United States Patent Application Publication US 2011/0014706 A2 - sequence listing, part 44

SEQ ID NO: 136486 - DNA, 388 bp, Arabidopsis thaliana columbia
  unsure (1)..(388): unsure at all n locations
aagctctgtttcatggaacagagtatgtaagtctgatgaagtttcagaacgagaaaaaaaaagacagtctcaagaccgtttaacttttcttttcttttttttgacaatgattgatttacttaagagttaacgaactcctataactgataaaccaaacttgacggcatttcactaggaacttaaacggagaaggatgaaaaccatgttttactgataactaattcttgccaagcaattatcagtttggtctggtatgaggcagatacatcactggacattcgggggttgtccgtttcacctgatatttttagggnggaaatgnttgnngnaaaattggaaatnttgggggttnagccanncccatttcccggggncnnnngattggntt

SEQ ID NO: 136487 - DNA, 508 bp, Arabidopsis thaliana columbia
  unsure (1)..(508): unsure at all n locations
tttctcgttaccacggagattctctaacacctcaccttgctaagatggtttcaactgtnattcgccgtctccgagatccggattcctccgttcgctctgcttgcnccgtcgcgacggctganatgtcggctcatgtnacgaggcagccttttgcttccgtcgcgaagcgtttgattganactttnattcaggaaggtgattcgaatctgcagatcggagcggcgttgtgtttagcggcgtctgttgatgcggcgacggatccggaatcggagcaattnagaaaatcgttgcctaanattgggaaattgcttaaagagtgatggttttaaggctaaaagctgcgttgttgagtgccgtcgggagtataattaccnccggtgggtgcgggnactaaaaccggtttttggattngtaagttccggttttaattgagtttttangcantaagnntttgncgcgnggaaagcttcggcttaggcgtttggaaanttcnccgcgganatttggg

SEQ ID NO: 136488 - DNA, 568 bp, Arabidopsis thaliana columbia
  unsure (1)..(568): unsure at all n locations
tttcttctggaacagctcgatcttttgatttagggtttttttagttacatttcttgttctatctgaatctctttcgttggttaggttttattcgatttttgactatttgtgagaaatatggaagaatgagaagaagaagaaggtgatttgtttgatttttttctaatggagcagcttgttaacttcgtcattcgacctccaagagctgaatacaatccagaacatgatctcttggaacaagagttcttgcttaaagggagatggtaccagaggaaagatttagaggttaaaaacatcagaggagatatccttcaagtgtagtcattacatgccagttgagcgtcctgaaagataggcctctaccttgtgtaatatactgccatggaaccagtggatgtagngntgattgccagtnagntgcgatcgaattcntccttcaaacatcaacggttttcacgnttnnctttncgggnnccggncctttttggggggnggatgcnctttngggttgaccgaaaaggtncnttaagncttggttaggatttcnccggttggattnnccctnttg

SEQ ID NO: 136489 - DNA, 589 bp, Arabidopsis thaliana columbia
  unsure (1)..(589): unsure at all n locations
ttaatgcatgtgtattgatattgaaatactaatgtgatcatgtctttgaaaactgtaagaagtattgatatttcaatttaatacagagaatcatatagagaaccacaagagattaagagtttctctatggtactgagttatattatttatcttgaccaaatcttcttcttggagtctctctctttcacgaccggaacttcttgttgttctcttttaataactctcttctgagccacagggacttggcttgatgaaccagaagctgttctagttggtctgactactctggagaaaacttttggtgggtctgattttctgatccgtttctccttcatttgagggatcatcaccattgttctctgtttcggccgnttctcgaggcctcttcctttcctagncaatctcatttgngatttaaatgaatcggggcctttaggccttgagacgggtttnatgtctcaagnatgttggngttgggtccannttctnaattgccaaaggnannttttttnangaaggtttcnctnaataggggagggtttnaactcagggnttcctaagttnnncattcccgnaaatgtctttgttt

SEQ ID NO: 136490 - DNA, 583 bp, Arabidopsis thaliana columbia
  unsure (1)..(583): unsure at all n locations
gctgnaagtcgaagaggaccccttgcctaatgaagtaaccgatccaaagtctgagttcctggagaaaattgaccttcttttggctgaacataaagtggatgaagcactggaggcaatggatgctgaggaaagaagcagtccagatcttaaaggatcagtcgagatgtcttcttacaagtctgcctttatggaaagaaaggcggttcttgaggatcagctccttaggatcgctaaacaaccctcgatttgtgtagctgaattgaagcatgcattgattgggttaatcagacttggaaaaggaccttcagctcaccaattgctttctaaagttttacggcacaaagcctncgcaggaagaatccgaggnctttcttcccttcatgttttgactttgcccaaacaacggttcctgntactctctntaagngttgttttctttaacantcnaagtggctnaaaaaagatcccgagccattgtttggtgcggtgnaatccngaantttcaacaaanttgtcaattggnaaagggggagntgaattttggcggtttgttaagaaacgtttccttccnaaagttttattc

SEQ ID NO: 136491 - DNA, 554 bp, Arabidopsis thaliana columbia
  unsure (1)..(554): unsure at all n locations
cataatnaagtctcactttgtttacgaaaattatttaaacgactgaaagacaatccaaagaaaagaaacattgaagatgatacaaataaagtagtacaaattcaaagcataaacaagcaacattatcaagctcgtgagtcacgatcaagcaaattacttagcaggagaaagcggtgcgaaataagctccaagcgaggtaaggtttttatcaaaagatccatgaaacccaacgatcttcttgcctttgacttcaagtgtaaacgtagtaccaatgttatatcccatatatgcagacgtcctgatattggttttgatcacaaagtccttgtatctcaccatcatcgtaggtaacacttcacaggntaaggtatgctcatcgcatgtattggttaangntcaaaccactcggtgnaaattgtggtatgnggcaccatngggttgtccngctttagggttgccctttcttgncataggtggncttngntggttgtttttggccctttggncccnttgnttttngggttttggcaaanatntaannttgggtccntnaa

SEQ ID NO: 136492 - DNA, 529 bp, Arabidopsis thaliana columbia
  unsure (1)..(529): unsure at all n locations
ctttttgtctcccctaaatttagtttctccttttaagtcagattccttcctaatcccattctttcagtcttctctttcgcccttctgagttcaacaactgtgttatctctatgaacagttcctttgatgaagaacacaaagtgaaagttgctgtctttataaccaggatttggtaattcccattgtttcatgggcaattcttgccgtggatctttcaaggacaaactcgacgaaggcgataacaataagcctgaagattactctaaaacctctaccaccaacttgtcttctaattccgaccattcaccgaacgctgcagacatcattgctcaagnattctccaaaggcaacaacagcaacaacaacagcaaagntccagtcttgttattcctttaggggaccaatcatgnggngtacccngcaatcaaggtnctatgtnttnggcataggcaccaacattgggtntttttnccttggccgaagttggnaaggcaatttgggcggntttttntnacagggttcctagggt

SEQ ID NO: 136493 - DNA, 535 bp, Arabidopsis thaliana columbia
  unsure (1)..(535): unsure at all n locations
cataaacttcaaattctcttccaaatcttgaaacgaatttctcccaaaaatctctgtttcttcacaaaaaaacaaaaaaacaatgttgtgtgcatcatcttcgcttgctcttttgggtcctccttcttcagctatggtgactatggcttcttcaccagtgtccagatttgttggatttggtcatcatactattctcaggtatgataatgatcaacgtcttcgtcgtggttgttcttggactggaattgaaaagaagatcccttttcctcggaagaagactgcctctgcttctgcttaccctctctttcgcagtcagcatactaaagnctcatcaagncccaaaaattacaaagaggttactaagtcagccaggcaaatgtttgctcgagngntctctatccaatcgaaaggcaagtgaaattttcgnttgaaaggntntaggaattnctcttgttagggataactctggcctcttggggctttgttcaancnntntnaacatgtantgctatgctctnggggtntttnttgggga

SEQ ID NO: 136494 - DNA, 537 bp, Arabidopsis thaliana columbia
  unsure (1)..(537): unsure at all n locations
ttttcaggtttcagcaaaaccactctgtttttctttgtcttttacgtcacagtatttgaaaccctctttgtgaaacagaggttcctacgctgtacactgtctatgaacggatgtgaggctgaccacaaagcaccacttggcacggtagaaacaaggactctatcaacggtgccatctccggcagccgcgacggagaggctgataaccgccgtctctgacctcaaatctcaaccgcctccattctcctccggcattgtccgattacaggtaccaattgagcagaaaattggagcaatcgattggcttcatgcacagaacgaaattcttcctcgcagtttcttttnccgtcgtagcgattctggccgtccagatctttttcaaagacttctcaagtggcaatggntcatctgntcanaaatccagttagtgtncgttggaatcggggcttnctggntttttccgggttttgncccgttttttaatgttncttgggncaatccgaggtntttgntnaaagntcctctnattggncatggg

SEQ ID NO: 136495 - DNA, 512 bp, Arabidopsis thaliana columbia
  unsure (1)..(512): unsure at all n locations
aatatatgactcacattggctgtaccttattaccaccgaaataaaaacatgaaaacaacgaatcaaacatattacacagcacagcacagccggagaatcatgacgctcacagagctaaaactcaatcgatcgaccaaaccgataaataaaataccgaccactatgatagttgttggttcaaaaacacaagaaagagaccatgaatgaaaccctctttctccaaaaacaacccaattctgtggattttttttacttgcggtggngactcgacagcttaccgagtttcatcttccaaagcacggantccagcattgagatcgtcgtacaatttcttgaatttttccaccagtgtatcctcccttctgctgggtcttcgnacttntgnggcactaacggtggaagntctcctagnggtgcttgataagggttnggnatnttttgccgccattcagtgtttttancgctggtggtnggtttgnatggaattttcggttntccacggcttttgatgc

SEQ ID NO: 136496 - DNA, 547 bp, Arabidopsis thaliana columbia
  unsure (1)..(547): unsure at all n locations
tcacttaatcttactccatacatatatatacatacaagtacaaccaaagattttattatttcgctaactctctctggtcttctagtctccaacttccttctcacttaaggcttatgataacactaagctaagaactaagcaagttctcctaatgaacaacaacatttaacaacatgaagcgagtgatgcaaaatgagtacttactactttacaaaagaccatacattacccgctaaattcgatcccatttcatcgatgaaaacactagtttcccctcttttgatatgccaactttgttcaatagttttctncggctttcggnatcaaagcaacttttgagctggtcatggattgaaaaatttggntnccccatcttcancgtaggcttgtttgnattcatcaaatcattcacaaccgggtaaactcggattgnttcanctttccaaatncattcctttagggggttccntggaccttggnnccggggtggncttttttgccgnattntcacggttataaatccaacctttggnttaaataattttgc

SEQ ID NO: 136497 - DNA, 514 bp, Arabidopsis thaliana columbia
  unsure (1)..(514): unsure at all n locations
cctacgaaggtcgcacggtcatcgatnaagacttgnatatcgnaattncgcgngccgcaagnacttcaaaccctagaattttgtttgttccctcgatttttgattcactggagtttgtgttggcattcattagtctctttccgttaggctgtgaggcttatgatcggtgccactaacgttactggctaagtcattgaatctgattaaaatatggccctttatggtacattgcagttgtctcatagtctgggtttgtgcagaaaccaacggttttgtaatccagaaaatagtgccatgagaaggaggctgcatatatcaaatggtcctctctcattaggtgttccgttgggacaacatggtttcagcaacatattactctcaaatnaccttcgtaggnctatttgtcagttccatgcaganccaccggttttaaggnncattccctttttgaagnggnaaggaattgaccncctnntaaagntgcnccggggngtaacaaaggcacangggttgt

SEQ ID NO: 136498 - DNA, 462 bp, Arabidopsis thaliana columbia
  unsure (1)..(462): unsure at all n locations
ttagggctttaccccaaagggagcccttccagaaattctcgaaggcccaagacaagcttaggcccaggagggggtttggaaatagttttcaaccagcaatagacgcgcccaacaatgacaaagctgattaagatgagatcttgatgaaagcttcagaacacatgcatacattatattaagtcttttagtagtggataggagagttaaggccttcttgagaagaaagtgagcggagaggttggtgtctccttgaagacattgacgacagtgaaagagacagaganggcattctcttaaaagaaggtctcctatcaagattcctcatccgttctttttcgcctgaatncgccttcaaagcaggtccttnttctnttcccntcagcttttagtaccacgnngaagnggagcctgttaacanaacaaggntttntnctncccgaagcnangtcccnccnttttnat

SEQ ID NO: 136499 - DNA, 558 bp, Arabidopsis thaliana columbia
  unsure (1)..(558): unsure at all n locations
catttccaggattcttcgatatgggagcatctcacagtcatgaagatctagagatctgttcctccgatgaagatgaatatgaagaatatgaagaaggaagagagggagaggaagaggaagagacgtttcaggactcgcgggatgatacgttaggtatatcttcctccggtggtcgtcgtctccggcctaaatctccttcatcatcactcgacgacgttgaggcaaaactccaagccctgaagctgaaatacccattgacgcaatcagccccgtctactcagaactcagctcggcttttccgctacatcaatggcaacactcccaaagccaaatgggtcacagctgagaaactgactgcnttatttgtttcgtcaaagactaacaaaaggggnttgaagnttgttnagncggccgntgangancggagattgttgaaaaacgaattggtggnttttttaaagncggaagcaagtcccnttgaaaaggtttcaagttgnattccaatttaaagnttttaangccaacccccggttngttnngttgnnaaantntttgnga

SEQ ID NO: 136500 - DNA, 536 bp, Arabidopsis thaliana columbia
  unsure (1)..(536): unsure at all n locations
cgctgttttctccagcacaagttacatgataggaaaccaaaaaagaaaccaccttcatcacaaaggctcattacatgaatcaagcaagaacagcaacaacaacaacaacaacaacaacaaaagacaatggttcgtatgagtttgtttccttggttgggtcaaacagttgtatgtatatacacattgaaatcatcttttgctttttggttgaaatcatccatcacaatccatttgctagttttgccctcagatctttcctcaatatcttccctgatggagctttaggaatggattcagtgaagaacactttgttgatctcttgtaaaacacaacctgtttcgncacggnttgnttcacatcatcttctgataactccggatccttcgntttacncaaatgcaacagggncttcancngtgttctcctttcatttgcgcaacaggaccatnagtaatgcaaggttgnccgtgggaaagncnttnggttaancggggggtccntnaaaccttagncttggaangttttnaaanggcngc

SEQ ID NO: 136501 - DNA, 454 bp, Arabidopsis thaliana columbia
  unsure (1)..(454): unsure at all n locations
ctttttaaaccaaagcgaaatcaaacttaatccaaagagaaatatattaaaagaaacaattctctgtttaacattgaatcaaatcaactgtctgtatgtataccatagtccttaaagaagccagttctacaaaatcaaccacttcatcctcctgatgaatcgtcattatgggttattggtacagaagccaacaaagtatcggctgtgatcaaaaggctcaaagaaaagatattgttcttgcattggcagttgctagtccatgaccatgagangtgaganctgacagattctgaacggctctaatccaatccacaccaccaatggagtgganggatttcccgggctcgttagggtagtctgtcatttgacagtcaggtggcattttgctccaagnncaagcccaactcctgaggtgcccanantcntattcatatnggcanttcccatgnatnng

SEQ ID NO: 136502 - DNA, 414 bp, Arabidopsis thaliana columbia
  unsure (1)..(414): unsure at all n locations
ttcagcatttgatcggagtagatggaagctctgtcttctcttacgttcaagggttctcttccagaagccatatttgaagccaaagggaagaagaagctttttgttgtctacatttctggagaggatgaagagtcggataagttgaacagattgacttggactgatgcatcggtggcagattcgttgtcgaagtattgtattttagtgcatatccaagctggaagtnttgacgccacaaacttctctgcaatatacccatattcatctgttccttgtatagctgccattgggattcagtggtacaaaaggttttgagnaccnaaggatttttcacttgctgaagncctttcatcccagttagagnaanccntngtaaggctncanntcccggganaacttnaananttttttaag

SEQ ID NO: 136503 - DNA, 477 bp, Arabidopsis thaliana columbia
  unsure (1)..(477): unsure at all n locations
cagtagnagccagctcttgctcctcctgctttgagtcctgttccaatgcctaggcctaagaggcccagatcaaatatagcaccttcatctcctgactcttcgatgcttaccagagaaggtacaactaaggcaaacatggaccctttaccagcaagcggactttcaagggtcttgcaaggtcaagaatactcgaccttgaggacgaaacatactgagagtgtagagtgtgatgctcctgagaattctgttgtctggcaatcttcagcggatgatgataaaggttgacgtggtttcggggttctagaagatatggatctnagaactggatgtcctcagccaggnattgaccctacttacaacagnntttgctcttccgggttttngggcttaacattagatccatcccattggcaagngggtnacccttttntttgcccttttatnatnacctttntttgcttnaanngggntnttnng

SEQ ID NO: 136504 - DNA, 454 bp, Arabidopsis thaliana columbia
  unsure (1)..(454): unsure at all n locations
aactcctaactttcttcaccttcttaaattacctatctgtcaattatcatcatttcccaattgtgttgatacttaattggtagtagcaattttttccattaaagttttcatttttttggtttttttgttgatggaaaaagtattgatccaacggctgtagaagaacggtgcaacaagattttgaattcggagatgcgtttgttttagttttaaaatagaaataaataaagttgttctctctctctcttcgtggacactggaactaacaccaccgatgcactacactctgtagagactgcaaatggaaagcatcttttggtaatcacggattttgagntcaggtagtgtggattttgngancaggtacatttncttgcaaggtgtttgaattttggttgtggcataatgggaagcctcaagtggttaaaagtgnctcttggaagancctctaatg

SEQ ID NO: 136505 - DNA, 411 bp, Arabidopsis thaliana columbia
  unsure (1)..(411): unsure at all n locations
cattttgtcttggaaactacatttgttcatatacagggagttcttatcatatatacatgaatggttcagctaccaaaagacacatttatctttactttattgttatgagttttctgagatcagtatgatccaagtatatctcggcaaagacggtatctcacaattcactatcattggaacaaatatagcacaaaaatttgattttggtaaacaaagggcttttttaaggtctcatgcatttgaccagaacatcgacgnatcgcttgtacatatgtngcttcatgtacattttctcaaccattttgcgtccttcacttcccaatcgtagnctctcgtctggnttcctaagnggtncaaggngttatgggncaantcctttngtaccggntctccccattgngnnnagnggcc

SEQ ID NO: 136506 - DNA, 537 bp, Arabidopsis thaliana columbia
  unsure (1)..(537): unsure at all n locations
ctttagagatcatcttaatctgaggatggtattaacatcatcttatgttttctttcttcagtttctctatattaaaatttcaaccacaaaaagctgatattgcagttatgattatgtgagattaacttgatcttgtttctgcagagtgttgaaggcaagcctgcatcacttggcccatggggaggccagagtggtcatgcctgggatgatggaatgtacaccacagtaaagcaaataattatagcccatggttctggaatagactccatacaaattgagtatgacaaaaacggtagctcggtttggtctgaaaaacggtggaggaaaagggaggcaaagaagtttgataaggtcaaattttggtttacccncatgaggntcttgatttcagtaaatgggnccctcgggagcttttnacggctgggggacctatatgtgtccgtccactttncttncgggggtanccccgnnaanntggcccntttngngttggtccaggncatctttgnattccaaatnagggcgaggntnttgggg

SEQ ID NO: 136507 - DNA, 442 bp, Arabidopsis thaliana columbia
  unsure (1)..(442): unsure at all n locations
aactctctgcattgccaaacctgcaaatnctgcaacttnataataacaacttcagtggatccaatatcccagcttccnatggaaactnttcgaatatnctaaagctgagtcttagaaattgtagtttgaaaggggcacttcctgatttnagcaagatacgtnatctcaaatacttggatctnagctggaatgaactcacaggacctataccttcctctaattttnctaaggatgtgacaaccattaatttatcaaacancatacttaacggatccatcccgcagagcttctcagatctcccttttacttcagatgctattgctggaaaancaatatgttatctggntctgtccctgattccctttngnaggatatctcttttccgaggaagctggcttctacttgtcttggggttntttnttgcacggggtncagggggcct

SEQ ID NO: 136508 - DNA, 560 bp, Arabidopsis thaliana columbia
  unsure (1)..(560): unsure at all n locations
tcctcatattacttattttgaatgatacatcatgaaaccaaaacactcaggaggagattagatatgcatccatatttacagcttcagaaaagagttcaacagaagatgtaaatggatggatatttcatcgttactgaaatttgaaaacgaaaacaaaagcgataaggaaagttacaagcaaagaacaaccagtgactattttatatcaagccagaccccttttcttttggggactacttgtttgctgcagcgagttccgcagtgataatgaaacttgatttcccagcttgtctcaagtactgaacatctccattcatcagcttcaccagtttccggctaaccattaaggctcaatccttcttctgacacatcttcctcagtcccaaacattttggtttggtaaaactcagggtttcccagntccgggnttgcgtaancctgatctctnggttngaagntgacagacggcccgggtnatccttcctcagggngntgnaacagttgggngcccccgggtggntnaagtnnagccntggatgaatttccagnnttttnggtga

SEQ ID NO: 136509 - DNA, 507 bp, Arabidopsis thaliana columbia
  unsure (1)..(507): unsure at all n locations
cgnatctttcctctctgggtcgtcggaatttgagctttttaaaatcatgggaaattgttttgccaagaaccatggattgatgaagccacagcaaaatggtaataccactagatcagttgaagtaggagtaaccaaccaagatccaccgtcgtatactccacaagcgagaaccactcagcagccggagaaaccaggttccgtgaatagtcaaccaccaccgtggagggcggcggctgcagcaccaggactaagtcccaagaccaccactaagagcaattcaatactagagaacgctttcgaagacgtgaagctcttttacacattgggtaaagagctaggtcgtggtaattttggggtaacgtatctttgcacagaganttccacggggaagaagtcggtttnaaatcgtntngaanagaanttggtnctnaanttgntagggttttttgggggggggttcaatnttcancatttngntggnnnccnattttggggttaaaggncttt

SEQ ID NO: 136510 - DNA, 522 bp, Arabidopsis thaliana columbia
  unsure (1)..(522): unsure at all n locations
aactctcaagtctgaaaataaaaatccaaattgaatccagagttgagaacgtatttggtttttcaaactgaattaaatccaaaacacactcaaactcgaaaagtctcaacataaatttaacgacacaaaataaactctcctaaggaaattataaaatgatgcaaaggattcgtcaccaaaggaactccaatctgcagaagaactttgcttcatcttcaaaggtcttgtacactcaaacctggaggaagagactgcttaagcttgtcggctttctcttggtcaaagncgcagagcgtgtagaggtacctcgngcatcttgcccttaaacttgacaatatcctttgcttctcttgatcttcacagatcgtgcatctttccttctagcgtccgcnggcaccggaagagattngccntngggcgtctttgcgttggaggtttacggtggtntnccaaacttngtggtggccgctgannttctcnttggttaaacggnatntnacccggcggnttggcctttttngc

SEQ ID NO: 136511 - DNA, 546 bp, Arabidopsis thaliana columbia
  unsure (1)..(546): unsure at all n locations
ttacaacagacttcaaaccccccaaaaaaagaccctaacaaaagtctcagattatcacaagtttaatttcttctctccataaagatgaaattttcgttttctctgcaagactgcaaactcaaacttctcagcttatttagtatttgctcctcttaatagttctatctcttttgaccgttcggtcgtcaccgtgaagcctcatatacatggtactgaggatctttccaccagtcgcttctccatgtttgcaccgttatacccaaatgttcagaagacttttaagtttggtgaaagcaaagtatgttctttgttggaaatggaaagttgagagatcttcaaatggcagngtgttccccgtatgctacccatttgttttaagctatctggggaatcatngnggatcttttgtgtgtacagnaagttcggtttcactggtcttttnccttcctgntgctgntccactctctntnataggctggggnaattgtttnctnaagnggtggtatcnnttnntnagcggctttcggttnaaaattnaaggnggtc

SEQ ID NO: 136512 - DNA, 496 bp, Arabidopsis thaliana columbia
  unsure (1)..(496): unsure at all n locations
caggcaagtgtgggtggatatgttaaaaatggctgagatggaaaggcaaagagagctggagggattgatgcagcatcatgcagtatcaaacttcgctcatcgcaaccgcattcaggcattgctaagggggagattcttgcgaaatggtgacaacgatgataaagagaaaccaacatcatctgcagccactgagttgggctttctaagagagaggcacactgtatctgagctgagggaggaatttatatccagactggacccggtctgcctctggtcaagcgagcagtagtcactctgagncctcatcaaatgctgaaactggtcataatagaggtgacaaaacgnccctgaattgnctngatagcatcaatgattcagacggtggtcagttccaaaatggccngagnttncacccaagttncttggntngntaactantctggccggttttttccgnncncaaantttgatgaagcntcccgttnganggtgttcc

SEQ ID NO: 136513 - DNA, 500 bp, Arabidopsis thaliana columbia
  unsure (1)..(500): unsure at all n locations
ctcttcctctgttttgcagatacttctttcttcattgactgtggaagtcccgaaacttctacagacgtattcaaccgtacatggcttcctgatcaattctactccggcggaagaccgccgttgtctccgagcctcttcgattccatctaatcgccgagaaaaccatcaggcactcttgttttctcttggagatctccttggccggagagtcttctccgcgatggctcttattctgatctctttgcttttatcggtgacggtgagctcgatttgtgcttttatagcatcgctactgatcctcccattgttggttccttagaagncttacaaagttgatcccttncttcgtacgacgccgatnggacttggtcaagaatagttttttggtnaacaatgggaggctctctttgtggtnaaaaccaagtgggnccntgggttaataaccanaccggtaatttgggnggncggnggaanttgnccgaggnttngnnngaaanttc

SEQ ID NO: 136514 - DNA, 475 bp, Arabidopsis thaliana columbia
  unsure (1)..(475): unsure at all n locations
ctttatttcaaaccccctcatgtagaaaaaaaattagagagtttaattacattttggttcatgatgctttagaaaactaaactaaataaatacttttcacacttcaattagctctttcatgacttgtccatctttcacaccaaaagatccattcgcttcagcatcagaactcgcatgaacgccataaaacaaatacacgagcacgatcaaaccggagaagaatccaaaccggacgtaagagggtgcgtccaacgnaccaagcaaaaaaatgttcaagaatatcgncacggacggggtccacgggcatgaacgggactnccacaactcaggttttctagnctnggnaccacggacttgnaagntcagcacgttggntttagcaccaccgaattggaccngggcatgnangctttagggtttccttcgggacaagtttccagttnnggttnggcgngngggtttttggggnnagttt

SEQ ID NO: 136515 - DNA, 332 bp, Arabidopsis thaliana columbia
  unsure (1)..(332): unsure at all n locations
ccttcacgctcaaatctggacctgctgaaaaaccaatgatcgtcgttaactacaagggagaagataaagagttttctgctgaagaaatctcttctatgattctcatcaagatgcgtgagattgctgaagcttaccttggtacaacgatcaagaaccgctgttgttactgttccagcttaccttcaatgactctnagcgtcaaggctactaaggatnctggnggtaattcctgggtttgnatggtaatgcggtntcatnaacggggcctacttgcaagctgcnaattgcctnacgggtntttncaaagaaaggnttnaaaggttntttgggga

SEQ ID NO: 136516 - DNA, 342 bp, Arabidopsis thaliana columbia
  unsure (1)..(342): unsure at all n locations
ggaacatcaccagcaatacttgtctaaaggagggaggtttggtcttaagnaatcaacggaaaaaggctgcaacgacccaatccgctgctacgggtaaaagccttgcttctaaccgaaagcagaggatgcttccacttatctatgatagattatagcaattatcgttgaaaaataaagaagccgaggctacttatgtaactngtncttgttcataaaactttttaagtgttcaatcctttaggtatatagtattgtttggatgtnctcgattgantttgttcttgtaagattcatcaaaactagtttgagtaaaccgtaaaatngtttttntagtggcttttt

SEQ ID NO: 136517 - DNA, 264 bp, Arabidopsis thaliana columbia
  unsure (1)..(264): unsure at all n locations
cttgcncgcaacaactctctaccagctatcaagtaagtttggtgttataccgcatccctccgacaccaatataaaacactataataagaacgttcgcattgacttaatagattatatcgaaacctaacaccacagttcactaaggttttnaccttaatgtttctnatttgtaacngtagttattgtctcacatgatcgaacgtcataataagantgacctgtagatcataacngtaatattcnnagcgttgcggctatnatcct

SEQ ID NO: 136518 - DNA, 155 bp, Arabidopsis thaliana columbia
  unsure (1)..(155): unsure at all n locations
tctctctctcaaccctaaaaccactcgtcacgcgccacgaactntacaccacattccccactactagtgaccatccacctctncgtctatggcgtcagacgccgttaagtatatgccantccacggcggaggaacancagcaacanccgtcgncg

SEQ ID NO: 136519 - DNA, 480 bp, Arabidopsis thaliana columbia
  unsure (1)..(480): unsure at all n locations
gactctcacttcttatctcaaatctacttcaactctatttccagtctccacattttcccacaaatttcaactcttgttctcttcctccaaagtaaaaaacaaaacactgcaagtgaggtttggttttggtgttatagaattatgaagagcgggaagcaatcttcgcaacctgaaaagggtacttccaggatcttgtcactgactgtcctgtttatcgcattttgcggtttctccttctacctcggtggtatattttgctctgagagagacaagattgtagccaaggatgtcacaaggacggctacaaaggctgtagcttcccctaaagaacctacaggtactnctattnaantcaantcccgtttcttttcccggagntnggggncaaagtttccaaggttacaaccctgnngaaccgtnccaaaggnaaaantagnttccactcccnncttttgattggcanttttangggggntgcaa

SEQ ID NO: 136520 - DNA, 487 bp, Arabidopsis thaliana columbia
  unsure (1)..(487): unsure at all n locations
ctatatagacacaatccagaaatcaaagagttaagaacactgcagactttaacatcaaactccaaaagaggaaataaaactcaaaacgaaaagacaatcggaagatgtttggtctgagtgaacagcatgaaattttcaattaaatacaagctcacaagtgggtgaaaccctttggcgacaaggctaactcctgaagcatctgcagtttcttgttggcatcaccaccactccatttagcggtaaaactcgcctttttaaaacaaactgcggttttaaagagatatgtcgnaagttctttctcttcaatgcgttcctccatactctacccactncaaagtttcaaagcctttgagggttaancatctttggacagggcccgnttgttccattnaggtcgggggttttntancagggtggcnctgnttgntttggaatcccgtagcttggggatnttngggcagntggtgnnnngtcgggcccncagntt

SEQ ID NO: 136521 - DNA, 539 bp, Arabidopsis thaliana columbia
  unsure (1)..(539): unsure at all n locations
ttgttttgctatccgccgccgtagctttgctcttcgtagccgccgtcgccggaatctctgccggagcttcaaaagccaacgaaaaacgaactctatccccgtcgtctcacgccgtgctaagatcctcatgcagctccacgcgttaccctgagctctgtatctctgccgtggtaactgccggcggcgtcgagctaacgtcgcaaaaagatgtcatcgaggcatcggtgaacctaacaataaccgccgtggagcacaattacttcaccgtgaagaagctgatcaagaagaggaaaggactnacgncgcgcgagaagacggcgcttcatgactgttttggagnntattgattgagacgctngacgagctcccatnaaacgggtggnagatcttccatttttattccaaccaaaaaaanttttcgggaaanggcgnggtnttaaaacattaattaggtncgccatttnccaaccnnggggtttttttttgngggtttttttnttangggggcggtaaagaattttgnaaagncttttttnggg

SEQ ID NO: 136522 - DNA, 386 bp, Arabidopsis thaliana columbia
  unsure (1)..(386): unsure at all n locations
aagtttcaatggaatgacacccatggaagtctctcatgagttacccatattggcctcaaagggctctacgtgtttcctggattggagggatgatgctctcgatagggatctatacatacaaacaagtactgtnacgattttggcaatggacgggagaaggcgctggttggacatagatttattggggtcaaatggaaagaatcactttatatttgtcacaaatctggtgccttgttctggagtaagactccatctatggcctgagaagnngaaatcgnattcaaatttaccggttttgtgaaagggtctttggaaagttacatcaangatgggttctcattncnggcaggncctgcncccaaaannagtncggnacccagtgnngt

SEQ ID NO: 136523 - DNA, 527 bp, Arabidopsis thaliana columbia
  unsure (1)..(527): unsure at all n locations
cgcttatcagtgtgaaggagctgcacatgaagatggtagaggtccaagtatctgggactccttctctgaaaaattcccaggaagatgtgaatttnctgcatcaaattggcttcgatgcttaccgattttcgatctcatggtcacggattttncctcgtgggactctaaagggaggaatcaaccaggctggaattgaatattataacaacttgattaatcaacttatatctaaaggagtgaagccatttgtcacactctttcactgggacttaccagatgcactcgaaaatgcttacggtggcctccttggagatgaatttgtgaacgatttccgagactatgcagaactttgtttncagaaagttttngngatagagtgaagcagtggacgncactaaaccgggccatatacaatggtacatgaaggttatntaccaggncaaaaggnaccntggnagntgtnccaatttctttaaaccnggttgcttaggntgcgttcagcncggggccttanatngnggcnnaac

SEQ ID NO: 136524 - DNA, 527 bp, Arabidopsis thaliana columbia
  unsure (1)..(527): unsure at all n locations
cagttgacaacaaatccctaagcaaaaatttcctttggtaacaataagaaatttgaacaaaaagaattataaaagaagaatctacgtagatgctaacaagggaatactaaacacaaaaactgattttatacaagaaaccagaaggtgatacagtttggttcctaggattatgtcattagcaagcaacaactagaagctttttgatcttcaagtgtgagtttnctgcaattcgttaaatatgagacatgatgtgtcccaaagttccttagccattttcgggtcactggaaagtgttgaagattcaatggtcctnccgncaaaggaaatattttgcctgatatttcaaggtggagctaaagcagcatcantggcaggnttcaagctgcatcccttgagnctngatcagtccaaggatctttagggccccaaaacggaatgccttggntntattgngggangccatncattatnggttgntttactngtcctgggnctccngttcaanggggtntgttngttctcctgga

SEQ ID NO: 136525 - DNA, 382 bp, Arabidopsis thaliana columbia
  unsure (1)..(382): unsure at all n locations
aacctttaagcttgtgttccaattgcttattgttttaggtgttttttcggattttggtgtatagtttgatgatggcaggaaatggaatgcctacattgggtcgtgtcaaggtttgtnatttagttcccagtgaaggtctaccttctgattcttacaagttagcggtgactacattgtctcaatctctggcacagtactctgcagccatcattcagtttcctgctagcgatggagccctccttagatccggtcttgattctgctcggctttattttcaaccagagnggattcatatccagnccactaataaatatggtncncacaaattgnttcacaagggattggtgnnannnctttttgggtnactnttgaangancccca

SEQ ID NO: 136526 - DNA, 532 bp, Arabidopsis thaliana columbia
  unsure (1)..(532): unsure at all n locations
tccgtgctcctttagcttctgctcggttttgttttttttagtctgacgatgagtaacaactggaaatccgttcgattaaggcttcaaaatcgtactctcgtgtttcttctggtgattttnagcttcggttcttgctattcgttgaaatctcaaggtgatggttttctggaatccgtgacgaaagatctatggtcagatatagatgctgaggatttgagagcagttggttttcacaggaaattacttggccgttttcgtaacccgtacacccatttgaatgcgttcagggaccgccctgtggcaagagctacaactccgtcatcttcggtttctacgngacctgatgccaaaagatcctctacattgcctccgncacaaaaaagtcctcctgggnaacatgtttcttgctcanctncttttgtgancatgtgncttacctagnctaanaaggngtccaaactttttcaanagacaattccttaggtgggtgntgaanaggggtntgggttnnccccttnggaccggngttntc

SEQ ID NO: 136527 - DNA, 528 bp, Arabidopsis thaliana columbia
  unsure (1)..(528): unsure at all n locations
cagtaaaaaccaagacaaacagaaaaatgttactaaaatcaacataaaaagatctacgagctaaaaacgaaccaaaataaaaatttgagaaaaaagaacctggttcatcttatgaacgttgacccaaacataatgaagctcgatagaatccaaactcttattaatgttcataagctaacctcttttaatcatatatatatccactaaactcatgattcatcgttagctagctagcaacgattatgagtgtgtgtgtatatttgatcaatacgggtggtcgtcccgttgaccaataagnctgatcatgttgctgctgcaactganccggaccaaggaaggcaccccnaagnttcttcgtgcaaggttcatttggcgtttgtagtncataaatttttcctgncaccacaggaaaagggggttttgnctgttttcaaatntcaacaaaaggngtttggtncctgcattttaagggggttggcnggaaccngggcctnaanttttgggnntttnggnttttntggaggtnct

SEQ ID NO: 136528 - DNA, 489 bp, Arabidopsis thaliana columbia
  unsure (1)..(489): unsure at all n locations
tttactctactctgacttggaacaatggctgctaagagatctatctactgtcttcttcttcttcctctgctcttgtctttactgatctggattccttcgatctccttagctgctactaaccctgatgatgttgctgcaattaacggattattcgctgcacttggagcacctgttcttcctggttggattgcttctggtggagacccatgtggtgaagcttggcaaggcattatctgcaatgtttcagatattataagcataactgtaaatgctgcaaatttgcaaggagagcttggtgacaactttagctaagttcacttctatccaggggaataagatttcaagcaancaatcgcatttggagggaagcataccttctanttttgcccggttacattgcagcattttntctttcagcnaatcaggtcaccggaaggnccccggnaanntttnggnccattgngttnnttnatnnaagnnttttaacng

SEQ ID NO: 136529 - DNA, 566 bp, Arabidopsis thaliana columbia
  unsure (1)..(566): unsure at all n locations
acggtcatcgnatcaagacttgnatcatcgaattncgcggtccgccatagttaaaccagagacaaggctgatgaacaaatcaagtaaaaagggccacaaatattgaaaaaggaatccatgttttccaatgttaacgattctcaccccttactcccctagttatctcattgtcttgtggagttaaattaaaacgctaagagatcagctggagaagtcatcatttgccacatgagctgatggaattatggcatagcatccagtactgtctcaatggcatgtggagccatggcctcggaggaggaagatcaagccccagttttgatggcattctcttnccactgagggactccgcgagctgatgttgtcaagaggaggaagctgatattcctgnaaaanttgttttatagtgaggcaaaaagatctaaggtnggaaatttcttcggagatttggaaaccnttnggnnatttcttttcangggtnccgtgtcttctngtangctttttngggncttcgangngtcaatttggtttaagggaatgnttccccagnntcccttttaacccaa

SEQ ID NO: 136530 - DNA, 506 bp, Arabidopsis thaliana columbia
  unsure (1)..(506): unsure at all n locations
cattaaaaacagcaagacatcccaaaaacaaactaggcaagtcttaacagactgcatgtcgtttttgctaaacagaggtttcttcgtatctaaaaacggcattacaataaatctgtaaacaccttttcttttccataaaacccctttcatttctcataatttacgactatgtccagctaatcgccacgggacttcccaccacgtgtttcccatccgaccattcaatactcccaaagctgttagatccagacggcttcgacgagtctacaagtaaacgtcacccgtatacgattttttctcgttagctttccttgaaaattcaaaacccgccggttcaaccgnaaatctttgactcctgtcgncttccgaaggttactttnacccgggtaagtcccagcttnttccanggtnggtaaccgtgcggggggantttattaggaccggntcanttnaanggtnananggggancgcgggnnggtnaaannaaggggcccgggtagggtta

SEQ ID NO: 136531 - DNA, 476 bp, Arabidopsis thaliana columbia
  unsure (1)..(476): unsure at all n locations
ttttacattattctgcttattcccaaaccctttcccaaatcanttgttgcgtttaacacaacaaagccgttacattttccaatcgctgaatcatctaaccgtagacaagttaccggaatatgtttctcctttataagccgtcttcaagaatcatagagctcaatatcccttgaacgaactcgctctgtttcaacttttctctgtgatcctctgctgaaagagactgcttctcaacattcctttcaggcaaactctgattcaatgttttcttggcagaacttgtgtctgcacatagncttgactcagnaatgaaaaagtcatcagccatttggtgnaatgnatgaaggcagtaaagggtccagnagctttnacttggcagaagnaggggggtaccagcacggtnttgttccnttcaaaaanggnnctngaaaatttnccatnaggaaacnctctnttcaagtccgtagnattggttt

SEQ ID NO: 136532 - DNA, 484 bp, Arabidopsis thaliana columbia
  unsure (1)..(484): unsure at all n locations
cttgctttcaatcgacgaaggagttttgagttgaggaagtgagtagaaatcaatggaggaagaatctaagaatggcggaaccacgattccgactgaagaattggcggtggttgcggtgccacctgtagtagaagaagaggagccgatggtcggacctggaccagctccacgaggcaaacgcaagcgtccgcttcaattcgagcaagcttatcttgattcgcttccttctgctaatatgtatgagaaaagttatatgcatcgagatgtagttacacatgttgctgtttcagcagctgagtctttataagtggaagtatggatggtcacttgaaaatttttggaggaaaaaggntnttngtatncgagtttcctaaagaattttcccntcccnatttcgggtccnatttaaaaggnttgccggttaanaatttnatgggttttttttnctgtacaacccnaaangccancctgtnnaaaaaatnnt

SEQ ID NO: 136533 - DNA, 484 bp, Arabidopsis thaliana columbia
  unsure (1)..(484): unsure at all n locations
gnagtatcctcaactccaggcaaagaactcgtggctctggctaacatacccattcatgagaaaaaagcatatgtctatggggaggttgtgaagaaacttaacacttcaagagaacgaggcatgccatttagacctgctatgtgttttaaggacgcttatgatactcttggtgctgaggtaactcgtggaaaatcagtcaacatgcagaaaatatggcagcttgttcaggcaataacaggtgaaggattcagccagttcgacaggggtttttcgaagaggattngccctcgcggtnaggtgcaaggccatcaattttcaaccatggggcattgggaaatttnttaattggccncaattnaaantttancccttacacaggnttgccntttgggtgggccttttggaattttcaaaggattcgggctttccttnggnattccgtttnngggctnttgggttttaggttttgngtnnacttgttncc

SEQ ID NO: 136534 - DNA, 426 bp, Arabidopsis thaliana columbia
  unsure (1)..(426): unsure at all n locations
cctacgnaggtncgcacggtcatcgcatcaagtcttgcatatcgnaattncgcggccgcgcaagcaagcactcgattggcggtttcttgtgcactcagatttccttatcggctctttcgtgaactgcacctagtggtcagaccttctgcgatctttacggaaggtgtgatgcaaatttctgattcagggctgatgtttgcaagtnatcctaccttcacacagtcctagagtgtcatctaaatctgttccctgcactcaaaaactagttggtccttcttccatatcctgttcttatgagagctttttgaagnaggatgaatcagttttttttcaaggtatgncttttcctaagctgtgncttttccctcgnggtctctggaanccccttngnggngnaaatnttttgttnggcataaggttttgncc

SEQ ID NO: 136535 - DNA, 520 bp, Arabidopsis thaliana columbia
  unsure (1)..(520): unsure at all n locations
taacacgacacgtttaagaaatccacccacatcaccatcatacaaaaatcttcaaaactaagacctttctttttgttgggtcacaagcaagatttcaaatcacaaccaaaaaagcaaaaagaacagagcatgaatcttctacccataaatatatacaagccacacgaatccgccattcaaatgttttaaaagttcagttgtggccttgtccattattatcttcaggaatatatggttccaaaagcttggcacatgggttaggatcttgatgcataatccttgcagctctttcgnactcctccctcaacactctgntactaaaacttgtcggccaccctacccagatcatgggttggtntcaaacgggttcccttatgnattatcaagtgcctatggttccnacccttttggncagncctttttttnggttnccaggtttggaccggtgnggcgggnaaacattttcggttggnatggggtangccnttgttaggtncccggcngttagtttggttctngc

SEQ ID NO: 136536 - DNA, 353 bp, Arabidopsis thaliana columbia
  unsure (1)..(353): unsure at all n locations
ctttagttttnagagttaaacattttgattttnattttnacatccattcttttggttttacaaacatgaatcagcatattaaaatgtcaattgatataccattgtnatgtagattgtgtaattttatgatcgccacaccctccctctgcgtccccttttttttccggcgtctctctatcgagagagatatcccgattggcttaatctcatcagcttacatatagtttggnatttttnaacctctcaatatttgtgttaaacattttgaataaatatgtgcagaattaaagtcgnctttatggaagntccaaagnantaaatatcaatattatatagcanatnttatgtngngt

SEQ ID NO: 136537 - DNA, 432 bp, Arabidopsis thaliana columbia
  unsure (1)..(432): unsure at all n locations
ggttnccaccattacctatcaacatcaatgtgaaaccaaaatcaagcctgcagttagctgtctccacatttggttatcaaatactacagtatcctcaatttgctgaactttgctgggtgacatcaaagcttaaggaagggccaagtgcagatgtttctggtccttggaggggatggccatttaattcgtgtatcactcgcccttgtaattcctcggagcagactattacttcttccgattccaacaatgttaaaggaaaagattccactggaattgtcagaggcttactgctgttggattatcagcgtatagaggnaccntatatatcgcttgaggggaggctcatttnngggtacggaaagtnnttgnggcnnttagttggccgntcagntgttaaaantnanttcctggaanggncagattgtcggttat

SEQ ID NO: 136538 - DNA, 454 bp, Arabidopsis thaliana columbia
  unsure (1)..(454): unsure at all n locations
cgctgtaagcctctgtcacctcagctgaagtcgaggaatcggtatgtgtcccagctgaagtaacaagtgaagaggttccctcgtcagaaactcccaaggtagtagaagaagaagtgatagctaccaaagctgaagatgattcgccggaaaaagaagagcaaacggaaacacttgctgcagcagctgaagctgaagaggtggttcctccaattccagaaaccaaaagtgaagaggaaattgttgagaactctattcctccaaactcagccactgatgaagtttcatctccagaagctttagcaagtgnagaggttnngaaggagcaagtggttgccgaaananctgttgatgaagtcaagactcctgcacctgtagtcacagaagnttntttttgagggaagtggcaacancngttactnntgaaanattcaaaggcnttnanccnggnntttgt

SEQ ID NO: 136539 - DNA, 519 bp, Arabidopsis thaliana columbia
  unsure (1)..(519): unsure at all n locations
tccaaatgttggaaccgagttgcattnctctcagtgacctttacagtgaggctctttaaattctctttatcggaccatcttttgaagctatagcagaaacattactacaaaagaactgaaaaagaatatatctatcatcttctgatctccggagtttaaataaacagaaaattcaaaccaaaagaaagctctgttcactatcgagaatcaatccctagggggcagaaggctcacgttcctccttagccatgaaccataataatcttagatcccagttgtaaccattatcttgagctgattcacggatcgatcgggtgatcaagattctatagttacttgcgggtatcaaccacttgacgnatatcacaactttttgatatattatantanctcggcttaggacaatctgnaaaccttttcggtgactttccaaatntgtnagggnnatatnccactttancanctcgggttnccataaccgccggatcttatagggttnnntttttcttggggtggnca

SEQ ID NO: 136540 - DNA, 511 bp, Arabidopsis thaliana columbia
  unsure (1)..(511): unsure at all n locations
gttggaccaaaagtctccaaaacccaagtgatgttgataatgttacttccccatttcgattgagatctatagattcccattgaaggacaaaatccagtggaatggctcatatatttagccatatgttaagagaatatatcaagtaccggatgatggtttttggatccacatttgcttctcatgtgaactgggaccaccaccacttcctctccgggaggttttaccctcgccaatcaccacctcttcttttctattgcgacctccaacacggcgactagaatgtctggcagaaccattctcaagagtgtgaccaccagaggagttcaccactttttcccgatctttgagngaacatcctgtctttcactnctccattgtttcctgctgaagatagtggttgatcctcactaccataangncggggnggcccacatnaaacggtcagggntntccttgtttntngncggcttttttgttttacttntggnccnnnngtttgnaanttncctct

SEQ ID NO: 136541 - DNA, 523 bp, Arabidopsis thaliana columbia
  unsure (1)..(523): unsure at all n locations
gattagtgtctgaatattacaacacaccaaccaaaactgcagctaccactaccgaataccaaacctttacccaacaagtcacaagtctcctatttctctccttgtttcctcagttatgaagtagttattctacatttaataaatctgtacttgtcgcaatacctacaaatgtacatttgatgcgtgtctcaagatcgagatggaatgccggtgagccatgcctgaaaagtgctttctccagtgcaaattatctatcctctgagcagttaacttcgtggttcaaaatcaggncaatanctaaaacattttatcccgaggcttcataggttcaccaataaatgtgatggccagctatcagatcagacggttctctaatgttgcgtggntcgtgggnaaaacaagtntttacatttgggcgtaggccgtttggttccttaanaacacagnacttnggtgntttcatggnattnagggttctgggggggcntttncaattcggggcttcaaaggttnnaggcaanca

SEQ ID NO: 136542 - DNA, 519 bp, Arabidopsis thaliana columbia
  unsure (1)..(519): unsure at all n locations
aggtacgnacggtgatcgcataagcttgcatcatcgnaattacgcggccgccttggttccatggccatgcccctaacgcttcgattactttaattccaatatttccgatcttttcgtcttcgagtttctattgagcgtcgtcaaaccctaattttnacttccgggtggataatcccaaatccgtttcatagctcgatttcactgataaatttccgagctttcggtgttttgattcgcatgaggatttgaattgactaggaaagataaagatgtctatggagagatctttagaagcttgggaagaggttcaacgacatggacaagacttagctgatcgacttgctcaaggatttacggggtttnattcatataaacccaccttcgtttccatggccgccgaatcaccatcatcttnacaaggnnaaactnttcgntctcgagttccaactaacatttcagtgtatnaggatncnaggttnggntcaccaccaatnaacgggtanaggatntngnntttgg

SEQ ID NO: 136543 - DNA, 283 bp, Arabidopsis thaliana columbia
  unsure (1)..(283): unsure at all n locations
ttcctctcctctctctctctctggtttttttttgccctatccatagggttttctncgctctctatctcctcgatcttcatgtgcatctctctctttggtataatcggagctaattcgttcgttttcttcttcatcttcgtcggatctctcttttttgctctttcccacgggttttcgcttganaaatcaagcggtttcggttttcctgggnggttttnagnccaaaanaaggttnnaaaanactttaaggnttttcccgggggaaaaaaanttttaaaccccc

SEQ ID NO: 136544 - DNA, 308 bp, Arabidopsis thaliana columbia
  unsure (1)..(308): unsure at all n locations
tgaaatctaaagcagaaaatttgtataactctctactgtgttataatatactctntcagatgaaaaccacaatcattagttgaaaaaaccacaacaccaaattccttaatccaccaatcccatcttcgtctttatactctccatccaccaagaatcgattccttggagtatcggtgccggctactggntctagctagggatgtggcgtaagaccaggggcaaaattttcggcttttttaacattgatccnggggcttgatttgnttnntnagggctnanggggnttccnttggnaatttgggaccccc

SEQ ID NO: 136545 - DNA, 276 bp, Arabidopsis thaliana columbia
  unsure (1)..(276): unsure at all n locations
ttgaatgtatatttttgattatacaatttcaccagaattcataaataaaagaataataacactcattaaaaaaaagaagctagaagatcaatgcatctcttgcgacatgttccaaccaattcgcaagttccgacatagttggttgttgattcggatcctcccgtacacacaactctgccacggcagcaagttttcaacaancggggtccnncggtttntttggnaanggaatttttcgggttcccnaaattnggcnnncggttttgcccctttttt

SEQ ID NO: 136546 - DNA, 261 bp, Arabidopsis thaliana columbia
  unsure (1)..(261): unsure at all n locations
cagttcctaatttacccaagaaaaaaacaaccgtgaaaagaggtaagaagaaagacaaattcttcaaaagcccatatcattttttnacattttgaccttgttgttatgttatctttggttatttctgtttggcacttctccactttaaacgatgctttcaaatgcaactttgtgtgtgagaaganctaggttttaagctcgnttgttgagtntccaaggccnctttagggngtttaaggcnccgntnggntttataggccc

SEQ ID NO: 136547 - DNA, 328 bp, Arabidopsis thaliana columbia
  unsure (1)..(328): unsure at all n locations
cgtttccaaggaagccgcgcaagaaagagctcaatggtggaagtattgctgtgattgttttatccgcagctgcttttatcggtttatgtttcgttatcgtttggttcttggttttccggcgacaaagagatcgacgacgtctttcgaaaagaacaccacttgctcgcccttcactgccttccctctcgaaaccatcaggctcggcgagatctttaactggaagcccgttttagctcaacttcaattgncaatttgaatcnancattgctcccgtttaancttttcttgnaaaanatttttnnccccnangggnnaaanattggaaggg

SEQ ID NO: 136548 - DNA, 278 bp, Arabidopsis thaliana columbia
  unsure (1)..(278): unsure at all n locations
ctttttttatgaacacgaatatacttattagcttatggtattgtaagcactaagcaatggcaactttgaggaatcaagaaatatacaactcagcttggccgtcaataaagagactcatgaactcttcaccgtcaacagtttctttctcgatcaggagctgtgcaagcttgtgtaggntatcantatgnggttgttaatgatctccggtggctctncttggaatgccttntcaacttaacttttggaancnnanggaattttcaaaaaatccccnggnt

SEQ ID NO: 136549 - DNA, 478 bp, Arabidopsis thaliana columbia
  unsure (1)..(478): unsure at all n locations
cttttttttggcataatgttaatagctgccaaaaaaagaagaaggtatatattaatatacatatctatcatccatatatatggaatcatatctcaacttgcgtttggnacgataaataaaagagaaagggacaacctaaccaacgcttataatttgacatgacaaacaaaaaaaattataattagaatctctcatctttgagccatcactagctgtacgtatggctctttctgtcttacccaccaatcttgtttgcttctcttctctactatttgtnaataaggtcatttgtttacttctctgcttcctcttttgcacaaacaggttttngttctttgnaatgatcctattnatggtcttcaagtgagntccggggagnactntcatcttcagtngccnctcggntcgggggctccggtttaatcttanaggcgggaattgncnctttttggtntcntaggcgncnatcnttccgggt

SEQ ID NO: 136550 - DNA, 500 bp, Arabidopsis thaliana columbia
  unsure (1)..(500): unsure at all n locations
ctttttttttttttgacccaagtcgatctttattgcaaaccaaattgtcacacacgcaaaaaacaaaccttaacaatacagaaattaagaaaagaaaacaaaagcagaaccattgacgaggcaaagacgcgccgtcgaaaaaaaaagaaaaaaggagacttgttttttctgatgatgtataagattattagagagtttataaagtaaaatatttgctcagaagaggcatgcttgagttactattggtttaggggtcatccggcgactttcctagngtaggcattggtggtgggttgttgttggtctaaggancatgtcacggggtttctcctacccaacctgnccttcatcggaggntggtttcagctgtttgattnctgtccaaccncaggcacagagtttttcgagatncccntttctccattggcaatntttcggggttntcaagantntcgggtancttctttnggtgncccggttntttttcacgntnttncttt

SEQ ID NO: 136551 - DNA, 531 bp, Arabidopsis thaliana columbia
  unsure (1)..(531): unsure at all n locations
aattacgcggccgcctcttaagtaaactgtacaacgaaaaaacgagaagtgagtagagctctatcaaaccgatcaaaccaaatttttcagcgcacccgagagagtcaacgatggcctttttttaggcctgaaaagtaaccaccatgtttatccttgtggcgctcatcatctccaacctcgcggattagttggttaagcatttctatgatttctgcaaaattgggtcttagagctgggtcttgctgccagcatttctcaagaagttcagtcagttttgggtgtgtttcctttggaatttttggtctaagtcccttttggacaacgccaacagcaagcttgcaagtggagtcaaagtaagnatatgggagttcccagttcaaaaggtcccacagnacaatcgggtcgtgaagncatnttncctgtnatcnanaaggtttnttgctcaatnncctttgggccatccatnggntgncccgntttccgttgnatacccttnatnagnttgntttgaanccaattgggaactttgaa

SEQ ID NO: 136552 - DNA, 366 bp, Arabidopsis thaliana columbia
  unsure (1)..(366): unsure at all n locations
ttaaaagcctcctcttcttcctcttctctctcctcacaactcaaaactctctccatctctcttctaaaatcagacaagaaagatggctcaagaggaagtacagaaatcggctgatgtcgctgctgctccggtggtgaaggagaaacctattaccgataaggaggttactattcctacccctgtggcagagaaagaggaagttgctgctcctgtctctgatgagaaggcggttncagagaaggaggtgactccggagaaggaagccccagcggcgggaaggggngaaaatntngtttccgntnaaggnaggganganaccggnttntttttaagcttnaggaagggttnttggttttaaccttcctt

SEQ ID NO: 136553 - DNA, 495 bp, Arabidopsis thaliana columbia
  unsure (1)..(495): unsure at all n locations
caacatgggtccaacatcttgttatcaatagttgaaaaaggtatacatacataaagatattaggtatttagaggaagcatttcttacaacaacacacaaaagcaaaagataaagaagcattgtaaaggtagattagccttccttttcatcgttagtatacttaaacttgtgatggcttagtctcggcttctgcggcttttggttcaacatcagcttttgcatcaaccttagcctcagtcttagtctcagcctcggttttagtctcagtcacggtttcgaccttaggatcagcctcggcttttggctcagcttcagcctncactggccagtaaggaagtcttctttccgggtctttgaaactgtttggnaaactgcttcaggntcaacattacctttactgtcaccttttgnccctngaatcantgcaaatgctaanccttccatttnnccaaaacntnttgngggncacgngncttgnttgnatncantttgggg

SEQ ID NO: 136554 - DNA, 508 bp, Arabidopsis thaliana columbia
  unsure (1)..(508): unsure at all n locations
gtaacgtgaaaactcaggcagaaaatgtttgatgtgaaaaagcttcaaaaataaaatgatttatcaagagatggaacctctattgctttcttctcgtgaggtcgctgagagttttgcctctaaaatctgaagtaagtcatggtactgagcgaaancaagtgagactctaatgtcacgctatatgctttccacaaccgtagatcataccggaaaatatcataaagaacctcagnccgttgtaaaagagtggcaagaacaactatccattctttgaatttnacgggngcacatctgagccaataggaactctgcatctaaccgggttctgtagctcactcattttgcagcttttgnccaatcagttcaagccctgcagnaaaattctgcagntgggacaaccatattttctcggttgagggaattncccattttaaacttgggngcntttnncgggtgnacaggttttaaagttttttccggncntangtactggatgnnttnaagtttc

SEQ ID NO: 136555 - DNA, 531 bp, Arabidopsis thaliana columbia
  unsure (1)..(531): unsure at all n locations
acgnaggttcgnacggtcatcgcatnaagncttgnatnatcgtaattacgncggccgcattcaaacatatacagagtaaaacgcatagatatatatgatatctcacaagaacaaaacagcaacccaaaaaaagaaaagaaagacaatgcttgtggtaaagtaacccaccccgtgtttgtatctagtaaagccaaatgaaatccttagtagtttggttatggctgacttgtgtttagcttctaatcttctggtctcacacccaaatccttcttacctcattcattttttttggcagcagcgacagaatcacacaagtctagctttctcaaggtttccatggtgctggtggaggtggtggagtagggacaaaggaggacagctgngaaaatagtgtttttggctatcttaccggtggntttttcttcacccgntaatgcncaagggctncgctngncccagatttccttcaagggcggttcagtgtagtttggtntntcgggcatncgggnccctnggggttttnggccngaa

SEQ ID NO: 136556 - DNA, 518 bp, Arabidopsis thaliana columbia
  unsure (1)..(518): unsure at all n locations
catttgatctatgcatagtaattctttgaaatataaagtttacatatgactatcctgtcgtgcaacctagttctctctactaaaatctcatttcttccaaactagtatcacaacaaacaaaataaaatatttgatgtcaagaggttcagacttcagagacataactaaactactcaaaatccaagaatcttgggagcaatgtgaagcaaaggctccaaagcactcggagcaaacttcctcgcaaagagataacacatggaagtgttgcggccattgtaactgcagtttcttccatcaaagntttttccaaagaggttttctgtaatgtccgatcggcccaaaacgtagctgggtggggccgcccttngnccagtccnccatgtcaaggtccggttagccaagncttttgggttntcaattgncaacattgttgggagnattgttggcccatggaagaggcctaagnaccttttnnatttggggntcantggggnttgaaatggngntnccggcccgga

SEQ ID NO: 136557 - DNA, 522 bp, Arabidopsis thaliana columbia
  unsure (1)..(522): unsure at all n locations
tatctacatatatcatactagtcatgaaattaccccaccaacaaaaaaaaatacgaagaagtaattttgaaacataagaaagaaacatacagtttctctttagccgttcactatcctttgtggcctgataatggagtcttccctcctgcaccagcgtgtcgcagattctctcgatgcctctcaagctcttcatagagttcttcttcccacttccgacgtatctctgagaaacaacggctattatttactcccttcttggtcgactcgttgacttgagttggttcagttcctgactgcatcactctgcttgtgttcagtgtacgtttggagcttttnaggtgggctgggcatagcatcactggnttgcttagaggcgnctactcggaagtcggttagggngtcttgcttatacttgggaaggttnggaaattgaggaattggggctccaagtnaccttggggattccnggttaaagatttggattttcagganggggctnacctttaaaacctggctntatnt

SEQ ID NO: 136558 - DNA, 431 bp, Arabidopsis thaliana columbia
  unsure (1)..(431): unsure at all n locations
ttattcaatagccggtttaaagacattggtacaacaattacaaatcttgtcgaccactagagacatctacagaactcacaaaacctttactaagcaaccatcccacgcaacctttactcttccattgttgtgtgtgaataatcagaaaggaaccaagtagcttcatctattaataagnaacttagntaggtttccaaataacttnaccaacacaaaacaatttaagnggcctgttttcatcacccattactttaaagtgggggncagatgncagatctatcatctatcnctatccatctcttatacaaaggccggcaaaantttaataaaatcacttccacatttggttcatccnccnagatgnttccantnggaattgcaggcttgnggtccaacttctttcttacacggattggtntttcctcatnnat

SEQ ID NO: 136559 - DNA, 524 bp, Arabidopsis thaliana columbia
  unsure (1)..(524): unsure at all n locations
ttacaaatagtgcaggtacacttatttctgtttgtggcttttttcttttctctagagttgtatcaagtccattgattcatttacatggaaacttaaagctactcatagaaagagagagagtctcttggcttgtgttgataacttcactcatatatccatatggtgaccacttgtgttgggtggttgactttccaatggcatgtactgtgccatgatccctctaatttccgcatccatgtaactccngattctgtatttgtagactgcatatccagaaagacctgcaacaaccaccccgattataagggatccacaaaaaagctccagctgagttttgtggttccacttttgcctgaancntatgcaagtgtcgtgctcacgnatgtaaagnaaaccggttgttgagntgnattcataatttcccaaagngttttaaatttnacttttngggactggaaaccggttttctttganttggccaanttttnnaggttttnattcnatngccctgaccnaggggganc

SEQ ID NO: 136560 - DNA, 486 bp, Arabidopsis thaliana columbia
  unsure (1)..(486): unsure at all n locations
aaccttcttttaggtttcaaaaatacacaaatgaataaacgtactaaattaaatgaattaaaattcccaaccatctttcttgtttcttcattcattcaaagatcggacacataatcttatgcttgggttttggacctgtagagcaccttcttcttcttaaaggtttggttgtcaatcgtgatcacgacctttcccgcctcacttgccttgaaagaatcggttatcaccggttcatcagttaaaccgaccttccggttcttagagncaatcacggtgtagcttgcctcattgcttggctcaaattgagctcccgtagctcacggtccgaacccaaaacccctaagntnccattgagagcgtggnaccctcttgtagnaggcaaatnaaatggtatttttagnttgtcgntttaactacggcctnggtgnttcnatctnaacgggtgantgggctttnctttgntgnggcccccananttnaccgggg

SEQ ID NO: 136561 - DNA, 479 bp, Arabidopsis thaliana columbia
  unsure (1)..(479): unsure at all n locations
ctttatgtacatggggaacaagtattgggttcctaacgccttgcctctccacattagtcataaatggagctatgaaaatggcatttaaagcaaaacacaaacataaaacacctaaatgaagcatatttnctacatatattttagaactaaaggccctaacaaaaaccccccaagccgatgacattgcctaaatgtacaaagacaattagcaataatatgttatatattggntctttacttcttcggtacctttggccgtgatctcatactggctctccttgccacatcccacggcttctntggcgcgtatatccctaacctgngncgcaaagnaaggttcataancctggngaatcaaaccgnaaacccagtgtgcttttnagnggttccgaggcaatttgtggtancggatnggttcttngcctnttgaggtgtgngggnaanttttttacctccagctgatntgcctgctttaatct

SEQ ID NO: 136562 - DNA, 375 bp, Arabidopsis thaliana columbia
  unsure (1)..(375): unsure at all n locations
attacgcggccgcttcagnaatgctctcttggnntctacacaacggttggctactatttcaacacaatgttgatagtatttactgtttatgcattcttgtggggtcggctttatctagcacttagtggtgttgagaaaatagcaaaggataggagtagcagcaatgaagctcttggtgcaatcttgaatcagcaatttattattcagctaggacttttcactgcacttccaatgattcttgaaaattctctcgagcgtgggtttcttncagcggtttgggncttcataacaatgcagctgcaacttgcatcgtttttctacantttntncatnggnacncgaacccnttactttnggccggactatantccntgg

SEQ ID NO: 136563 - DNA, 500 bp, Arabidopsis thaliana columbia
  unsure (1)..(500): unsure at all n locations
tgatagatatcctaaagcactcgcatgaattgctttcacaagatctttccatagaccctttcagtctcatgttgaatgaaatgcaagaaaacatatctcttgtctcattttcaagtcgacttgctacacagatttggtcagagatgcagagtgatttcctaccaaacttcattctttgcaataccactcagcgatttgtccgttcatcgaaagttcctcctactcagaaaccatcagtgccttctgctaagcctagtttctattgtggcactcaagacttaaaatgcagcgcatcaaagtttttgcacgnttgcatagtggatttttncgggggtaccacatttatttttccataggttaaacttnttngggtccagatcatttgccttgggtaataaggggtttnctgggccnttntcaaatagggtacaacattttggccantgnttntgggtttnagnnggntttnccaaggcccttgggtncttnttttntgnggc

SEQ ID NO: 136564 - DNA, 432 bp, Arabidopsis thaliana columbia
  unsure (1)..(432): unsure at all n locations
aactatcaaaaagaaattaccaccttgtagcatgcaaacgttgcctgcagtaacattggagcccaatgatgaaaggaaagctgctatatctgtacctccggcgaagaagagaaagatggcttcacccgttagagagagtgttccagaaccggtgaagccacttatgacagaagtggagaggcatagattgggcagacaactcgaatcactactcgacgaacttcctgcacatatcattgacttcttgaaggaacacaattcaaatggcggagaaatttgcagaagacggaattnagataggcattgntgttctcagtgnntgaagtcttggncactcttnggaaccttcttgatgnatntnttccaaaacaaagnaggaaannagncggattttgacccttgtgaaatagngcttnttaatggtnncggccg

SEQ ID NO: 136565 - DNA, 253 bp, Arabidopsis thaliana columbia
  unsure (1)..(253): unsure at all n locations
gatcgtgccccaactaggcgattcgaaatcgtcgatcattatcgaagtgaagattcgaaattcccagttttgaatttctctttnattctgtgaattgatatcaaaaattttccgaaagagnaagattatttgtgtttcanagnattttgaaggnggagatcggnatagttgaaaatggctaaccaaggtgggccctcgnggnaaaagtntttcctctccggtcattcaatttnaagggagggaaaaaggttca

SEQ ID NO: 136566 - DNA, 560 bp, Arabidopsis thaliana columbia
  unsure (1)..(560): unsure at all n locations
acggtnatcgttnaagcttgnatcatcgtaattacgccggccgcttggtactcttgggttgtattggtctaccttaacgtatgattttttggttggaagggatgaggaagttgtcccctttcgtgctaggcagcttaggaacctgttgtgcaatttgggaccttcatttatcaaagctggacaagttctcgcaaataggcctgatatcatccgtgaagactacatgaacgagctctgcatactccaagatgatgttcctccattcccaaacgaggttgctttcaatatcatcgaggaagagttaggccaacctcttgagaacatatttagcaagatttcttcacaaacaatagcagctgcaantttagggccaaggtttatcgagctactctacgtgccacttggagaggatgttgctntcaaggtcaagggccncaantagngccttaattttaccngggttcttttnttttccganccttggntccttntaaaatgggttaannttnanaactggggttnaacgnggngttatnagttgttnatttggggaagctttc

SEQ ID NO: 136567 - DNA, 544 bp, Arabidopsis thaliana columbia
  unsure (1)..(544): unsure at all n locations
tcaatctcattaatccaaattaaatagttaaactagaagatgagcagcaaaagggcatcacaatatcaccaagtagaaatccctccaccacaacctttcttgaaatcactaaagaacactctcaatgagatccttttcgccgacgatccgttccgtagaatcaggaacgaatcgaaaacgtcgaaaaagatcgagttagggttgagacacgtgttccctatcttggaatgggctcgtggttacagtttggagtatttgaaatcagatgttatctcagggataacaattgcaagtcttgctattcctcaagggattagctattgctcaagctcgctaatctccctccaatccttgggcttttctcgagctttggtgccgccgttggntacgngntcatgggaagtcaagagnntttagcggtgggaccagtggcggtgcctcnttgttncggctgcnnttntgggnaangggaaccgagggttgatccaaggttacctccttaggttaccncactttttgncggttatgaaanctccttgccttc

SEQ ID NO: 136568 - DNA, 505 bp, Arabidopsis thaliana columbia
  unsure (1)..(505): unsure at all n locations
tcacaaccctcttcctcctcacactacagtaagaaaaacacgcgcgaaagctatggtaggagcttcaagaacaatcctatccctatctctatcatcttccctcttcaccttctccaaaatccctcacgtttttccatttctccgcctccacaaacccagattccaccacgcgtttcgtcctctttactccgccgccgcaacaacttcttctccgacgacggagactaatgttacagatccggatcaattgaaacatacgatcttactagagnggcttaggcttcgacatttgaaagaatcagcgnaaccaccacancagggnccaagtagtgttgttggtgtagaggaagngagtaggtattaggangaagagtaggaagttngttgaggattttcangggattgggtttaaagtaaggagtttttgggggnttttcaaggggttgaattttngggtccncctnngntnnagtgttcggatncntcggttttggnccgaaggngt

SEQ ID NO: 136569 - DNA, 546 bp, Arabidopsis thaliana columbia
  unsure (1)..(546): unsure at all n locations
agatgtcaacctataatccgattctctcttttacacatgaggataactaaacacagatgaatatcagataaatatattgacccaaaaagttaaactaacaggactttgtgtacaagtgcaacacaaataagtaccttggtcagggtagtttgtctctgtacataatgctatttggtaggtggagatctcagcttatcatccgagtcatgtttaagagaagaatcccctcccattagttgttcgaatccttcaaccttaacgggttgagncctgacagttcctagtgtgggtgtttgcatctgtggaatttgcattgaagncaattgtctgaattggttatagcccggcttgtttgttgcatattcggcatggcagnaatttgttggttgctggcttgaggtngctgctgtagntgntgctgggtggctttgggtcaaaggggtaaaanggatttccancactgccatttnagagggtttttngttncctnacancggcgncctttncnancangtnggcgggggtaacttgcgnnccgttttttac

SEQ ID NO: 136570 - DNA, 332 bp, Arabidopsis thaliana columbia
  unsure (1)..(332): unsure at all n locations
gatggtacgaacggtcatgcgnatgaagcttgtatcatcgnaattcgcggccgcctcaaatttatcggaatgcaagtggaggtgagcaagcacactgaaggggccaaagaaaaggctttgaggcccaatgggcttccggaatctctgattcgatacgatgccccgncaaaaaggtatggcggacaaaactcagtgacagagctagtagaggncggttgaagagacctcggganttaagcgatncgacggaatcttccatcccttcnatgncaaaantcgggggancgttgaccttcccgaaaaaccnanttcggcgnattttcccgaaaatt

SEQ ID NO: 136571 - DNA, 556 bp, Arabidopsis thaliana columbia
  unsure (1)..(556): unsure at all n locations
ctacgnggtacgcacggtgatcgatnaagcttgnatcatcgnaattacgcggccgcgcatnaatttggatatttgtcagcaaaatctgcagctaaattgggacttgtcttgttagttcaaagattgaaacttttttggttaattgtttggcggaagaagatttacaatgggagaggagcatccgagaaagcggtctagacaacattttgaagcggaggcgagaaacgtatcgttgtttgaatcccctcaatgcgaaacctccaagtggtatttcagcagggaagagattgagcgtttctctccatccagaaaagatgggattgatcttgtgaaggagtcgtttttacggtcttcgtattgcaccttcctgcaaagacttggcatgaagcttcatgtgtaagctcaccatagtattactttgttgttttgccatctagggagnaataagtgtttgtccttnggttgtttnctagaaanctnctnatncngctccttggcttctgnaaatccttggncggtttttagntaaanggggncnaatnatgcantggtncca

SEQ ID NO: 136572 - DNA, 518 bp, Arabidopsis thaliana columbia
  unsure (1)..(518): unsure at all n locations
ggtttcttttctagctaatgtacatgaatatgactaaacaacaacagaaagcgataccgattaccgcttttgtctacatattaactgaaacaatgtacatgttattagacattacagaaattgaaaagcaactagtaagccaaagggatgtatttgctgacaagtctctctcttctcatagctgcccaagtttttcctgaagcatctgcattaactttggatgttgttccagtagctgacacagcttgtcacggtcacttaatagagcctgaatggcttcaggggacttgaagtaatcatgtaatgacattccagattcttgttgctggggaagtcccagctccttgctgacctttgaacagcatgatgctgtttgctgttgctgcacctggggagggctnttgttgntgaggaggggtgatagnaaggctggnctttcggcctggtgnaataantgcatntnatgcattngnatctgnaatgggntttnanttnaannncctncctganggttagga

SEQ ID NO: 136573 - DNA, 510 bp, Arabidopsis thaliana columbia
  unsure (1)..(510): unsure at all n locations
cgtttttttccttcaatgttttggtgatgaacgatgggaaaacaaatgggagaattctttagttacatcaatttctgaacaagaataatattaattttgaagattcttgatcactgatcacaaaatatggttgatcaagaaagaacaaatccttcccccttctttttcttctcttgttctttcaaatctgacgaagcaaacaatatatgatgatcgaccagatcagattagtcttcttcatccacttctctgaaaggaagcggcactgtctttacagcgcgaaatttccctgcattatttagatgcncatnctccaaatcgggtaaaagttccattgtccctctttctgatgactttcaaggggcagncaagnaccaatccctgtggctctgttaatccacatgntcaaaannttggagtgcaaaacctgttttnnggccatgcnancctttagancaagggttttgnncccttnggggagtngnaaannggtttttnggggaagttaag

SEQ ID NO: 136574 - DNA, 472 bp, Arabidopsis thaliana columbia
  unsure (1)..(472): unsure at all n locations
ctncgaaggtacgcacggtgatcgcatnaagacttgcatatcgaaattacgcggccgcaagtnaagaacaccttattcataaataaatatacagaaagatgacattacagcaacattgtatgcatctacctctgatttctatcttcgtatatctaccatatcgcgtagttcaactcctatgaattcattcgaatagtccactctggtccggttcagaagtgcttcacacctgtttgtttccagtgaaataataaaaacgtgagatgggttcaatcggaatatgaggagggatgacattcgtccctcgntttgtgtatgcactaaccatatcaatggncctcaaaggnnccnggggaaaaaaaannttttnttcccnccaccaaaaaggttaaaaattttntgacctttncccagttttttgggggnatttgnggggtaagggtttaaattgggnaaanggttgggggccaaa

SEQ ID NO: 136575 - DNA, 491 bp, Arabidopsis thaliana columbia
  unsure (1)..(491): unsure at all n locations
cttgtagttcgcttggttcccttgtgtatttcaagacatggacttgctgtattttgaccttttcatggttactccattatgttaaactttttgcgttgcaagatcattttgttttcaaagttcctgtgactttgttgtgtttctgaagggtgttaggttttgcatcagtttataaaagtcttctcttaatttcttaattcattgtgcagatattccaatacagtactttttaaaattggcctggtgaatcttctgaagttattaaggagctgatgcaaatggagttgtttagtttttggatgaaatgttactctttcggtgtccttcaaaatacatgactcttcaaaacctttcaaggaaggtttagggtttcccctacttggtttctcaacnctttttaatggtatcccaaaacactggtccgntttanaactattcgntctgtttnaacttttgggacggttcattggaaacttaanaagggtccccgc

SEQ ID NO: 136576 - DNA, 477 bp, Arabidopsis thaliana columbia
  unsure (1)..(477): unsure at all n locations
ttagaaatcacacaacatacaaagacatttttgtttttttcaaatacaagtgaacaaagtttaacaatggcagatgatgaacaaagctcactaacttcaacaatggccataatgaacaaacaacaaagaggtaaagaaaaaacctccaaaactacttgacgattaatcacacagtcgttaaacaaaactcgaaccatccacaggtatgantccggtttggtcttctttcatcgccttctaggtggtgagcattgaggttgttgattccatgnataaggacattttcgcagtcacgntcgnactaacattatttaaacaccggggggaaaccaacctttacgggggtntctcatggctaatgttttaggcttatttctcaatcgnnccttctttcccanaccnggnttttcccttttngnatnatttccncaaaacttncccctnatnaaantcttttccnctccattgtttttgggc

SEQ ID NO: 136577 - DNA, 494 bp, Arabidopsis thaliana columbia
  unsure (1)..(494): unsure at all n locations
cagagacccaagcaagagctcaaattagggttatttttccgatttgagagatccattaacaatggcgtggtcgtcggaaacgccgtcgtattgcggctggaatgagcgacatgtgaagaacacgaaagaaaagatggaggttcattattatctcgagaggaaagatggaattgcagatctagctgttattgggaggttgaagaattctaaacgcatgtcttttagatacgctttgaagaagaatcgctctgtcttgaaaaagcttaattctaaagatgatgttgcgctttggctcgattctattgtttctgctaaacctattaaatgacttaatttttctgcagacagatccggtttccacctttttggtgagatacctcatgtagncagatgtaccagctactgtnatgnctnaaaaanatgctggaggggtcaatnttgggcncttttatgattnggaatttcaggggcctttnagcagnccaaacgntnga

SEQ ID NO: 136578 - DNA, 521 bp, Arabidopsis thaliana columbia
  unsure (1)..(521): unsure at all n locations
ccccaaattgacttgttctcctctctgtttaggtttgtgtctctttaatggtgtgtgaaaggtgaaagctttaagcttttgtgtgtgttttaacaacaatggcggagatcaagaatgctaaagtagaacaaaggcaaacgaagattaggaatgttccagtagctgtaactcctgaaggtttctggtgttgtccttctcctgttgcgtttcaaaagactcttaaatctcacaactctctcaccaaacacaagcaatcttctcctgctcttcaacctcctaagncggagaagaaaccatcttcgacttactattagatcccgtcattgcttctgatgaaactcaacaggatttttgggtagttttggaanttgttcatagnatttgctggttcctgcgacggttcaagnggngnccncagngggcaaaaggtttaangcttttnccgnggaangttgntaattgnggtttggggacccgggagnagngatncnaaaggggttttggtttggngnagggttttc

SEQ ID NO: 136579 - DNA, 431 bp, Arabidopsis thaliana columbia
  unsure (1)..(431): unsure at all n locations
tcagnaaataatcacacaacacctcaagtaaatagaatgaagaaaccgaaaaagtaaagtacacaaacttcaatacagagctaaaacctatacagccaaacaaactacttccataggacagaaaatgttatgcgaaaatgtcaaacatctctccctccacccttttttcttgtcgtcatcgctaagcagtgtaagccgatctaagtcagaaagcatacttatctttttcatccttaagttctatggtaattcaataaatcacagaggatgtaaaggnaagcaagagaaataaaaangngnttataaaggttaaaaaggngcttaaaaaattcacacccaggcctataaccggttttncttggtttaanctgnttccggccncaagncctnggnacatnttcctcccttnatctcattgggtactccttntt

SEQ ID NO: 136580 - DNA, 289 bp, Arabidopsis thaliana columbia
  unsure (1)..(289): unsure at all n locations
cttttccaccaaaagaattagagcatataataataatctaccaaggatcctataaataaagtagaagaccttgtccatttgggttcttaaaccgggaatctaccggtcatctgtatatgctcaagtgtttttcgcaaaccgtacttgtgaacagctaaccttccagctctgaacccggcttcataaancggggaagcatcagantcgattttggtgcttgaaaaantcacccaaggtttctnttcgtacttanntntngggtcccctttttnaagntcctttnaggagg

SEQ ID NO: 136581 - DNA, 485 bp, Arabidopsis thaliana columbia
  unsure (1)..(485): unsure at all n locations
gtcagctgaaaaacctgacacacttggagatgtctctgacgtgtctgattcagtagatagttcagctgaaatacttcagcttgattcagaagatagagagagtagtcctgttcattgggaaatggatgcctcagaggttcatcctccttctgcaggagacactagcagaggaagaggcaattctttttctatacctaatggagttgcagaaagaaagggtctntccacaatggatgatagttcttcaacctgttctaatgactcgattcaatcaggggtagccaatgggtcatacaaaagggnatgtattaaattgccaaaagccaaaagtggtttagcaatgggaaaaatacaaccagggnaagtatctgattccaacagtttagccagtggaaaagngcatcaaccttcaangcttgnatctgccctaaaaatcagngcnttnttnttntttncgnanggttggtnnggtgcanagtttntng

SEQ ID NO: 136582 - DNA, 515 bp, Arabidopsis thaliana columbia
  unsure (1)..(515): unsure at all n locations
cttggtaactccaagatcaagaaagtacattttnaggtttaatagcgacaacgacaaacaacaacgagaaacacacacaaaattcttggtctaaataaagcaaaagagattctnatgatcctgtgtatgtaaaaaacataacatatatggagagagcttacaatataaacgatgaaagctcttctctattaagtctaattcaactaaaacacctaagtgggatgtcatttatctacagaaactaagtatgatggcattgattgattcaccaaggtcccgactctgtcctcctcagctttttctttggacctccttgcagaagattcctcatctccgtctcctgattcttttgattccatggtcccttgcctgtttcgttgtactcgcattctcttcctttaactttgaaactcaggtttaaggtccacggggtagccttttgnccaaacaaggnncggctgggaggttttggggnaagcctgggtgcntttaaanntttggcccnaaattngtnc

SEQ ID NO: 136583 - DNA, 386 bp, Arabidopsis thaliana columbia
  unsure (1)..(386): unsure at all n locations
gcaaaatgtcagacccattgacattcaatctaaagatcatactaatacaaaagcatatcggcactaaaggaaggaatacatgtagacatgcaataggtttaatctcccctttctaacttgtttccattgcctctttgtggtacttgtccaattcagcatcaagatcctctgcagatacgttttcatcacgtnctcttccancactgccacgnccaccacgtcctctagctcccctgccacctctgnaattaccaccgncaaaaccaaccaaccacgngggacggtcccatnaaaaccgnctntttccttcttgcctttggaaggtttncatttnaaggttggccatttgnaattggcccattaaaaggtnctnaattaaaggttnt

SEQ ID NO: 136584 - DNA, 410 bp, Arabidopsis thaliana columbia
  unsure (1)..(410): unsure at all n locations
cgcttgagtatatgtttctctatcaaaacaagctctccggtcagatcccaccgtccatcttctccctccaaaacctaatttctctcgactttagcgataactcgctctcgggagagatccctggctcgtggctcagatgcaaagcttggagattctccatctcttctctaataacttaacaggaaaaattccagaagggagtaacttctttgccacgtcttaaaagtccttcaagctttgggcaaacagattttccggtgggaatttccgcaaantcttngggaaccataacaatnttantggtcttgntcctttttnccacaaatttaacccggaaaacttcctggcaaannnttttgtggntttttggcctntttaattagggtaaancccttnttntnaacnttttt

SEQ ID NO: 136585 - DNA, 528 bp, Arabidopsis thaliana columbia
  unsure (1)..(528): unsure at all n locations
acctcgcggtgcttccacctctcgcctatcgaagttctgttctaaaacctgttccgagaacttgtatagagaaggatttcccgctaagcagcagttcttccataccaacttagctgcccggcgctgctattggcataacaaccggtacaccataggttggcccaacccagtcctctcgtactagggttggctcctcgcagttctccctttaacaccaacggtagataggaaccgaactgtctcacgacgttctaaacccaactcacgtaccacttgaatcggcgaacaaccgaacccttgggaccttcttcaaccccaggatgtgatgagtcgnatcgaggtncaaacgncttcgtgataagagtcttnggagtaataagcctntatccccggggacntttnatccgttngggggggccttcaaanggnctccgntcatnttggcggntttggtttttttggccagtnggttaaagtaaggagttttccattaggtnngggagnatttnngttggcnccttgaaacnc

SEQ ID NO: 136586 - DNA, 407 bp, Arabidopsis thaliana columbia
  unsure (1)..(407): unsure at all n locations
ttggtttcagttttcaggttgtgtaatgaaagtaatcgccattgtgtctgttgttctctgcaatggggctgctcacggagctgttgttagagagtgaacaaaatgtggacttttgcaaaacccctgtaggagaagatccaaatgttggactattcgttgtactgtttagtacttcacctagaggacctcctaaggagtntccccatgagattggtatccaagtattcacctttttcacagtaggctcgattgttgttttcatcggtttggatcgataggtcaagctcgcgggatagcnttgagagggngagagtgttgtnttttctagagganttnttatttggttntggtgtngnnggaaggggnnttgatgntgnctattggaaattgacaaattgnagnggtgg

SEQ ID NO: 136587 - DNA, 459 bp, Arabidopsis thaliana columbia
  unsure (1)..(459): unsure at all n locations
catatttcgcggcaactttcttctgcaatggtatctnctgtacctaaactccatgctttgtttgtctccaagtctcaaccagttctccgagccgccaaagttaccaatgaagaaaggtccaccaaatcaaaactcgccaggtccttggcccgtnccgtgaactctaacccgtggtcggacgaactcgagtcttcactatcatctcttcatccgtcccaaaccatctccagaaccaccgttctccaaaccctgcgtctcatcaaggtccctgcggatggtctccggttctttnactgggtttccaacaaggggttttcttaacaaagngnaagtctttcttncctcatgttagagttcctcgggtngagctnggnaatntcaaatgtgggttggaaatncctttgtnctccatngnngggaggttaattggttgngtaaggtcaagggtngntattttaa

SEQ ID NO: 136588 - DNA, 419 bp, Arabidopsis thaliana columbia
  unsure (1)..(419): unsure at all n locations
aacgttaagaacatcaaaatcactccatctagtataacatatttttnaatctttgccgtgcaaatacaaattacacggtgattaatacttccaccaccaaacaaacacagcacactaattttnagaggaaaggaataaagcaaaancaaaatctctgaccacaaagtgtgtggntcganccaagctacggccagtgaaagtgtaaaancagacacttgaaaggctagtccatttncctacttcgtaaggntccgcatagtaatatagcttgancctgtttgctaaagacagtcctgcagcaaaaggagaagcccggctgctcaaatcaaacagccttttnggggntcatctgtaaaaancttgtacatctcctagnagtttaancggttactctctgtgctngtaatctgtttngggag

SEQ ID NO: 136589 - DNA, 476 bp, Arabidopsis thaliana columbia
  unsure (1)..(476): unsure at all n locations
agacacaattgatgaatatatacacttatgcaaccctttcctntnttncccgcttctttatacaaacagaattacacgtgaccgancctcctttatatggtaatagggagcttttncctcacttccctgaatccaatctgaagcctttcccctatagagatgttaccctcaaatctcaaacattaccaataggcacagtttgtatcgagtacccaaaagcttcacaatagctttnntnagctgattctcagttgcagccacagctcttttgtagggcaataccatctgtccttttgctttaaggcagttggtgaatcctgggttaggggggagaaggcaatgtccancaataggcagtatctaattaagggaggggggaatgaggccaaaatgtgtgtcttaagttttaaccgtggtttttnctggctgnnaaactnaagntgtttntngttcgtnggttnnaaaataaggcagtt

SEQ ID NO: 136590 - DNA, 304 bp, Arabidopsis thaliana columbia
  unsure (1)..(304): unsure at all n locations
ctggagctttcttgtgtcctggnattatgctagaactngaaggagatagcaatgactatgttggaaaagggctctctggaggtaaagttgttgtttaccctccaaaaggaagcagctttnanccaaaaganaatatcgttattggtaatgtagcactttacggtgccactagtggtgaagcatacttcantgggatggctgctganaggttctctntccgtnattctngtgctaaagctgttgtggaaggtcttggtgatcatngttgtcagtacatgactggtggtactgttgtngtgcttgg

SEQ ID NO: 136591 - DNA, 404 bp, Arabidopsis thaliana columbia
  unsure (1)..(404): unsure at all n locations
ctncaaagtttaactaataaggcacggccagcaaaagtcaaagaggaaggcgacactccggctgcagatgcaaataatgctgtcactattccacggcctattcctactattccacctcctcccggtcggcgtacttnaccttctnagttgatccctgatgaaaatacaaagaatgctcctaggtatgacggggtgatatttgangctctctctgctttagccgatggtaatggatctaatgtcagtnccatttatcatttcattgagcccaggcatgaagtaccgccaaatttnagaagaatccttagtacaagactnaggaggcttgcagctcagagcaacttgnnccacgggntccggggnnggggcnttttttgnccaccaactttttttncccgaaaant

SEQ ID NO: 136592 - DNA, 581 bp, Arabidopsis thaliana columbia
  unsure (1)..(581): unsure at all n locations
ttgacctacaagcaagggctggtacaacaaaatctcccagacccggtaaaacaaaacccaaccacaagcaaatattagcagagagagaagcatattcacgcaaagcttcttagttctgctatcaaaattcaaaaacccccaaaaaaaacaaatgaagaaggagagatcttcatttcagatatgaacatcatcaagccacactgagaagacgagactaatactttctcccaagaattataccgatgataacagagatcagcgccactccagtgacgatcttcactgtcatgagatgtgaagttgatgctgtttgagtaggagtagtaacattgcccgnagacggagnaggagaaagagatgcttctggcttcttcttgntcttacggttcggttggngagnaaagggtagtcatgtcncggntttggcacgnnatccattgccccggttccctaggttttgnantgggggctggcttctgtcaaggctttgccttggtccaatccggggagccttttctaggtcaaccccctggggtcctaaggggcccgcngnttncnngggggntgttggcccaagngnt

SEQ ID NO: 136593 - DNA, 538 bp, Arabidopsis thaliana columbia
  unsure (1)..(538): unsure at all n locations
cgcggcngagaaaaattgaacaagacgatgcagcggcggagacggttggattcctccaccgttaaattcggtacaccggaagcactggagtatgtacggtcgctcacggacgttggcgcaatgacacgtcttcttcacgaatgtatcgcttaccagcgaacttangactcagatctcgacacgcttctatcgcagcggacggagcttgatcggaatctcgttcagcttcagagatcggcggagattctcgatatcgtgaaagcagatgcagatcacatgctcggaaatgttcgatcgacttgtgatctcgcggatcaagtcaagtggcaaggtacgagagctcgatcttgctcaatctccgtgttaatggtactcctctcccgcattgacgcgattgttgaacganggaattgcatcgaaggcgtgaagactgnctttgaatcccngggttacgaactggctngnaaatttgncananantctcccaattggttnnagacaagatnctggtccntnaaancganaantntacngccaa

SEQ ID NO: 136594 - DNA, 439 bp, Arabidopsis thaliana columbia
  unsure (1)..(439): unsure at all n locations
gaattctgcggccgcccttacntgtggctctttcattacattttcaatactccacaagacaagattctttgggatgttggtcatcagtcttatcctcataagattcttactgggagaagaggaaagatgcctacaatgaggcaaaccaatggtctctctggtttcaccaaacgaggagagagtgaacatgattgctttggtactggacacagctcaaccacaatatctgctgggttaaggaatgggcgggtaaggaangggatttgaaaggggaagaccaacaatgtgggntgcnggtgaattgggtggatnggtgccnatgaacgggcaagggcaagggctttattgaagcccatggaacnaacgnccgggntatcntagancccnggaaangaattgggnatncttaaatgggcaacaagcaaggncccatttnccc

SEQ ID NO: 136595 - DNA, 538 bp, Arabidopsis thaliana columbia
  unsure (1)..(538): unsure at all n locations
aaactcacattaagccaaatacagctgagaaatggagaccaaaaaggcctaaagtgatgaaatcaataaaaaagactcaaccattcatttgacccgaggagcagaacgacataaactaaactgaaataagaaagaaaccatccatgtcttagatagagttaacatagtaacatcatcccaacacaaagcaaaggaacagaccatgtgacgcagcacgaaaccaaactaagagatcaggttttatttataaaacataattattcctgatagataagagagatagagaagagttgccagaaaccaaagagctcatcaagcctccttctcccctgtgaggaggtccattaccacgcctttgatgcttccattgttcttcttcagcaggctcttgttcggcacatcatcacagnaggccatctcctggagctccccngggttgggtccactcggtaactccacnaagggngtcacaggctggtccaggtgnnccggttcccccagntncctggcaaatcnanncctggancnttcccgggct

SEQ ID NO: 136596 - DNA, 481 bp, Arabidopsis thaliana columbia
  unsure (1)..(481): unsure at all n locations
gtttaaaataccactatagtatttggatactgatgatttggtgttacaacataaatgataaaacccaatgaatcaagaacgtatagtttcaactctctaaaccctttgtggagagtcttgtggagtcagagtatctatcttctttttcttgtagagtggaactcttcctccaagctctcttagctgatccacaagtccgtatagaaactcaaacgtcaatatgttttgagcattaagttgctctctaacttgtggatgaattctaaaccattctcccaacatcttatgaacgtgagatcgnatcatccctccatgggaccggntggcttnctcaaacagnnttaaaataccccaccaactaaaatncnccctggggccaaanccccccattngggggaancccccctnnttggggaaacttttgggccatttnagnggggtttaaacccnngaaagggncgncgggggttttaanaagggg

SEQ ID NO: 136597 - DNA, 605 bp, Arabidopsis thaliana columbia
  unsure (1)..(605): unsure at all n locations
caacgccttcttcaaaggttaaatgtttacggtttgtgtgagttgaaggtctctggtgatggaaactgccagttccgagccctttctgaccagttataccgatctccagagtaccacaagcaagtgaggagagaagttgttaaacagctcaaagagtgtcgttctatgtatgaaagttatgttccgatgaaatacaaacgatattacaagaagatgggaaaatttggagaatggggagaccatattaccctacaagctgcggcagataggtttgcagcaaagatatgcttgctgacatcctttagagacacttgtttcattgaaattatacctcaataccaagcacctaagggtgtgttatggttaagtttctgggcaanaggtgcattataacccctttatancgntatccaagctgnccccagtccagcataagccaaaggggnaacattggttgtcctagaaggnccgccaccatccaggtttnttttaggcccctcaancattttccngccngttgggaaagccaccggcccnnacgggaaacctcctttaancccggaaccanttncggnccnctggggganctttaaccgaatggttgc

SEQ ID NO: 136598 - DNA, 538 bp, Arabidopsis thaliana columbia
  unsure (1)..(538): unsure at all n locations
gccggctcaccaacgttctcggttagggtcaggagacgtttgcctgattttcttcagtcggtgaacttgaagtacgtgaaacttggttaccactacctcataaaccatgcggtttatttggcgaccataccggttcttgtgctggtttttagtgctgaggttgggagtttaagcagagaagagatttggaagaagctttgggactatgatcttgcaactgttatcggattcttcggtgtctttgttttaaccgcttgtgtctacttcatgtctcgtcctcgctctgtttatcttattgatttcgcttgttacaagccctccgnatgaacacaaggtggcaaaagaagagtccatagaactagcgggaaaaccagggaagtccgccgaagagacacccgggttcaagaagagggncttacaanccccagnanaggnggcgggnnaanaggncccaanatcaacccttcaccngaaaacntacaccgggtnaaaaagggngggaaaaacccccncgggggntttggggcccnaagnnncc

SEQ ID NO: 136599 - DNA, 624 bp, Arabidopsis thaliana columbia
  unsure (1)..(624): unsure at all n locations
ctttgaagcaaaagaattccagtaatatgaagccaaaaaataactttgcgtattttgttttcactcttgtttggaaaagtagacagaacaaagcataaataagcctaacaataatgtaaagcataagctaatttatgttgaagatatataaaatagaagaagaagaaaacaaaaaaacagcctctcataaatcaaaaacaaccccttattcataccaatatttggtcacacgcatcagaagaccaatatctcatatttctccgaccaaaccagacccaatccgactcaaacaattgccaataaacggcttaatcagnaaaccaaacgnagnaccaaagcttggntcttttatccctctcaggtacctgtagtgnacagggcttgtaagggnctttcaacgggggatgctggccataggccggnttgggcccttgggtaagcttnggtggggcttggacccagntttgccctaagtggagtggnggnaccttccncacccaaggggtttggggaaaccatggcctcttctccaaattcccgggtgggntnccggtccagggggccagngggggaannccnggtngggnttgggcggatnccgaccgggggccngggggccagggc

SEQ ID NO: 136600 - DNA, 533 bp, Arabidopsis thaliana columbia
  unsure (1)..(533): unsure at all n locations
cttgggccatgggcctatcacttaactttcatacaaaggacatccagtgatcactatttgagtttttgacattgtgtgatacatttgaaggaaaggagtaatgtttaaggttgagttaacatgtaagagagtctgtggagttactcagttcagtagggaagaggaagcttcgtctgtctgctgctgctcgatgtccaagttcagctgcggcgggccagctaaactcagtatgacaggtaagaaaacgagcccatgcaagaagccgattataaccaaagccaagtacatttggaagtaatacaccacaaatatctcagatcttgcaaagcaaagcacggtcactccaacaagttttgtgagtgtgatcccactggaaactgaagctcccatggtttccagtgcctccctcgntccaatggtccctgtccccactaatcatcagggaagcatggtgatnttgtgcacgcggattctacagcaatcccggntgncattatcaattcccaacaggaactggattgggtngggggcgc

SEQ ID NO: 136601 - DNA, 517 bp, Arabidopsis thaliana columbia
  unsure (1)..(517): unsure at all n locations
ttttacgacgttatacttttcgattatgagtgcatcatgggctgatgtagctgactcagagaacacgggttctgggtcttctaatcagaattctcatccttcacgacctgcttatgttcctccacatctaaggaacaggccagcagcttctgagcctgttgctccattgccagctaatgatcgtgtaggttatggtggtccaccttctggctctcgatgggctcctnntggtagtggtgttggtgttggaggtggtggtggttatagggctgatgcangncgtcctggctctggctcctggctatggtggacgaaggaggtggtggttggaacaacaagaagcggagggtgggnccgtaggaaacgtgaaagtaaaacccttttgaaaatgatggattccgaancagaaccagcttttactgagcaggntaatacgggtnttaattttgnatgnccatgnagnanatnccnnttagaccagtggggaaaatgtgccccccccnngtaaaanattcgg

SEQ ID NO: 136602 - DNA, 539 bp, Arabidopsis thaliana columbia
  unsure (1)..(539): unsure at all n locations
taaacaaaatttgaggaaaaagcttacaaaaaaagaggatataaaggtaaaaagccaacctgaagaatatttgcagagaaaaacagagagtacaatcctcgggatcagcaacgatatggccaacgaaacgaggcaatctctcctcgttacttgtggtcattattttattacaaaatataaaagccgatttggatttccattttttaaagtgaatcaaaactttttcctcatgagaaagttagtgtaactcgtgagagagagagatatgtgtattggagccttggaggttgaaaatcagatgctactggaatctctaccaaagatgaaacgcctcatccaatctgaaaccacaagcactctcgtacgccagctcacttgcttactggcgtagcggagtaccagagccactggctgctgtggccaatagaacccaatctcctggaagttgtntgccggttggtccctccagtggngaaatgnccngntgncntacctgaagggggggaacggtgcggcttcccccncanccaatgggggtc

SEQ ID NO: 136603 - DNA, 560 bp, Arabidopsis thaliana columbia
  unsure (1)..(560): unsure at all n locations
caaacaagatatcattggctaagtttcatacagattatgaaacatatcaagtacattatatatataccacgttgcttcattttcttctacttcctactaaagaaactttttaatttccctttctcaatcctttcaagaagcttcttcgaaccaggaacctccaactccgacaacttcttcaaataaccaacagctccatgtgagaccatcagcttcttacacttcctgctcgaacacaaagccgccaaacccgaaaccgcatacttctttgccgagttacccggactcggntcaagcaacatcacaagactcggtcacacttttctcatcctctcttcacttctctgnaattcccttgggancggtaaaccaggactcggnaatagctttgaggcagnaacctctctagnnccaatcgggtttggctnccaanattntttttaaacaacgggggttnaactggttcacnggnantcncttggnccaanttgngggnggaacccgggaaaaggttgcggggccggtgntggggccggnttgaaccggggtttngaaatggg

SEQ ID NO: 136604 - DNA, 291 bp, Arabidopsis thaliana columbia
  unsure (1)..(291): unsure at all n locations
tagccacataaaatcaaactgtggcgttcacttctaataaatcaacattagttgnagataatacaagacctttttaatctanagaaattttaacttcttncatcnaacaagtcatccaagttgaaaagtaggataagtttttgcagtcgatacactacattgcagcatcactgnagtttggcaaacattcattcaaccntgctaaaaggttccctaagcccanaccancactggtcacaacgattctntnttcttagcggatatatggtaaagcnaaattgagatgcatcc

SEQ ID NO: 136605 - DNA, 540 bp, Arabidopsis thaliana columbia
  unsure (1)..(540): unsure at all n locations
tggataggaaattatttgtttaaaacccaaaatgatgattcttgaaaacaaaaatacagatacaacacaagtgaagaaaaagatgcaaaagaagtagagcaagaccaagaacaatgaagattaaaaaatttacttgggaaaaatttggctcaggaattttggaaactgtttttgacttctcgtcttcgcttggcgtcttataaggtcaaactatctggattctcaatgatctttgcaaaggtttggagaaaagcagccaagtcagctccatacacaatgcgatgatctgcagtcacattcaccagcattgtgttttttacactgaagaatccatccttatcagcaactacagttggcttttgacgctccaacagccataaatagcaccctgtcctggcggaaggaatagcgtcaatctatccactccaacatnccggggttcggtaangnaaagtccagagtgnatcntgggggtgaagtgctgntccaggttnccacaggcttccattttggggaccagnccaancacctaccgggntc

SEQ ID NO: 136606 - DNA, 529 bp, Arabidopsis thaliana columbia
  unsure (1)..(529): unsure at all n locations
taacattgataaagatgctcgtgaaggtatcagtgctgatgtttgggaagatgcttcgaatggtgctcttagtgctggcagtgagaatgaagcagctgatgtaacagagaataatggtgggaactttgaagatggatcttcggaagagaagattgaacgtttagagacgaggatcgagaaacttgaagaggagcttagagaagttgctgcactcgagatttcgctctattctgttgtgccggaccattgtagctctgctcacaagcttcatacgcctgctcggcgtatttctagaatctacatccatgcctgtaagcattttactcagggaaagcgtgctacgatcgctagaaactctgtatctggtcttgttttggttgccaaatcttgtggnatgatgttccgagggtgaccttctggtatcaacatcatagcttgagcagtaaattcccaacatttggaggcncgatcncacaaaccctgacccaatggngnggaaagngtcnggggnaacaccngntgnantntc

SEQ ID NO: 136607 - DNA, 547 bp, Arabidopsis thaliana columbia
  unsure (1)..(547): unsure at all n locations
cgcgtttgagaggatgtggcggggaattgccgtgatcgatgaatgctacctggttgatcctgccagtagtcatatgcttgtctcaaagattaagccatgcatgtgtaagtatgaacgaattcagactgtgaaactgcgaatggctcattaaatcagttatagtttgtttgatggtaactactactcggataaccgtagtaattctagagctaatacgtgcaacaaaccccgacttatggaagggacgcatttattagataaaaggtcgacgcgggctctgccgtttgctctgatgattcatgataactcgacggatcgcatggcctctgtgctggcgacgcatccattcaaatttcctgcccnaaccaactttccgatgggaagggtagtgggctaaccatggtgggaacggggtgnncggngaattaggggtccgattcccgganaggggancctgagaaacggnnaccacatccaagggagggagcagggcgcaaatttcccaatcctgacacggggnggagtgncaanaaaacaaacccggggc

SEQ ID NO: 136608 - DNA, 547 bp, Arabidopsis thaliana columbia
  unsure (1)..(547): unsure at all n locations
catatttagcaactgtttttgcatcttaccccactatacaaacaaaaaaagctgtgttgccagctttggaccacatcacttaaaacagaggactttactaaataccctatcaactaaacttatcataaagcaaagtagtgtgattagtattgcttgttatggtttagttcaaacctctggcttctttccctctccctcaaagctagtcttggcgtttcaacagacagcctttcactgaacctatccgagccatcattcgttagctgaccgctgtaatgatccgcccagaacctcccgcttcggttgcctgccctctgaacctggagttgatgcgtagtttccatccattatcatatctcccttccagtatacgcaacacctgagacatgcggtggcctcaaatgtgggatctctaacggatggacaacgnagctggaatgaagnataccaaatgncctcactttctacaaaacgggtcccaagnctnggggnggnnaagtncancancgnanattcttccagagaggggggccatnaggcaggntac

SEQ ID NO: 136609 - DNA, 534 bp, Arabidopsis thaliana columbia
  unsure (1)..(534): unsure at all n locations
aatattcaaccgttttagaattgcccacggaacactacaaggacaagaaagaacataacgaccaaaaacgaataagtccctagggtgagagcttaaagaccgtgaggaaggtttgtggttgcttctgtcattagagtctcctctgctccatggctgagataactgtaagcagacatacggtagagacaagtgaagacaaggacgtgcaatcctattgtgtagaagaaagcaaatgtccttgcgtatttgtttcctagaaggaaccgcccactgcttagcgtaatccgatctctgattcccaaatctttgatccgttgctctctttccttttttccgagaatgctgcaaaagggttgatgtcaccttcggaaattttcctggattttgattcgacatccgagctgaaccactttcaagacttccacananttttcggaccccggggnacaactttatcagggnanagcctnggcaaaangggttncccaagngtttncggtgctcntnggctncccaatcgcnggggaaacatgc

SEQ ID NO: 136610 - DNA, 532 bp, Arabidopsis thaliana columbia
  unsure (1)..(532): unsure at all n locations
ttctccatccttcttctctcggcgcgcgcttcatccccaccaccttcgaattcgtgccctttgagggaagctgctaggatgggtgtgaagcaggctctaaggagcattgatgcgtttccaagagcagaggatcatttgcttcagaagacacaatctggcgctgttggtaatggattcttttttctattcgctcttctcgttattttagaatccccctatgtgtgtttgaatatgttaacatttngaatttgttgttattgtagtatctattgttggacttcttataatggctactttgttcttacacgagctgagttattatctttaacacacttacagtgcaccagggtatgtggttaagttcgagcggaaatctgggtgcttntccggtttganccnctganctccaagccttcaaactngctaggnataggcccatncattcaagtaaaacntcttcgggttcatggggccnangaaaccngaagatggggcnanggnaataggaatccgnccannggccacgnnggng

SEQ ID NO: 136611 - DNA, 530 bp, Arabidopsis thaliana columbia
  unsure (1)..(530): unsure at all n locations
tgttatggtagacagatgtaaaaaacaaaatcccaatattttagagaaagtacaaaagcaaatcttgaaagcagtaggaaaccgatatactgtagttgtctcttgattttctcaaagatcagcaaacaccgcgaatatgtcaccattgatgtaatcgttctccaccaagcttaccaaatagtagctgttcttcacctcctcgagcaagtttctggaagggtcggcttctgggtacaagttagcccagcttcttgaccaagtctcaaatgcttcatccttccagacgttgaagctagcgggatcgacaatggttggttgaaatgatttccttagccgggaaaactccccaagtttacagcattcacatcagcttgggcagtggttcgatacccactgtctccctttggtcacagccatggaagtaatcgntggcaaagctttggatttctccaccaactggatctaatttcncctttggggagnngnactctaggtaagccttttgggatcatntccaaagggcnnccggc

SEQ ID NO: 136612 - DNA, 437 bp, Arabidopsis thaliana columbia
  unsure (1)..(437): unsure at all n locations
cagttagatacatcaaaataagccatggatcatcaaaccacaacgcacattagaaaggattaacaaaccatacatttaaaaagaagaagcagaatctcagtttccagattcttgaaatctcttttgcaaaggcatagaaccttgttggcctgcctcacttcctcccgaacccgtaattcccatttnattcccaatggnggnagccaaagtgactgtgtagagtcttgaaacagattctgnagacttttgnggtcacttcttccggcggaaccagngnttccaagaagtaacagctcctcttcaggtttctccggaaatccctccttcggcttttctccgganaatgcttcancctggtttcgnaagctggcttccngagctcgggnttcntttaaancccccgaaaactttttctccaaccnccnccgngttggggg

SEQ ID NO: 136613 - DNA, 522 bp, Arabidopsis thaliana columbia
  unsure (1)..(522): unsure at all n locations
tcctgtgtctcttgattctattggtattgccgagagtgatcatcccgggaatggaaggtatactagtgttagtcctatcacctccgttggatgcttggaagccaatcagcttatacaagatgttcattccgcagagcaatgtaatgacttcacagagagcttttatgtccctgtgtacgccatgcttccagttggcattatagacaactttggccagttggttgatcctgaaggtgtaagacaagaattaagttacatgaagtcattaaatgtcgatggagtagtaatagaattgttggtggggaatagttgaaagggatggaacccnccagnaaatatggtatgggctgggctantaagggagctcttttaanccttatcnagaggncttcaaaccttaaggccaacaggggggtgatggcatttccatgnagnntgggnggggaatgccccctggggaatgtgnntgnattncggttgnccnaaggtggggggtttaanatttgggaaaagccaanccng

SEQ ID NO: 136614 - DNA, 535 bp, Arabidopsis thaliana columbia
  unsure (1)..(535): unsure at all n locations
tgagcagccaaaatgtcataacacaacaaaatggacaataagattattaaaacgaagcatagcttctttaacaaaagacaaacagacaagagaaaggtcgacaatttcttcaccatcatcctcataacttattgttgtaccagtacacacctttcttgtcaccttccctgtccggttctacatagatacactcctttgcctccctatacatcgctacataccacggtgttccatcgaactggtaatagtctcccagaattggctttatcgcctttgtagcttccattgcgttataatgcggcattgtcgagaacaggtgatgagccacggtgtgtgtctgtaatgttgtggacaccttnttcaaagatncgtagtctctgtntanggtaggccaaaggtccccttgggcagtcccacttttattgantngtantaggcaacggggggttagtttcctcaagnaaggntnaaggcgggggacgattanttttanaaggggnctnntnggggagtnatngggcatccntntnagagg

SEQ ID NO: 136615 - DNA, 545 bp, Arabidopsis thaliana columbia
  unsure (1)..(545): unsure at all n locations
ctggagattgagaaaatgattaacaagcaaccgttggacatccgttgtgttggaatttggggtatgcctggcataggcaagactacacttgctaaagcagtctttgaccaaatgtctggtgagtttgatgctcattgctttattgaagactacaccaaagctattcaagagaagggtgtttattgtttgctggaggaacagtttttgaaagaaaatgctggtgctagtggtaccgttacgaaattgagcttgcttagggatagattaaacaataagagggttcttgttgttcttgatgatgtccgcagtcctctggttgtggagtcttttncttggagggntttacttggtttggncccaaaagtctaantcatcataacctccaaaggttaaatccggtgtttcgcctttttcggggcaatcaaatntnncggggtcagggtttaaaattnggaaaggntnttaacnctccnctttgtggcggntntagcggtatggcaggnagatttcncggggttaattaatgnttaanatnnaatgccncc

SEQ ID NO: 136616 - DNA, 465 bp, Arabidopsis thaliana columbia
  unsure (1)..(465): unsure at all n locations
tctgaacatgtgcatacctggtggacccaagtttgaacctttgtaccgtgatatggagaaaggggatgaggactggaatgagtttaatgacatcaacaagctcattattcgttcccctctgcgtactgagtacagaatagcttttccccatctctacaataatcggcccaggaaagtaaaactctgtgtgtatcacagtcctatgatcatgtatataaagaccgaggatcccgatcttcctgcattttattatgatccgttgattcacccaataagcaacaccaacanggaaaaacgtgaaaaggaagggtttatgatgattgnggatgacttcggcttaccagaaggtgtngganctttnctaagngntacccactctacactgncaattacagctgctnganatnantggttgtttgcccacggcctttcaanntgaggncttggnggncgngcccgcaaaag

SEQ ID NO: 136617 - DNA, 430 bp, Arabidopsis thaliana columbia
  unsure (1)..(430): unsure at all n locations
ttttcaattgcttaataaacttaagaaaacacatttctacgcaatgtatttagtagcaccaaacagacacaatacatagatagatatagatattgataacatagctgcatctcgctcttctccgtcttcttctcatcccaaccattgtttttctcgaaaccagattctctcaagtctgattcgaattagttcctccatgtnctcaatctttgtatgtgcattagacttcatcgaaaatggctgatgacaagagcctctgaacaaactctgatttgtgcctccncttcttncccgatctttttaacgggncccggtgagatggaacactttgntctnttggnggnttatcnggtttntncctcggganacggntttttggntttggggttggncaaggggggaaaaaaaaaatttcttgggccncttgggt

SEQ ID NO: 136618 - DNA, 532 bp, Arabidopsis thaliana columbia
  unsure (1)..(532): unsure at all n locations
caataaacaaaggntgctggagntgaaaaagnttganatcagggttcgnggccngcgtcatntnctctttccgatcnggttttatctccctccgtttcatctacttctccgtcgtctcttctcgctcgtagatcttttggtaccatttcccctgctttccgtcgctggagccattcctttcactcgaaaccatctccgtttcgcttcacctctcagatcagagctgtttctccagtcttagatcgtctccagagaaccttctcttccatggcgtcagagcatccgtttaaagggatcttcactacacttcctaagcctgggtggtggtgaattcggaaagttctatagcttacctgctcttaacggtccacggggttgataaaaatttcctnanctctattaaggnattntgcttgaaanctncggattcggnaattngtgggtaactttcaaaaggnacctaagggaagatttttnggaggttnattgccttgggaaaggcaatntcctaaacaaggtgggggttcccttt

SEQ ID NO: 136619 - DNA, 552 bp, Arabidopsis thaliana columbia
  unsure (1)..(552): unsure at all n locations
ctcgttttgttgatttcttctgggtgaagatgtcaggtctcgaagatatcaagaacgagaccgttgatctggaaaaaattccgattgaggaagttttccagcagctaaaatgtacaagggaaggattgacaacgcaggaaggggaagacaggattgtnatatttggccccaacaagctcgaagagaagaaggaaagcaaaattctgaagtttctggggttcatgtggaatccgctttcatgggttatggaagctgcagctctcatggccattgctttggctaatggtgataatcgacctccggattggcaagattttntgggtattatctgtctgcttgttatcaacctccacaatcagtttcattgaaggaaacaacgccggaaatgctgcagnttctctcatggctngtcttgctcctaaaaccaaggttttagggttggaaatggggttacaagnggctnntttccttnccnggggtatttttgnctaaacttggggaatttccnnccnttccgttttttnaagggggccctttaaggttncagctttc

SEQ ID NO: 136620 - DNA, 539 bp, Arabidopsis thaliana columbia
  unsure (1)..(539): unsure at all n locations
taaaaagttggttttgcatagaaaccattggtaagattaataaatggcagcttctttacagcatccatttatagaagaagaaaataaaagttaaatctatttataagatcccaatgaaatatacaaatgggataatatggttgataccttcaaattaatctaagccaaaaatggtgttgtcaatggaagaagcttgatccttggatctgctgtagagatggagcgtctcggtgtggttagggtccaancagagagcagcttcacagtcttgagtggccantgacagattcccagtggctcgtgaaatgctgctctgagatgcagcgttttcaagttcctggtctgaaaagctatcgcctttgacagctcttcccacttgcttctgtctctctctgntcatncatcaggcaccggaagntnnggtatctgttngggnnnaggtncgcangaggggtcggngttgtttttggccantgncaaannatctttnttttgggtttttttaccggtccacaaggaacttnagnccgggtttattt

SEQ ID NO: 136621 - DNA, 468 bp, Arabidopsis thaliana columbia
  unsure (1)..(468): unsure at all n locations
cttttttttttttttgaaaaacaagattcaagtaaatnatactggaaggagaagaaaggttaatacatctgagtacttactgagagaatgtgagtgaacatgataaaatacattatatgtttatcaacgaactaagctaaacccaatgagagcttttcaatgctctgtcaaaaagttgagccgcaagagccaacattgccttagagacaactcgatattcgatgtttttttggctgtagcagtatcatctttttcgtgtcagtcgatcaacatcttctgtngtttgataagatgcaagcaaatacgtntaacacaacgggttttcaggttcttggtgtatcttcaaagttcccaaaagnaatcaatccctgnggagnatgnattccccggttctncctccttcttccntnctnntttccttcctttttncntcgggcattcatagtcangcaaggngtnaaaggnttg

SEQ ID NO: 136622 - DNA, 436 bp, Arabidopsis thaliana columbia
  unsure (1)..(436): unsure at all n locations
ttgtaatcctccctttaatttgaacatttatttgttttgtattacatgctgacatttttcagataaatagaacaaaacaattgaatatgacctacttatacagccaatttaaaagggtttactcctatacaaactaaacccctctaataaagaatcgaactaacaaatactattatactacaanaagaatggatatcaaattataagaaagcttcttacttaatctncttcaaacctaactaactccttcctggttttgattaaaccccttgtgcttgttcacatttgtncttctttgactgncacaaacggcgtcatagcttttggagncacaacccttgtcaccagaagnttncacttggngtctcacccatttnntngtctttgtnctccccgtttcntaanttgnctaggncccaaaaaaaggggtnaaagg

SEQ ID NO: 136623 - DNA, 488 bp, Arabidopsis thaliana columbia
  unsure (1)..(488): unsure at all n locations
ttacgctcttcttcacctagctaccaatatatgaacgagcaggatcaagaatcgagaaattgatttgagctggcgaataagcagtggtgggatagggaattagtagatgcggcggcgatggaaggcggttacgagcaaggcggtggagcttctagatacttccataacctctttagaccggagattcaccaccaacagcttcaaccgcaggcgggatcaatcttatcgaccagcatcatcatcagcaccagcaacatcaacaacaacaacaaccgtcggatgattcaagagaatctgaccattcaaacaaagatcatcatcaacagggtcgacccggattcagacccggatacatcaagctcagnaccggggnaaacgtccacgtggggngtccaccaggnttttngancaaagccaagccncggtntntggaacncgggnancccccaaggggttanntcccncgttctttgnanatnncctggggg

SEQ ID NO: 136624 - DNA, 512 bp, Arabidopsis thaliana columbia
  unsure (1)..(512): unsure at all n locations
tcggattttgcttgtttcgatgtgttagtcaatcgatctgtgttcctttttagtcagcgttcttgatttgagctcattgaagattgtgcattttgacttcatagtagctagttttacttttcttcagctgaaattttcaaccttttttgtagtgaagattgatctcttgagctgtttttgattagtagcagtaaaccttcgaacccnaaagaagaaattagggtaaataacagaaattttctagtaataaccctttgaacccnaaagaagtaaccttcatagtttgggtgttaaatttaacacttttgacttcacaaagtacttgtgtatctccgagtttttttncttccttttcctgacagttttgggggatncggtaagataanatgatcctgggccatccggaatgatccgaacccttccntngggtaaggccntnggttggncccaccgaaagggcngnccaggngggccnatgancttgggttgaaagnccaagcccaaaggggnga

SEQ ID NO: 136625 - DNA, 508 bp, Arabidopsis thaliana columbia
  unsure (1)..(508): unsure at all n locations
gaatttcgatactcattgtttggattcgttgatttgatcaggtgatagtctgacttacaatggctccagttccggatccgaacagtgttggcggtggtgcgaacgggacgaagctacgacgaagattccttctaaggattccaagaagaaagatgataaaaaggaagaggatctgtctgaagaggacttgcaactaaagcagaatctggagctctatgttgagagagttcaggaccccaatcctgagttacagaagattgctcttgaaagcatgaggaaggaaattcgtgactcaacaagctccatgacatcagttccaaaacccctcaagtttctccggcccccattatgggagtccttaaagnatttccatgcaaaatgggcagagccggtcnccaaaaaatgttggcggaaaanctttctggcctggnactgaccatnnttnctnaaggngaanggnancttaacnatagggggatggnccnnnggggnccggangnggggcccc

SEQ ID NO: 136626 - DNA, 531 bp, Arabidopsis thaliana columbia
  unsure (1)..(531): unsure at all n locations
ttcatctcgtaaacctcaagaccctccgtcttcttcttcttcatcgccaccgcgtaaaccttccggcgatggatcatcaagcaaaacatctttatcaaccgttgattcccaagcccgtctcgctatgtacatagcaatggctcacgctggtctcgctttcgccatttgtgttctgtatttcgtcggaaagctattacaagagtatctaagaccgattcaatgggcgattctctgttcgattcctttacgaggtattcaagaaacccttgttgatttctggagcgagcctttgaaattagggcttacggaagttgttctcgctggttcctggtttctggcttcaatggtttcatcgggccgattgtgggtattaaaaaggctgcttaagggtttcctaagggatcgaaccaagagaacggggaagaagaacgaaactggggttccaaacggggnaaangggagcccctttgggggcttggcanngctnagaaggattgggggatggggcctgcaancccctnagggttggtg

SEQ ID NO: 136627 - DNA, 534 bp, Arabidopsis thaliana columbia
  unsure (1)..(534): unsure at all n locations
tttacatagcatatcataaaacacaaataagtaaaaaagaaaagtggggaaaacttccccaaaaataagaaaatcactgtagtagttgtcacataatataaacctgtcaaacaaattacacccaatagaaatataaagcacacaaatcttctctatttcttctttttgccttgaaagggaattttgtgtttttttaactcaagatccccagttgtatctctcagccttgtctcgatggcttttgagactcaatcatttctgtgtgttaatgcgttcaactgattctccaactgcccatttttctgcttctgtttctttagttcttctgttaggctggaaaaagctttgttgtagtagcatgnccttgagactgaaggtctctctctcgtgagggtgcaggaggcgtntgcaatagggcatcgacgtcggctcaggnggtccagggtgcttggagagggttgcccaagaattggttagccccaaacnntccggtgnaaagatttggngaaaacgctnattgtgggggggtgggga

SEQ ID NO: 136628 - DNA, 434 bp, Arabidopsis thaliana columbia
  unsure (1)..(434): unsure at all n locations
ccgaaaatggataaggtctgaaaattagctatacagaaatgctaaatgtgaaaaagggcttagctacaactagtcctattacctacaaaataaacgccttggagctttgaagaagtgtcttattcagaagtttcatcagctttaaactccataagcttcctattcaagtgtggagagcaacgggttcttgagttagtagtcatcgaggncaaaacgatactcggcttcttcttcttcttatgtgtaagatcatctaccataaaactccctaattcatgaatttcctgcagttgggggggtttacatagacacggnaccctggaattccatccagggtccatcctggatcnaaccaagtaatcggatgttaacnccncgcnggagncanagggggcttgngatncnganaaccgnatttnggaancccnaaancc

SEQ ID NO: 136629 - DNA, 467 bp, Arabidopsis thaliana columbia
  unsure (1)..(467): unsure at all n locations
tggcaatctaaatattgccaaaacaaaaaatttgtttcggattggccctaactacaacatctgctcaaagaaggaagataacatcaaaatgtggttacaagccctatgcctacttctgcgagttcgtcccatacaggcaggagtgtcaaaaccactaggattagtgcaatccctacaagggccttcctccaagttccaacctcggtcacgtcgtttagacacantttttcaggtgttctatgtccaaaacatactgcttagaaacatcttttaaagctgactcgtatttttgaagtagcagagtttngaaaattttgtgtacccggcagattagtacgtagagtncccanggaagtgcnaaagggccancggncactctggggtccaagnattcattnggtgncaancnaatgntaccagtgaatttttccaaatgngcctgnaaggncttnctccatcnaaaattc

SEQ ID NO: 136630 - DNA, 501 bp, Arabidopsis thaliana columbia
  unsure (1)..(501): unsure at all n locations
cgtttattggaatggacggtgttttaaataaaagatagaaaaaagtaggagaaacagagaacaaatgtgctgtttttggtgtgagtagcaccaacaaaaacaaaatagggtaaaatgaatagacaaaaatcggggacatgtcaaaagggtcgtcgtcgtcctcaaggcaggcataggcatgtgcatgaatgcaacacaaaaccaaaaaacacaaatcctcacacgttacaggtagccacaaaccacacaacttactaagcaattttatattcatctgtttccacatgtccccaacagtatggacacctttccccggctgctaccttactcaccagctttctcacncttggtctctggttcggnttcagggtttggntcaggnatagcatcaggtcggatccagtcagctttnggggtgatcagntccnatgagactggggttatcaggncagtcagtgtgggnagtcaggtcggtcagcatgggttgtccgttttgggatc

SEQ ID NO: 136631 - DNA, 515 bp, Arabidopsis thaliana columbia
  unsure (1)..(515): unsure at all n locations
cattttggcaactttcgtatcacatattctaatacaactatacaccaaaactgacggctccaaacgcaaaaagaaaaaagaaaaacaaacaaaaaatgtggagtagccgcgtagtgaatcatgagccatatgatcccagtccatgtcactttaaaaacaagttaacttcttttctaccaccaaaagtttgcataatctttaagagccaaagagtctttaccattaaggacctccacactaacacctgaaacagaacagttatatcgaggaagatctcacagcctttgtgtaaatgtaagagatcgaatttaatggaattggagcaggtaccagtttatagaggcaaggcncaaagtctgcaattcagcattatgtgaancggggatattctccccggttcaagaattcactaactcttggatcnggttccccggttgctctgnnaaagtctgtgnattgcacgnctcccttgagactggagcancaaatccatccggtggaaatnaanctncnnc

SEQ ID NO: 136632 - DNA, 487 bp, Arabidopsis thaliana columbia
  unsure (1)..(487): unsure at all n locations
aatggaaacaagtaagaaactgttcaatattcaaatcggaagggtgaagaagagagttgaagattgtatttactattgctaacgaacaaacacattacaattttatcataatatttcaagatcctttaagtatgattctcctaatcgcatgttcacatttaccaagtgatttgaaacaaggnagtctgcggccaatgtgattttggtcagtctatttgttcttctccatgacgcagtatgatttaggncaagaaaacttaagacnagactcatactacgcttttaatccctgcattcttgtcgaattcctctgaagggaccacgtccggaataatcttttcctgaccgnggccaaagaatcctgncaatgnntccaaatccttagctttngggganccatggaanatggcctcccatacggtagcaaaggcncncggattccagangcttgaaggagtcccaggatccgattgaaagcccctngngc

SEQ ID NO: 136633 - DNA, 477 bp, Arabidopsis thaliana columbia
  unsure (1)..(477): unsure at all n locations
tcaggtctggtgctgtgatgggtttccttcttgcagcgagtggtctattggtgctttacattactatcaatgtgttcaagatctattacggagatgactgggaaggtctttttgaggctattactggttatggtcttggtgggtcttccatggctctctttggccgtgttggtggtgggatctacactaaggctgctgatgtcggcgctgaccttgtcggtaaaattgagaggaatattccagaggatgatccaagaaacccagctgtcattgctgataatgtccggtgacaatgttggtgacattgctggtatgggatctgatcncctttnggatcaaatgctgaagcatcatgcgctgcncctggtggtgccccgatcnaaccttcggaatcaccacgattcactgcangggcaaccattgncacagtcaatgggacctggttgttaannaacccttgcacgatcttgaanaant

SEQ ID NO: 136634 - DNA, 530 bp, Arabidopsis thaliana columbia
  unsure (1)..(530): unsure at all n locations
cttttaagataacactcttatttgtgaatttcttgtagaaacccttatatcgaaaaaatttcaaacgcataatctaatttgttaccaatatataaatgaaggacatgacagtatctctctacctcagacgaagcaatgaacccaacaacaagctcatcatttgctatctaacctgaccatctcgagacagtgcagagcatcattcatggcataccccaaaactacgttatttcaatgttcacacaaaaatctatgcaagtgctctgatttctctccagttttagtcagtcaacagctttgattaagtttcagtctcgtcggctcttcttctcccggcttgactctttttgttcttcgtctgagcatancgtgaagaagaagacttcntgggcctgcggatggctttgagnggttcctgggggtanttccctcccnctagaagatccccccggtggnccaanactgnncctgggnaccccgcgggggagcccgggtanangcccnggaacggtcaagcnacccccnaaant

SEQ ID NO: 136635 - DNA, 527 bp, Arabidopsis thaliana columbia
  unsure (1)..(527): unsure at all n locations
cattgaaaagaagaagtttaggttccttgatctctagaatgcaagtagtgcgtttacataatccatcaaaaactgcttaattaaactaatcttgatattcgagtaaaacgatgttctgctttaaactaaagaggtaaacacaaaggagaaacatcagaagtgaaatctacagttcgtccttggtgttctcttcttgttgctcaacgggttcggcttcaatgtttagaccaccagccaagtcatctgatttcgtctcagttgcctcacnggtctctggttcctctgctgcctcgatttcctcgtcggctactgcatcagggctgatgttcagaccgctcttgactgagttataaatacgggcagcaaagtcttttggggcggtgagtatgaatccactctcgatcaaagctggctggacatgagctgtgctgtttcctcaaactctcatccncggggcacttnaatccancctgagtcttgatgaaaggggcgtgggtaanccngganccttccgnnatgaanttggc

SEQ ID NO: 136636 - DNA, 526 bp, Arabidopsis thaliana columbia
  unsure (1)..(526): unsure at all n locations
ttcttcctctagacatgaatctcaaccaattcctcttctcacccatggccatacggtttctggagagattcgcacgcctgatacacaatctgtgcgaactacatcaggtcctttgggtccttctgacaggaatgctatttcatctccatatattgatccacggcaacctgtccctgtaagaatcgtggacccgtcaaaagacttgaactcttatgggcttggtaatgttgactggaaagaaagagttgaaggctggaagctgaagcaggagaaaaatatgttacagatgactggtaaataccatgaaggganaggaggagaaattgaagggactggttccaatggcgnagaactccaaatggctgatgatacacgtcttcctatgagtcgtgtggtgcctatcccatcttctcggntaacccctatcngggttgtgatattctccggntaacacctggggttctcttgaanatggaaaccccccggaaaatgaaaccctgggggncccggattggaaacggttngc

SEQ ID NO: 136637 - DNA, 330 bp, Arabidopsis thaliana columbia
  unsure (1)..(330): unsure at all n locations
cgtttgngacatctgatccaataccaaaacagaaagagagtgtatcatagagaagaaagatcaacactcttttcaatattttaacccaaagaatgcatccattgagagagagagaggaccaatacaagaaaacaaacatgtcaactcaacaacatttacacgcccccaaaatcatctcatcaacaactggagactcggacaaaatagaaagcttttggaaaagcagagctggaaagagnagatcaaaagttattgaccattacctcgggggncaatngggggntggggttgggttcaanaggggccctnnantnncgcgggtggaanana

SEQ ID NO: 136638 - DNA, 507 bp, Arabidopsis thaliana columbia
  unsure (1)..(507): unsure at all n locations
ttaaaccatatttctccgatcaaacatggcgtccgtatctccatctccgtcgtgttccactatacccataccacttcgacgaacatctttcgccgttgctgagttgagacgattaaaacaaagaagagcgatcccacctgtgtccgtcggtctcggacacttcgctgatgttgtacgcaatgacgttgatttcctgaagaacaaaatcggtatcggactccgttgggctaacgaggcttttcgtgtaccggaagtgactaaatccgctgaggaactnttttggcttaggcatcttgagggntcatacttctcagaatttgaagtcacaatcttggcctcagccttcctactcagggtcactggggtggatttttcatggctgatgtaaaagccttggngncaaaatgntgggtactttttanagcctttctaagatgtggcaaanncncttncntgaaggttattnttnaaaactgttcaagnttnnttaatttaaggccncttttt

SEQ ID NO: 136639 - DNA, 539 bp, Arabidopsis thaliana columbia
  unsure (1)..(539): unsure at all n locations
gctggtttngntaangtttgatatcngntttcgcggccacgtgcatgtgacttcatctccattggaggaatctagttccggggaaaagggagagactgaaggggacagtacttgtttaaaaccagagcaacacttggcttcttcgccgcactcatatcctgagtcaactgaagttcacagcaatagtggctcccctggggtaactagtagagaacacaaaccagttcaaagtgctaatggaggacatgatgttcagagtcctcaaccaaataaggagcttgagaagcagcaaagcagcagagtacatgtagatccagaagattacagaaaatttcacatgtgggaacagaacctgaggtagtaagttctgtttcaccaaccagagtctagaagtaatcctgcggnanttaccacctgctcgtccagcaggtcttnggtcggcttntccnctttttggaccttcataacgggttcttnaacaggttnggggnaantgggattggtttnnaatnagttttngangnttgaggctntccctt

SEQ ID NO: 136640 - DNA, 505 bp, Arabidopsis thaliana columbia
  unsure (1)..(505): unsure at all n locations
tcctgaatctcctgcagctagctattccagtggattgaagatctctgtcagagttttgtctctagcttttcagtctggcttagttgaaccattttttggctcgattgcattgtacaatcaagagaggaaggagaaactctctgaggattttaatttccagattcagccgacggaaatgcaggatgctaaactttcatctgaaaatcgtggagtatttnatctagatgccccatcagcatcagtttgcctgcttattcaattagaaaaaacagcaactgaggaaggaggcgttacatcatctgtctattcccgtaaagagccctgtgcacttaactgagagggaaagcaaagtncagggctggtctcgcattatgccctaccgngggntttttnttngggcagttgttccnttttttggtaatanntnncccaaanacttggggatctggttcccctagcagccccttntnccaggaatnnctgcgcaagtccnngntggggngtc

SEQ ID NO: 136641 - DNA, 496 bp, Arabidopsis thaliana columbia
  unsure (1)..(496): unsure at all n locations
gnattcgggtactgctgctggtgggtcaaactccgacccgtttcctgcgaatcttcgagttcttgtcgttgatgatgatccaacttgtctcatgatcttagagaggatgcttatnacttgtctctacagagtaactaaatgtaacanagcagagagcgcattgtctctgcttcggaagaacaagaatggttttaatattgtnattagtgatgttcatatgcctganatggatggtttcaagctccttgaacacgttggtttagagatggatttacctgtnatcatgatgtctgcggatgattcgaagagcgttgttgttgaaaggagtgactcacggtgcagttgattacctcatcaaaccggtacgtatttaggcttttaaggatatattggnaacatgtggtccggaagaancgtancgngtggatttttnaaacnttctgggggaggttnaagtacttcggtnnaggccagancncancttngggggttcttg

SEQ ID NO: 136642 - DNA, 461 bp, Arabidopsis thaliana columbia
  unsure (1)..(461): unsure at all n locations
tttctctcacgcacctctttgaagattcttcttctcttaccttttggattcgtctcttcttcttgattttnagtttgattctaattttggatccagagggtttatttatgtgaatnattccgattttggggaacttgttcgtctgaaatgttttgttgaaccggttgcgtcatcggtgcgtcttttcatggtcgttaagagtttcatgattgcatcggtgttgaaagggtaactgcaatgaactctgtatctgtcacccttgcatttcatgtaacttcagactgttctgccgtaaaccaatgtcggntaaatgttaagtgtttggtttcntgtatgcgggtcagtaaagcaagcaatgcacggagttgtggatncctgtnactgaaacanaattnctnggttttanttaattggnctgtagnganagngtaggcagaattgtnatttcnaagnttttgnag

SEQ ID NO: 136643 - DNA, 527 bp, Arabidopsis thaliana columbia
  unsure (1)..(527): unsure at all n locations
cggacggaaaatggggatgtgttcggtcataagaggacagatgttcattgagttggggtagtacaaaagtatctaaaaacactgattctaccatcctgagttgttcctgatttcagatgttgcctcctgaatctncttcttgatggaactgaaactattctggcttgctgtgctccagtgagtggatgtgcttctcacgatttcggataaagcaggcagattcaatgttacatcttcatattctgttgacatagggaagctcgtactggcgctttaagaatttggaggcgttacgatctttctttgtggcaaagaacctctaacaagaggtttttgcaatcctccaagcgccgctgctctgaactcaacccccatgttgatgagctcgctcgcagtcattagcatctgaattagcatatcgctctcgaggggtccaagcgnggnnctntttggctnttntgntcttnctaacaagngancgggagnccncccttggaattaggcntttnaaaactnggctttcccag

SEQ ID NO: 136644 - DNA, 447 bp, Arabidopsis thaliana columbia
  unsure (1)..(447): unsure at all n locations
tttcacaagcgcagttgcaacgtactcatggtcatcaccaagcacaggagccaataaggattcaccatccagaggaagaagggcatcatgaaaaaggaccatcaaaagttctgaagaaagtgaaggaaaaagcaaagaagatcaagaatgttcttactaaacatggacatggtcatgagcacgatcgtggagaacacatccctgacgatcacgatctagaccaagaagacgatgaagatgactacaacgncaaccaactncacggcggtgcaccagcacgaggaaaagctcatattcccggtgaaggagggngntagtcccttccngggttcgaaaagntttttccnagtttgtttccnnttttaanattcaaaacccttttgggccntttagnggggtttngccccggggnganttttttggcccctttaaaaanntcccgggttt

SEQ ID NO: 136645 - DNA, 483 bp, Arabidopsis thaliana columbia
  unsure (1)..(483): unsure at all n locations
gatatgtgctttatttaatgggagaaggaatgacggagggcaggctgagtatacctgcccatattgctttatagcagaagtggagcaaagtaagaggaagcctttacctcagagtgctgttcttggagctaaagacttaccgcgaacaattctcagtgaccatatagagcagcggttgtttaagaggctgaagcaggaaagaacagagagagccagggctcaaggaaaaagttatgatgngattcccactgccgagtcccttgtgattagagttgtttcatctnttgacaagaagctggaagtcaaacctcgatttcttgaaatntttcgggggggtagttacccnncagaatttgatacaagtccanggtagtctngttgttcaaaangttttaggcgtagaagatcntatttgggtttcgccaaaattggtntnaatggattcccattaagcgggttttcccgatttggtnttcagactga

SEQ ID NO: 136646 - DNA, 425 bp, Arabidopsis thaliana columbia
  unsure (1)..(425): unsure at all n locations
taataatacaacagttttcacttttcaccacaaatcctacagatgatagtttgcgtaatccaaaatttcatgtcaataagatttatctttagttgatcactcctgctcaatccaatccttgaacagcaacatcatgtaaatgggaacgtttaacgccgcaatgacgatgaccatcatgattgtacgtatcactctctggatcacaagttttgtncttgattttaatgctgatctcatcagaggatcagacccaccagcacttgcatttacatctgagtccatcacaagctnaatcttgttcgctaggcggttctttctagcccgtgatctnatnaccgngttaaccntttntttccaggaggtttatcggttttnacggtttnaaaggggttttnaagggnttttttnncaagntgnatngancc

SEQ ID NO: 136647 - DNA, 404 bp, Arabidopsis thaliana columbia
  unsure (1)..(404): unsure at all n locations
cttttaaaaagcacccccaactccgaaaaaaattgtcatcccttttttnagttgttctgttccgtctgcttctttcttcatcagactcttttaaagtcatttcgtctcgccagcacaagctataaccggaacttcccaaccattcagagtctttnatgctaaacaaaatagttttaaagatctttcactcacccgcctgtngcttctgatccacgggtttgacctgaaccgcagaggaaacagcgtgaacattagtgaaccctggnggcccaagctgatgttgttgagttttacccatancaccanctccttttcaatgtattngcttcagnttgcagnccggttatggctttttggttgggatctgaagttggcggtganagnttcccnganantngnaacag

SEQ ID NO: 136648 - DNA, 430 bp, Arabidopsis thaliana columbia
  unsure (1)..(430): unsure at all n locations
gaanaaatcgaaggataatctgtttcttccagcacaagttaacttgcaagagagagctcaaagatggaaccaacagaaaaaccatcgaccaaaccatcttctcggactctacctagagacactcgtggctctctcgaagtattcaacccgtcaactcagctgacccgacccgataacccggtgttccgtcctgaaccaccagcgtggcaaaacttgagtgatccacgtggcaccagtcctcaaccccgaccacaacaaggaccagcttcatccaaccctgttcggtctgatcaaggaatcgntgttanggcctcatggatggttttgaagncccatnaacggggggaatttttccangagggggtttanngccgggnaaacccaaaaaattnggggnttggggntttntncaaaanngggnaaatttggg

SEQ ID NO: 136649 - DNA, 374 bp, Arabidopsis thaliana columbia
  unsure (1)..(374): unsure at all n locations
ggagcccaccaccgggaccgagaagcttcaccagccaatagaagttgaagaagatgacgnacaaattgttgatttggagaggaaaacattccgtcatggaaagggacacgatactagtgtggacagtagtacaatcaccaacaccagctcgtcgtcgtcttntagcttttccggtgatggtgggacggaagagaccccgattttcacagcaacggcgattggggaccataccngttttnggtaaattttgaggtncccgagctaggaaactnnaaatncgtattttcacccaaggggnatttncggcggggaggaantttcaattcggtctttttnggccnggggnaccaaagtttttttaggtcaaactttgg

SEQ ID NO: 136650 - DNA, 486 bp, Arabidopsis thaliana columbia
  unsure (1)..(486): unsure at all n locations
gcgttnccttgctctccagggattccgatcacaatccgttgtacaatgagaagagagaacgagctactggttcagataaggaaagggtgaatctcagggctgtcaacaagtcaaatattcatgatgaatccaattcttcaagtccgacttcaaacctaaaaataagtgcttcagttcgtggtccaagatcgggatcagggctgccgccgaaactttctccggttgtccataacactccctctccaagtgattgggatattgctggctgtacaaacaaaacctccattgttgtctgggggttcccaatcgcaagcgtattgccatcggatcggtctttcaatcaccacctgtaaactcaatgggccagtcaaaggccncaaaaggttttccgtngttgcaaggngnacgnactttggccccattgttttnggnaatnttggnaattccggnantnggttnanaatnnaaaatttttggtttnggnaa

SEQ ID NO: 136651 - DNA, 516 bp, Arabidopsis thaliana columbia
  unsure (1)..(516): unsure at all n locations
tttgttcatcagtttactttatggacgaggtcctcatgtagatttgactttgtttcaaagcggaggaagaaggagaaggcaacactaaaagatcaaaaccttagatctttgcttacgctttcgcctggttaggaacggtttttcagaaacaaaagattccattttnagattcaattcccttctggtttgaaaaatgatatcaaaatggtgaatagaagtgatttggtggtgattggcatctcggttgggcttgcacttggtctcttgctcgctctgcttttgttcttcgccataaaatggtactatggccgctctcacctcaggcgatgcgctaatgaacagaattcccgactctacctgttcacactgctaaaagagggtgtagtaatccctgatgtagggcaaacacagnatcgtaacagccccttngnattgggcccactnanataagcctggtggncaaccccaccaaggtntactgntntgatncggatacctggttnactcaagggntgc

SEQ ID NO: 136652 - DNA, 431 bp, Arabidopsis thaliana columbia
  unsure (1)..(431): unsure at all n locations
tgcttaataacaaggngtttcacagtagacgcgaaaagcagaacgctaaactgttcactagtcaatgataaataataacaaagaaaacgcaaaacgctaaaccgccgaaacacaacaaacccgatnctttttntttttggttccagcagaagtcaatacccgancctctttacctttnctttctcaagcctctttttttcggcccnccgctaacaaacgcggaaatgagattaaacgcaaaaaggtgcgttcttgacttcctttggngaatctcaaaagncttnaaaaaacaaaaagncccacaaaacatttntccattaaaccttccctaaaaccttccncttttcaactntttaaccttttccggaaacatnngatttaggcttccgtcggagggccagagtgggcttttaatccngttcggnaggtgc

SEQ ID NO: 136653 - DNA, 465 bp, Arabidopsis thaliana columbia
  unsure (1)..(465): unsure at all n locations
ttcagctccaagaagggatagtgtagtccccacaacagagctcgtaagtnatatggaaaagctacttccgggtacccatctaaagcctttnagagacattttgaaaatgcctgctatgattttggatgagaaagagagggtgatgtcgaggtttatttctagcaatggactgattgaagatccatgtgacgttgngaaggaaagaacaatgattaatccttggacctcagaggagaaagaaatctttctgaatttgctagcaatgcatgggtaggatttcaagangattgcttcatctcttacccaaaaggcaacttgcggcctntattgatnnctctncaaaaacccccaaggtttgnttgttttggggaaaataaagntgcagcgtnctttatggtaagganggggatgcncccctccattttggctccccggaaaagttgnaccgtnagnnggggctccncc

SEQ ID NO: 136654 - DNA, 535 bp, Arabidopsis thaliana columbia
  unsure (1)..(535): unsure at all n locations
agagattaggaaaatctcattcattatgttaaaaatcccttttggggattatatttatcagagaaaaagattcgaattgagtgtcttcatgatttgggcaaagctaatctgatcttgcggagacaacaacaaaaattgtctgttttttttaccaattcgtaacggaaagtgttcaaagttccaatctttggatcctccgagcaaaatctctatcttttcaatggcggatcatcaagaagacgaagatttgaaattggctcttaagatgagtatgcaatacaatcctcctgagccaaaacggngcaaacccattgaagaagaagaaactggatccggatctcaatctggtggtggatcaccggaggcgaaatctcgtcgggtgcagagagagcttatggntgctgctgctgagaagngtatgggtttggttcctaagagcccttcnctggtaacaagcaggggtttgncnataagngtgtgggggggaaggtnnggagtgtggncctgntngggagngtgcttggaagccncaggc

SEQ ID NO: 136655 - DNA, 542 bp, Arabidopsis thaliana columbia
  unsure (1)..(542): unsure at all n locations
tgtcttccaaacatctcttacatcagttatcatctattcatatgtgtccaaaatatattttctttacctaatttttttaggaaacgagaaaattcacaatcttttcttcttcattttcctcagtcatttcagtcttactccgccgtactaaagccttgaacatcgttaacgctgatatcaaagcaatctcccagtgctcagagctgttaagtttcacatttatcttccccattttcctattgttcatgtttatgttgacgtctatgttcgtgccccgggctggtctaaactgagtctgtaaaccatagttcaagaccagttctcgcttgaaagacagagncggcattggcaaaccgntttggtcatttctgnacgggggaatctctccctctgntaaaagnttaaaggttccggcggttngtggttggcctgaaaccccaantggacnggatttggggtaanttaancnttttcaaacaanaaggggncnaaggtttnggnaaataggatttcacaaaangggaaacaaccaaatngngggc

SEQ ID NO: 136656 - DNA, 538 bp, Arabidopsis thaliana columbia
  unsure (1)..(538): unsure at all n locations
ctctgttttcaagactctgtttctctatttatcacgatcatggttcttgttcttctcccccgtctcagtctttctgatacttcgacgtacacccgtcctgagaatttttacgtcaactgtggatcggattctaatgtattttatggtggccagaccttcgtcggagataccaactcgagtactaactcagtttccttcaccaacaaaggaactgaagtcatcaacgaccaatcgtccgttgcgcctgaaatataccggacggttaggatatttagacacccttcttcttacaagttcaaacttgattctctgggtctgcactttgtgggtctccatttctctgttgtggtttctcgggcagatcttttaactgntcgggtcaatggccctgntaacnctgggtcaataanacttgaaaagttctcggctnaagaatttacaatacccaaggggtgaaanggttctccngatgatgaatcgtgnggtggaaatgnttnnggggtattccctnaggncaanaaggannagggtttggngc

SEQ ID NO: 136657 - DNA, 540 bp, Arabidopsis thaliana columbia
  unsure (1)..(540): unsure at all n locations
ctcttcatatggtacgtcatcggcgacatcaattggctcgatttgattcacctgtagctatcaatcaatccctgatctgtttaggtttgatctcctctgttttttcctagggcttgttattgttgtttctcgaaaaagaagaagaagcgatggtattgggattttagggattattgcggtttgttgtatatatatatatagaagctgagggattttgtgttgtgaagaacatcgaatcctgtttttttccgtaagaaagttcttagatttctccaagtgaaagaagatgtcatcagctggtgttgcggtaagtccgggttcgtagcgagccattgattatgcctctgggtccgtgccaattcttggcctgattcttatcctgacgacaccatcatgaattaccctacactcctggatcggnggaacaatgcgagngctgagcngattccaatgagccggtaagctcgggtcagctaacgggggttgntggagaacaaagctggttcgggggcnaanaacagagaatcaaangngggnggc

SEQ ID NO: 136658 - DNA, 542 bp, Arabidopsis thaliana columbia
  unsure (1)..(542): unsure at all n locations
ttacacgtggcttgaagagataaggctgaagaggatggtggtcaccgacgattgcttggagctcatagccaagtcttttaagaattttaaggttcttgtgctttcttcctgcgaaggcttctccaccgatggtctcgctgctatcgctgccacttgcaggaatctgaaagagcttgacttacgagagagtgatgttgacgacgttagtggccactggcttagccatttcccagatacatacacttctttggtatcactcaatatatcttgcttagcatctgaggtcagtttctctgctctggaaaggctggtgactaggtgtcccaatctcaagtctctcaagcttaancgagctgttccacttgaaaaattggntaatttaattcaaagagcacctcaattggaggaattggggactggtggggaactgcagaagtgggccagatggtaccctgggtaancgaaggggccctggggggaaggaatnaggggtaactgggtttggggtgtggccggcaactcagagtaatcgggtgagtggc

SEQ ID NO: 136659 - DNA, 530 bp, Arabidopsis thaliana columbia
  unsure (1)..(530): unsure at all n locations
tttttgctttctttttattaagcttacattgaaccaacggagccattgttatgtacaacaaattaatcatatggggactatatatatacatacatacatgatacatggactagttaacaatttgaggacccatcagcttccccatccgaccatggttccggggcgggaaaacgcgagtcctcgatcatacatgcgttgaatctcttctctgtattcagtcagagactcatcaggaattgttggagtcagctccaccacatcacccatcttcagcttccacttgaggtcacttacaggtatttggttcagtcttggccttagttcttcctttgctggtatgccatacatggnccaactcgaggtccctggcccgcccgggtcagcagatcgagaatgntgaactcgntggaaattcttgaaaganatctggaaatccggnttggcagganaaaatcaaggganancttttgaacngnaagntnggtntaaaaactacatttggtaaatggaagatgggaccgggaggngnc

SEQ ID NO: 136660 - DNA, 552 bp, Arabidopsis thaliana columbia
  unsure (1)..(552): unsure at all n locations
cttttaaacaagaaaatgtactatctatataaaattgtcaaataaaacatctcttattgtttctacagatactacaaatcacatcattttttttttgtttttttttcttctaaaattgagtaaattagaaaatgaaatatatacaaaaaagaaaaagattacaacttttagggagagggcgaaactcttgtgtagatgaacgcctcttcagtcaaagctcttgtttgtattgcagagatcatcctgcatccatccaaaatccacaaaaataatcccacaaaagnaaaataccaccaagggaattatcctttaaaattcagagtgattgcntcacttgggtggncacttcccccagaaggaagagntacacaaaactttagggcaagatttaagggtcatttgntcnggggggatcaacacatatccctgggtcntccttnacttcncatccccatcagggggggctgggttccttttgggtgggggtggtnccttggcnggnaacggcnagggagggngtntncnnaggagntnnagncggggggtggggga

SEQ ID NO: 136661 - DNA, 539 bp, Arabidopsis thaliana columbia
  unsure (1)..(539): unsure at all n locations
taatggtgaatcagaaggaaaacgaagaaaagctctctactgcatttacagtgactgtggatgcaaaacatggtacaacaacgggagtatcagctcgtgacagggcaacaaccatattgtctcttgcatcaagagattcaaagcctgaggatttcaatcgtccaggtcatatcttcccactgaagtatcgggaaggtggggttctgaaaagggctggacacactgaagcatctgttgatctcactgttttagctggactggatcctgttggagtactttgtgaaattgttgatgatgatggttccatggctagattaccaaaacttcgtgaatttgccgccgagaacaacctgaaagttgtttccatcgcagatttgatcaggtatagaaggaagngnggttaattagtggaacnggcttctggggntcggntcccacatgtggggccttcactgntactggtaaagggcnnattagncggnttgggncctagcatgggtagggnnanttggngcggcaaaatccggggggnatcgatc

SEQ ID NO: 136662 - DNA, 555 bp, Arabidopsis thaliana columbia
  unsure (1)..(555): unsure at all n locations
ttaaaattcaaacttagaaacagccatagagaaaaaacaaaaggctttcaatttcagaaagctttaacaaaagaaagctactgaaatcctacaaagagaatgtacttatgaatcattattactttatggacgataataaacaaaaacaaacctaaacttttacttctctctactaaatcatcaagttcggtacttttcctctgcaactctcttccttcatctctgccataagtcggtcctttacgcctgtgtgtcctctaaaagagtaacatcagttgtctttctctctcgacttttgcttcagatgagtaaggctttcttttacctcagtttgtgatagtggtgtggttcatctgggtaagggcctggtggagcttggcggcttcggcaacatccggtttggngaggaattngccaccggnctggagctgnnggccctncgngnnagccaggcancaaaggcggnctccccggaaacaccggggggaaaaacctccanggnggggaaccggnanancggncnaaggttgccggtgnnaatcgggccagnncaga

SEQ ID NO: 136663 - DNA, 569 bp, Arabidopsis thaliana columbia
  unsure (1)..(569): unsure at all n locations
tctctctctaatataccttttttccttttcctatttcacccttgatacaaaatttggtcagaatgagtttttattcccgaaaatcttcgtatggtgaagatccacttgaataaccactttcaaatggagtggtctctattggagatgatggaagtgattctctttgctgagatgttgaacctctttgagatcttggacggaattttttagtgtgacgtctgatgagtctcttagcttttgtaatagttaactgccgagcaaaaggagagaattcaacatcactgtcactccagtccccgtggaagtcattctccgcttcacctctcataagttctcaagacaaaatgctttgggccttgcgnctttggggaatgaagaggccncgaatagaagnaacaaatccatcaaccggnccatcactttgncggtnaaacatgngncntggtggtgacaagggtccccaggttganggnggacctaggttcagggcattggcagaaacccggggtggaaggggctgccttgnaatcnncccggnnccagaacgggnaaaacccagnagggggngc

SEQ ID NO: 136664 - DNA, 567 bp, Arabidopsis thaliana columbia
  unsure (1)..(567): unsure at all n locations
gctcaacttaagccagatgtaacaattacatctgctgattcagaagatgaagcagaggattctgatgatgaaagcatggagaccattatcctgggcgacaaaagaatagggatcaaaacaagtgttctagaggaaaaggccacggcttgtaacatgctttgttgctatgctgatgagttaaaagaaggattttttccttggattgatcaggttgcacctacattggttcctttactgaaattctattttcacgaagaagttagaagagcagctgtttcagccatgccggaactaatgcgctcagccaagctggcaatagagaaaggggaatctcaagggcgagatctatcatatttgaagcagctttctgactacattattccagccatgctggaagctttgcataaagaacctggtaccagagatctgtgtgagnatggtngnagnnatccatgnatgcttgcagancccnggaacctttgggtnagggnaaatngncccnaaggtggtggggaaancagtntgccgnaanccaggngggccgaaaggggnaaggccacctaanta

SEQ ID NO: 136665 - DNA, 563 bp, Arabidopsis thaliana columbia
  unsure (1)..(563): unsure at all n locations
cgcgtcgttttgttgatttcttctgggtgaagatgtcaggtctcgaagatatcaagaacgagaccgttgatctggaaaaaattccgattgaggaagttttccagcagctaaaatgtacaagggaaggattgacaacgcaggaaggggaagacaggattgtgatatttggccccaacaagctcgaagagaagaaggaaagcaaaattctgaagtttctggggttcatgtggaatccgctttcatgggttatggaagctgcagctctcatggccattgctttggctaatggtgataatcgacctccggattggcaagattttgtgggtattatctgtctgcttgttatcaactccacaatcagtttcattgaagaaaccaacgccggnaatgctgcagctgctctcatggctgggcctgctccnaaaaccaaggtnctaagggntggaaatggngtgaccaanagggtgncanccttgncccaggnggaatggaacataaacttggggcatntccagncggtgccggctcttnanggggccttaangggncagcngccaacngtc

SEQ ID NO: 136666 - DNA, 556 bp, Arabidopsis thaliana columbia
  unsure (1)..(556): unsure at all n locations
taccctctcttttactatttttatatgatatatatgtaaaagggacctctctccttgtcccaaaaccgaacataacccgactaaaccgggactgtaccgaaagtctcaagaatgtagtaaagaacacataaaagaaacaataattggtatccctatcttgctgcaattggtgaatccaagacagaacaaaacagaggagtaaacagtttgttcaaagtaaagttatgttggattctgttccttctcctctgcttgtttctgtctccagctttgtgggactagactctggttacctttattgcaccagagattgcgagatatgtgtggtaagtatggagnaatatcttttgccgagaattattcaccatttggacaaagcaggaactaattttctcccattagccaattccnggtggncatccagggcncctgagtgcgggttctggnacnacctggttnggggcancccaagaacttgaacgggcggggncctgggatcncgggggncggagnntcctgaggtccccntgaaaccaacntgggngggcaancnnga

SEQ ID NO: 136667 - DNA, 551 bp, Arabidopsis thaliana columbia
  unsure (1)..(551): unsure at all n locations
gctaccctctgctgctgcacagccaggtttcttcccatcaatgctttcgccaaccgcggcgctgcacaacaatcttggcggcactgatgatccctccaagttactgagctttcagacgccgcacggggggatttcctcctcaaatctccaatttaacaaacagaatcagcaagccccaatgtctcagttgcctcagccaccaactacgttgtcccaacaacagcagctgcagcaattgttgcactcctctttgaaccatcaacaacagcaatcgcagtctcaacaacagcaacaacaacaacagttgctgcagcagcaacaacaattgcagtctcaacaacacagcaacaacaatcaatcgnagtctcagnaacaacaacaattgntccagnagcaacaacaacaacaactgnagnaacaacatcaacaacngtnaaggaacaggctnaggngaggaggtaaggacanagncattggaatttantgggnncaagncnaacagtttaacanataggtggggatttgggtcaaggattngtttnatggnanag

SEQ ID NO: 136668 - DNA, 563 bp, Arabidopsis thaliana columbia
  unsure (1)..(563): unsure at all n locations
tcacagttcgcgttttctaaccacaacacaccccacgcgtgtggcttactcgcgctacataataaaaataacaaacacaaacaaaaagagtaaagagggggtttccaaaccccagtcaatacccgaaccaccaactcctccaccgtgatcggacccgaacccttttacgtcgttgtcccatcacggtgacaaaggagttggatctcgcccactcgcgcggttcgttcttgactcgacaccccctccctcccatagtacaagaccaaaaaaacaagttatataaaaattcacaattcattaagaaaaagaaacacacgcacgcgncagtcttgatcaagatcagctttcgnattgtaaagcggnangaatcttctgaacggtggcatgatattanggttgttgacaggntcaccggcttcaaccgngagttttgccggtggganattgtnaaagggtttgaacgcaatggnaannnggggtcaccacaaacgggtgntggnacaatacctggccacannggaatggctncggagggnganagggaacggcggagggncngggga

SEQ ID NO: 136669 - DNA, 553 bp, Arabidopsis thaliana columbia
  unsure (1)..(553): unsure at all n locations
taacgaatcaggtttagattacaacaattcttgttcaagtaaagatacagaagagtgatgaactttactgtctcagaaagtgacaaaaaaatttgtatgggggagtcttttgacatcagttgatctttggcttaggagctcttggccttaagacagcgtaaagtaaaatcagtactatgataaaggcaggtattgttgtcatgtccacttccactttcaccttcctctcttttgtgcagtgaattgggtgcaaaacacccactgttgcattcacttctcttacaaatgagctagtagcttcctctaaggtatgcagaaatctcatggcatccccatagcgtggttctccagcaacattcggaagtcggctccacaggntaacacgtacttgtacttggttcatcagncacggtcccctggttggaagagcttaaacggccttttatcggncncccagccgnaaagatganccngaatgncagctggntgntnctcagnggggaacaaaagcccgggaatgngcaggtgaacgggangggcacctggnagggga

SEQ ID NO: 136670 - DNA, 527 bp, Arabidopsis thaliana columbia
  unsure (1)..(527): unsure at all n locations
ttcccaacttctctcctctctcttcacattattatattctctctgtttcttccaatccaatccaatctctctctctctctctctctcagaaactaaactgaaatattgcagagttttgaatacacggccatgaaccaatcaccatctcttatcgaacagggtatttctcaacagcatttgaagactttgtcttgtgccaatgttcttactttggcttaccagagtcttggagtgatctatggtgatcttagtacatcgccactctatgtttataagaccactttctctgggaaactaagtcttcatgaagacgatgaagagatctttgggagtggtctctttcatcttcctggncatttacactcattgcncttttaaatacggtttcaatggtctctagcaggtgncatggagaggngggnatttgcgtgaccgnttcttggagaatgcaagcaaggtttccaatcccaggatgggggnacncacattgacggngccgnggnggaaggggtaatntctggggggtc

SEQ ID NO: 136671 - DNA, 555 bp, Arabidopsis thaliana columbia
  unsure (1)..(555): unsure at all n locations
ctggagaagtaagtttattatcacattcaaagtaataaagacaatgtcaacgaaagtatcccacagctttattctcttttcgcctaaacagcctgcaatcataatctctagtagaacaactttcctccccaagatgattgataagagagacccacattatctcttttgccataatgaaaaagaacaaaaagagagtactgagatcacaattctatgatgtcccttgcacaaaaatttcaaaacttgtaatccgggttgtcacgaaggccgagttttgacagtgaaaggcagtaagaatcccagtccgttcttctcatatacttcaacgagatagtcttggtggtggtggtacggatcggggtcggncgtcagaagctatcacgcatgggactccggttcnagaaancagctgnaccccgttgatctggctgaagatgggattgggctccctgnggnaaancttggncagcccgggttcgggggngnctccnaggnattcttcaacctcccncggttggncntgncntggncncaacaattnggcngggttccnaa

SEQ ID NO: 136672 - DNA, 410 bp, Arabidopsis thaliana columbia
  unsure (1)..(410): unsure at all n locations
aaatgtggcaacgtttcaacaaaaaaattaaacttagacaaatcgaaattttataaatttacatacaacaataatgccatttttattaaatcaagtaaaaagaatcagtattattattacttatggttttncttgagtaacacaccaaacttcttcaacattttgctagtctcaatagaatctgttctttcctcatcattgttcagtatagangctgccgtctcagcagcttttcctccattgctcacattggaatcttcactcttttaagntcagctttccataatcaccttnctcttnggttcgggaancaacattttgccnttattcaaggttnggggnactcngccggaaaaaaaattcccaaaacaactttttgggggntncnccttaaaatnggntttctttnt

SEQ ID NO: 136673 - DNA, 517 bp, Arabidopsis thaliana columbia
  unsure (1)..(517): unsure at all n locations
cgttttattacttctctctgtactataaatgaagtatgtgatacaaatgatacagagagaagtaataaaactcagtttacagattctncttcattgctattattattattattattattattgtctccactttcagttttggctctgcttctaagttcctcaaatgctttcatgctctctgcatcaaaccctccagcaaactgatggactctaaacgcgaaacgaacaccttggagaagcaagaactctctgttcggatctttatcggatccgctcactgaatctagctcataagctactcgtttcattgtacttcttcggcgagctggacttacggaaggcttnatcctttcctacggacggcantatcagataanccaatcaacctgggatncccgaattcttttatatcgtgaatcgccatgnctctcggacggaaaagncgggnttcacttttnntcaaccttcttngggaactttnncaantttttnaaggaggttcnnaagggggttnggg

SEQ ID NO: 136674 - DNA, 317 bp, Arabidopsis thaliana columbia
  unsure (1)..(317): unsure at all n locations
cnanaatcnttgananttaanttctgcggccgcatantttcatcngttacttgaaattttgaaaacgaaaacaaaagcgataaggaaagttacaagcaaagaacaaccagtgactattttatatcaagccagaccccttttcttttggggactacttgtttgctgcagcgagttccgcagtgataatgaaacttgatttcccagcttgtctcaagtactgaacatctccattcatcagcttcaccagtttccggctaaccantaagctcaatccttcttctgncacatcttcctcagtcccanacatttggnttagt

SEQ ID NO: 136675 - DNA, 329 bp, Arabidopsis thaliana columbia
  unsure (1)..(329): unsure at all n locations
taaacaatatgatttacttttcacattagtgatatctctctaggaacactggtctctctctctatctatacatcagctggagcatgccttcttcttttccacgaaattgctaaaaacaatcagagagcttctgataagaaattcccacccaacttgacaatatgatgaaaaaagaatatattccaacaagnaaagatnngatgagnaaacgaattcgtatccaacttctggttcnggttattgccanccggttttcctacggttganccggtttggcatttngtcttctgnatnctccngtgtcagttcttcccnacgctttgnttccc

SEQ ID NO: 136676 - DNA, 401 bp, Arabidopsis thaliana columbia
  unsure (1)..(401): unsure at all n locations
tctcctcgctccttcagctctctgcatttcagaaaaccactcctctttctctcttcttcttcgtcattttcctcgaaattacagcagagcgangcagcaatgtaataatcaccaggtgagacacgtgtccaccgtacctgtcgagtattctacaccgactcctccggaatccgacgatttcttatcggaaatcgatcggcttaagtctctcctatcgaaactagatgtttccaaggatttacgaaggaaggacgcggttatcgacgctgattccagagttcgtcgattcttcagcgagnatcgnggcgggtttatcnaagggttttggggtatcctggggttgnaattccgnaatgngganggttccncggnaaaggggggtancgngggnggggggnngg

SEQ ID NO: 136677 - DNA, 538 bp, Arabidopsis thaliana columbia
  unsure (1)..(538): unsure at all n locations
gattttacgataatataatgcaanaacaaaccacacgacgaccaccttttctcacgcagagatgnaatcgtagacgtcttcgtcgcagtagtaaaacccaaggtnactgatcgcagctgaaagagagttacttggcgatgcctggtcagttgcaagatacggcatgttgtggaacgaacggtcgagagaagccgccacattgttgaactcatcatcttcttcttcctcttcattttcaccttcgctaccacctttggtatgcatcatttcctctgctcggtgctttagggtctgaaacattaggctccggctcatgctgcattgctcggagnacatccgctgaggactgaccagggaccgctcgggtcactgcaaagctgtgtggnccatcgntctgggagncccggacaacgctttggtcancaaacagattgtggntcaccgtnagctcctcgaagccctccaggganataccanaagnangttctcagtgcattttgnnaggngtgaggnaantggttacgcntgactntggttc

SEQ ID NO: 136678 - DNA, 526 bp, Arabidopsis thaliana columbia
  unsure (1)..(526): unsure at all n locations
ttagaaacagccatagagaaaaaaacaaaaggctttcaatttcagaaagctttaacaaaagaaagctactgaaatcctacaaagagaatgtacttatgaatcattattactttatggacgataataaacaaaaacaaacctaaacttttacttctctctactaaatcatcaagttcggtacttttcctctgcaactctcttccttcatctctgccataagtcggtcctttacgcctgtgtgtcctctaaaagagtaacatcagttgtctttctctctcgacttttgcttcagatgagtaaggctttcttttacctcagtttgtgatagtgttgtgtttcatctggttaaggtcttgttgtagcttggcgtcttcggcatcatccggtttggtgaggatttgtcanctgatctgcagcttgacgccttctgagtagccaggcaccaaggctggctctcggcaatnactgcgggnaacccttcncggtgggaaacggcaantgncttaagttgctgtgcntcggcnga

SEQ ID NO: 136679 - DNA, 525 bp, Arabidopsis thaliana columbia
  unsure (1)..(525): unsure at all n locations
ctttttacaactccaaaactgaattaaaattaaaaaattccacacaaatgaaaattcgcaactaatgtacaaaacataaagttgagaaaaaaaaacacacttaaaaatcatcatctctggtttagactgactttttagttagtcatagcgagcctaaaatccttgagagcggtccgctcgtaacctctatatgaatcaagcttttaaccagcccggtttattaaaccggagcaatccggtacgtcaataatttgtgtcattacattgaacagccaccagtaaccggtaaaggcattgtagctttgataccatccaaaatagtcttagagtttcctccacatttcattgtctgctccaaaatattcactagttgcatgnatatttccatcctcgncacgtcgcgctcgcctcaacagtgagggggcccaatcttggctctcgngttcgtgctccttnaagntnggtancctaagctctgtcatcgngttntgaaggacccgtggcggtanttggctgggaagggga

SEQ ID NO: 136680 - DNA, 532 bp, Arabidopsis thaliana columbia
  unsure (1)..(532): unsure at all n locations
tcatctctctcacaaatcattttctcagacttctctctttctcttaaaccatgcctgaggcaccaaagaaagaatctttagaggttttcgatctgacgcttgaccaaaaaaacaagcaaaagcttcagttgatcgaagaactcacctctaacgccgaccaagtccaaagacaagtcttggaggagatcttgacccgcaatgctgacgtggagtatctcaggcgacacgacctcaacggtcgcactgaccgtgagactttcaaaaacatcatgcccgttatcacctacgaagatattgagcctgagatcaacaggatcgctaatggtgataaatcacctatcctctcttccaaacccatctctgagttcctcacaagctctgggnatctggtggggagaggagctaatgnccaacaatcgnagnggngctagcaggggttatcctctnaggctnttgtgctgtgntgggcagttggtctgggntgaaanggnagggtggttttggnataggcgntcaggncgggggcccnggc

SEQ ID NO: 136681 - DNA, 618 bp, Arabidopsis thaliana columbia
  unsure (1)..(618): unsure at all n locations
tacacacaccattctctcatgggttccgtgaagagaaaatcagtggaggaatcttctgattctgctccgccgcaaaaggttcagagagaagacgattccacccaaatcatcaacgaagagctagttggttgcgttcacgatgtttccttccctgaaaattacgttcctcttgctccctccgttcacaataaaccaccagctaaagatttcccctttacacttgactccttccaatctgaagctatcaagtgtctcgataatggcgagtcagtcatggtttcagctcatacatcagctggtaaaactgttgtggcgtcgtatgctattgccatgtctttgaaggnaaaccaggagagttatttacaacttctcctataaagggacttagtaatcagaagtacaggagattttaaaggagagttttctggatgttgggttggtngntggggntggtggctatcgntcccnaatgccncttggccttgncatggcntacgggggttttgcggnggnntggnggttaaaggggccgnggtttttccggggngggttccgtggggttttttggtngggggggtttnnntggggggattnggggangngggggtngggtttggg

SEQ ID NO: 136682 - DNA, 498 bp, Arabidopsis thaliana columbia
  unsure (1)..(498): unsure at all n locations
cttgatcctgaaaagatgaaagaaatgagaatgctgatgtttcctaatgaagatgaagacgaaagtgaggactttagagagcaaacttcccatcttatgacatccttgactaaacgaaatgtaagaccttcgcagaaaattgctcaaagaaatagtcatcaagaccctccaccggtcgtgcgcaaaactccgcttgctttgctggagtataaccctggtaatgataaaagctccccaggtagtatcctgatggtacaacaaaataggantttggcagtgaggaaaagtcgaaaccggnaggtttcgagncttggccatcagccatggtccacacccggttaactggntaacctatttcccggcaatngttggttgntggcaggcntttattcnntgggggangatccggttccggagccnggnttggggggcccaaaattggngggtccttttttcccanctggggnaaggccaattttggngngccccaggntnccc

SEQ ID NO: 136683 - DNA, 508 bp, Arabidopsis thaliana columbia
  unsure (1)..(508): unsure at all n locations
ctctaagacctttcttctcggcatgttgcttccacagtgggatgatggagtttagatacaatatttgtttattaataccgaacaatcaaaaatagatactaagtttttttgttttccaaagctcaaacctaatgtacaaattcagtaaagctttcgacaccatctcacctaaatatcttggacctttattggtgcccacttctcatgaatccaagctccaaagaagagaagctaagtaaacactagggcaaggtaaaccaagatatatgcttttcggagggacaagcaatggaaagctatagacttccatgtggtttaatgcaccagcagacaggttcccaatcctcaaaggtatccagntatagccactcnggtagntggggatcagntncncagggttcttccaaacanatgccggacangtggnaaacccanaccngggntaaggccnggcnttcccnagggnccatnggaggnctagnttctggccangggttaacccggcgga

SEQ ID NO: 136684 - DNA, 457 bp, Arabidopsis thaliana columbia
  unsure (1)..(457): unsure at all n locations
gaaaccatacaagattttttcttggtaaattatatttgctaggaggaacactttaacttggctatataatcaacaattacaaaattcagacaaaaacgcactcatataacaactacctttctctctgtttaagcttccgagtctcctctatccatttggaactcttcaagttcatggtgtttctcactataccatttttgctcaatccaatgaaatccaaaattttgggatcaaaagaaccaaatgaatttcttccaaaactaaaaggngnaagaagcaatccatgggctngtgcccgggnttattccaggaattggcaacaaaggggtcacggactgagncaagccatcccatgncattaggagnaaggcttggcttggnccttncttttncgaaggggcctncctgggggaaaatcttccatggtcnaacccnagaancccttctnnacaaccnc

SEQ ID NO: 136685 - DNA, 558 bp, Arabidopsis thaliana columbia
  unsure (1)..(558): unsure at all n locations
aagaaaaacaaatgtatgactcaatgtgtgatagaaacagcgatttgaaaagagaatataagaaaaatacgtgagatcaaccgaggagagaaaagccctgtccaattagggcagtggcaagaatctcattggcagcttcgtgatactggtgcatcaaaagctgaggtttttgttgaagatagtcctgtctcttcaaaacgggattcagaggtgcttaatctttgcgatggtaaaatagtgttctcagattgggctagcaatgtgagttctattctttgggtccctgttcgtgccttgagtgagaagcttgctagagggtcatcatcagtcactccgctgaaacaagatattttaagagggaatgagaactgtagctttgaaacttgaatttgggggtcctcataaccagatatttgagagaaccatagntgcacattttaccgntcccctttgatgtgaccncaagggtggcaaccaatgccatgatggcncttnggctgcaggtatgtaccnccccggcaagngacttgaagccctnaggttgntgnccncaatggc

SEQ ID NO: 136686 - DNA, 529 bp, Arabidopsis thaliana columbia
  unsure (1)..(529): unsure at all n locations
ttatcctccaatttttgtttttttatacatgaacatatcggaagatgcatattgcagacaaaaggacattcctctaaaagtttactataaaatttcggtattacgatctaaagagcaacataaacaagaaaaggaatcatagacctacagaattatttgattactaaggtcacagattcactgctaaattgctttcacattgaatataagcaaaagagccttaatcctctcaggaaccaacaagggtccctctataaatggctaggccgtcttttaccagaatctgtccttaacctcttcaccggatttgcccatcccacagaatcaccggccgcaccgctgttgtttggatgagtgggntgggtttggccaccgctgctgttgtgctaagccttgttcccttggactccaccagacacagggcttctaagaccacgnccatcattgctggaggtggtnactggggtgctgnagcaccagtcngggttcgnccagattcctnggcttcccctttctggagtanaatcgc

SEQ ID NO: 136687 - DNA, 522 bp, Arabidopsis thaliana columbia
  unsure (1)..(522): unsure at all n locations
ctgtagatttgtgtgttcttaatagaaaggtttaaagaagtttggtgctacaacaaatcaatagtgatgacacttagaagaagaatctaatcaaagagaggagagacaataaaaactagatggcctaattaaggattcctaaaggctcttctcatgttgtgcttaatctctcataatatacaaacaaaatactctcaacaactacttctaacaatcttctctctttcagatcttcaaaggctttgttaaactgtaaatgtttctactccaattgctccagaggcacacgaacaaataactgcccgtttagggttaccacagccgatgtgtgatgcggatcgattctcgttggtaaacttaccacctttttgaaaggagtagctccccaaggattcatagggtctcgggtcgcacttattactaccgncagccggtctgattgncccgncctctcacggcnacctgggcaatgnaacaccccaagaactgngcccngnggaactcncngnagtggggcaaagc

SEQ ID NO: 136688 - DNA, 533 bp, Arabidopsis thaliana columbia
  unsure (1)..(533): unsure at all n locations
agaacaagcatatacttacagagtttcttcttattctactctcttcctccaccacctccttgcatgttcactagtctcgttcttggtaatgaactaaggagtcaagtttcagttgaagctgttgagacagaggaagaagttgaagatgaagatgaagataatagttctcttcctttactactgttacattggttctacttcctctgttttagcttccatcgacaatgtcaacgagctctctgttttgctgtcggtgaaatcaactcttgtggatcctctcaactttctcaaagactggaagctttcagacaccagcgatcactgtaattggaccggtgttcggtgcactcaaatggcaatgttgagaagctcgacctggcggggatgaatctcacagggaaaatctcagattcgatcagccagctgagtagccttggctcggtnacatatcatgcaacggnttcgagcggtggtcccgaaatcaatcccccggtgaatcaatgnatcagcagatcatccagggggctttcagc

SEQ ID NO: 136689 - DNA, 548 bp, Arabidopsis thaliana columbia
  unsure (1)..(548): unsure at all n locations
catgaattcctgtacttttgaatattgaactcaatttctttgattttggtgtttggtctagttcttgataagaatcttgttatgaaactttttttgtattttgttatgtgttgacagtaatagaaggnactctgaggggatatcttgtctcagagatggaaagtctttgaaaagaatcacaacggcttctaagaaagtgaagacgtcaagtgatgttctcacngacaaagatctctctcatttggtttggtggaaggagagattgcagacatgtaagaaaccatctactcttcagcttattgaaaggcttatgtacacnaatttacttgggtttggacccgagcttgaggnaatggaagtttaaaagatgggaaccncnaacctggggagatggtgcagtttaaggccaagggttccacgcgaagntttgcccngcagagaaggggaattttatgaggggantgggaaagaagcntgaaanccggtgaaanncngggccaaccctttgggggcccgnccaaaagntcccaagggggggccccttttng

SEQ ID NO: 136690 - DNA, 520 bp, Arabidopsis thaliana columbia
  unsure (1)..(520): unsure at all n locations
tatatgaagtatgctgttgaggaagtctatcacactctcaaacttgtcctaacagaaactctggaagccgaaggaaggctgtgggtggagagaatctatgaagatatccaaaccagcttaaaggagagaaatatacatcatgattttcagttgaacaagctctcccttgttatcacgagagtgactgcactcttgggaatcctgaaagaaaatgaaacaccggagcatgcaaaaggggctatcaaagcacttcaggatctctacgatgttatgcggcttgacatattgacttttaatatgaggggtcattatgaaacgtggacctgttaactcaagcntggaatgaaggtcggctttttacaaagttgaaatggcctaaagaccctgagctgaaagactcgtcaaaaagattggactcnctatttactatcaagattctgcagcgatgtcctagaatctgaggcagnggngcctcaatcctcacaatcccttcatgntgnnncncctagcgccgagangc

SEQ ID NO: 136691 - DNA, 463 bp, Arabidopsis thaliana columbia
  unsure (1)..(463): unsure at all n locations
cgtttcttcagaatctagttccagaggattaaacaacacctctggtgtttcagagttttgtacagatggttctaagtctttgtctcacattgattatgtcagaagcttacttggttcacataaagaagctaacttgggaggacttgatgatgactctattgtcagagctttggaatgtgaggatgttagcttgcgtcagtggttagacaatccagaccgatccgttgatgcctttgagtgttttcatgttttcagacagattgttgagattgttaatgcagctcactctcaaggcattgttgttcataatgttaggccttcttgtttcgttatgtcttcgtttaacaatgtttcgtttatcgaatccgcttcttgttcggattccgggtctgatgaggatgcaacaacaaagncncgagagattgggagcncgagncaagaggggatctatcaganancgagc

SEQ ID NO: 136692 - DNA, 479 bp, Arabidopsis thaliana columbia
  unsure (1)..(479): unsure at all n locations
tcgccaagcaatctacactcaacagacactaataaggataaaaaaaacttcgcaacagaatcagatatctaaaaatcccggaaattcactagatttcttcgattggtaccgagaggtgtcatcaaatttaacagacttcaagtttattaggccaagcccacgagcttctcactgatctcccacactttacgagcctcaaacatatacagagtaaaacgcatagatatatatgatatctcacaagaacaaaacagcaacccaaaaaaagnnaagaaagacaatgcttgtggtaaagtaacccaccccgtgtttgtatctagtaaagncaaatggaatccttagtagtttggttatggctgacttgtggtttagcttctaatcttctgggctcacaccccaaatccttcttacctcattcattttttttggaggagcggcagatccncaagnctagcttntcagggtccntgggggggggg

SEQ ID NO: 136693 - DNA, 468 bp, Arabidopsis thaliana columbia
  unsure (1)..(468): unsure at all n locations
ctcgagatcttcagtgttttccaacggtgattgatgtttcacgtggaagaagaaagcagtggaggcgatgggtctgagattgatgaggagtttggcggagacgattcaacgacgtcattgtcgcgatgggtgttcgatgagaaagatgattatgaggttaatgaagattacgacgatgatggatatgatgagcataatcacccggaaatggattccgatgaggaggatgacaatgtggagcagcgtttgattcgcactagccctgccgttgactctttcgatgtagatgctcttgagattcctggaactcagaaaaacgaaatcgaggacactggtatagggaagaaactcatacttgctttgcagacacttggggttgtatttggtgatattggactagcccattgnaaccttcactggcatgtcagaagacnccattaccgccaagnagntattattgngcctntc

SEQ ID NO: 136694 - DNA, 537 bp, Arabidopsis thaliana columbia
  unsure (1)..(537): unsure at all n locations
cttttttttttttttatacacactgtaatcaattttattacctgaggggaaaaactgataaaaggaagaaaaagatgaatattttcttcagtaatggtttccctttgtagtgaattatagagattatgaatctgtacagtaaagagggagggctggatactacaaacagacctgtgaccctatgtttatgtatttgttgatgctttttactaaaatgaaccaatcaatcatcagagagccttttgatcaagacgctcgttccagtttaagcaacggattaagcttctaaaccaatcaccggtttgatcagatttgttgacagttgggagtggatgttggccatgtatattctcaccggaatctccccttgaaagntngttgnctccncttccatcaaacggaanccatgcattgcttcgngcanccacctgggancctttaacccgngtttgnnanaacctgggagaataactggctgacgcnggggatgtgggccnntggggtgncagcatncaagnacggttggtgncnaggatc

SEQ ID NO: 136695 - DNA, 592 bp, Arabidopsis thaliana columbia
  unsure (1)..(592): unsure at all n locations
gtctttagcttgttaccagaggaatgttccttcacgtggatctggaagatcgagaagatcggtgaaaatgatgtgtagtcagttacaagtgtctggtttaagaatgcaagggtttatgggattacgtggtaacaatgctttagacactcttggaaaaagtcgtcaagattttcattcgaaggtgcgacaggcaatgaatgtgcccaaggggaaagctagccggtttacggtgaaagcaatgtttgaaagatttacggagaaagctatcaaagttattatgcttgccaggaggnagctagaagactaggccacaattttgtgggaaccgaacaaattcttcttggtcttattggtgagggtactggaatcgctgctaaaagttttgaaaatccatggggatttaacttnaaaaagatgcacgtgtggnaggnttnagaaagattanttgggaanggggaaagtggccttttgttgcctggtttnaganncccaattnaacancccncggtgccaaanccggtgtccattgaaccncccccccttgnaggaancccnccccaanctttgggnccaattnncatttgggtccang

SEQ ID NO: 136696 - DNA, 643 bp, Arabidopsis thaliana columbia
  unsure (1)..(643): unsure at all n locations
tataaataaacgtacttcacgtttttttatataacttcaaagtagtttcagatttgtctctatctcttcacttttaagtcttctggttttgtcatcaccagctttttttgttctgtctctgtctttctctttgtgtatttttattctcgtcatcgttgttcttctatgagaggaagatcggaatgtcgaagagaattagaagattctcgtacatcacttcgttggaatttcacaggtcgatgagagatctgagaactgtttcattttgatccaaactcatctctttcagagtataatggactaagcattttttttctccgaagatggttaaagaaatagcttcttggttattgatacnatcaatggtggtgtttgttccccggttttagctataaacggcggtgggtaaccacgatggnacctgcgaagacgaagggaacaagtttctggaggaccagagaacaatccngnaaccncaaagnggaaancggttnctaaaccgnaggaggctaaattcccaaccccgaattgnggaacntaacnccgggaagtggnccaatggcccatnaaaatggggcccccttnnggtnncccccncaantgcccttgggggnaaacccancccnncaagggggggggnccc

SEQ ID NO: 136697 - DNA, 592 bp, Arabidopsis thaliana columbia
  unsure (1)..(592): unsure at all n locations
taaagtttatataactaaaagcgtcaggtcatacaaagatcccaagataatgaaacaaagcttaaacggagagtagaaaaaccatgagataatagacgaaatagtaaaactagtgacaactggctggaagcagaagctctctctcttcactcctctctgtagtctgggttctcctttaagatgatgaatccttctagtattggcgacagaggaatgtatttgtccgtggctagttcggctctctctccagcagccaggagaacaggtgtggagtgtgtctggaaaccggttatggtcttgggccgacccgcttgcccaaccacatcaactgcttgtcctacccggcactgggcactgacagtggcttcaaggttttcatccaactgtcaacatcatccttggttgcatcgccaaaacgaggaagtacagcacataatgggaacttccccgagnatgattnggttcatggcaagggatgcatgcaaaagtgnacnataccagnaaagtncgggttgnggatcnangaaccngtcanagtgnaaggggntnnntgcaaanaancccttcccatgggnaaancccttngnaantc

SEQ ID NO: 136698 - DNA, 547 bp, Arabidopsis thaliana columbia
  unsure (1)..(547): unsure at all n locations
aagtttcaagtgattaaattaaaacataatcgtacagttattctcttcaaagatgaaaacattaggaagaaagaaatacaaaacaaacgccacaaaattggagtgactatctccagcgttacacagtataataataatactcaacataaggngccttgcatagcaagcaacaagtcttgcttcttactctgatgctttagacttcttctttttcttcttctttgtgggctctgatgttgcttttcttttagtcttcgaatcctctttctcgtcttggtctatcaaatgcttgtactcttcaagactcgcaaatggagatttccgttttcttttcnctntctttttcttcntactaccgaccatcatcaccatcactatcatcatcaccaccaatcaaccaagtaccaatcaancatcaacggtgttancaancnncaanaatcaaaccagggncatggccaatggcnggggccatccctggaancgggcacaatcangcaacgngggccttcaancaancccngnnggggaaccccaaccaagggna

SEQ ID NO: 136699 - DNA, 640 bp, Arabidopsis thaliana columbia
  unsure (1)..(640): unsure at all n locations
cagagtttgatggctgaagttaagggaaagaactttgttgatcacttgaacaacaatgagcctacaccgggaagtgggattaaacgaggatttcttttcggaaactcgatatgtggcgaaggaagcacctctcaagattgcaatgttggcaaggacaacaaggtgttagaggttagacctgtcaaggttaggagaacaatgattgatcttcaacttcccgcagatgagtatctccatacagagggtgataatacgacttgtcctccttatgagcagtcaaaagaagttggtgaaaacatcttctttgaatctcatcggaacgattcttctggatcttctttgcttatgaagaactcaaatggatttactgacttgaacgagccagtccaatgccaagattcagtacctggtttcttcctccttccagggncttaanatcccctttaatggggcaaacaatttncacaccggtggaaagggcaagtngggtggnaaaaaatcctaggccaaaaatgggtgggatggggccaaaaancaaggggncggnaaaannccccccagggggcaaagtttcncgggcgtcccannnnggggaaaanntttntaaaaagggggnttnanccccnggggggncccttna

SEQ ID NO: 136700 - DNA, 489 bp, Arabidopsis thaliana columbia
  unsure (1)..(489): unsure at all n locations
ccttcccnccggaatctggnaanaaagggggaaactcccncngntggaccgnccncncccccntnntaccccncaatttccgtccctgacaatgaccgtttcaaggctcccctgatcangtatccncaagtgtgtcttcagactcgtcgaacatgaccgaacttccagcaatggaacgagctgtatngtgaaggaggatcgaggaagaagacgtcgttgagctacttcatgtagaagagagacaaaagagagagggagggagatttgttcgtttttgatctctctcgtgttcggtttttttttttgaatctcattttggtcgtttaatttataaatttgtgtacagagagaaagcgtgttgttcgttttgctgtctaattcattttctttctcaacataagatgaaaaaaacattcgctgtataatctaatacatgcgtatgtatatagaggctcggatcttttaaggataaggacataattctaaatc

SEQ ID NO: 136701 - DNA, 478 bp, Arabidopsis thaliana columbia
  unsure (1)..(478): unsure at all n locations
aacttancgccctgnctcntccccctntgtgcnccgggnaacgctntacnttntagngccggggattnttggaccntntttgaaggaagggaagaagaccaggggatcccncaaatgcggaccancttcttcatccncggtgggattaaacccgaggccctctcgtctgacatacattggatatggagatgnccaagaggttccgatgacgagaagtagggggaaaatgggaacgataaagatgctgatgtttctgccgccaagatatcatctaatgtttgaaatggaagttgggcaaggatcgacattggtgcatataagaacagattattggccttgcttagcttatgttgatgattacttagaagctttgtttttgtaataatagcagagactttcactattttcttcttattctttgggcccaacctacatgtaaagttttacccaaacgaacaaacacaaattctgttttttg

SEQ ID NO: 136702 - DNA, 544 bp, Arabidopsis thaliana columbia
  unsure (1)..(544): unsure at all n locations
tcggttttcttncaaaaccctggggaagcctacccaaaaagggnccgcctttagtttnggnaaanancccctttcttttcncccgaaacggcaatttncccnatgctttgggaaatggnaaagccnccnccncgnggttcnanccatcctggcccaagaaggacccatccgagcagctgtgtggncccnaacctgaaaacgcctcctcctgtgcactggaagctctcaccttttacaatgtggactcccntcgggtgcttttctgtgtatgcaatccccttccgggcttctccatatcggacctcaaatggaacattgatggaagctgtctccttctcaaagacaaagatgcgttctgttgtgccacggtcccgtctctgcctgagtccagcgactacagttctgatgactgaagattacttatgtggttctttgtaaaagtttcagccttgtttgtctttcaattttaggagtgtttttttccgcgacatttactagtgaatgttaaaaacatttttcaatgtataaagaagctttcttgagt

SEQ ID NO: 136703 - DNA, 520 bp, Arabidopsis thaliana columbia
  unsure (1)..(520): unsure at all n locations
cagggtcccctccccgagctgtcctggaatnttccccccanttggggccaggaagggngaattcccnatacccatggcttggtccctgccgncggcattcccncagatgtngnagnggaaatncatgccagggagggaagaggaggaaagatnccaaattctgaggtgtcctggaagagaccccggaaaaggattctggattctggacatgagagagatagggagagattcttgttcccagagttattagtctttgagtcagagatcttgagttttagtcttaatgcttatgagattctatactatgttgttatctgaaggcttaagtaaaactttgtttttggaatttgaacaaattcaaagcctgagacttggaacaaaaaaagtggggaaaaaaggctttgttttgtaagcgacgtcttgtttttcaaattgtccgagtactttcagcgtttatggtttttaaaagattgatcattcggtctacagaataaaccgtcgatgtgatctatttcagtgc

SEQ ID NO: 136704 - DNA, 526 bp, Arabidopsis thaliana columbia
  unsure (1)..(526): unsure at all n locations
aatnttccntttttcctcccngctccaggnggccgnttttaaccaaggggtttttaaggggcccntggcccnttttcccccccaggnagccncggttgcnaagccaaggggttaaggggaaccngtaanccattcncatagaagccccgctncaagcccngatgccaaacccccatctggngcccatccctgtggaaattaaaccggacaatcagtngaaagcaaggaatttggaatctgaaaccattggaactgatatcaaacttgcttcaactgaggtagagtcaccagccttagatgatcttgaaccgcaacagattcaaaagtcacccgaggatgaatctagcaaggaacatgttgcagctgatgttattgtaacggaagagacaattgctgaaaataagagcgacgtggattatatataaattttactgtaaaacatttatgattcatttgtgttgtctttatgcgtcacttcaattgctgtgattactggtttggggataaaagttgaaattggttttat

SEQ ID NO: 136705 - DNA, 525 bp, Arabidopsis thaliana columbia
  unsure (1)..(525): unsure at all n locations
cggacaccctggacccancgntgttncccccttggtccccccgtcagctgntnnnccggggtttcagngccccngggcccaaagtctttgctggaacccncccccaaggttgggctaatcngntgaatncaaactncccccccacatctcngatattgcctgttccataggggccatnttaagggtggtnccatnccacagtcatgggaaactgaggcttgtgatacccctcgaaatgaagttacaatgttttggattttgnccggaaaggttgtgcagaggtgagaaaaagccaagccattcttttgtttaccaagtgaggtgatataacatttttctgggggttttcttttaattcagccaataaaacgtaggaaatttnggacataattttttcttttatggtncttcatgtttaaacattagttttcacgtaattacttgcgtatttctcatcgattacatcaattctaacgattcactatataaaatgtcgaaattataaacttgtttattgaatcagtt

SEQ ID NO: 136706 - DNA, 300 bp, Arabidopsis thaliana columbia
  unsure (1)..(300): unsure at all n locations
acaatgcaacgcggccantgtccanccagcanagcttcccgcaccntcaccgacgnaaaagaccccagatgtgacantaaccccaacctcattgccgggtgctcgttcaggagttggaggtggttccaagacagttccctccgttggtaccggctcgtccagcaggaatgttgaccccttgccgcngcattttcttatgtttgctgtattggtggtctgcacttcntcttttctntaaccaattctgagagttcatgtatttggtaatttcatttcanntgctgtgncagattgatcata

SEQ ID NO: 136707 - DNA, 499 bp, Arabidopsis thaliana columbia
  unsure (1)..(499): unsure at all n locations
tnccccttccaaggncttggctgggncttccattgcccggtaataaattcttcccgccccnttgagctttnggcccnaagcgatggtgnccggncatacncccccagtntcaggggtaactgtgaatatggtnccggcatatggagagtngatgtaggaatgtcccagtggtgtcttgactctagacccagaggttctggagataagaggggacaaagctagagtaataaggagcaaccgtgacagacttcatgaacttcaggttgcagattacatttaaaaaaaagaaccagactctcatgttcaagattcaaactttatcaccgtatttgtcatcatacacataataaagcatcagaaggtttcnagtctttcagacaaggtccagatgcagttgagcgaggccatactttgaactctatgtacgtatctatgtatatatgtgtgtgaatcatcagatacaacatactatactcatcaagtaaaggttttgtatagc

SEQ ID NO: 136708 - DNA, 497 bp, Arabidopsis thaliana columbia
  unsure (1)..(497): unsure at all n locations
cnttggccttcccggggaaaggttngggtttggttccgattgaaccccctnacccnattggaaccntntggaaaancccggggggggnccttanaatccgggttttnnaccccagngggnttaaanggcccccaaaggcggagcccggggggggcccccctccccccggatntcaaaccatgcagtgnggttcaagctnccgggaaaatggagatcatcattcctaaaggagagatcagacgtggaggtccttccttcgagttccgaccaggacactaatgatcttaatttgtttaagaacaaaccacttgatatgtctttattacttcctcactttcatttcttttgtgctttttttcttttctggttgattcttcttatgggtatggaacttagtgctgaagctatcaaacttcttattagtctcttggtgtgatgtataaagtcgtctctctacatatcaaaggtnctaaataaaatccataatatttctgngt

SEQ ID NO: 136709 - DNA, 491 bp, Arabidopsis thaliana columbia
  unsure (1)..(491): unsure at all n locations
ttanatntccggnaaccgggtgnccnacattcggccggnggttnaanccctttnccccccccggngnactnggatttcggagggccccncttcngcccgaagaagattcggggnacatcaagctgagacatggtggncggagaatccggnaaaagtgtnccgaaaaatttaatgtaagagtatcggaaaaatccaacggcttctcaaacgcatagagacagagatgaagaagaagaagacattcctcactagtagtcagtctcctaataacatttgtatgattttgccccataatttcctgtgtctctctgttttgccccaaaactgttcattgttctacttaagncctttttttttttctctatctcgattcaatctgtgggagattaattttcatgtcctctacatgtatgttgtatatatatatgaagaccatcggttctaagattactttaggaagaaaaagaaaaacttaagtattgaatttgcct

SEQ ID NO: 136710 - DNA, 498 bp, Arabidopsis thaliana columbia
  unsure (1)..(498): unsure at all n locations
aaaaacntnncncgntccccntgcccccgggcgggnctccnaattgtccgcccccggacacccgacgtctanccgncgtacatccccgatcgtgaacgttagggtgttgatttggtccagancnttgngatcttcctcaccgatgttggatctgttctggtttcggctatgatgattggtgttgcgttgatctgtgctcatggtgcttttagagctccggaagatcttttccttgatgagcaagagcctgctgctaccggattcctctctttcctcggtggtgccgcctcttcagccgcgcctgctgttatcgccgctcgcgtgtaaatgcgattccgatctaccattccctcgcctgggtaaatctttctatatgattcatttgttgaatttgatacttagattttgtttttttaatctgaaaacaataaacgtgaaaatgttgtggatctggcctaattttggttcttgttcatgggcaatagctatagatgaaat

SEQ ID NO: 136711 - DNA, 511 bp, Arabidopsis thaliana columbia
  unsure (1)..(511): unsure at all n locations
acgtacggggaanagcccggncnttccgntcccaaagtttaggaaattggccccccaacttgcnggaaccaatggttggncccccccggnggcantatccatgctgcnccggnaaatcttgncaacttgccgtngccggataccttttncaccgccgtaggnccttggtgtaggggnttnacttgaaaaagggtgttcttggacgttggtaaccattggcatccctttcttccccaggacaaaagatcgatgcaagaatgtgccggagtncttggtaaaaccctaagaagtactactgtcctcacatgtggttccatagttttttctcttgtagatattctcacatatcttcttcctcttctagtgctttcatgcccatggtggctccctctccttaatgttcatcatcataaacgtgtttgatcacttttattgtaaggaaaaataatcggattatgtttcgaccaagaaaattatgctaacggaagggccataatggtgattgtgttgc

SEQ ID NO: 136712 - DNA, 501 bp, Arabidopsis thaliana columbia
  unsure (1)..(501): unsure at all n locations
actttgaggncctctctcattccccggttcgaactggcaaaactgtcccagacccgngggntttgtncagcccctttgattggacctctccatatttggncgatgtagatgaactgncctgnggaaaatggaagaagcaagattggctttatgtagcagcagtgaatnccgcaaaggaacgagaagatgaagaatctctggtcatggctgctcaagctcgagcttacctgcaatcactagcctttacatattaatcatcttcaggtacttacttctttatnggatatttctctccttgggttgttttaggagtatgtagatttgtaccatgaagaaattggagaagaaaagcttatgtgagaaacataacgttatggttttcccctaaaccaatgaacgcaactctgagtttttgtttcttcatttgagcatgtatgtatctatatgatcttctacattattgggaacataaaatcagattgtataatgcatctgttcaat

SEQ ID NO: 136713 - DNA, 495 bp, Arabidopsis thaliana columbia
  unsure (1)..(495): unsure at all n locations
antttnaacctccnttnaanggagtgacttcccccctgtaccctttcaaaggctccatttgnagnggtatgatccacccttccccccaggtggatcaacttccngtgaaggactgaccatgncgatttgaagagtcgaannagcttaaagagtttgggnccactggttaaaangcgtatgattagagagtctggtcttctgtgtaaaagtcagatggggtgccttacttagtctggcctggtccggtcagatccngtggttngtgggtttgagtcatggaataagcttgttgggggngagttgcgtaggagtcatcaaggnatatttatttttgggaaagggtttataagtttttaaagtgtgatctnatgagaatgtgtctctctgggtttttgttacatttgtactacacaacactgcaaagtcaaacataaaaaagttggtcaaactttatttggtcttattcgtnacataaaagcccaattggttcgtctc

SEQ ID NO: 136714 - DNA, 411 bp, Arabidopsis thaliana columbia
  unsure (1)..(411): unsure at all n locations
ccaaacccccccntntttttaaaancccctttnggaaccttttaaggaangggccttanattnncccccattgtttntttcttnaaaccccaggcccccccccaacttggtaccccccnaggttgagagttccncagaagcttcnccgcggaggntttaaaagatttaccagagctacttggatggcttgggaaactaattgggggacatgaggatggtgacgaatgattgatttcnctgtttttgttttgtcttttcttacaattttatagtttggggtttggaggttttgttctgttaaattcncgcaatttgagtaagttataacatgaggcggcatacaataatttattgtttggtaggatatatttttttgtcacttttgcataataataattctgcttcagtctc

SEQ ID NO: 136715 - DNA, 484 bp, Arabidopsis thaliana columbia
  unsure (1)..(484): unsure at all n locations
cctttcnggnncnaatngggnnnggnaaaaccgnggaaattttccccgggggtttttnccccgaaaatttccggnnccgncctggnggggccccccnagaattccccccggggtatttncccgttacccnggaaacccctgacagtttacagtcgnggtaccccccaactgaaggacatagttctactgcctgggtgtgatgatatgtcccaaatgcatctttattttttacttctgcggttggatcacacctctgagtcgtccgtcccaataaatggtgtttgttcccaatcgctagaccctttattattgtcttcgaaactgagcaagccaggttgattattctttttgtaagagaaattgaaattcttgtataatttatgagattttgcatcttttttttggggtaccaaattactggttcagaacaacatacatttgtttgtcttattactgtcacgaatgtcaatgcagcttcttcttc

SEQ ID NO: 136716 - DNA, 525 bp, Arabidopsis thaliana columbia
  unsure (1)..(525): unsure at all n locations
tccccccccccccctggnnnnnngaggcgccccaangcctaaggttnccgtgtccaagcgttgactgncgtncantgaagctagtaggcttttgtttacccgggngcagaccccgntgaatgtcgaaaacccagaacgngttcttgaacccttgaaggtcatcaccctaacaagtttagaaggaagctatacattgccagctcgaatggattcttcgtcatcatcaacctcgcttgatcagcaacaaccactggagtttaggaacaataactctggaagcaactcgggtttgttccctgacgttatggagacgtttttgaggtgattgacatgttcaagattcaggtttaaggacagattaaactaaaagctctcgatgctagttattagcttatgcttgttataaatacatgaaactctctgttcgttgtttcttccttcttgttgttgttgttgttattgtaccatattgtctgattgtttctccttttatgtcaacactcttttaacatttgaagatacttt

SEQ ID NO: 136717 - DNA, 380 bp, Arabidopsis thaliana columbia
  unsure (1)..(380): unsure at all n locations
ggncccgnttcccttaanancccccccccatcnccccccaaatgtggnncntccccccacccagggccgttcagatataaaaccnnccccnaataaccccaacccagttggcttccannaaggaagattgggacttttttcccctttcaaatttccccnatatatcaaattagctccctttttttctactttttatcctcgttagataattagattttgttctctttactcgtttggggattcattatatggggactttggtaatgcttaatttcgtcatggttggtaaaaatattgtcgtgaggttttcggtgtagaatacccaattcacggccccaatgtatctgttgtcaacattatctttatagcttctacaaatc

SEQ ID NO: 136718 - DNA, 504 bp, Arabidopsis thaliana columbia
  unsure (1)..(504): unsure at all n locations
ccccttttttcccccccgttaaaaaacccccngnnaggaaaangcccaaaggntttaanaaagnaannangggtttgttgcccattggggggnggccnagttccgggggaaaagggaggaaggaaaggggaaggggnaagnttggaagccntccngngggggaacccnggaaatncgggggaaggaggaaggcccaaaggaggantaaagcctgggaggagaaggaggagactgatggatggtcacagcccccaagaagaaggaagaagaagtcttaaggagcgctgaatagaaaggggatgcaacattaacaaaccctgtattgtatttttttttttgagctaaattaatgtcgtctgtttttcgtagtgaacatcggagaatttttgttttggtctggaaacgattcaaggtttggcaatatcttaagtttgtttaggttttcactattttgacgtttgcaaccgtgaaggaggctcctccattttataaaatacaattacc

SEQ ID NO: 136719 - DNA, 529 bp, Arabidopsis thaliana columbia
  unsure (1)..(529): unsure at all n locations
ttttcccctgggggncttttttntaaccaggttnnccttttcccngnactgatncattcccggggattccnctttttacggggcttcctggaaccttggggttggaantgggccaaaggcttccccaaggacctggaggccttccaccaatngcttttngcccaatggaagtccccatggggnccnnttnttccggcattcttcttacttcaaggcggccaacnaaccccngggnccnaagtgaaggaacatttgggtgcgatctaattttgtcaagtgccctcacaagaggtactgtttcaagccatggtatggcacgcttgtgatctgcgatttctggattttgctttgtatgtttattttctaccttctagaaagaggtcaaaaagttaatagcttcnccgtgagaatgttgttttcnccagattcatgtgctatgatagaaaaagacaaagcaaacaagagttctttctttgcttaggttacaagaacaagagtatcgttataaagtcaacaaagattgaaacat

SEQ ID NO: 136720 - DNA, 515 bp, Arabidopsis thaliana columbia
  unsure (1)..(515): unsure at all n locations
aaaanganttttcaaccaacattctntgcggaggcgngcagcagccntcatcaggattgcggtgcccngaccctgactcatctcaaggctcngacagtccattcccggngatcgcccagacccgtcgttccaacacggtntcagcgtcgaaagtgttacaagagactngcaactacataagaaacttgaacaaggaagccgatgacctccgtgatcgattgactcagcttctggaatccattgatcctaatagcccacaagccgccgttattaggngcttgattaatggataattaagatataaattgattagttgtgctttatatatataagcttaaaatctcgttgggnggttgatccatcagggtgttgcataattatatatctattttatgtttcttatatattatttacaatcctatctagttagggttcatattttgacccttttttggtttaacgtcatgcatgcnattccattaagcttaaaaattataataaataagatttcgagt

SEQ ID NO: 136721 - DNA, 519 bp, Arabidopsis thaliana columbia
  unsure (1)..(519): unsure at all n locations
tttggcgaaacatcttcncttccgcaaacttgcccctnccngactngttacccagccatgtntgataaccacttgnccaccggagggaacnctctacattgtgtgatgatgtgatccgcnagaagtaaaagaggtaatgatttgcttctacatactaatggagccaggggaaagctaccttggaggatctggatttgaggtgcgaggaactgataaaggaagagtttggtgcgaggtgtaactttgatgtagaagatgcagtccagaagctagagaagttggggatagttgctcgggacactattggaaggtactactgcatggggctgaagcgagccaacgagattatagggactaccacggaggagcttgtcctcaaggccaaacagggcgtcacaccttcttgaattcaccttctcttattttcagcatttgttttcttcgttaatttgatttcaatacaactttaagttactgtgtgggttgttactaaatacaagtgcaacaaattcattcacc

SEQ ID NO: 136722 - DNA, 497 bp, Arabidopsis thaliana columbia
  unsure (1)..(497): unsure at all n locations
atccctggttagccatgggatcctaggtgncccccatgcatgttaagggtnggatttagggtgttangncatgggcncgcccaccaattaggattaccaccacatgccngttggttntgccagggaaaggncnggaggtggctattaaganccattgcttctaccccagaggancagaaaatgtttgggaggccactttggtgtagacgacaggcttatcagtcacatttctagtcgatccgtggacgtaatcagaactaattactggaatgagttatctaacgacgagaaggatcttgttttgagacttaaaaggatattcaagatacaatgaagatttttgagatttgagagtgagggacttaaacttatgtattttttttctttttttgaagtgctgatttttttatttttttttcgtttttaataatatagacaaacaactcctttaatgcccctaaatactttatggaagcaattgtcttttgtttttggct

SEQ ID NO: 136723 - DNA, 510 bp, Arabidopsis thaliana columbia
  unsure (1)..(510): unsure at all n locations
ttaccaatgggcattctttacccgctnggaccgngtgtccccncggtanagggntcctgaagcccccacggtttaaatgttcccccgatgtcctcggagatttggaaccaattgcttggggaagatattttcnttgccagtttngatgttggaagtttagtgagcttcncccaattaaaaaccgatagacttctgtgtttgaagttctaatggtttccggtggttttggagtttccgtttgttgcttaccatacgatgaacggcgacaacataaacttcatctctcaacgtgttaaactttagttcatagcatcacatgtggctctgtgttggaagttttaatgtttacttcctcaaaaggtttagtttctagattgagctttcataatattaggcctttaagttgaatttgttggttacagtttaatgtgtgcagggcctgtaagtggaaggttacactgttgtatttcttacgacttaagatataaataaagagcaacacttatgagg

SEQ ID NO: 136724 - DNA, 418 bp, Arabidopsis thaliana columbia
  unsure (1)..(418): unsure at all n locations
accccggggtttaaaaccccccttttttttggggaaaaccttccncccntccccanccccnttttnntnggggggncccccnnaaaaccccgaaaggttcgggttnnggggtcctttaaaagggtggggnaaaccaagtggngatcttatgcatataatctggctggtgaatcnaaaccggagtcccaaggagatggatgncaaatatgactcattcgagcttgcaaagctattagctatggctcaaattctgtttcttgttctagtggatgaactggcattttaggtctagttttttttggcttatctatacaattcgtttatttgtggggtaaaaaaaagttgtgtaaattttacaggaaaaagaacaatgcttagatcttctttttagttttttaaatattctgtccttctgttc

SEQ ID NO: 136725 - DNA, 315 bp, Arabidopsis thaliana columbia
  unsure (1)..(315): unsure at all n locations
agggcccccntttnggggcnttagccnaaggggaaagggnttggngttccnccnggatgcatttngcgaacnccacgngcggaaccnaccggctgtgattgagaagttaacggagatcatgaagagccttggctgctaaagacaaaagaaaaaacaagaatttaggatagtgagtgagttctaatctccggtgaccggtgagtttgtcatattttgataccttgtatttttgtatcattttttcgatttggttaatgatgtaaatttggcttttattttttgtactaaacatgatttctaatggttatcttatct

SEQ ID NO: 136726 - DNA, 342 bp, Arabidopsis thaliana columbia
  unsure (1)..(342): unsure at all n locations
ccccccccccnggnntttttngggggntcccncttttggnggaaacccccccntccccaaattgttccccccgggnttnccnaaaggctgcatcttggaatccgggaaccgtaccgaagaagtgggttcgtggaaggctcgtcgaagtcacagaagccngcctaatgttgtagcaatttagcagagaaaagtcatatttttcaattagtaattcaaaattttggcttatatattngtcttatctcttatgcttgagagaagcagtttccagtttgtgatgtgccaattgtatctataactcaattgtatgtcagagtttcagcttagtaaacaattcttcat

SEQ ID NO: 136727 - DNA, 330 bp, Arabidopsis thaliana columbia
  unsure (1)..(330): unsure at all n locations
gggngnaccccnttnttaaaatnattccccccgggtgtatttttcnagacccatgngcccggggganaaacccccgggncccattggaaaagnnaaggtttttaggctttccccctgaagctttctgtagcttgaggaatctgttggatggctgaaactngtgtgttttctggtgaaaaccnatgattatataattgatgatgacgaataatctctcccacggctgcttttgtatttagagattttacgcagctgagagaactcttttgagatatacttgtgtattaagtgtgtttgttgtgtgcacagtatgcgattacagttttgtgt

SEQ ID NO: 136728 - DNA, 355 bp, Arabidopsis thaliana columbia
  unsure (1)..(355): unsure at all n locations
aangcccccccaaatnngcccgggccccagngaggntnctgnnccnaaggcntaacnccccggggaatttggaaggttggggaagcctaaagggttttaaaagaccntcgtgggaagcnttaggaaagcttcgagcattagttctgagaggtgaaaatggtaaatttccacggttcaaatgtccagttactgtgtgtttggacattgtttagctaaaaaaaacaaaagagagcttccattgttaaatgtgtgcattgtaggcttgtaatcatgtttctttttttcaattgtttatgtaactttgactaccaactattttgtcatttttatatttttattttaaacctctaagaat

SEQ ID NO: 136729 - DNA, 259 bp, Arabidopsis thaliana columbia
  unsure (1)..(259): unsure at all n locations
caaannaancccanntggaggcncngggtttggntncactggtaattgaattgcttgctgatttttcnaacttcttagtgaggacaaccattcaaaacactgtcatactcaacttaacaggtgattttaaagtaattgaatagctcagaaatattcttagtctagtgtctgagtgactctagtccaaagtttgtgtgacactctttaacactataaaatcatggtgttataaatttctgtatattcaagctattttccc

SEQ ID NO: 136730 - DNA, 285 bp, Arabidopsis thaliana columbia
  unsure (1)..(285): unsure at all n locations
cttaagccccacaatngggccttcnaagccnntngaacnnntgcnctgagagnccttggccttgataactacaataactaaggtcaatctttcnccattggttggtactcgcaacaaccggaatgaatccagttttttttttccaaaaatttcatgaacagtttgcattgaattctcttttgggtagaaagcattccgatctagtcttttttgcaacattgcttttgttcgaatgcttgaaaacatgtagtaaaaattgaaaggaattgattgagaatttcggtg

SEQ ID NO: 136731 - DNA, 334 bp, Arabidopsis thaliana columbia
  unsure (1)..(334): unsure at all n locations
aaannnggggaatttccccccccnaaaaaccccttgggaanccggggccccttntttccngttngnatccnaaaccggaaagaaggacntccgaagaanccggagaaagccngtgaggaaagtgttcggaggattgtttaagcaagagaccatctacatcgacgatgattgaaaaggccatatgcgatgtcgttttgaagttccgtacagtttccttttttctctttccttctgtttcaagttaaaattctgtaatcgtatgacaaaattatacataaaaaaccatcattctctctttaaatcccttgatataacacaagtttttaatttgatt

SEQ ID NO: 136732 - DNA, 475 bp, Arabidopsis thaliana columbia
  unsure (1)..(475): unsure at all n locations
cccncggantcnggnaaaaaaaantgggggggaaatttttccccccagggtttccggccccncnaaaagnccgggnnaacctttggntaaagaagccccaagtcccattcntaggctttntaaacccagaattccgaaaggatgcaaacccnggggaaantngcccttgccgaaattaccncatatcttcccaantggcattcactctcacaaggatctgctgttctcatacaacattgcggttgatagaactgaagaaatgaaacgagtgcttnataaatctgcagcgagtgtagggcttcgtcttcctgaagtttacgagccttgatcatgcattcattcctctttgtctttccgggggatgagtcgttatgatttcttcatttctgtggacaggtctttggttaatttttgattatatgagatagtagatgaagccagagagctcttttcctttaagcttttaagtattgac

SEQ ID NO: 136733 - DNA, 508 bp, Arabidopsis thaliana columbia
  unsure (1)..(508): unsure at all n locations
tggcatctttcaggtcagcttcccncnctggttggtgtcccgtcccccctntttccgggattgccntnattccggncntatgccccgccccattnccgnggcctgatgagcntgngntnctgncttgccctagaggnttggtgaatgttttagcgaaaatgaggcctaaaatcttaaggaatcgaatccggtgatgatgaagcagaaagagngtagactggagatggaggngatgagactaaagcgtgatactgagggttctccgaggaagaacagcaaaagatttnagaagcttgtattgttttggacataatccattaattagttcaaataagattatgaggaagcaaacaaaaatagacgtataagaggctnattacaactctttaagtgttttttaaaagaaatttcttgtatgtttattttctagggttgtgaaccattgtaagacccattaagagatatggaactttatttttccttaaagtaagaaactatatattgagat

SEQ ID NO: 136734 - DNA, 532 bp, Arabidopsis thaliana columbia
  unsure (1)..(532): unsure at all n locations
ttcaggaangtcccaanttncccccccagggcgggatttgatggaccaagngcccgtcatncntggcccctattccaaagccgggatctnggctccagccnaggaggggtagtaatgccccnnttggaacatgcaagngtcttaaaccgngccngccggntttaagcccatccagagatgttcaatgnaagtgaaagagagcccaagttgggaaccataaacaatcaaagtgatgaaaaagtctgcaaaaggcttcgattggaaggagaagcttctacatgacagacttggaggtaaaaaaaaaacatccacatttttatcaatatctttaaatctcgtgttagtagtttgcttctccaatctttatgaaagagacttttaattttccttccgaacatttctttggtcatgtcaggttctgtaccatattaccccatgtcttgtctcttgtctctgtttgtgtatgctacttgtggtctatatgtcatctgctactactgttaattaaccatgaagcaatggatttgtcttt

SEQ ID NO: 136735 - DNA, 459 bp, Arabidopsis thaliana columbia
  unsure (1)..(459): unsure at all n locations
cgcccccggtcgngcnccatttggtgtttttggntgntcccgatctgaaccccggnagctgaccaagtgnaggaatctctcaacngcatggatgtagatccggattcagaaaatgncccagccncaaaagcgtgatcatctctggtcagattcgttattcccaatacgtggacattctcngagagaaacatgcgccgcggacactgnacaatctgcatctggcaaaggatncgngagcccgacctcggactgggaacatgtcntcnaggatgattgagtngtgaaatttccttggacaagaagtttcgatcctataatgaaatcttgttattataaataaaaggtatttgtagaataacatgaacggccattntgaaaacgtttgttatgtntgataaaaggataaaactgcttggatgctgattttcataatatgatagttttaagttactgattttc

SEQ ID NO: 136736 - DNA, 532 bp, Arabidopsis thaliana columbia
  unsure (1)..(532): unsure at all n locations
atgccaagttncaagtttnccaccctggagggtnttccgagtggngctgacagaactcttgatgggctttccaggatgctnggaangagancgaggcccctattacgtgctatgaccaaggttaccaacccaattaaatccggntgaagaagcgtccaaggcgtgatagcagccaaggttngtgatgtgttcccctcaacttccccttgaagaatatgcaaacaagtccggaagagttagcgggattattggtcatggtagtgtgcctgatcatgcccatgatgatgctagtggacctgaatcagatgnggatgacaatgttggtgatgatgagcatgatttgcgcgaagacagtgatgaaaatgagcaatctcaactgcagaaataaactcatgtttggttgtactactgtcaatttggtaggattgtgagattttgcaagactgtttattcctgttgttttgataaaacttttacttggtcacctgcaatgcaagactagcaaagaatactataaattttgttctgtttt

SEQ ID NO: 136737 - DNA, 517 bp, Arabidopsis thaliana columbia
  unsure (1)..(517): unsure at all n locations
ccncctggagattacacattccggtgcaaaccntaacctnccgcaaccttaccatggaactattgatccctaattncataaaatgccnctcgttcactctccggtcccttaaatctctttctccgccgcatccggaagtctgtcttgtccattgtcttaaggaggagttacgttgctacatcgcagaatgtaaccagcagcaggattgagtaagggaggttcccaccagagttatggtggggaagatggaacagagaggtttagatcaagaggcagagtctgcttggggaccagatccagttactggatactacagaccttccaatcgtgcggctgagattgatccagctgagctcagagagttgcttttgaaaaacaaagcaaagtctttctgagaattttgattggttggttgacttggttccagtggaaggttgtcgtaggcgactattctgattatgtgtgtttatgtttgtcttgtatcaactattaagtaaaaataaagatcacattaact

SEQ ID NO: 136738 - DNA, 510 bp, Arabidopsis thaliana columbia
  unsure (1)..(510): unsure at all n locations
tctcacccgggagccgacttccatctcactaccaccagcgttnnaaccactggatgncgtcaaagttccctncctcttatcaagcanccttaggaatctttnctnccgttagtgtctcagaagttcgaagncccagcagaaggggaggatacactngtggaaaaattccaagaaattgtacgacgatctcaatgctggattccgtgctttggaagatgaaactcggtaagctgtcgagtctccaccgcaagtaaaaaaaatccacagaattgggttgtttttggagaaagagggtttcattcatggtctctttcttgtgtttttgaaccaacaactatcatagtggtcggtattttatttatcggtttggtcgatcgattgagttttagctctgtgagcgtcatgattctccggctgtgctgtgctgtgtaatatgtttgattcgttgttttcatgtttttatttcggtggtaataaggtacagccaatgtgagtcatatatttgatttg

SEQ ID NO: 136739 - DNA, 502 bp, Arabidopsis thaliana columbia
  unsure (1)..(502): unsure at all n locations
ccccnagnngttctggacnctcntacagggnctcangcggttcacangtggccccnntntcatcacttcagctaacccgngccattcccntgggccngtgcttccagtcctcacnccattatcgacgatctcttgccttgtcatcaaaatgccgatttnccatcgactttctgtattcagagatgatgtgatattcttgatatacttatnccaaaggtgggtttccccagtggataagacacgtgtgaacgagttcggttttggaggtgaggatgaaactgcagagaagaagttgatcactgagaaagaagaagaagacaagaaaacaaactaatctcttctcttcttcaaattttattacagttcagttatagtgtcttaatttatttttgttctcacttttggaaattgttttgttcaagtttaatgtcaaccctcaagacacattattaagcaactcctttggttttttgtgaaaaaggaaaaaaacaacattttctct

SEQ ID NO: 136740 - DNA, 512 bp, Arabidopsis thaliana columbia
  unsure (1)..(512): unsure at all n locations
gggtgnggggancttcgccccttctncacgtacgcanggngattanggctaactcgggcatcgngcgaaagctgtggattcnccntgcgggcaancttcatagctgtatgcccctcatggtccagtnctaccacgtacgaggcgacaattgctcgagtaaatgcaatggctccttctaaactcacaggtacgatggctttcatgttcgaatcagcattgatccctagagtctgtcattgggctctggagtctcctttcctggatcacgactactaccagtgttggattggcctcaagtctcatttctcgcgcataagcttggacaagacaaatgttgaatcaacagagaaagaaccaggagcttcggagtaaagaacacataattcacctgcaccactttcaatacccaagctgtacagacttttcaccatatacttgtataagaaagaagcatataacangtacatatgtaataataagtaggtaatgtttcttcatgtcactttaaatac

SEQ ID NO: 136741 - DNA, 501 bp, Arabidopsis thaliana columbia
  unsure (1)..(501): unsure at all n locations
tttggaaantgggtaaggtcccccttgggtgggtttntgggtgtatntgggaccgggatcanttntccntggtctnggcggcgaagttcccccggtgatgagtcttcatcttctgacggagaagcggagttccagtgncgaagaggacgagggctagagagaattccagatcttctctgctccgatgatgagatcggaagctcttcagctcaagggtcaaactattctcggccgttgaagcgatcggcgtttaaatcaacggttgttgtttaactcacactctaccgtatcgtcagaatgaacggcgccgatacatcgtcttctccgatctttgcgatctccaaaacaagaagagatctcagccgttgattcctttttttttcttgtttaagtaaatcaccaccgttcagttttctgacaatactttgttttagagatgaggtngtttctttctttctttgaatgtcgtacaaaatcaaatcttaactttttatttttctt

SEQ ID NO: 136742 - DNA, 538 bp, Arabidopsis thaliana columbia
  unsure (1)..(538): unsure at all n locations
aaacttgcggtttcccccggtgcccttcgntttacnnccgcccctgaccttccccnttggcgcccgtcncttnttcntggntggtcccgggattccgggatattggnccgaaacttggtttcncttcngggntaggactttggtccattncggaaagattgggcatacncgattacctaaagtgaagaggattattgggtgacttcaatgaagncggatccctgagtattggaacaaggcnccgaggagacagtnttgtgaggtgatggaaggaaaagtaggaaaaagaaaagagaaagaaatgttgttaaggattagaaaatgcagatctttggagaagatataaaaaaagcgttttaattagagagatttttgcacatacagatttagattcgatcattagttatttgtttctaaattcctcaattcctagtnccaagagaatgacgattttctctagtaatactggcactcttcgtttttcaacatgtaaacattactttgtataattagtctatatcaaataaatagttacaac

SEQ ID NO: 136743 - DNA, 560 bp, Arabidopsis thaliana columbia
  unsure (1)..(560): unsure at all n locations
antggtccccccttngttcctaccgntaatnctttagaattgccntttgccctgtaaancncgncngggtcaaccacgttgtccccacattctctggccactactgngtggatttcttnccgtggtancagtccaatgtagttattgngttttaccatctgtctgcccctgaaaggaccctgcggataaaccaccaagcccagacgcttcgtttgtttgcagaggctaaagacantgttaagaaattgacatcaggagtcacaaatactgaccctgcgctgaagaaacaagagtgagagcttgccacatcccatttttgttaaacaaggaacagtgtcgagattgcatcagaaggagcagagctcaggttcttgcaatgtattgtttggttgctagatcattctgtgttgtgagttttgggttagttgagcagaaaaactttgacatgttcatgttggacagagaagatagctaatgttgtaggacaaaatttcacaaaaaccataaacagctgtgtccataattgtttaattttaagcaatttgatctgtttttctcac

SEQ ID NO: 136744 - DNA, 537 bp, Arabidopsis thaliana columbia
  unsure (1)..(537): unsure at all n locations
atanccncggncaattccccttgtgggccgnacccgcnggatggcccccntctgggaggggntctttttggcccngatcatggaagngngtcttaagcatgccccctggactgggaaacncaatattctcccatttgggttgcagcttacgatacaatcgagaagaagatggcgtttttcgatcccttctcgtgcaaaagagtttcttttccatttctggaaccaaagatgcgaacttatgcaagaacaggggagaatcctccagatggatttatgtgtccgagtggatggaatgttcttgtcaaatactatgagagcttgcaagagaaggaagcaaaacaacaagccgttgtttcagcctaaagaatccagttgcatctctttcagaattgaaactccttagtgatctatatgaggcttttgtttcacctttcattgttttgtttaaattactncccttggatccatgtttttgtctcatggaaaaaactcagatgtttcgaaactctgaaaccaaataatgttctgattgacgag

SEQ ID NO: 136745 - DNA, 551 bp, Arabidopsis thaliana columbia
  unsure (1)..(551): unsure at all n locations
cnccagtgtgccttgggntttatcccaccgagaagtttccgtttgcccggaccggtttccttccccttaggaggaccccgtgcccggagatccttgctcccgncggngaaaggnggagagggaaaggancctgcagcaatgtccncggcagagtatttgtcggaggatggcttngccaaaagggangcaaagncnatataagtgtggtngtggttgatttgaagggaataaggaaattcaggagcaaatccttgaattgaaaaagaaggtttggaagaaaagtgaaaaaaaaagttttgatngtgggtaaaaattctctttagtgaaaaaagaaagataaaacaacaggtaataattacattgtaatattaatttcctgcttaaatttgttatttactttcttagtcttcccaccattatttaatctttttatatttattttactaacatgatatatataatgtacaggggaatagtgtaacttccaaacaaaaagcccccttgtatttttttttatcttggggttagttgtaataacactacattcgtct

SEQ ID NO: 136746 - DNA, 544 bp, Arabidopsis thaliana columbia
  unsure (1)..(544): unsure at all n locations
ccccaaaagggggatggtccagcttggcatcataccagnggaaggttatagttccgcttccnaggaagccntaaccnggttncncgtggnggaccccaaccactctggcttcccccatacccagttcaatccgcatctcggttggnccggggnanttgctactttggatgttaaagggtatttccccggatagggattgtagcatcgttgatnccaaaggaaatgtcattgcacaagtaaaagaatggattgggagtagagatatatataaggtggtgacaaaaccaagtgtggataaagcttttgtttttggagtaatcgcggttcttgactatatatatggtgaatctacaagttgttgatccgcccatcactatcatcttcacatttctgtgtttgcttgagtcatcgatgttgttttatgtgtaaattagttaattaattaactatgtaactgttgtatatagatgccgagcaactcttacttatgtgcatattaactaaattatactagttatcaaaggactctccaatttgtacggtc

SEQ ID NO: 136747 - DNA, 546 bp, Arabidopsis thaliana columbia
  unsure (1)..(546): unsure at all n locations
cntngtgccccgggatgntgncctttnncattttccnttnccagggaaggccaaaaaggnaaggnaggttagggaccggntagggaaagctnttcggccggtgcatccagcgatgcacaccccaaaaccaggaccgtggttgaaattnagtccaaattccngaaaagctggggaaaccctcagcaatagcttcacaagcgaaggacaaacttcatgagcggggagaaaaactcgagagaatcagccaacgcacagctgagcttcaagacaatgctgagaactttgcatcccatggcacatgaacttgctaagcaaatggagaagcgaaaatggtggaacatatgagagagttgcagccattgtgggctcttccgtatataaactaattatcttttgtgtttccacaggtgaaaatttctttttcatgtttatttatcaatcaaatctgtaaaatagattgaccaaagagagcaacccttctaacttgaaaagttgcttgtgagctgatttgaggctgctttgactgtctatcagaattttaaattt

SEQ ID NO: 136748 - DNA, 541 bp, Arabidopsis thaliana columbia
  unsure (1)..(541): unsure at all n locations
ttggtttgaaccccgccttnttaaccccncaatncccngaaatttggggggccntcccntcctggggcctaacccctggcgnttttccngggcnccggtnttaccggggccttgaaaccccgncgtttttatncaancgagccggtgcatgcngagtggtggaaagtttccgaccagatgcctaagaagctgaaaggttattgtggtttgaatcttaagatggagaagaaccgttgagaagtggaggaaaatggctaagctcaatggttttcctgaaaatccattggaaaattagaataaaagatcctaggaagaagaaccgtctaagtcaatgagaagagtcatcaaactcgcttattcaacaagagacttaattttttttttttctttacgtaaagattttgaaagggaatttaatttctaacaggtaattgtggattatgaaggaaaaacattatacgtagttatgatatatatttcgttcgagtgaaagtatttttagttttttacaaagactaataaccatacttttatttggaat

SEQ ID NO: 136749 - DNA, 530 bp, Arabidopsis thaliana columbia
  unsure (1)..(530): unsure at all n locations
gnnancccnnttngggaattgggtggtgcccaaaattccgnggagaaaccccccccaggtcttaggganctacgggtcntgggggatttccgggngatgaactggaaaagagncgctttgatcctttgcttcagccntgaacaactatgcatatgaaagtagatgttttgttccactttgcccaataaccaatggactgaatcttttgaaactgtatgtgattttggtgtctttacattcctatgttcaatcaaatgaacgttggtacacattgagtaagaagactagttggatatcgaggtagatcgaacacgaagagatgagacggaatagttgaagaaagctgacatggattgagacgatattatcactggttttcactattccttttgaaattccatgtcaggtgcatatcatatgtgtcctaaatgtgattaatagagggtgtgcttgctataaaatatctgtgtatttcttatgttattctttgtaatctgcttctgtttttcttcaactacgaattttctgtc

SEQ ID NO: 136750 - DNA, 525 bp, Arabidopsis thaliana columbia
  unsure (1)..(525): unsure at all n locations
aataaacggtttcccccccaattngcaatnttgcngggccnttccccaacaatccgttccatggncnaagcntcattcccggcccagcaattnacagtgtccccnggtttcccaaaccatggnccatttaaggaggcatctgtgtgttcttccatctaaacatgaccccgaangacttcttggacttgtggagaaatctcgcggaagggcttgacccattatgtttctcgtaaatttttctcaggagaacctgttttacggagacaaaagtttgataggtttgaagttgacgcagaggcacttcttactgtgcttaaaccttattgtgttcgtcctggtgcatttttccctcgtgtgcgagagattcttaggctgttgaggatgcatgaggaagaaaaggcacgattgagaggagctctaagtcgaagtggaaatacttgtctaaagttgtttggtatttctaacttgtctcctcaacttgtggaacaattttgtaggtcttactagtaatgaatgcctttttgt

SEQ ID NO: 136751 - DNA, 512 bp, Arabidopsis thaliana columbia
  unsure (1)..(512): unsure at all n locations
gcgntntttaggganctggtgncatcgggaaccttngggntaccgggncttgcatggcaaagtcntttgacngatcatggctccggaggggatacnccttgaggatccggcaactaagtcttatgctcaagtgtttgctcccccaccatggatgggctatacggaaagctgtttctcttgggatgtatgctcttcccacaagggctcacctacttaatatgctcaaagaggatgaggcggcggctaagatacatatgcaaagctatgtcaattcatcggcaccattaatcacgtatcttgataatctattcctctccaagcaactcggtattgattggtgaagagcctgaaaaaaaggcataactattgttactctttagacaaaataacctatgttctcacatcaagctatgtaatgtcataacaacagcgacgaaatacattggaataaattgagtatgtccttaatctgtcgttttatctcttcttttaataaacacagtttatctcat

SEQ ID NO: 136752 - DNA, 531 bp, Arabidopsis thaliana columbia
  unsure (1)..(531): unsure at all n locations
tatcagccctnccagcngaaccatggctaatcngcaccggccagcaacaaggntgggaatcagacaaccggccagcaacagcagtgggctacccagacagctggccagcagtcagggtggacagcgcagcaaccagtggtctaatcagacagctagccatcagcagtcacagtggttaaatcccgtgccaggagaggtggctaatcagacaccgtggtcaaactctgtggacagtcatcttcctcaacaacaggagccagggtcctcccatgagtgccaagagacacaagaaaaaaaggtagtggagttgaggaactagtttgacaaactcgctatttcttctgcaccaccattctcctcatagttaatttggcttttgctttgtggttcctattttttgcaaactctagtagttatttctttaggatcaacatcataatctactacgttcgttgcccttgcttcttcacttgtatgtatggttcttttgaagccaatggcttctaaagagtaatggaattcaaaatcagt

SEQ ID NO: 136753 - DNA, 535 bp, Arabidopsis thaliana columbia
  unsure (1)..(535): unsure at all n locations
ccaattccggccttggggtaatcccctttatccaaaggagangggnggngagtcctttccccntttggaggcccccntaaggggaaggggctaaccctatgtttggctccagagtgtcgtggattattacccggctcttggncngagtcaaggtttatcaaagncgatttcgcgtcccattgagccgccctattaagctcattctttcccttaacgctaatcttgattcttctattattccatcttgagaacttaaaaccgcggtttcagaaactctcaagaaacattgaccaggttttttcacagattcttgcntattgggttacacactcgttagatgctacatgattcaacatccttcgagggaaggaggagagattaaaagactttgtcaagattcaaatgaaggacaaagcctgatttattactctctcttaatcctcagggaacatataggaacctgtaaatttgtaagatcaatttgtaaaacttgaagctacgacgtttcgttaaactttagacgtgtacctaaagg

SEQ ID NO: 136754 - DNA, 553 bp, Arabidopsis thaliana columbia
  unsure (1)..(553): unsure at all n locations
ccggcaatttttttttccggngcccnggntaaattgcaaacccttacttncgggaaaantttccnccgggaagcngaccccngggnactcattcccggaccattctccaaaggccatgtctttctcttctgtccaatctcccaccgctcatccccattggtngnggatgatctttactccattggaaacctcggcgaacggactccgcgtttatgatgcaaatgcaaactcttggaagaagcttggagatgtgcccgtgagggctaagtctaatggaggatggggcgttgcgtttaagtccacttggagataagttgcttgtgattggagcatcagccggtccgtctagggccgagacaatgtcggtttacacgagccgtccatccgcaaatcctgcgaacaagctgtattgggaggagtctaaacgttgctgtggcgttaggttcaatcattttatcctaaactgttgtgtaatgattgcgtaagggcaaaaactttgcgaagctgtggttttgtgtgtgtgtgattgaatagaaccgtgctattgtgggtt

SEQ ID NO: 136755 - DNA, 522 bp, Arabidopsis thaliana columbia
  unsure (1)..(522): unsure at all n locations
ccccccccatcccgggtcccctgggnnggcttccccnntccccggtnccaattccggcccccctttccaccnggnaanccnttttttttaaaagggtttccngccntggatggccccaaggtaatcccaaggccaagcctggttggtccccntaggggtccattgaaagccgggaccgagttctngctagcaaagtgcccgaagtttnctggagantttggaaggtaaccattatggttctttgttgggttatggaattgagttgcttctgtagaagagttgtgtgttctgtagaagaaaaagaaagaaaagattcncgggctaaaacagaagtccatatgcatgaggatcagagttgatgcgggtttctgccatgttctgaatctaatagtgatgccacttgaacaagagttcagtttttaggtattatcttcatattggatttggatattttctttgtcatttgatgtaaacgccacatctctgtttatcttcgtatgtgaatacacttcttttcgggtc

SEQ ID NO: 136756 - DNA, 531 bp, Arabidopsis thaliana columbia
  unsure (1)..(531): unsure at all n locations
gnggccaaccggnnttcnggactttgccccgcgaccccatncccccncggaggacccgggttccggtccatccnccgagnnccccccccgggngcaggaggtnttttggaaagtgaaaagccctgaaccgtgccggttatgtngataaggggaaagttttnccggtgaagaagcttaagtggaacttttagngggantccaacccatgtttttcgatggaatgcttatagacatgatgtgggatttaccacgactggttctacaaagaaacgttgtcgtctgtttcgactagttcatcgtctaaaacggcgtcgtcgtcatcgtcttcttcaacttcatcgtctactcctccgtgtgctgtgtttatgtttaggaggaggagtggtttggatagtagattatggattgatgaagatgaacaagagagtaagatgaagaagaatattggttctagagatgagaaacattcgttttcacttatcatttgtgcctctaaaaagtgaccaaataaacaaataaacattttaacat

SEQ ID NO: 136757 - DNA, 439 bp, Arabidopsis thaliana columbia
  unsure (1)..(439): unsure at all n locations
ccngggnncnttccgtgccaacccntcagggtgaccggtnctggancgatntccttccaatgtgtgaaaggggccccttgcagcccncaggtncttccctacgngngnccgttaaaattnaaaaangaggcaaaaccaaatgcagaccaagtagagttctgttgctacaatttaggccgatctcgtaagtacatactacaaaggangtaagtacgtttttttgacaagcagaagtaaactcgagaggaaagaatgtgattttacactcatctcagtggttctaacttctaagaggatggggaagacgattttgtctttaaaatttaagcaaaagtgttttcagtggaagaggtcatagaagaagatatcatgtngttttcttggttaaatccttgtcacattaaggattatatgttcatataaatctatttcatcggtc

SEQ ID NO: 136758 - DNA, 412 bp, Arabidopsis thaliana columbia
  unsure (1)..(412): unsure at all n locations
ccccctaaaaaantccccgggccccnataaaagggagtnccccccccccnaantctntttttncccaaantngggggnttccccaaaaggcncattgaaccccctttggnggccaaaggttatattgggggaaaccccccgntgngcttaaaatccccctctcgctgagtcgttcgccgcaagaaancccgcggtggtaaatgttattattganccttttgctggtgctgagagtgggagattacagcacaagaactaaaaagctttgtggagagtccctttaaataatgttgaagttgtttgttgtgaacaaaaaggatatacgtattagttttctgtttttcactattgtaaaccggatcataaaccggtccattttaaaccataattgaataaaaacacgtttccggtt

SEQ ID NO: 136759 - DNA, 457 bp, Arabidopsis thaliana columbia
  unsure (1)..(457): unsure at all n locations
attttgtggcncncccnggtcactggggtttaaancntcccccccggaggtntcaacnctgggggcngaaccttccataacccatttnacccnggaaaagctgggactttgacccggtcccaaacgngaagangcaccccgnggttgatgttgccatatcaaacccgttcgggttcggtggacacaactcggtagtcgccttctctgccttnaaaccctgatttcttcataccttttagattctctgccctatcggttactatcatcatccatcaccnccacttgcagcttcttggttcncaagttggngctcttcctctggccttttgcggttctttcattccccgtttcttacggttgctgagatttcagattttgtttgttctctctcttgtctgcggaatgttgtgtatcttagttcgttccatatttgcgtaatttntaaaaacagaaactg

SEQ ID NO: 136760 - DNA, 545 bp, Arabidopsis thaliana columbia
  unsure (1)..(545): unsure at all n locations
tcntcgggnggttttncccccngggttnccccntttggggccttganctggccaaaggngcctaaagttgccaactgccccccgggntgcnaantaacccaangggaccccctntnaaaaggtgggntatggatggacccaactgntggatggtccggattaccatacttcccccttcttaggagaccattggctgatgccnacggatgtccgnccctgtcatngcccaagagattccggtaaccagggaataagaaatctctcccttttgtttcccactatatcttgattgcagattctggatttctttaacagatttagtcatagactagtttagttcctcaagacttcttangtgctatttaattagtgaaccatagaataatgctcggtgatattagtacacaagtaaagcgtaacccttgttttagccaggataatagatcattgaaatcttaagtgttctaaatgtacagttggtgaagctgagatactgaatgtataaaagtgagtaactattgagtgaaatatcagttttggaggtt

SEQ ID NO: 136761 - DNA, 531 bp, Arabidopsis thaliana columbia
  unsure (1)..(531): unsure at all n locations
tgnccatctggcccnggnttccaaaactgtntnccgngtgcntgaggaccccccngcctngtttnnatnccttgaagttntcccgaggggaggatnctnccggagttccttaggaacccttggnggacccntctttggggccatgatgggggacctggaaanccccacctcttggggaaaggctttggaaattgtgattccaccaccattcttcttaggcaaaaccgnggaatccatcaaaacctagagatgagaaggatgatgagtttacacccagttgatgcagattttaacccttgttaagancctacttgaatcctactcttcacaacaaggacttcctggtcctgcttccaatttgctcggcctcatgggtttgcagcttccaaaagattccggcgacaaaaactgaatgcttatcaaaatgtagtttgtttttgggttcactttgtttaatcacataatcgtgagtaacgttgttggggaagtttttgtgttgtcgaaagtaagcacatgacatgtgatttcaag

SEQ ID NO: 136762 - DNA, 426 bp, Arabidopsis thaliana columbia
  unsure (1)..(426): unsure at all n locations
aaaanaatccctttcccncgttcccgaactttttaggccttgtggacccccttggcccgagaaattntngagggcccccncgattgccggggncnctacagacgcttttgttcacggggacaaancgggctagacggaaaagccgcttcgcttgcncgggtttttcngaggcnggaaaatgcancgatgcgnnctggcgtttacgggtttgtagggaatacaaatgggaatagngncggtggttttacaacggatgtctcagttccgatatcaatctcaatctccgtaccngtgttgtgatctatgtttagtctaaaagaactctaaaagtggtacttttttgttgttggtggtgtttgtttcattgtttgtctatattatatacatttattggttgggaggtataatacaagtaatattttagag

SEQ ID NO: 136763 - DNA, 574 bp, Arabidopsis thaliana columbia
  unsure (1)..(574): unsure at all n locations
acccattaggatggnttnnccnnctttcccnggtgagngtgngctgngttgcttatagggntgatcccattnncttncatcccccaggtattccccttccttcccaatgctgcatcattngccattcaaaaccggcggttnacccccttcagataaggtggagctattgggtacaacttnggattccaaaccatgtgggagtgctgtgtaccaaccgcacatatggtaaaggcctccaaattaaaagctggctatggattctggatggttcgccttggctgggcatctctctgggttggtgatgaagctggaaaagtgaaaacgacaccaatgaagatgaaagtccagttcatgcttcaagttccacaagatgacatcaaatcatcagtcttgatgttccgagtcaagaaaagatgggacatttgatgaaatctttgaataaatcatctcttagtttcactttctttaatctctctataaaacccataaaagttgtttgtttctccttatatatcaaatcttttgcaaagtagatacaaaagcttagagtgaataattgcaattgtatttctgt

SEQ ID NO: 136764 - DNA, 547 bp, Arabidopsis thaliana columbia
  unsure (1)..(547): unsure at all n locations
aagncaattcaagntccccttgtccggnnnagttttccntcnttaccggttccggncggatcccanggaggtcccnatttgccgngaatttccgnncccgcgacaatccatgncngagaatcgncacctntggcgattcccagtncttgccccgagagtccgcacccnccggagactttagaagccccntctccgtnatggtgttccacagccactgatttaccagagtgaccgtcgatgggaaactaacgatgattcgagaaatttgaaactggatcttcaatctatacagcttccgatgacaggaagctcagttttcgccggaagcttaggaggtgaatcggtggtaatgattggcggtaaaagagagagtgaaggtgaaggtgaaggaggagtgatgatgaagatgacgactgagaagaaaatgggaaaatggagtcatcatgttcatataccttgtgatttctctactcttccattttcgcatgcttcaatctatgtttgaaaatcccaaaagattttatagtacaacattgtgttctgatct

SEQ ID NO: 136765 - DNA, 561 bp, Arabidopsis thaliana columbia
  unsure (1)..(561): unsure at all n locations
aanaccgcttttcaggctatgnncgccgactgggntccncaananccgngtnnttgccagttgtntaccccnggntaaccgcgtntgctctcaactatggcccttggacatggtcaaataaaaatttggggccctccctgggntgcnctcttataatcctcttcaaacccgcagcntcagctttcttggtccagaatcttcccttgggaagccctatcttacttgggggagcattttaggcggatgtgcaatcattagcaggtctttatngtgtcacctgggcatcttacaaagaaaagaaagcggcagcagcaaccgctgtgatcccgatcacctcaaaggaagctgaacccttgatctacaaggaccataagaacaaaccaataggacatctattcacaaaatctcccatctcttcaccaaaatccgctgattgaacaaaaactctgacttcttgaattacttgggtgctccgatgttttcttaaccttttgccgacgagagagtgactattatatttttttaacagtatatatatgcatatacacatcaatgtttaac

SEQ ID NO: 136766 - DNA, 542 bp, Arabidopsis thaliana columbia
  unsure (1)..(542): unsure at all n locations
aacngtgggntcccccgatgtnncttggggncccctaccntacagcctgcncaggctcatcagcccggtctgtgttaccngcgggatntgccccggaggnatggaagcaactctntcggctacactcatgtcaatctctanccggngccagtgttctaggtgggcttatggggtgcaggactgactcaaggcatccggcattaccaggagaccagttttggtaacttatccaacacttattatcctctgcaatcttagctcattgctccctctgcctcttctcggtcttttacccgcgagattctccagatactcttactaaagatgacgcagacgttgagatgaagtccaattaaggaagatgatgataattatcaaaagttaaaatgtgatatacctttagaggtgttctgtgtattcagttccaaccctgttattacttgaaaagaatgaagcaggcttttacatggaaactacttttacccaaaatatcatgtaaccaaaatgttgtaattcttaaaacaataaactcttttgttatt

SEQ ID NO: 136767 - DNA, 544 bp, Arabidopsis thaliana columbia
  unsure (1)..(544): unsure at all n locations
agtcnttttccccggcctaacccccctaangggggcntttaggccccgtntttccccnccttagccccnnttggcccgattgggccngttggcccnttggcccgntngtgggacccgtaaagccggtctccccgttggccttcaaggtccccggtggctgttnccaggatcngtgatggcttgtcctaagatcagtcttatgtcctcttctctccgcccatattccatngattccacacaccacctgagcacagcccaacgataaggagatggagatgaaatccatttcgatgatttctcgctctttcttttacttgtctgagctaactaactaataaagatgaggtgttgactcataaagattaaagtaaagtcaactttaataaagctgtcttgcttgcttgtatgacttggttcaagaaacgagtagagagagatccgaatcttcctcgaagtctcgaactgttgtttgcatgcttgtaatttctactggccaagtgaaggcccgataacaaaattggccctctaagagccttttaatgcc

SEQ ID NO: 136768 - DNA, 534 bp, Arabidopsis thaliana columbia
  unsure (1)..(534): unsure at all n locations
ccaccccccactccggacctnggccactgnttgcntgaagtttgagcnttttcctccatggaccccnctgncctccctnaaccgctgnggnccncancaactnncggttccggnatattccccatgcnttnggattggagaaagttncctccaggagattggcaaactgcagaatctgaaaaagatcccgatgagaaagtgtccgggatgcgagttcccggagtcagtgacgaatctagagaatctggaggtcaaatgcgatgaagaaactggattgttgtgggaaaggctgaagccaaaaatgagaaatttgagagttcaggaggaggaaatagagcataacctgaacttgcttcaaatgttttaagtgaaagaacgttatcgtagtagcttctgtggatcttgtaatgtttgttattcattattttcgttgttatatacattataatggctactgagtccaagtacagagaaaatgtcatgccaaagaattttgtgtaggtcaatcttttaaaaccatttaagagtactact

SEQ ID NO: 136769 - DNA, 501 bp, Arabidopsis thaliana columbia
  unsure (1)..(501): unsure at all n locations
acaaacctnntccggcacacttcttttcanccntaacccagcttttacctcactacctccatcnagtccaacttacctcagcaagtcnccgttcaaggctgccaaaaacgtggacgncctcgatgtatnccgtcaaggtgaattaacccacagggtgtttatgtcgcggtgaagccaacgagcttgaatttcaccaaagttggagagcaaaagacgtttaaagtgatccttgtgaaaagtaagggaaatgtggctaagggctatgtgtttggagaattggtttggtcagacaagaagcatcgtgtgagaagtcccattgtggtgaagctctaactttgaatttgagtgccaattatgatatttgatctatgaagtttagttgcctatatgtttgaatttaaggcttacaaagaatggtgtaatgttgtgctgatcatataaaataatacctagactagcacccgtgctacaacacaggtttctagttcttattagtgatac

SEQ ID NO: 136770 - DNA, 498 bp, Arabidopsis thaliana columbia
  unsure (1)..(498): unsure at all n locations
attcccanaagcttcgtnttcatccccganttttggngnancntttaaccctcccagcccagtnggtgcccctcaatgttgtnaggangnnattgaagaaggaggcgaggcaaatttcncaggcacaacagaggtncagcctcctcgagtngctcggaagaagatagtgggaaaagtatgaagagaaggcaacatnaaaggcatcgtttggctgagtcttcaagtgaggaagatggggcaatgagaaggactaggcatcataaacatggcagagattcagcatctgagtctgatggaagaaggtaatcagatgagaaaagagagcactacttcgacaaatgaaaatggaaaatgtctttgtttaattcacatcataagaactgaatcttgtggtaaaccatcagcacatgattactacccagatgttgggacccaaatacgatgaatattgtgttgaattactatggtggcactctgttcttagattttcatttttac

SEQ ID NO: 136771 - DNA, 508 bp, Arabidopsis thaliana columbia
  unsure (1)..(508): unsure at all n locations
cgaccccggcgattccccgcnttnntcaatcccaaccttntccctgaccttccgtcttccaaactcgncgcgcgtcgtttacgttaccattagncggcnccgttncaaccgttagccattaagncctgacttaanccgtcccnccgcattcgagcttagaggacttgagncgttggcgcgtatgtgtcacgctttagagcgcgtcgacgtgtctcattgctggggattcggtgatagagaagcggcggcgttggtctctgcgacggggctgagagagctgaagatggataagtgtttgagtttaagcgatgttggattagcgaggattgttgttggatgtngtaatctgaataagattagcttgaaatggtgtatggagatctctgatcttggtattgatcttctttgtaagatttgcaaaggattgaaatctctagatgtctcttatcttaaggtaaaatgtcataaatttgaaaactttatggagaatggattcaaagtttctacc

SEQ ID NO: 136772 - DNA, 491 bp, Arabidopsis thaliana columbia
  unsure (1)..(491): unsure at all n locations
ttnccccgcagccatgttccctttcgggnatcccgcatttgcngaagggtcaaagccaattaagntgcgggtcnatgtgatgctgcttaccagccggaaagttgnttaaaaggtgcgagaagctcagcttgctcagtacaactacattctggtcgtgggtgaaacagaagctgctacaggacaggtgagtnttcgtgtgagagacaatgcagccccctccgtgaagagcattgaggatttgctggaagaattcaaggccaagactgccgaatttgtatgagatccgactcatgaaattcaagttctgatatgatgttttttttttttttttcaaattagggtcgacccagatttaagtgttcatctgtttcattaaaccatattaggcctcaactatattaaagtttcgattacattctgcgaaaactctatgtttggtccccttttagtatcattttatggaagaaaaaaatctgggccatgattgttac

SEQ ID NO: 136773 - DNA, 520 bp, Arabidopsis thaliana columbia
  unsure (1)..(520): unsure at all n locations
aagggngacctggaggtggcgatcnggnaaccnngaagaatgtgattatgnggnatggtaataanggngcctccncaaggactgggaaatggttggtgagngancancaccnngncaaaaggcgaaccagatttggaagaaacatgtttggggttgtgttgatgtttggatttctgcatctgtgctgttttgtttggaatttggctttggatttgtgaagggtttcaatgcattcaagggtaaaagttatcatcatctgtgtacatctccaaattcatattctttgaatctgcatcaaaatttgatcatttgacatcttttttctgggtatccgtttttttggatcaaatctgatcccttttgttatctctctgttcttgtcaacttttttcattttctttgatttttaaagtcgcaaaaagtgttgtttccaggaggaaaactagggtatagattgaatcctggtttacatgttaatgatgttgttaattgtactttggaagttaaatcattcacaagc

SEQ ID NO: 136774 - DNA, 463 bp, Arabidopsis thaliana columbia
  unsure (1)..(463): unsure at all n locations
ttcccngggntancccgggtattttctctccngttggggaaaatgggtnttccccacaangggnntcngntggaanggccccgggatttccccccntttccccccggggggncccagttnccctaggggatganttggaacccttcaaaaccggtccatccatgggaaggtggagttaaagggaccataaagttnccncgggacccaatggttnaattcaagcgtgagatggccactatggaggaactttattttggtgataccaacttaacttttagttggtgcctgaatgattttctatgtctgttaatgtcttaatgaatgcttttcatttgatgtcagtgaataatgggtaaatatattcacggggtgaatatatgtaatactcaatatgttcatgtaatacttaatctgttcatgtcatgaataatgaataaagaataatacatatatatgtattgat

SEQ ID NO: 136775 - DNA, 517 bp, Arabidopsis thaliana columbia
  unsure (1)..(517): unsure at all n locations
acccaaacggnnacccgggttgnttccttcccgcacacggtttaagnttncccacttatccatcgcaagccntcggctggtttaccatngattcccccntgaccngtngctatccacncaatntccgtaatggccccttgtccttcagntnccggtaagagtcttgcggaaaaanccggattacatccgacatcccggggttttgctggtaatatagtgcttggagatatcattgttgcagttgatgacaancctgtgaagaacaaagccgagttgatgaagatattggatgagtacagtgtaggtgataaggtgacacttaagattaagagaggaaatgaagatttggagttaaagatctcattggaagagaaaagttcatgaaaatattattgacaacatttcatctcttccttttgaatctctctgttttttccccctttgagaatagcaaaattacaatcgttgtctaaattctctgaatatatatatgtctatgggaattttttttattnat

SEQ ID NO: 136776 - DNA, 530 bp, Arabidopsis thaliana columbia
  unsure (1)..(530): unsure at all n locations
tgccttcctnaaatcttaccctttcccaagcggnccccagacttcccgttggaccattgccaactggccattggnatncntcccagatnnctncaaggtcttccncnatattggggtttccccaagctagagtcctggactttttgggtgtggcatttgtcaanccgntgccattacaagcaacgtntcaggcttaaatggcttaangaggtaaagaagcccagatgtgtatgtgccaaggtcaggggatntggcgcagacggagaggtatggacattggagactctatgacgagagatttgacatacaagccatgagaatctgatttctacacacacactgccatgttttataataaagctgcccatagttctgacttgggtcggttgtttgttatatgtcgtgttgttaaaatggaccttaggcccacgggtctaaacgggctatttgtaatgtttgaacgggtacccatttaaacccgattactaacgggtctaaacaaatattaaccgagtggcccatttattttt

SEQ ID NO: 136777 - DNA, 539 bp, Arabidopsis thaliana columbia
  unsure (1)..(539): unsure at all n locations
agnncggtgacnccctaggcagctggggatgcaggggaccccngcagtccngccccnagcttgatcagcaccttnggcncccaatggagngtatccccggtatggcctcggaagacatcatcaccccctgcaacatctgcagctctcatggngctacccactcgtctggatttcttcaaggaacgacggtcacaacttatggaacagattcagaatcttgacctcaactatggtccctcttcttcttctctgcaccgatcctcttctccaccatggaattaggctctttgagaagctcttgtccaaaaaaatagaaaaatgtaaagaaagtctcgtctgtgcagactcttcatgcttgtaaaaccggttcaaggttaaaccaactatatatttaccacgaaattgatgagaaattgtttgctcttgcttcgttgttagtgtgatttatgtgagtgaggtttgtaaaaagttgtgtgtatttcctctgtttttgtttctacattttaaatggttggccgacatataaattcagtttattg

SEQ ID NO: 136778 - DNA, 510 bp, Arabidopsis thaliana columbia
  unsure (1)..(510): unsure at all n locations
cggccccctnggacctggcncagagctcnttgccccccaagcncaaactgcccttccggngaaagnttcagcgcncatcagctcntntcccgtgagngatctgaagacagtctctaaccggaccgacacagcactggaccagttcagaccaaggcgatgatcncggnaccaaggacccccaaatgtgcgcacgacagccctcgtgtcagatcaggcaaaggtaaatccggattgaaaccagtgaacgagtcctcagaagaagcttgaaatttcaaaagatgatgctttgttggtctaacttgatcttgccggagaaaatgtaaaatcaaagactctttgtttttcggttatttccggtatacgtttggttcactatgtaactgtcttttttcgattttaagttttaacatgaaaaactttatgttgattgttgaacaactcctcctaatgttgaaatttgtaaatctgaatgctgttggatttaaatttagcagctaaggttattttcag

SEQ ID NO: 136779 - DNA, 504 bp, Arabidopsis thaliana columbia
  unsure (1)..(504): unsure at all n locations
aaggctnacgtttggccgggatttcagcaccntggnctctnggnctnggttccaaaggntcanccttggagacttgtgggtntgaaganttgaccccggttacgttgggatgagcaggcactccttacgngcattcttcgaagccaccaacactcgtgtctctacggtctcgaagtcaccgcctatgtcgacaagtgttgtatgaagaagatgacaggagtgaagagtaagcagatgtttttgtgggtaccgatcgtggagatgagtatggaggagccaaaaagcaagaagatttacttcaagactcctatgggaatcggcaggtctttccccgttaccgcattcatggacgaggaagagaaacgcaacttttacttggagaatcccaaaaattaaaccaactaataattattcttatgattattacattttgtggtgctttttattttatttcttgtaaggtttctttatgctattaatttctatcaataatacatttctggg

SEQ ID NO: 136780 - DNA, 524 bp, Arabidopsis thaliana columbia
  unsure (1)..(524): unsure at all n locations
accnggccggacctttatgctgccanaccccctgggcnctgggnttcnncgaccnttnttcccnngggnttncaaccctttggctctcccgttccgaaggctttggtancaatgaactngnctggcggttttaggnagaccggttccatgttaaagcaatgctcgaaccaacgaagattgagattggggtaacaaagntgaagatngatagagaggaggaagtngtgtggataaagtttatgacattgccgacaaccaacttgcctaatctagatgatacttattgtcgcagtagttacttcatctttgacaagaccataatcatgtgttgtggcgattacaaaactggagctacttgcatctatatggtgaggggagatatgttcaagaagattcagatcaattctgggatttttcagttttcttactgtgtctatcttccaaatttgatctcggttccttttgaatcacatcaagtttaattttttttttttgctaagaaaacgaaacaagtttaaattctg

SEQ ID NO: 136781 - DNA, 504 bp, Arabidopsis thaliana columbia
  unsure (1)..(504): unsure at all n locations
gcacctnttaancaccccgangccctttggacccttggacaagtctggngaccttttttntccccnttttggcaatggagcttnnttccnggcaatttcagattggctgagaagctcgagcagcggagantcagctcgctaactcccggtatggaggaattgcgccagccggtcaccaaaggaggaaagaggatgagcctcaactcgcgaagataactcgggatagtgcaaagataactgtcgagcaggtccatggactaatgtcacaggttatcaaagacatcttgttcaattccgctcgtcagtccaagaagtctgctgacgactcatcagatccagagcccatgattacatcgtgaagttggtctattcttttgttttttggctgcggaaattgactatcggtttgacccggtttatgaggcaatgcccattgttccctatatctctagtgtagtatctgcttcagacaaagatctttgggttattaaatgacattaacat

SEQ ID NO: 136782 - DNA, 492 bp, Arabidopsis thaliana columbia
  unsure (1)..(492): unsure at all n locations
cnattcccatttngggtgcccngtatggccaccgggacttctgnttncatggncnncggnctcttacggctaatncccccccggttcgngtccncgatgaanccnggaagaagtttaggccctgcactggtgtatggttgctaccaagggaattnggatcctccctagttgcnccaactcttggtgcgattgcggggtgcatgggtttataaccccggttagatataccgataaaccattgcgagaaatcactaaaagtggttcatttctaaagaccgtgagaatcggtagcacttgataagagaaaagaaaacatgggtggagttgatggagtattttcaaatgaatgtaacaactttcaccacaccttacgtatatggcctttgtattaattgctacgtttctcttttattgttaacgccaagattctctatcttgttattaatgtgtaactgtatcgtatattttttaaataataaaattcaattttcg

SEQ ID NO: 136783 - DNA, 483 bp, Arabidopsis thaliana columbia
  unsure (1)..(483): unsure at all n locations
gccccccctnggctaaacgaggcntnttcccncccaaggggncttgngncctttctttggttactgctagcnccgggataccccattgcnctatggtctgtttcgngtcccaagcagganccagtttcgggnatcttggaatctgacnggcatcttttatacccctgtgcttggattcttttgctcttactggaatccccacttctgtgtccctatggttcaaanccgttgaagctgctaataaggaagctcaagaacaagataaaagagatggctttctttaaaanccttttgtgtgattctgcaactcatacagtgatgattgttgtctccacatatactttgaatataattctgcatttacaaaggngcttgcttctgttcactgtttatcncccgctagattttgtttgtaatttcaacaatatgccatgttccaacgagtaagtgcctgaaattcgatgatcagctgtcctctctttt

SEQ ID NO: 136784 - DNA, 508 bp, Arabidopsis thaliana columbia
  unsure (1)..(508): unsure at all n locations
cccntttttttggattgggcggtacattccccgggaccgttttccttgttcccnagctttatccgctccctntggggaagctggtacccctgcagtaccggtcnggattcccggntcgccccacgcgtccgaacttggacaccntgaagaagctagcagagcaattcccagaaacaagctccaggtgcaggtgatgtcccagtaacaatccaagaagaggacgatgatgatgatgtcccagatcttgtagtgggagagactttcgagacccctgctactgaagaggctcccaaagctgctgcttcttagaggaggaggaagaagaaggagaagagctcacctgcaaaacccatcataaaaatgtttgtcgctcgacctcttctgagcactgtcagattcttgttttctctaatgcttgcgaacagaaagacttggttttattatcacttgatgctttttggtccgaacagcaattttccttttattaaggttagatcgctttttgttt

SEQ ID NO: 136785 - DNA, 488 bp, Arabidopsis thaliana columbia
  unsure (1)..(488): unsure at all n locations
gggctccttnctgcggcttccngaactggggnccatcttncggtggtagggccaatngtgccgcctgtcatttctaatcncatccctntgnggatccagcatcgctggcagttccatcatgagaagaaagccggtgctcggattttcttgggttgtgacacccatcctttgtcaaggcaagaggtgatggncctgatggctcaangcggaaaatttgataagaagttcaaaggttttacaagcaccagtggtcctttagggaagaagctgaacaactctaagacacgagcggagataggatgggagccgaagtatccaagctttgcccaattttttggagtatcgacataatatttttacttggattgattaagaatgtctctagcgctgaagaatccaataatgtgaagcattatttatgtttggtacaaacaaactcatgtatcctcttgagtgatcaaacagctgaaattttcagaattcttcat

SEQ ID NO: 136786 - DNA, 461 bp, Arabidopsis thaliana columbia
  unsure (1)..(461): unsure at all n locations
ccctgcttgngtggttacccttgaaaccgtacccntttggtcgatgggaaggattccaaagcnaggnttttacagaggtttgntgatcctagatctgcaatggaacggttgctccactctccaancaggttgattctnttanancatatcttggtgaatttgaggatctctcgacgcngtgtttggangaccnngatactgtacntgnggttgtactcgtcaaagggcttaaggaggagattcaggaaatgcttcgtgtgtttcaaccaaagggtttgagtgatatcatcatgatggcncgtagattggagaatantcctttttgccgtctgatcaaaaattcacaagtttgaagatttgtctncccggagaaataccctttttggttcttgatgcttgtctttcaagattgtttctttgacctcccttgtctaaaacataaaactgttttagatttcttc

SEQ ID NO: 136787 - DNA, 551 bp, Arabidopsis thaliana columbia
  unsure (1)..(551): unsure at all n locations
acccgtggcccntggggtnacccccggaccacccttncggccaccngtacccgacttgtttgccaaggccgggnggccctccccggaaaaatggggaccttgctgccagttnatgttggggctgatgatcccaaacncgtnncaggacccggtggaagtggattagctatcccggtggaagttgtccaattctgctggaactttaatttgattagattgcaagncctcttcaaggaatttggatgtgaatcaaagcttagagttgatggtgatggcaagccttatgtgactgataacagtaattacattattgatttgtattttaagactcctttgaaggatggattcgctgcggctaaagagattgggaagtttcaaggagtggtggagcatggtctgtttctcggaatggctacttctgtcattatcgctggaaagaatggcgttgaagttatgaccaagtgaggttaaaagttcaatctttctcttcttctttgattgacaaatttttctcctttgtaaaattatcaattgagtttttatgtgagatc

SEQ ID NO: 136788 - DNA, 539 bp, Arabidopsis thaliana columbia
  unsure (1)..(539): unsure at all n locations
gggaattccggtgcaaaaggtnttnggncccngggcnggcctctttccnggncccggtaatcanntgtaccggttgcncaatccggacccaaaatggcctggggacagaggcatcccnattntctnggtgcaacaaagctgctgggnggatncgatgccactgncttattncaaagtccaacaatctttctgcaacaattctaattgatcagggagaaaacgaccagttctaccctgatcagttattgcccagcaagtttgaggaggcgtgcaagaaagtgaatgcaccgctcttattgcgcctccatccaggatacgaccactcctactatttcattgccaccttcatcgaagaccacattagtcaccatgctcaagcccttgagctatagctcacttcatctgcttggaaaccggctttgggtttgtccaagtattagtatctcaataaagcaagtggacttgtaatgttttatgttcaataactcccctgtgtgctcttttgtctacgataataataagaaaatcatctttgcttc

SEQ ID NO: 136789 - DNA, 538 bp, Arabidopsis thaliana columbia
  unsure (1)..(538): unsure at all n locations
acctccccgggccagggttccccnatgtcggcnnccntccccagtgtttntcctngntaccttggaccggtctncagaaccatcnccntgggntacggntcccancatgggctncgnttnttncgacaggaaggttggaagatctgactgaggnggattcagaggcaatggatgncatggatccggtggagagatatgtgaaaatagcgatatggtgtatacaagaagagcatgggatgagncctaacatgagaaatgttacacagatgcttgaaggtgtgactcaagtttttgatcctccaaatccgtctccttatagcactttcacttggtctgatgaatctttgtctagtgatccagtgtcacttgtttgataagttgataaaaaaacaaaataaagttattatacttttgtatggaataaactccaatcattgatattacgttaaataatcacacctttttttaattatgttgatataaccagcacggtatgacacaaattgcaactattacaatttcgttaaacaaaattgac

SEQ ID NO: 136790 - DNA, 558 bp, Arabidopsis thaliana columbia
  unsure (1)..(558): unsure at all n locations
cccccccctnncgngcttaagtctgctcgggcnttcccggggcnccgttccgaacnccagctntttgaagttccttggggtacnccccntttccatccccctggatccccnagcttttaccngncttggggcccntcagnactggggttttctcgaggttcagagnccgtgctctgcagttggngatgggccggaaacgggcaagttcctggtattgatgatgtgcttagatgatctgagctcgtttgatcttgccaatgggcttaagtcttcaaagaaagtgacagcaaagaagcaaaccgcgtcacatnaacagcncaaaaagccncagaggaaaaaggatcggacttggngggttcaaaacncagaagatggagatggaatgccttctgttaaagttttccagaaaccagctaacacaggtcctcttacgatgcggtgattatcaaattgtagtccatccaagcaaagatggcaaccgaagctacttaaagttttttttttttttcaaaaaatgtaacagcagttgaacctgtcgcagtagttctcgagtgtctt

SEQ ID NO: 136791 - DNA, 510 bp, Arabidopsis thaliana columbia
  unsure (1)..(510): unsure at all n locations
gtctntcttttgtcccccctggntcctnccaaacgggtccctcccnttncntagggtccnncncancacggttnctttnnccccatttccttcggagacccncgnnccggtttggngttttcatgccaagntaacggaaattccggngattcccttgcacttaggaaggntgcgtttatgcagtgcattcccagatgtgctatgccaaagtgatgtgtgtgacgggaaaaaacttgaaggagagcctgaagaagtatatgaagacactaaaatgtttgaggagaaaggcgatgggattatacagcatcagagtcatccacgtcaccaattgagacttgaaaaaatattccacgatgaaagccatcattgtcaagcgtgcagacgtccttcttatgatcatggtggtaatgtgtatcgatgtatgcaatgtgatgatttcatttttcatgaatcgtgtgcatatcttcctcgtactaaacaatttatgctacatgttcatccattgactct

SEQ ID NO: 136792 - DNA, 565 bp, Arabidopsis thaliana columbia
  unsure (1)..(565): unsure at all n locations
tcnaaannggtncgggccttccnggcncagaccaattccgggactnaggcntccttttaccgnccaaattccgggtgttttacagcccgcaaatcagcncaaccctnggcttttccccaaggacaacgancttcactgttaagatgncnccgcagcccttggagaactggngtcttttccccttgatgacttcagaaactccacatggaatcagaatctgcagctccacctggaatataagtctcctcaccgtatttccaggggcctacagcgtacaatatcgatagtggagttacctggagctgtgtcgtcctccttacgatgttgaggagatcgtagcaagcatgaaagtcctctccatctattgcttgagtcataacatctgttggttcaattgtttttagtatcttgtttaggacaacatctcctttggataccaaatctgtgatgatctgaaatcttgtgtccataagttcggttcccgattccttcccttctgtagttaagctcattaatctgaaatgagatgtagttggtaccaactactgtagcttcattcattttg

SEQ ID NO: 136793 - DNA, 563 bp, Arabidopsis thaliana columbia
  unsure (1)..(563): unsure at all n locations
catncccgtcaaaccctntggggtcgggctccnaaatttgcccccgggttaggcnaccnggttngnaggattcacaagcgttggggntcnncccccccccccttgaattgnggaccnaaggnntgncnagtttggaaccccccccccaacnnttgccnagtcttgccccccctgaggttgtctggagatggtcaggagatcaaccgcgggnccaactctgtggagaaangaagccttcaagttaaggaaataggccaatgnctttagcccattttgttctcaaagtttccatcatctcaatgaagatttcgcttcacgagtctgagcaggtctccatttttttctctttcaagtttgggttagactagagggaactggattgttggagtattaatctttgttgaatttcattatgtttgttcatgtttttgtacaaattttggggatttagccaaacccatatcgtctttggtcttgtcttgtgcctgcgtgtatttttaatctatccgttcaaaacacagattgttcattagatgttttatataaacagagttaaagacctg

SEQ ID NO: 136794 - DNA, 489 bp, Arabidopsis thaliana columbia
  unsure (1)..(489): unsure at all n locations
acaccttggngacccagggtgaagtcccgngnccatcgcctttncgggtctagtggnntcggncgcccccaggttctngggcattgtgcangaggccatctgtcgcncctgaaaaccccgntaggnaaggttgatcatccatacattctttctctactatggagctgacacagctggagattcatcccctgtcaaacaattgcgtgagaagtacaacagacctcggcatgaagttccttttgattcacaagacgaagattaagatgaaaacctgagagttcacaacgcagactcgagcacaaaccacacaaaaaaaacagaactctagcatagctcaaagcatctagcatccaacttagagatgttctgttggttttatacccatgtagatgtagttagcacttagcacgactgttcttgctatatacactgaaacaagtcaactttattcaagaatgctttgttgataaatgcttctttgttcatcct

SEQ ID NO: 136795 - DNA, 383 bp, Arabidopsis thaliana columbia
  unsure (1)..(383): unsure at all n locations
ggcaattgggcccctggngggncnatcncccccttnccatcatcgncancgncntcatattcatcccataccntcatcataattngtancnattaccatgaatttatggccccccggacgtacgtgaggaccaggtgaggttattaatcaatgttttttttttttacgtggcggcttgaaacaaaaaatatatcaactaaaaaagagtacagctatattttctctggaagttccgttgtatttttataaaatattcgaaaagtcaaaggttgggtgttgttataagtngtgtcaacaatatgatagcgtgtgagtgtaatattattgttcgtttaagatgcttatgtatatgacttccataattgaaacatcttattacaact

SEQ ID NO: 136796 - DNA, 498 bp, Arabidopsis thaliana columbia
  unsure (1)..(498): unsure at all n locations
cnggatccnaagccnatgtgggcttcngggtgctctntcagggggcccaacagttaggccccnttgcagctgtaaccccgtcttgagctacccaggtggtcaggggatgccaccaattgcaaactgctactgntgtcccntatggngcnccagctntagatgtccctcctgcaattctgtcacagatatcccgtgtatgtattccacagatggttttgtgctccatgtccaaatcatacttggaagagttgatacattttgagatccgagtaagtaatcatctgatgaatcatttataataaactgtgttatatttcaggaaaacaacaaacgacctccatggtctgagcagcaaggaccactcaaaagtttaagcagtctcaggagagcagagaattaaacttgaaccgatttttgtcaattttgaaccggtttgacgactaaaaaccttgtaataatgtcgaaggatagatgaaataaaatcaccattaataatct

SEQ ID NO: 136797 - DNA, 388 bp, Arabidopsis thaliana columbia
  unsure (1)..(388): unsure at all n locations
cccccgcccccggggganncnaanncaaagttttnccngggggttccccatnnctttttccaggntggggnttnatnccnttgaaaccgggctggcggattctaggggtccatacatcttttggtcggagacaatggacangcattttggaaatgtgtgtgagctagacataatgttccatctggagaaagctcatttcatgctggaagaaatggtgatgaatggttgcattgtggagacaagcaaagccaacatactttcacctatacaacttatggacaaagcccattaatgctaaacaccctgtttctatttctgttaatccgtttcatcactttgttacacacttcttcttgtattattattaacgatgcttcaaagagaggat

SEQ ID NO: 136798 - DNA, 483 bp, Arabidopsis thaliana columbia
  unsure (1)..(483): unsure at all n locations
tctttncccngggggttcccnttaancctantgccnggaaaggcccccnttgaagccccgaaccccgttgnatntggggnattancnggntgattggaccccnncctttttnaatgccaaaaagcgatgtgagactntctgctggtaggagcccggtctcaatgtccggaacaagctctctgtttccctngctggtgcaaactctatcttcacccggagagaagcttttaacccacaccaaacaatgattttgacgctgaccagctcatgttcaagacattaggcctcattcctaaaccgccaagtttctctgaagatgattctgaatcagaaaactgcgagaaagttgcttccgcttctcactaatatcattatccacttttttttttgtttggagtcgggacactatagagcagtcccttttactatgtagcatggtttgacgattttgtgatatcatttttcgttaatcgttattcgaag

SEQ ID NO: 136799 - DNA, 376 bp, Arabidopsis thaliana columbia
  unsure (1)..(376): unsure at all n locations
ggnaaaggttttnaccatttnnaaagngccttgggaaaattgcngttcctagggggancncntaatattataaaaattgtantaagccgcaaaaaataaaannnnaaaaatttctgaagatgtgcagattagtgaacattgttgtatcgagttttaatattatgacatattttgtttcagtttcttgagctgcaacttcaatggaatggtgttgtacagaaacaacaacaaatctctatttttttttattaatttgttgcttcttttgttttggtcatgaattganccatgtaagagcatgcttgattgcttcttgttgttgttgttgttgtataattgatacggccgataaatgaatatcctaatgtggtgagct

SEQ ID NO: 136800 - DNA, 359 bp, Arabidopsis thaliana columbia
  unsure (1)..(359): unsure at all n locations
canaacttgnggnaccttggtttctttcccccccgntctaccccgggtttttntngggccagnaaatnccttcccttggcttttggcccatggaccaaggttgggggaaancntttggaggtccccggaaaagaaaggcaacacatactcgtgggatttactgttcgggaagaagactaaaacaaactgaagctgattctctagaagatacncatagatgtggttggttgagccttagtccgtaaatgtggttcgtgtttgtttgctagtttgattgttaaatnactnccaaagcgtcgaaaaatgttttgttgccttgtgaggtgctcnataagtaagaaaagatgtgatcttctgtg

SEQ ID NO: 136801 - DNA, 502 bp, Arabidopsis thaliana columbia
  unsure (1)..(502): unsure at all n locations
tggctttttncccnaaccgccttttcaagnggggttccaaacccccccgtggccccctttcacgngcccntccccttacccgccctccntgggcgttggtaagatntcccaaaaattcgtgtggggncnaagatcccctccccaggttagggntgccagggntggcaagttacccccttattncaaccggagnccccntcagncccaagggaagtatagcttgagccncaaatggagaaagaaaagtgttttgcccccaaaaaagctctctcaatttttggtgcttgaagctgtcaatttagggcattgaatcaagattctctcacccctttttagggttttgatctaaaagtgagaatcngagattgtcgaaatttttataatatatataaagaagtttctaattcagcgtttcagtttctccactgtataaagctattagtaaactctggttttgtaagagtttttatctttggtaaatgcaaatgaaaaagttgcgact

SEQ ID NO: 136802 - DNA, 451 bp, Arabidopsis thaliana columbia
  unsure (1)..(451): unsure at all n locations
gttnncntngnganttcccnaatcgggcctttttcccccgntcagtttcgggccctttggggnctttttgggcacgttcccnattttcccggtgcctttgggnctttnnagccngggaggcacccaaacttttccaaggngtnttgggttccaattnccccaacccgtgaaggaagtttgacgaccaaaccccaaggatcaagatcatggcgttggaatggaactgagaaaagaagagacgtgtgtgaacagaaacggaaaataaaacgcactgtaatcacacgaatggtgaagagagcattcatgtctctatttgtcttcaggtacatacacattagaagaaagcaaaagcatggttagaaagaaaaaaaacacgaaaatcttttaatgagtttgttaaacttgaacatgtatttttnctacttcggtaaacttttttattttgtttcac

SEQ ID NO: 136803 - DNA, 472 bp, Arabidopsis thaliana columbia
  unsure (1)..(472): unsure at all n locations
cgggggttttncatcccccgggnttttaangggctctaggggncnccgntccccngaagggggtttggggcacccggtncccngttttaggncgngctanaaggnttgccccccnaaggncggcgtttactttcccgatctagatgtggttcccctgtgctaagcttgaaaggtggggtccntaaacgaggcccggcgtcataaaaaatcgcaagcngaacttggctctgaagggaggggtcgaccatcgctgatcaggtcggataggaactcttatatctatcattataaatttatcacattcaatgtttgcatagttcatcttggaaactagagaaatccagacagctttgtttgcggattttttaatttcttttnccttagaaatgtcccaatattacaacttgaacacttaactttttattgaactacattacataccacgcaaaaaaaggcagaaacatgtttgttc

SEQ ID NO: 136804 - DNA, 485 bp, Arabidopsis thaliana columbia
  unsure (1)..(485): unsure at all n locations
aggcaccncaaacgtaacctntggggcccccttnncatttcccccnnangttttccccaaaaagttttaagccnccccttnaanccccgncctttccnncnccaaggtgtgatttccggatccccaaaaccgctaaagggaaacccaaaggaaagaagaaaaaagntgcaccntcnccagataatgacccttttggtgactccggattcgcctgccgaagggcctgacggagaggccgatgatgcgacggcagatgatgctggtgcggttaggatcatcggaggagctaaggctggtttggtggtgagcttgctctgcttgtttgcttcttcttggcttctatagttncacttcgtttcttctattcttccatgttttttttttttgtgaatcttttatttatggtttttgggggaaagtaaatgaggattatttatttccctctattgttgagttttttttatttatttaaaagttggttgtcg

SEQ ID NO: 136805 - DNA, 462 bp, Arabidopsis thaliana columbia
  unsure (1)..(462): unsure at all n locations
gtcaagtccccntctttaccaaaaatgnngtcctccccnaanacccctnntnaattcccccccttccgggaaaannttcaaacggggcaaccgacccggttctgcggttccccatcaacttggntntccccaaattcagattcntctccaggaaacgagtccagngcactgagncgcaagtatttgctgctagaggaagatagtttcgcgttggagagagagttaaaggaagcagaggatnaggttaaagcacttgaagatgagaaacttgagctcttggacaaactcgttgttatggaaggtttagttgatccttgattctatngcttagcacttgttttatttgccacattcatatgtaaaaaatcnccttatctagtaacattgtttctgcttatataacttataagcttttgttgtgtgttgagagaattggagatggtaaagaaaactgttgtgttc

SEQ ID NO: 136806 - DNA, 484 bp, Arabidopsis thaliana columbia
  unsure (1)..(484): unsure at all n locations
aacnttnngggaagccgaanccncgggnaggtcccggagggccccatttccaaatggtanttggggaccctggggnggttnacccggtttaggtccnaacccaccccgggngagcctccagtnccagtncaatnttgcttgttgccacccaaaggcttaatccgggttcaaagctggctcnccggctctggaagaagcattgaagtccgggatatgaaggattttaaggggaatcagangtgatccagatctggaaactctcaggaagtcgaaggatttcgatccacttctgaagcaattcgacgaatctttcatcaatgagagtgccattaacgccatcaaatccttgtttggctttaacaagaaatagttcncctaaagtttgtgtcttttgatgtgatctgttcatagcttctcttctcttcttggctctatacatacttgtgaggaattttatttgatcataaatgtgttctttttttct

SEQ ID NO: 136807 - DNA, 493 bp, Arabidopsis thaliana columbia
  unsure (1)..(493): unsure at all n locations
cggattcgggtgtggttttacccgctttagnggataccncctggggnaccntggcctttngtctttgctnncccntacgcgcntccatggctgaagggcttggtcncggtnggccntccaaattctctggcctatgaangcttcccttaaggcaaccccgnttacttaaagnaccccaactattgttcttcccagttcagataaacggcaagacaagaggcaccatagaggttgaagaaggatgctctgaagatgatgcttttgttctagcttcacaggacgacaaactcaggaaatatctagatggacaatcaatcaagaagcgaatctatgtgcctgggaagatcctcaacgttatcctagaccggactaatgtcaaggtcactacaaagtaggatttagaaagaagaaacaattacaaaacctgtcaaatgaacaaaattttatctctattgagagtttccnttatatagaaaaagattcttttagaagc

SEQ ID NO: 136808 - DNA, 504 bp, Arabidopsis thaliana columbia
  unsure (1)..(504): unsure at all n locations
tttttanttnagacccggtcagnccggatgnggtacccccnccnctgggntaccnttcnggganccaggaccgnaccaaaattggncccttaacccccccaaggctttacttcttcttcaancatccccccntaaaaaaanggttaanattttccccccctatggatatacaggcaagtagtctcttttggctggnccaaactgactctggtcttaatgaaaagctgggccaaaaacatctcttttttttggcagaaacagagaagcaaagccacacaaagattgattaccaaaggcaagaatttagagaacttcctcctatgaataagtaacctttttgtttttcatttttgttctttcttctcggattctcttgcctttcctctgtaggttgtttgttgaattaggtttgtttcttcgattctttacattttagttttgtgatgtcaacattttacaacaacacggattgattcatttaatcgaaagagagaaagttccttc

SEQ ID NO: 136809 - DNA, 482 bp, Arabidopsis thaliana columbia
  unsure (1)..(482): unsure at all n locations
aggggcttcaancttacntntggggaacccntgaancagntncatgtcacaccnagccgcncggtancgnganccccgggctcgtgctaaaaactgcntattccggngaccagcgtatatcccngtaaatctataaccaaggcatatcttggaaggccatggaaggagttttcaagacccattataatgggaacaacccataggacgacgttattgatccagcgggatggctcccttggaatggtgattttgcacttaatacgctttactatgctgagtatgagaataatgggcctgggtcaaaccaagcccaacgtgttaagtggcctggaattaagaaactatcgcccaagcaagctcttcgatttactcctgctaggtttttacgtggtaacttgtggattccaccaaatcgtgtgccttacatggggaattttcagtagattccaattggtgaattttccactttctgtgtgctcttt

SEQ ID NO: 136810 - DNA, 488 bp, Arabidopsis thaliana columbia
  unsure (1)..(488): unsure at all n locations
anaccgnttggctaancctccccggaacnggnacccttggaagncagnctgtcagcactccctgatcagngctacccgggctgaagtccggngagtccnctcccgatggttgcaaatgngacaaacgttccggctgcactcttgagttngtgactaccaatccccaagaagggtcacagttttgcagaggttttggtgggattngtggtatgttaccgttacccagcttgacatgaggacatttgatgagttatcagatactgaagtttacgaagattctgattaaagtgggaaaacttttggtgatggtttcagatcgataccgtgagggaaaatgtggcataaagatggtcttttatcaacaaagaagagagatttaagtttcttgttttctatagaacattaaaaagcttgactctttctttctgttagacaatttgtgttgtaatttttgaggattttaaacatctttttgttgttcttctggt

SEQ ID NO: 136811 - DNA, 375 bp, Arabidopsis thaliana columbia
  unsure (1)..(375): unsure at all n locations
tncccccnttgggnntnaaaaacccccgggcncaaaaaggntncccaanngtttttccccggggnaaaangctccccccgactttttatttttttgancngggttgggggaaagggnttttttggattgcacattcaaactgaaaagagtgttgatatgttcttcgcggaagaaatcccatggttgaggtgaggagaagggatgaagagtacaaggtggtgatagaaagatggaaggcatacgacgggcaaggcatttgagtttccttcatcgttgtcaaacttatgacactaacagtaaatgtgtctttcttaaatgatcaaccatttgtgtaaaataatcaaaagaaaacaataagcatgcatccgtctgatc

SEQ ID NO: 136812 - DNA, 472 bp, Arabidopsis thaliana columbia
  unsure (1)..(472): unsure at all n locations
aaaccccaagcntggccccnggnggtccacgnccaactttttnccaatggcccccnnggtccatntagggaccgcttcnggacccctgtactggcattcccgaccccagtgaaggtttgggnttccttgaagaaggcttgtcgaaccnacccccngtcnccttaggaaccagtgaaaccccatcaanccttcattctttggacncctctgtacatatccncgaggattttcaggcaggataaggagaaagagcttttgattaagactgcagaatgaatagaaatcgcaagtggctatttttgtctgtccatattatgttagtattagtctatttattattagggtttctctctgtccccttaggattttgtatatcaaaaatcttttgaaatagttgcaaactctcaaatattagtagttgatatttgctatccattctagtaagcaaaataagataagaaaattacatatt

SEQ ID NO: 136813 - DNA, 425 bp, Arabidopsis thaliana columbia
  unsure (1)..(425): unsure at all n locations
gaattcattctcaaaacattggngttcaggtancagctaggntaatccctagagcattgtcaaacnctacgatgtcattnncaaatttaattggtccctattgaagaaatcagcttctatggacancccattacttacatggccccaagtgtgtatggccatccccatgcnttgncgatgcatttccngagttacntgaaccagatgncgatnncgttgactgtagatccaacggtcanaagtgatcctcatcgactacttgacgattgggagaaatctttncaaagcatcaangctgctgtgcaagaaagagactcccgctcattagattgaatcaaatcttttctttttttattcgtccaaattaagtctaccttttttttttatgaattctgattaattttaaattaagtctacattagatt

SEQ ID NO: 136814 - DNA, 557 bp, Arabidopsis thaliana columbia
  unsure (1)..(557): unsure at all n locations
ccccnttccccggaaccttttntncggntggggattttgagggcnctggcaattcccgccgtntgtgtgctctggctgcttccttaaccngcacgggttnctccgccatgngtccccnttnaggacttggaattngctctaactgtggaccnaacnacggnagntncnacagaagttagcatggncccgtcaccagcgccangcagatcttccccacaatcccttcaaccactggaggaagagctcgaaacaaatcccatttatgcgtgttgataagcccagagatacaggagaaactcggttgcaagtcgccaattgatacaatgagggaagttcggaacaagaaggatcagtngaggggatgatgataaatggagagcttcttgcctatgttttgtgtacttgtgttgaatgatcctgtaaaaggtgtatgaaccagtaatgttgatattctgtgtgaaactgtgaaccggtttggtaaaccgaaatcagaccgacctgtaagccgtactccctttttgaattttcagtttactatggataataatttcagtgtc

SEQ ID NO: 136815 - DNA, 510 bp, Arabidopsis thaliana columbia
  unsure (1)..(510): unsure at all n locations
tnccnangtgnccggnccaantgggntccccgggagggtncggcccaatccaaanacccnnggtcngaaactccccaanaagngcccgggnctcggcaacnccaaatgggctanggcctttggnatgggagacattatngtcacgtactcacttccccgttctcctcagctcgaacgggactagttgggngttttcagcatttacgctgcggtttgcgttatctcatggatcttcgtttacatgaaagtcccggagactaaaggcatgcctttggaagttatcacagactactttgcctttggagctcaagctcaagcttctgctccttctaaggatatataacttgtaactttcttcttcgtcaattgctctgtgtacctaaagattctcttcatcccctttttgttttgtttttcagataccttcatatcgtttttgtttcttttttttttttttttttcctttgtttcgttgtcaaaatcaatctaataagtactcaattttctctc

SEQ ID NO: 136816 - DNA, 547 bp, Arabidopsis thaliana columbia
  unsure (1)..(547): unsure at all n locations
ccctttntttcnggccccntnttncgnctagagtgggcccatcagaantgcagggntctgcaacntcccaatgctnggtgcaatccgggnctcttggggtagtttaggccgngggcctttccnggtaccattgggaatggcnctgtgatggtnattaatgtggatcntacggattggcncatnccgaagtattagagcatcgtggagttgtgaacctcagggaaagagagactttcggtggcggcattcccacaatattggattgggtaaagaaattggtccgatgagaagtctcgtggaaaggcacaaggctgcatttttcaaaagcgtgactactgaagngtatttccatggcttgttttcccgtgagctcgatggaaaagcttaccttgatgttatgagactctaaaggaaacaattcataaaattattggcttgtgccccaagaaaacaatcacattttctgacccttcctattgtagtgtatatactctgtttctcctctgtttcatgcttttgcaaataggcaacatctctctctctctct

SEQ ID NO: 136817 - DNA, 466 bp, Arabidopsis thaliana columbia
  unsure (1)..(466): unsure at all n locations
aaggnttttttggccccncaaaccctggggggntttcccccagggcccgcccancgccnnttcnggagnccaanccctaaaccattgcccngaaaaagggttattngggnattcccatnggggtagggatttttggtttggnaaaanttagggggaacccttcccgtggatgaggaaggagtgagtaagcncaattcctcccggattggaactttaaccatttttggttttttttgaaattggtgtncctgaattcaggatagtgctctctctctnctttacatactctcttcctattgtttcttgtcctttttttctttgtgtgatgtaatcttaaaagatgagagggacacactccaagatagagagagtgggcatacacccactcactactttttattcagtttcagttgaaattctcttttggttgctctatctattattttacttttttgttttagagatt

SEQ ID NO: 136818 - DNA, 481 bp, Arabidopsis thaliana columbia
  unsure (1)..(481): unsure at all n locations
ccccttttntnggaaaccccaaaaatggccccttnccctttntaaaaaattgggccccanttgggnaaantttgggcttttgacccggccnaanatttccccctttttcaattgccgaatttcccccccccnttttttttggagggcntttccccggaaaaaaanggngttaaaatggcccctccttttcccgttaanggacttcaggtcctttggccgctttntncaaaggctcccccgganaagggtacaaaagcctttnggtggttaacccgggggtttaaccgagtatcccgagggagttttcccagagatcgaagggaccgaagagcttcggttcgccacgatangaggtgtatcattttatttactcaaactacttgtactgttaccgtcttttggccagaagagtcgttaaattggttttttggagccaagtgtgaagacattttttgtttttaaaattgtgtccggtttacac

SEQ ID NO: 136819 - DNA, 587 bp, Arabidopsis thaliana columbia
  unsure (1)..(587): unsure at all n locations
accgggccccncggccatntttcaagntggtttccncatggctactntccgtgcccaaacacgtggtggcccctttcaaatgcattcataanncccgaaagctttggcccagattctgaaggtgaagncgaactgtcccgatagtcnccccaagttgttgcatatggngtctacatggcagtttctagcaccctaaggtaccnaaatagtggctggtgtgattgaaccaacggtctcctggagccaatgctacaccaacacaaaactttgcactcagtgcgttgtgctttgcagttagaacaggcaacacattcttgggttccttattatgggtggattatgcccgcctcattggtatccagaaatctcactgatgaagcggaataagaaccggatgtgcccgattctgacatggtctttcgacttatgtatacgcacactacttttgtcttcatacgattgtttctgattttggggccgtttcgttgttctatgttggtcctctttctaggaaattagtcgatttttcaatgcaaactaaggctattttcacaaaccacgtaaagactttatgcatttggggtttg

SEQ ID NO: 136820 - DNA, 588 bp, Arabidopsis thaliana columbia
  unsure (1)..(588): unsure at all n locations
aaatttaccccattcgaaggccnttnaaattccgtggggacttcgggcaacgtggaattagtatgatggaagcccagctgcttcaaccagggagggtttaatncatgngcttgacncgtncgnggaactcttctgtccacatttagtgtgaaacccattagctggagatctacattggatgcancctttagncctgaagggatgtttgttgtttcaggttccaggtgatggtagtacccatgcatggggtgtaagggagcggaaaacaggtacatagttggatgggtttagggagtgagcccccagtcattaaatggggtccaggaagtcccatgtttgtgacaggctcttccgaacttgcttttgttatacccgacttatcgaaattgccagcttatgccattcggaaataggacgactatcacgtctgtgccatgtaaatgaggcctcatttggccttttggtttcagactttgttgtgggttatgccggtaacttatcccttgcactctgattaatatatatttgggtcttgtaacatgaagataaaccccaagtctttctaatgttgtaattcgtgtaatttac

SEQ ID NO: 136821 - DNA, 573 bp, Arabidopsis thaliana columbia
  unsure (1)..(573): unsure at all n locations
ggcaacctcttncgcgctcccanttggggaccctgggtncgtcnggtcccaatcttccggtatncaaggcttggaccagctggttncaggggnatnaagtttcatggggcattgancnaaagggttngttaacccttcnggggagaagggaaccnccctcttaagattctgggtacaggngaacttaggcatgaagctcnccttcaaagctcgtgccttctcaacacaggcaaaagagaagcttgaagcttcaggttgtacactccactgtgttgccgggaagaaagaaatgggttaagccatctgttgcaaagaaccaagcacgagcagatgaatactttgccaagaagagagctgcagcagcagaagcagcaacttcagagccagcagcctctgcttaaattacttcagtttcaagctctttttagtgttgtaaagctgcagagaagataattgtctatgacaaatgttaattacaattcctttgtctttttgtatngtgaagagatttacattttgttgtttgaagagtcattatcaaaaagatatttaaacggtaatgaaatattgaac

SEQ ID NO: 136822 - DNA, 571 bp, Arabidopsis thaliana columbia
  unsure (1)..(571): unsure at all n locations
gtccngcnganccggcnccccngcggttcagntatgncccgaaccagtgtcggaccggngtgggncagggtatngtggctgagctccccacttncatggccgtccgggcaaccggnggtttatgttgatttaccgggagngtaccctngaacgncgagatcaatcatcgcatttataatcgtgaagncatttcacgggttcagaaaaagtattaatgtggttcatgaagaggttacagatagaggacgcccaagccagttgaatatgttggagccaaatcttctgttataatcactgtgtgccttgcgttgtacttgcacatcataagcggctgtgttcggaattctcccataggcgtaagccagcatttttagttcttcagatgaagagcagatcatcgatttggttggatataggataatatttgttaggtacacaagatttatcagctcgttgtttatagttggagctgagaatattgtaaagattgtgtgcgtgtattagcacaacttgattcttattgatggatcatggatcatatatatatacatattgaaaaggttcttgggac

SEQ ID NO: 136823 - DNA, 590 bp, Arabidopsis thaliana columbia
  unsure (1)..(590): unsure at all n locations
acgcgtncaccnccgcccntcaacnccgaactgcttaaaccnncttnggcctttcagntccnggaagacncancncggcgttaggtggaaaaccagaggcatggtcgcccatggtcggacccggttgggtctccattggatncgataagactgncgaagagncagtggcctatggataagtctggttcttgggagttggntttataccgtcggagctgtagcgattcgccatggctacgactgtggttgccgtactgctcagcttcttgctatctacgactccgatctctacccattccaagctggtgaggttttacagaagaattgggtttgaagaggtgaaagaagtgagtgggtcgtcaattaaagacatggctgacatgttagtgtggggtggagttggtactcgcatggatgctnatatacatcatcttcttcttaaatggtccaaagttttcctcaaatcacattcttaattatttgtagatatgtaaattattttatctacaccatatgatttctgacaagatttatatttgtatagacatctttctgtcttaatttccatcttgaagcttgaacttttattt

SEQ ID NO: 136824 - DNA, 566 bp, Arabidopsis thaliana columbia
  unsure (1)..(566): unsure at all n locations
actggcntcgtttncccaggtnccnggagaccgtcagaaagaccncgggccgccctttaaggtggatacttggttcgnggccccagagataaagtggactgaggngngcccccccgtntctgngacttggtncnccgtgtcttcactgaccagaatcgngagtctagattccccaatgacccgagaggatgtttagatgtgattcctgagagagtaaaactncccaccaaacgtgaatgtggcccaagaatttggaagatgagcagaagcataaacccgaaccaaaagcacaggaagccgaaaacaagtctggaggacgcaaggatcttcctggagaggctgccaaaagggaagagattaagggccaagctgataacttttggactcgcctttgggggaaaaaatattaaaataatgtgaattgttaattcatgtttaagttgtcaacaatggatgttttcttttgaatggcagattaacgttttattttggattggcttttgcttatttcttactgttgtttcttatatataaactttacctcttaaaaaagattcaagaacaat

SEQ ID NO: 136825 - DNA, 570 bp, Arabidopsis thaliana columbia
  unsure (1)..(570): unsure at all n locations
cggccanccccaattcaggccnggtctcaccccttagnggtcncntttcgggtttnnccccaacggaagnccccaccnttngttctggacaaggattttcccaggaggaaatgttggaaggnatctttgggttggggaaattgcagcaagtaccagggtggtggattggntatattatctaccaccaacgtcttggaccactcaacgggttatctcgtccccaatacggcgtattcatgaagagatcaatgtctttggacaatccacgacggttgcaagattcttgaaagactattttggatttcatcatgaccttttggcggttaccgcggttgttcaaatcgcttttcccattgccttagcttctatgtttgcattcttcgtgggcaaactcaacttccaacgaagatgatcatgccaattagtcttcatcaatcatcattttagaataaaataataaaataatggtttttatttttgtttgtgaaaataaacatataacatataacttttctttttggtatgtatatgattttgaggaaagtaaacaaagcattgtctatgcaaaac

SEQ ID NO: 136826 - DNA, 592 bp, Arabidopsis thaliana columbia
  unsure (1)..(592): unsure at all n locations
tttcccancgatttgcatnggcaaggtcccncgnttcgggcaacaattctcncnggacctnncggctaattcnttgtgngaaccngacaagcnggagaagtncggttanccgtcncaggngaagctaaaagtgctcagctttacgggccaagcaattgcggaccaatcgggcatccatccactctggggaaagattgaagctccgagagagatngcacagaccattgcaccaatctgctaacaaggtttacctgagctccaacgatctgttgcttaaccttcaagaaatgaacttggagcctaagaagtaaaagagaaggaacgagtaagtttcttcatttcatattcatttcatttaaaagatctctccgccttggaagtaaaggatgggttggtgtttgaccaaatgaccctttctcgtgactgattctgaaaatagtctttaagaggacatattgagagagacgcagattggctttggtcagtattattcatcattttcaatgaaactttttgttgatattttcctgtgtttccccggacaattgatgaagttgaatttaaaactcaataatattcatatgatctgatc

SEQ ID NO: 136827 - DNA, 554 bp, Arabidopsis thaliana columbia
  unsure (1)..(554): unsure at all n locations
aaacttttttcancggcacattncggggtatancaaccccgcgntcgcccntatctggttgggtatccccatntcccttggantnctgaccaaggnggtatatggacccnctaanccgagctagaggtcggntaacgacccaagaggctganaatttggttccggatagctttgtgttgcgtccacgaggagccagcattgaggccaacaatggcagcggtagtgggtatgttcgaaggaagtataccgttggggaacccgaggatggagtcgttgaacttcttgaggttttatgggctgaggtttgcggagtcttccatggttgaaggacaaaatggggagagtgaaactatggtcttccaccggcgagagagctctaatagtggcggctctaggcagtctgcgtcttacatagcgtctcaggaagtgtccggcccgcgatgagatcacctaaatgtgaattatttttgtcttttgttttatttggttttggttactttgttaatagtgataggccttgttcatataatctctactatatatgaaaattattg

SEQ ID NO: 136828 - DNA, 566 bp, Arabidopsis thaliana columbia
  unsure (1)..(566): unsure at all n locations
anntccngccccatgggtagagttggggaaagagntttggggttntgggaaanttgggnaaggtancccagttttgnggngttcaagttnttatccaaancggcncgnggngctttattggctgggaatggngaaatgggnagnggatggttgaaccagngatgaggaaagtaggaggaggtggaggattgaaagaaagggttttagagacagctcgagcccttggtgttgtagcttgtgtctcagtcagagttcatggtccatggttgactcagctcatgccacaacattgaaccaaaccaaaccactcggtaaacttgtatagcctcttgtatatattatgatatatatcaataataattacacgtgtaatgtaagatgcattttgatttgaagatgcattatgctgatttgtaaaacataaacggctttggtccctttttagtgtgtccgaatgaataaggtgttcaaaatagcgtgtgatttgtaatttgtaatttgtaattagtctgaaacgttgtatatatgaatattcttcaattatataaaagcttgctttcaaattt

SEQ ID NO: 136829 - DNA, 556 bp, Arabidopsis thaliana columbia
  unsure (1)..(556): unsure at all n locations
ggcggccccttcagntgncnttcccacccagttntcgcctgcctaggnccaaaaacggtcgaaagttccttccncgntgcatggcacatgtttanaccaacttttggccaacccggagggatcnttcgccnaaggtgcncggngnctntcatcaaacccaatgcaaatcaacgttacgccacttaatgccgtaacttccntttggtatncagagagattagcagagaagcataatctgcctgttcaggattttgtggtgcgtaatgatatgggttgcggatcgaccattggtccaatcctagcaagcagtgtggggataaggacggttgatgttggagctcctcagctctcaatgcatagcatccgtgagatgtgtgctgcagatgacgtgaagcattcatatgaacactttaaagctttcttccaagagttcactcaccttgacgccaaactcactatcgacgtttgagagattcttaaatcttactgctgtttaagttggaactgaaaagatcctttgttaggaaaaactacattaataaaaggatttatagcc

SEQ ID NO: 136830 - DNA, 566 bp, Arabidopsis thaliana columbia
  unsure (1)..(566): unsure at all n locations
aggttcccnggtcttcccttcaatcctttgcncccacnccttcttaggccggntnaancattttggggacctnaaggnnccggnatggnncattcccaacttggcttaattngnggagggcccttgggnagggaaagattccacccatccggaacctttttnccaggatggattcaatgcntagggccggataaggggagncttccataggntgntccnattccatttaaccaagttcttagcttgtggaagttccccagagaagtagttagtctgattatctaccagaattanctgaagatggatcaaggttttgcttaggaaggacttttagaacagagtgattggagaatacctgagaaaagagccaacaagagactcgaagaactttgtaaggcctctagtaatcatagaacatcatctttttgaatgtaaattgtccttgcagttgtatctttatagccttgctcgatctgtgcagatatgattcttgagttgtatacctgaaatctccaagaggctctctctctctttctttctctatatatatatggttcttgttcttg

SEQ ID NO: 136831 - DNA, 589 bp, Arabidopsis thaliana columbia
  unsure (1)..(589): unsure at all n locations
aananattccgtgncccccanatttttcnnaagnccaattccttttccccntcaagaatgctttccccntggtggcccccaggttaaggcaacncccaattgatgggnntcacccctttgggaaatccggcggtctntaanccagcattccagaccccttacattcggctcactcgccaattccacnccttnccntgggagtcancctgccccgntatagtcnctgcatggttcccagcagctaaatcgctggggggacagtttaacactctccatgtctgaggaagagcttgagagggaaatggagagagcttcatcagtcaagattcctgttgtatctcaggaggatgcgccatcaggagaaactacgagccaactatcggagaaatctactcctactggcatttagacgatgatgaataaaagggttttgggatttggttncctgttggttttaatgttttggtcaggagtaatattttgatagtgagaagactaaaattaatcatttagttatatgtttttttggttgttattgttctcttgatgataccaataccaaactagtaataaaatttccaagttcagt

SEQ ID NO: 136832 - DNA, 536 bp, Arabidopsis thaliana columbia
  unsure (1)..(536): unsure at all n locations
tgagggggcagatttnncagggtgaactgctttcgggttcccancccctctgngtnctgtcgttcccagnggngngagtcaactggcggaccaagccgngggctctgatcaggcttaaaagcggaaactgatggtgatnccggaggagcaacgtgctactgaaatccaggnaattaagaggagatgccgtgaaagctgaatggggacagccgatcaggaactacgtgtttcatccgtacaaactcgttaaggatgtccgaacaggtcatgaaacttctgatatcacatctgtaatggatggtgacttggaccctttcatcaaagcttaccttaagcataagtacaccttagccatggcttctgctgtaaccaattagaatgctgaggataggcttgttcctttatatttctctacttagatagaaatcatctcctactagactgttcaattttatagcataatcttgaattccaacagtcaatgtgggattgtgagtcaagtctgtttgtatctaaataaaaccgcattttgtttt

SEQ ID NO: 136833 - DNA, 531 bp, Arabidopsis thaliana columbia
  unsure (1)..(531): unsure at all n locations
aattnccatgacccaatnntnccttcnccgntatccatggccacccccgnttatccnctntnggagagctggttttgancagcccccaggatntgacatgccatcatccacttcattatcccngcggntncctcaaaaaggaaatgtcagncccgaaccntcaaattctgggtttgggagcgggaataaaaccggcggttggacttcaccattcatgtcaccggggaaatgatgcaaaaaaagttggagtatatcattcatctgatctgctgagcaagattatgtgtgcctttgggtctaaactgtgatttctgcagtgaaaagctctagactgaggttgaagatctgaatggagtttttccatgaacagcttactgtttgacaaaaggcatgaagattatgtttgctttccttcaagattctcacaaatgactgacttcaacctttgtataaaatcttgcaaccgggcgtgtaatttggttcttgtgattcattctcccaagttttcttctataaaactttgttcgtatt

SEQ ID NO: 136834 - DNA, 535 bp, Arabidopsis thaliana columbia
  unsure (1)..(535): unsure at all n locations
tnncccccnatggaaacncgaggggccctataaatgtccccatgcttcaaacatccccctcggcacctccacggcaatcacctccaccgcngtctcaagctggcctnccaccaaccattcctccttcaccgccgaagaagtcttattgtccaccgcntccgtccacttacatatacatgacgggtccaccaggagagttgtatccccattgaccagcagtttggagcggctgttacaaaaagcttcaccgtggtgaagatctcaggcctgatcgcgtttggggttatgagtttcttgatgatcatgaattgatgatgtttcgttgaccccctttttatcgtttcatagattcgtttacttttaacggatgggtatatgttgttcagataactctgaattacttattatctcataaattaacgattgtgcattttctcttaggttaggatcaatttacgtttcatcatatttcgatgtaccaaaatttatttgattaaatactatggataatttaaatgatatttagtgtttgcat

SEQ ID NO: 136835 - DNA, 532 bp, Arabidopsis thaliana columbia
  unsure (1)..(532): unsure at all n locations
anttctccccccccatccgtgaattggtttccgattnctggacgggncatttggatcnggncagcctgtcagncncattgctngattcntctggcgtcactggagtcatcgtcggggcccctggaactttnccgggtggagaatgagcacttaaccaatgtcggccaatttagggcagtgaaggaccgtaccgttaccgttccttgacagggactcagacggttaaacaaaggatttggagggtttaaggatctaaccaagtttcaagtatttagaggaagcatttcggattttgcatcgatgtagtcatatcggagaaaaacctttgggaaactcccgaaattgcctaaccatttatccttaaacatattaattatgggagactaatggattctacaactgttaaacgctccaaagtgcaaaacgaagaagacaattttaatttcatatattggtttatgtaaattttgatttgcgttctatgttcaataagtcttctttcttttctaataaagaatgtcactatctcctc

SEQ ID NO: 136836 - DNA, 535 bp, Arabidopsis thaliana columbia
  unsure (1)..(535): unsure at all n locations
aaagnccngacaccgatagaacccngggttacccccaaggccatttgcttctttccncccacatggcatgggcttcttctggccccgtccctgtaacagctttcccgcaatgttatncaaagagcgacgttatctcatcgatgtcactgaagtgtcccgtggtatcagctttgaaaagaagctccggtatacccaagctcgggttctacgtctttctctttcatcatggttgtctttaggctcactctctctgcggtctatagcttcacggaagatgatgatctacttcatttgttttgatttantccnttgcgctctgcgttatcaaccactctctctttattttctgagtgtgttttagaaaattgtgacaggtttttattacgtccctgcttagaattagccattcagggattcatcatgtagctttatataacgtatgattaccgaaaactcatcacaaatcgtttgacatggagggtttcatcagttttgttttgcgcaatataatgttcagtctcatcattgaagtcat

SEQ ID NO: 136837 - DNA, 555 bp, Arabidopsis thaliana columbia
  unsure (1)..(555): unsure at all n locations
ttcncgtacagggncangggancnccagtttccngttggatnccccctggattacctgccngggcggtaagagttgccactgctggcngatttgttgctggggaccngctcgngtcttcccaagtgcacccatggatcccncttcgctgcatcgncaaatggnttacgcaacatatgacttgtccgaaattgcagncactgtctggttgatccatgccaaaaagtcttaagtgactgcgatgcagctgatcaagtggcagcgacagcaacggagagcatagatatcagaatttctcctctagaacctgaagcaagagtagccacttttagagaaagcagctagagtatgccaacaaaacaatcataatttcaaaatttggctctccagcaagattatagtttctttatgtcactagccataggatgtcaaaatcaaacacagcagagttttttttttgccttttgtttttctcaaagagtacagaacatataccttaagctttctgtggcatcatacgttcatcagaattatctgaatctctacttctttgcaat

SEQ ID NO: 136838 - DNA, 564 bp, Arabidopsis thaliana columbia
  unsure (1)..(564): unsure at all n locations
aaattgtgtcnccgacccnttcggacagtctcaaccngtcccnactgcngncctntgccgtggncaaggtttntaagncccccgctcaaggctcttggggaccacccatcgcaacttncagngcaccaaaggcatggacttatcanggnaagctgctacaccaccggtttataaaagtccctgatctggacccggttatccaggagctgattccgaacttgtcaaagagaagtgtgtttgcggtcatcttcgattngtgtggggaaaaacttggaggatatgtcagcgtatattcatttcttggcgtctggatttgaagcttccagaacagcttttggtgctatacctggaagcttgcagcctgatgaagagttatgtagagatcttggtttgtctctcaacactccttccccaaatactcgcaagcaagattgacctgttttttaatttatctttgtctgcatatcattgggatatttttgtgtataaatcaatgtatactatctgaatcattctatagcagctttggtgtaatattgatgatgaaagttagatttttcatct

SEQ ID NO: 136839 - DNA, 578 bp, Arabidopsis thaliana columbia
  unsure (1)..(578): unsure at all n locations
ccntcananatcccttccggggntcaggcgacatccccttcgaggcttcnccttccaaccngccctaggtggntcccaaagantttggngagncatggggtctccaaaggaggcnccaatcagncttggccatcttacccggagctttaaaccaatttccaggncccaccagaggctgataagctgttgaaaatccagagggagttggatgagacaaagattatcccttcataaaacccattgatagtgttctagcccgtgntgagaagctggacagcctagtggagaagagctcagatttgagcatggcatcacagatgttttacaagcaagcgaagaaaacaaattcatgctgtactattctgtgagctggaagtcctgctgggtatatagtcaaccaaacttttgctggggggagactgttttttctatcgtcttatctatacatataattccgtctgtagtttgcatgcattattttgattccataagtctcgagtcgtgtggtgtgtttatccaaatacataatgtcaacttctgcaagatttgaattgtctttcccagatttgatctgattg

SEQ ID NO: 136840 - DNA, 570 bp, Arabidopsis thaliana columbia
  unsure (1)..(570): unsure at all n locations
ccgccccaaantgncctcngaaccttgtgatcgggtactcngcaggggnatcncactcatccntcncagttccccancaggggctacncccagagttgcaatngtttnccntggatgggattancaccggactttcttcgctcttcgtggcccgcaaaatcaactcgctcacatntcatcggcagagaggcttcccactaactttaggtttccattgccacccatggttggcaccatatatggtctcgatggtgctcccatagctacattctctctgtgattttctctgcattacaggttattgcactggcgtactactgtatatcatatttccctggtggatcatcgggaatgaagttcctcagttctactcttacctcctctgtcttccgaatgtttgggagatgantttcgctttgacctatgcaaagaaaataacttgattctctcgtgtataaagaaagatgaaagatcttcaacagtggttaaatgacaaatctggtaaaatatgttggtccaatggctcaaagacagttttgttataaatttcctatattgatactttctgct

SEQ ID NO: 136841 - DNA, 541 bp, Arabidopsis thaliana columbia
  unsure (1)..(541): unsure at all n locations
tttttncccgccnttttttngccntctngggtccccggggacctccntggggcaggactntggtttttcnccccctnaacctatgggccattcncanacattgngatcggtgaacttggtttnatggatgcccntncagtgnacaaaggcttcttcttcactgntgtgtcaggcccaatntggctcggaccgcttcatgatgcatccntatgttacggaaatgctggaattggcaaaggaattggggatgggtcagtgaaggcactggcatggatctggacaagcttctcagtataatgattgaagaaagtgatcccagactaccncctggatacacaaaaatggatgagatggcgagccgtgcgaagatgaactcacctccgttgaagaagatgatgagtgcactagttaaggngggttacgctgctagcagatctcacattattcccaatgctcttaaaacagattgtcccatgtcccattttgttaggattgccaaggaaaattagcatagttaactttttgttataatcaagtttag

SEQ ID NO: 136842 - DNA, 520 bp, Arabidopsis thaliana columbia
  unsure (1)..(520): unsure at all n locations
acnttgaancccaggggggcnccctcccctgggggggggatccttcaaaaccccattcgggttgcnctaaanncnttccntgggnaaagttgggaancggggttgaatgncgatatggcccccnccttaaaggcccnttttatccaaggtcagaattttggatgatattgatganggaatcgtgctgagtgaccaaaacaacaaattttgcccgtcattctatgcatttcctcaaacgtactgatgcggaaccatacattgctcggggccaaatggaggagctgacaggatgattgatctantcagaagctgtggtgggctcagatgaatcacggtcgggtctgtgatcaaagaatgtaagcttacttagccttgtataattgtaagacaggaacatgaaaccagaaacctcatactcaaactcatgtaacaattatttatcttacaaagttacttctgtagtgcataacattcactagcaataatgcngttttgacaagctcaaaattaccttttttcc

SEQ ID NO: 136843 - DNA, 420 bp, Arabidopsis thaliana columbia
  unsure (1)..(420): unsure at all n locations
cccgnnnncccgggggaaannanaagaaaaggngggncanaattggtttcccngaaaaaannccccnggagattttaaggcctggnatccgcccccncccatgactggccggtgagacttgtccccgatggaattgaaggaaatgggaaccaattgtgggtaatgagatcaagaaaaagatggagatggctaatcagatgatgagtattagtttggccattgttagtcaaatgaagaagcttttgttgatatttcactaaaccaatcctaaaggttggaacttttttcttatttctctgttttgtcaatttcgaattcataaatgtgtgtatgtgttgtgagctttcctttgtaagtaactactacattgatttgttttcggtatgtaattttgataaaagagaaatcttttcttcttgt

SEQ ID NO: 136844 - DNA, 489 bp, Arabidopsis thaliana columbia
  unsure (1)..(489): unsure at all n locations
aattccaaaccttgggntgaanccgggttttttgggntccnttcaagaaagtttccccnngccctcgtgcctttccngnggnctaaagccnccgggancnggtttntcccccgggtncccataatggcttcaccatccaaccccaaagtgattccagaggngttcattgaatgagaggggttcngatngccagaggttacaggagacaagccgacggggaaaaacataccaaagatactngtggtaggaggggcgattgcacttgcatgtacattggacaaagggctgttgacaaaggcggtgatattcggngtagccagaagatttgcaagaatgggaaaaaggatgtaggagagagtgtacatgtaagtagacagagaacgaatgagggaatgagagaggtgaaaagactatctctttagtcattgtcttgctggatgtatcaatcatgtaatagcaaagagaaaaagaagcgagagttattctttc

SEQ ID NO: 136845 - DNA, 453 bp, Arabidopsis thaliana columbia
  unsure (1)..(453): unsure at all n locations
cantttntccaccnnggggggggttaaaaccnccccctttcccngtttccaaaccanggggggncnggaaccccagggcttggnggggggntnttttacccccnggggcccatnnatcccccaaggttcctggaattcnaattatggtgggtcaaggattccatggtctggctcgggtncacttcactcgggacgcaggagatcgtctttctacgatgtctttgggtgagattttgcacaaatgggtcacttctaaacaacttcttcattcctctgtttgaagataaaaagccttaataaatttggcttcctttgtaattttgtaacatacatttaagattcttaagtcctattgcaggctaggtaggcttcctgcttagtttagcatccctatcatttttagcaatagcttattccatcacaataacatatataatgtacgatcttttcctc

SEQ ID NO: 136846 - DNA, 554 bp, Arabidopsis thaliana columbia
  unsure (1)..(554): unsure at all n locations
cttgncanggccgggggncccccngggganttggccgggggttttccccncaaanttnaagggnnccccgggnagtnaggtccgntggccccattttccaggnggntccaaccggccacttccncttccaacttccggtccggatgggggcccnccagggaacggtttttccatatccgccgggtancnggtggagcagcgtggctttttatatggttggccncgtcccagaaacggaaaggattnnccactcgaagaaataccaagtttcacttattcatcagcccgatgaaagaaatcaaacttaatttgaattattttattttattataaaaatgatcaaattcagtttatggtgttctatttgtttatttacaaacaaggatttttttttttcattatgtaattactactttatttttctgggtaattagccccatttttatgatgtatatttacgagatgtaaaacttggcctacgtacatgtgtattttatctctaaaattgcaaatgtaatatttttcggacatatattaaagaagagattgatttc

SEQ ID NO: 136847 - DNA, 497 bp, Arabidopsis thaliana columbia
  unsure (1)..(497): unsure at all n locations
caaagcaaaagctttnnnnnaanccccccaatcttttcgggnancccccannccgatccccnccggnttcaacccgccttggcctcgattccccttctagggnggcccnatctgaatgctaangggttnagggnggaaagaaactggcccnctgtgaaagatcaatccctgccagatgttgaggtttattgtaaaacgaacttgagatagaaaagaatgtggcggaaagaactctaagggagcacaaaggtgatgcggttgctgcgactaggcaattgctttcacgatatcctctatgatggagcaggaccattctttacttccaaggttttttgtatgtttgagaggttgagagcaagtctcctaatatttaaccgagttaaaattgtctattgctgaaccgatctctctgagaagccctgaatacagttacaatcgattctggggtggtgttttgtggttctacctgaagtttgangttcaatcttattatcaag

SEQ ID NO: 136848 - DNA, 481 bp, Arabidopsis thaliana columbia
  unsure (1)..(481): unsure at all n locations
accaggggttttccccttttnggggtgggcccntttnccccnntccctttgntccccccccaagggggccttagggntttncccaattccggnaaccttttggtttccaagaagggcccnttnaccctgggggggttcccnattccttngcccttagggctttgcncccncgattgaaagccnctgcaaagggggaaacttcaacgacatcaaatacgttggtcgtcttccctcagctgctacagccacaggattttaccngcttcatgttaaggngcagactgatcttgtgaagaaagctcttcaacctgaccccatcacccccgtcatcccttaaaaaaacacagcttgagaggcttgagcctgtataaaaaagacacaacacaaaaataaaagattcatgagagaatctttggttaccaaagngtgtcactggaaaataaacagatgtttgctagacttacaaatttaagtttattcg

SEQ ID NO: 136849 - DNA, 516 bp, Arabidopsis thaliana columbia
  unsure (1)..(516): unsure at all n locations
gcccttccccccattgncccttttttccngcccaagggggttcccccccccntggggggggggggttncccctngcccttttctccggnganccnttaaggcccaagggntnntaaaggggaacccggaggaaaatngangaagngggnttttaagggggttngaagaaggtttgaaggaagtntgccgggngaaagggaaatggagaagccatngatcttataaccaaccggcatatacagtaggattcatacagcagagcagagggaagtggatgaacatgttcagagacaggtncctgtcgtcttacctttctaggatgctgctgaaaaagtcccatttcgattgcggaagccttgtcccatgatgattctcaaacataagtcaaaagcttgtgattcttcttgtcatcaccaactgcagaacagttttcacctttggtttgcttcaaagactatctatctgtttagtgttatttcatataacaaactcagaattaataaagtaagtttgtgt

SEQ ID NO: 136850 - DNA, 577 bp, Arabidopsis thaliana columbia
  unsure (1)..(577): unsure at all n locations
atngtnccaaaaccccggggtncccgnattttgcccccaacccccaaaccggaccccgngcccctgnggnaatnaatgggccaaaccnctggcnttggccttnnnagggggaatgttggggccccggattcccaagggggttccctggcccccntgcctgctggcccntggatgcttcagnattcatcggcctgggccncccccgcttcttcctggctggatgatcccagttccaaggtggctaccaaagcatgtggtgctgtctatggagtttaaagatgaaggcggtcacggaggatgtcttcagtggaattatgttgctcngtgaaattccttttgtctacttaggtcccttttcttttgttcaatngtgatagagagaaagtaaaaatgaaattgcttttcttgtggaaaaaataagagcaaaactggtaggtgtagtggtgactggtgaggcgtgaaaatctcaacagatgcacagagatttctggtaaaggtccaattaaacattggactagctatttatttaatttaattacagaaaataaaatgtccattttttatggtcatttgaatt

SEQ ID NO: 136851 - DNA, 544 bp, Arabidopsis thaliana columbia
  unsure (1)..(544): unsure at all n locations
tcnttncccaaccangnaactgcctttatggggacccttcttagggaccncccntgtggnanttgaatccccatgtctggcccgactttttgaaggtatcagaaccncagtcacgncccnncaaacgtctggtttggtcggtnccntacaaaggatgtccattttcctcaangacggggctctgcttaaagctgaggctagagactctgagacccatttctctcttgttggctgcacctgcgctcctgcttttccagttcgaggactttgagctcgcgaaacgctctgatctcttatcaaggtttccgcaacacgagtcactcatcacaatgctatcttacccggagtgaaagggcctacctagaggagacgccttattggctcaatggtttttggtaactactaagagaaggatactatgtttgctttgttacttcaacttttcatatgaatcatacaaaggttgtaactgtactttgagttcacttttcatctttgtatctttgtttttactgaattgtgattgatcaaataaatggccngt

SEQ ID NO: 136852 - DNA, 577 bp, Arabidopsis thaliana columbia
  unsure (1)..(577): unsure at all n locations
gncctttnccgggnaacttnccgcnnctgggnaantctttgttgnccccaaacanagggttccggtcccattggggaaaaccgggggccctccaaaaaaaaaattctccccccttgtntaaaggcaagtggtcctggaanccctnttttgccttttaatggcgggnccttactgcccccnccgggtcngtcgaaatgggtcatgccggngcccattntttccccggtggtaaaaggtncggctcaggccnaaaattaaaggagtttgaatgatgctggngtgaaggttgttgaatctccggctaagattggatcagcgatgtatgagctctttcaagaaagaggtcttttgaagccgtgaagtgaatttcactngctttcgcttctttttttccatcttgaaaccttcaagaaaaaagaaaagaaaaaaaccctaattccacgccattgatggctgcacacttttttggggtttgttttgctatattgatatgatttttccaattgaacagtgataattaaaagagattcaaatcttatggcattggattatttttaatgttatcttccngtacaag

SEQ ID NO: 136853 - DNA, 541 bp, Arabidopsis thaliana columbia
  unsure (1)..(541): unsure at all n locations
gntccnnagntttcccccccccntnntattnggnaccccccaaaacccgggntnttaaggntgnaaaggggtaccaagtcctttttccgggcnttanggnaaacanaccccccgnggagccaaggggatatgggaccccctntgctggagaccatgggggtttttcctccggcatccccaggttccaatgataaagggggtgtaancctatctgagcttttaggccggattttttcttttcaattattgnggttttatctaggatgatgcatttcattattctctttttcttgaccttgtaaggccttttcttgaccttgtaagaccccatctctttctaaacgttttattattttctcgttttacagattctattctatctcttctcaatatagaatagatatctatctctacctctaattcgttcgagtcattttctcctaccttgtctatccctcctgagctaatctccacatatatcttttgtttgttattgatgtatggttgacataaattcaataaagaagttgacgtttttctt

SEQ ID NO: 136854 - DNA, 579 bp, Arabidopsis thaliana columbia
  unsure (1)..(579): unsure at all n locations
cccaaacaggtttccttngggnaggnccccaggggnggccggnaaaccccnaaggggnnnttttttccccntttcccangccccccnaaggggtttccgtgcggntttnctttcntccccccccgccnttgttgntcccaaatctccggggaattcccacccctgggagaactggttcccgggaaaggcngatggagtgcaactagagtggccnggcatattgcacgccttagaaggatggggaaacgcatggagtgtggcacatcccttcttctctcggatttggacaaagtatgggaagcctgtctcagccaacgnttccagcctctcctccttccacatcattaaaactccaaccttggaagatttttggagaatgagagcgacacgctctgtgcttcttttccttatgatccagctcttccacgcacacatgaactatgaaacatatataaagcgcacacattttatgttttacgcacacatatatttatgcatatcaagcttttggtgattatggtattgatagagtcaaattaagctcggtgactatggtattaataagagtactatttcctt

SEQ ID NO: 136855 - DNA, 568 bp, Arabidopsis thaliana columbia
  unsure (1)..(568): unsure at all n locations
aggtccancctgncnttncctttgttcctnaccnaaccnttcatgcccatcagncctttgcgncaacnccatttccngatntttcaaccattctactaacttccggatcnangggcctttggnaccgggggaancnctnttgagaaagctgggaaancccaatttncggccatagtgtccaggttgctttttgcaaccttagcacaantgttacccgtccaagtgtttngtgtcagctttagaagtaagggaagaatccagtaagaggagcagctctgcatctgggaagaacagagaagattctagagatcttagagagaagaaggttacctaaattgagatgtgatcagatgaagaacatcgacgaatggagagcattctacaagattaactcttgcgaatgtgataataacaacaagacagtttatcccgactcggacgaactgcgcctcactgttgagtagtttatagatatgttaaaggttgtagctttttctgtttttgtacctttgtgtattcaccacatgaatctctttgtatatagtaagaatctgaagctttttgacac

SEQ ID NO: 136856 - DNA, 552 bp, Arabidopsis thaliana columbia
  unsure (1)..(552): unsure at all n locations
ggccngggcgatnntntccaagctttcnggnctngtaantttccttatccacctgagcttaaaggggngtcatccacctttccagntgcntgggggncttccaagctgaggaancggaatgntgaccagcagctgctgcngtgaatggntccatgctaggagtngtttgcnggtgaaaacgtggaggcttcccgtggggaaaaggataaatgtacccgctcatcccatgttacccatactttatgtggaagcatgatacgcaactgttattgctgccttggaaaaaagtttgattactgctccccaaaccaacanaactgtttgtttagatgcgaggnggttaaccggattccagatttcccgaagacaaacggngtaagcaaaggattagggcccccaatctatttatttttcttaggacaatttatttattttgttttaggtttatagtttatttacgggtgtttaattataaaaccctcgactaataaattgtaagaaaatccttcaattatatatttagtgaaaaaccactcaattttactnttacac

SEQ ID NO: 136857 - DNA, 574 bp, Arabidopsis thaliana columbia
  unsure (1)..(574): unsure at all n locations
atccnagnnttggcgccccggggattttttccgnatttgggnaaattttnccnttccgaatgagtccttggctttcgggtgacgtntgggctccaaactggcccgctgcaaaggtttttttcaagnggaattatcgggntaaaaattcncnggangtcaccnttttggnaaagttagtgtatacccctcaacatccgaacgggaaggaaaaggctctgaaaaccactagcancggctgctcggctcgacattggaagatttcccttcagaagaaagtcttcctcgaggtggaagtgaaagtgaaagagaactggagacaagacgaggggcttctcaagtactacggctatggaggacagatccgagctatgtagtatgtgggcttcaaatgggccttgaagaagatgagaaagtgcaaatgactcggcggctcaggttagctttttcccttctttttttttgtatttagccgatgccactcagtctagcttttgtttttaatctcaatcagttgattcctttggaaatttgaactctttcttcttttgttttgtccttaagagtttgttcaacc

SEQ ID NO: 136858 - DNA, 497 bp, Arabidopsis thaliana columbia
  unsure (1)..(497): unsure at all n locations
actngggaattgnggacccggagnagagncccaggattgtggggnttaatncccatntgacctggaggantcccggaggtggancngcngnggaaagtccaccggattnggatgggggnattaagatttccaaggtaccccccntaagaatggggaaacccgggaatgtttgaagttttacttgcccacatatgaaagctacccggagaatgaccggtaccaggaggacccaggaggtnnccgccggcggagggtggncgaatagtcacgggcattctatagcgaggagtntaatgaggctgtattgatcaacaaaattgttcattggatggtttaattagctctatgaagctgaacctttgtttttagtatttcgttggtttaggtttaatttcggttcaattggtttactttgtaatgttaaggaggggatgcattctcaaacgaatcacttgttgtcgttgtctattttaaccggaataaaccgccattcgacc

SEQ ID NO: 136859 - DNA, 557 bp, Arabidopsis thaliana columbia
  unsure (1)..(557): unsure at all n locations
cggntgatccatgttcgannccctggatgtgggcnntnncctgactacggcagcttcaccctnttncttggacccaagcaggtttncctttntgccancgngtntgaacccccaagacccccntgatcaggttcccttatggntnccataattccccgngagagagcatgccaaattctggatacaaatctcaancaagtnccgttncattagatcagggacataacctccgagggaagggactttaacttgacattgcactggcatgtcatgcccaagacaggcaagatgtttgctgacaaaatagttatgtctggttatcgtttacccaatgcatacagatgaagatgaagagcctcctcctgcatcatgtaaggttaacaaaaatctcttaaaactaggaaagaagagagttatatttcaggggttaagttagacttgctgatctatatactggcatgaagttaaaaacattgtttgggaatgaattatgagccaagaacatatgagattgtcatcgactctttgataagcttcatacgaacataactctgcnt

SEQ ID NO: 136860 - DNA, 567 bp, Arabidopsis thaliana columbia
  unsure (1)..(567): unsure at all n locations
gcatcccntgnccccntcccgttggggaanatttntgaccccgggtgaccnaaggngggaagaagtggccccaggtgttccagggtgaccggttgagtttttccaaatggggaagttcccaatcgggagaaagaccttttccggccaggaatcngactggggtcccagggaggaggagggggntccaggcaaaatcggtgaaggcggncaaacccntcaccgggggaccctcggntgaaaccgggaaccgctttnaccccgcaggaggatcnggttnccgtgggggaaggaggntcaggaggaggaggcttttacttggtaaaagtgggnatcttcctcaaggaggaagccncctgtaaacccagaattaaccaaactcttcgaggtaaggcgaaaaaaaaagtaaaatcttatcatgtaaaacgtatatctgtataccccttttgatttcatcagtgttctttaatctttatatatatatatttgttggttcttgattcttttcttcttttcgattttaacaacaatgtcttccgatcttttgtttataaaggtttgcgtttttct

SEQ ID NO: 136861 - DNA, 548 bp, Arabidopsis thaliana columbia
  unsure (1)..(548): unsure at all n locations
caggcccaangcttaaagccntggngggaanctggncanttgccagggnacattccngaatncatggnnggaacaggttcccccccccgngtaaagggtttgccccgttagcatttgnngggtttccaggaaccncncggtgatttcgaggatggtgtncccgagtttgccgacatgtcgagagaagactgggagatggcnaaatatggtttccagatngctttgaagttgagaacccaaaataccctgtcttggtaaactaaaggtatcccaaaaaccccgggtctgactgactgggattggtgcagtgacattgtttgttgcgtctaacttgtgacctgtgtttgtacaaccattataagagatatcatatatctacttgtgtaaccacatctgtactttcttctccttccttcttttttcatggggatctcaaatgatgatgtcttgcaagaaccttcgtggtgtgtaattgactttgtaagaaccggtaatctcatatccggtttagcttttaaaaatttgtatccaaagaccggtttgttctt

SEQ ID NO: 136862 - DNA, 520 bp, Arabidopsis thaliana columbia
  unsure (1)..(520): unsure at all n locations
agnacggccaccnttggacagccncccattggggccncangnantgggccccttaccngggccttgggcttntatggcgganttggacaaatcggnacccctctgtcatgtgattganccgngattgaaaccatgggngaagtacatgcttgncctcacacactaatgccgatgaggaaagcgtttaaggggacttttatcnccgcaggaggtttcacgagggaagatgggaatgaggctgtgtcaaagggaagaactgatttggtggcttatggtcgatggtttctagccaacccggacctgccaaagaggttccaagtggatgcaccgctgaataagtacgatagaccaacgttttacacttctgatccagtcggtcggttacaccgattaccctttcctcgaatcaacagcttaaaattgttatcaataatgtaatgtagtgtgtttcccttatataagatgtaataagtttctggcttttcatttatactttttaagtttaagtcataaaaccttc

SEQ ID NO: 136863 - DNA, 483 bp, Arabidopsis thaliana columbia
  unsure (1)..(483): unsure at all n locations
ccccnaggggaccgggcctttgggctttcagcccnttanggngggnctaattnggnttnggncccccaacnggntcccacncgggggntcctctggccnaagggtgggaaaccccccaaacgggtcctcnttaggggatataggtnngcccatataccttggttcccagctacgtccagtctgattacttgtgtacaaatgncctaacccaaacaacttccttctttctgaacatgagagtatgaggaaagagtttggagattgcttgcttttccataattcataacatcagtttgtacgtaagtggacaattactcttgtgtgtanccttggagttgctgtttcatatgtaagtggacaattactcttgtgtgtagccttggagtttttttatttacgttattttggtcagcctttaattattttgcaaaaaatgtatctgtttttgccacatgcccacataatacatttcgcaaatttgat

SEQ ID NO: 136864 - DNA, 520 bp, Arabidopsis thaliana columbia
  unsure (1)..(520): unsure at all n locations
gcccccttncgttnttttgcccaggtctgcngttacggggaagtnctctcccagggttaacntgtganccctnctcancatttttcgtcccattgtctggngaattggcggtcaacggattcccccccacttgttacatagcaagatcttgctccaatcgtagtcgccatgccatcacccatgtccatacaggacgtcatgatagctgctgaacatgcagagaaagagattctgaaggcagccccaaatgtggctcgtgtcagcattcagcttagtcttaactccgaataactttgaaggaaataacaagagaagacccctctgcaatggctgcaacaactataatttttaaaaaaagaaatacagtgcgctaactatgttcatactgattgtcaatattttgttgatatttctggctttctttacactgctcatcgaagttgtttctttctgatgagcaatttaatctcgaaaatttgcaacttgatgattccaaagctgagaaaagttttgggaatgt

SEQ ID NO: 136865 - DNA, 516 bp, Arabidopsis thaliana columbia
  unsure (1)..(516): unsure at all n locations
cngtggttnttcttnggaccncccntccttcgtctggctctgaaccanttcggttccaagnggattnaccgggggggngggaagccgagaaccnttgggcccattctcagccggtgagctgagncaaccggaaggcaagcncagacttggggagatatccaatggaggancagagagaanccagagtgtttgggtcgaagttgtgancgctaatggaagcggtagaaacaataatgacaacaataacagtgatgncccaatggcagaactagaagattgagcaaataaaaggtaataaaaaagccaaaggacaatccgagtaagctgaagttaggatcagacatcatgaagcggagatcttgtaacttagtgtttccactgtcgaatactatgtggatcataggagacgatttagtattgttgttgtaatacgctttccgtgtaataattggagttactagtatgataaactaaaacactcatcatcaatataaattcagtaagcttgttcagttt

SEQ ID NO: 136866 - DNA, 551 bp, Arabidopsis thaliana columbia
  unsure (1)..(551): unsure at all n locations
cggnctttnacgnaccttggggnggcttnggcnttccnaccgggggncccncggtttggccccccnttgggaaagggcccaatttttccgggccagaaancccccggtttttnagggacaaattgggccccccaagccaaagggggaaacccttgctncagaaaccgggaagctctctggaaaagnggggatctcatgaaagcgaagtttggtcaaataagaatccaagaaagtactggaagacgtgatgaagagagtngcccaagttctgaagtaggagacgcaattgttcattgggttaccttgttcttcaagaaagtgatctccactcaacaaaaaaaacaaaaaaacaaactaagtaaaaacaggtttagcagtactgagagtgtataaggacaagtaacaaaactctaaagctgcttctctcttgttgtcttatttctctctcactctctctctctcagtcacttctttaatgattctgaactgcttgtgttatgtatctatgttcttacacttgcctctctagaatgtaattttgattatgtttt

SEQ ID NO: 136867 - DNA, 510 bp, Arabidopsis thaliana columbia
  unsure (1)..(510): unsure at all n locations
tcccttntnaggcgganggccccatttgggntattcagggaccancggattntcngttctaacggcccctcgaggattnncgggnttggattctcggtcaccntgtcaggaatnccccatcggtaacgttccccctgagggcaggatcaattgaccggcttgaggcaatgggnttggatagngcaattagtcatagaagccttcctttcctgtgaccgtaacgaggaattggctgcaaactatctactagagcactcagcagattttgaagactgagttccgagccttttaacctgaacaaagcacaagattttgttttgtttctccaccccttttatctgaactgttactatgctcagagaatcaaatgattatatcttacacctccatatttaccttgaagaataatctgcgttttccacactgtaaacacaattcattgtgtttctctctactgaaatgattattaacaatatgatatggttttaaataaattgtggtcatactcgc

SEQ ID NO: 136868 - DNA, 508 bp, Arabidopsis thaliana columbia
  unsure (1)..(508): unsure at all n locations
tncccccngggccgacggtactctagaacagacgggncccgatgaatgctcaacgttcccgaagtccccctgatcccgngaaccgattgcagacgtgcagctcttactctaagggtaatccaggttggggatttgataagaatnccagttcatggacaagctcgttttagaggtgtcacaaagctacaaatagagaactcaggtttcaaacttcttaaaaaacttcatcgccggttgagtttatagatcgtactctagatcttgcctctacttaaaacggtacccatttcttttgaactagtactcaaaatttgggcgttagctttttcgtcatacgttttgagggtttccgtaataacggcattgttctttcgatctttgttactgaggagattgtattgtatcccttttcatcaatgggttattaagggtttaagcctgtttttggatgtgtaattgaaaagagaatggttcttgagtgttggttctagtgtcttatacatgccgt

SEQ ID NO: 136869 - DNA, 532 bp, Arabidopsis thaliana columbia
  unsure (1)..(532): unsure at all n locations
ggcnggaanggccccattcaatgcggtaaaccatntccccaagncctctcccaaggttccgtggcccntaaatggcnaaccggaccggtcccaggcagtttggtaaaatcccccctttaccnaacctacngttggttggaggttgnacnttttccngtaaggaattccccatgggaggaattgttnccccagnttttatgattncgtaaaggaaatatccngtagtgaatattctgacctattctagaaaatagcgctgtagtatttagtctctcgtatgggttttacgatttggatttatcacggctgcattcattagcaagagctatggctagagtagctagctcctggagaagtaatacgagtatcgaaggtctctgatttttgatatgatggcgtttggactcgattcgagcctgcagtttcgattgatatatactctgttgttgtatcatttcgtacagtagttttttttagacttttgcattctgatgggatctttcaaatttaataagtcagtttcagtttatgc

SEQ ID NO: 136870 - DNA, 511 bp, Arabidopsis thaliana columbia
  unsure (1)..(511): unsure at all n locations
ccagtnttcanttcccgcgggggnttgggttccccggattctgcatcatcnccngngctcttactctcgcncgggcaaggcaagtctttcggatcaactcatggtgtttccctttggnaagcccttttcgcggattctctacccgntgatgattttcttgaaatgtcttatgaagagtacgttgacacccatggcaaatgcatgaagcagcttggtcttcctgtcagtgattccacaatcacgatcaatacaagagccatcaagtagaactgatgatgtaagcaatggttcttcaaaagatcagccatcatcaagaaagagaggacgacattcatcctaggattcaactacaagactcacaactctagcccgaaaatcacattgaaatgcacaagaatatgtagtgccatttcgattgtacggtgatggagaagttgttgtgatattgtaagatgttcattttgcctggtggtttatagaaaccagaagactgtaactaaaagtttcttct

SEQ ID NO: 136871 - DNA, 498 bp, Arabidopsis thaliana columbia
  unsure (1)..(498): unsure at all n locations
gaaccatntcaattcccattttggaggaaaccntggtanccttntgggaagaagttaaggaggnaaccccnacgctccatcttacgagatcaccccagcggtcactgcccacacgatgagtccctgaggtggtgaactatctgatgcncggntggatcaagcacctggagtctggtggttttgaagcnctcccgcttttggaggacactgaagaagattgggaggagtccaggattggtagagaaattgagttcccgagagatggttggaaaaaagcagtgaatctgtggttatatgggtcaaactatacgtactggagaggagttagagaatctttcagatccagttttataagggtgtttggagggaagtctgcatagaagaagcatggaacagtcgtctagtgtaaattaattgtaatctatgttgcatccgatgctagctatataatgttgtctgtagaatcaagtttctaaaatgttcaaaaggaaaagttag

SEQ ID NO: 136872 - DNA, 489 bp, Arabidopsis thaliana columbia
  unsure (1)..(489): unsure at all n locations
ttaaggttctnancccacgntaccacgcgagtcttagatccggaacaatnccttggnaacttccntcccagattgtaatgaagttggnggatccctaattaaaaatcaatggacttctcttgaagctccggcggttcccggtggttttagagtcccctgagttgctaacccagaacggtggtgaatggcgacaactaaggcttcttcagtcaacgtgtttcaactttgtttgttaacatcacacgtggctttgtggtggaagggaatctttaatttacttcctcataaaggttttgtttcctggtttgggctttctttatgggcctctgcttataagttggacttgttggttttttatgcaatatggatgactatattttagttgatccaatgttgtaaggtttaatatgtgtcaagatttgtaagtggaaggttccacagttgtatctttacaacataaggttttaaataaagtgcaacacttatgag

SEQ ID NO: 136873 - DNA, 459 bp, Arabidopsis thaliana columbia
  unsure (1)..(459): unsure at all n locations
tggcgggncatatcataggctccacnccggttggtgacccctcaagcnnttgcggatgagccagctcgaatccaccggatcattagagcncgtgaagtggataatagcccagaagtgaggatgaanncatttgtggagatgaagagattccaaggaccgttggaagaaagctgtgagggatgatacatgttgggttgatccgtattgaaatccgagcggtttaagtaaaccgaatcaaaccggattcttttccttgttgagtgtgctttgtggtccattgtataccattattttggtacatagattttgttttacttcgagaaaaattagtgtatttatgtgttttatggaccacagtgtagatttaacattttggagcattatacaaaagtgtttttgtgctagcnaatatttgaagattataataaatacataaatatacagaagtgtttttgtact

SEQ ID NO: 136874 - DNA, 505 bp, Arabidopsis thaliana columbia
  unsure (1)..(505): unsure at all n locations
accccactgtaccgncgttcacccaaagtctnccnagtggngttttgaanttgcgatgaactgctcccaaggtgnggcccntctaatgggggncncaaancctaccnggcacatgtctacataacgtttaagggcttggcagancctcgagccccatgagcggntttttgagattggggagcatgttgaacgccaagctatagttagaagagtcatgggcccatagaggagacttgactctcaagggtaagctttgtggtggtcaatatatcaaaaagcgttctctggctctcaagagtggaaaaaagtcccagaagtgtaaaaagcaagcgctcgtcggctaggcgttcgtatacatgggcgtctgcgtaatgttaagatccattttgaaaatgtggatcagataaataaactaagctattaattttgtgcgtttggattctttgacttatggttttatttaagtgtgacgctttttttcttttttaatacaatgagttaatct

SEQ ID NO: 136875 - DNA, 481 bp, Arabidopsis thaliana columbia
  unsure (1)..(481): unsure at all n locations
ccccnngggggccngtgttctcccnnggagaanccgccncgacccctgaattcttggnggtgagncatgnaccattccnccncctntccgcatggnggaggagccaatggctctgcaacacacttgccagaagatggatatactttcccatcgtttctacacacgcctatgcaaggttatgatgaagaccgtggtcgatcaggcagagctgttgttggatggcttaagataaaagccncaatgagatgggggttcttcatcaggaggaaagctgctgagaggcgagcacaaattgtagagcttgatgatgatgatgaagatggcgaatagtgtataaaaggaagtgtacagttagattcagtggatctgtggatgtgtgtgttttatgaagcaggagacttctaatatgcttgattgatgataactcatttagacagtagcattcttaagaactgattctacagtcttagatatgtgattc

SEQ ID NO: 136876 - DNA, 492 bp, Arabidopsis thaliana columbia
  unsure (1)..(492): unsure at all n locations
acggccggttctggccaccccatttnccgggctggctacgggtatcncacatcttccactacggctgcctctccatgtggactattgcgcaagctcatgncttggtcatcattctgaaacagatttatggaagaacttggaagttgagataggagtacttgagaatctccaatcccacattcgacgacatgatgcaaaatcttggcgatgcagattctatcgacagagaaaacgcggattgggatgttaaactagcgatggagttcaaagagcggcagagaaagattgtctcatctattcttgattcatgttctgcaggtatcaaactagttcaagaatccataactaacccaccggtttagctaaggtagaatgagatgagaacctgatcttggattcagcttatactgtattatgaaatgtatcttcttgacaaagttaaattgtgtgagttaaaagactttagttcaattttagttacattttagttac

SEQ ID NO: 136877 - DNA, 508 bp, Arabidopsis thaliana columbia
  unsure (1)..(508): unsure at all n locations
ccncattccgccntcttngatccccnttgaatggtcaggncnggggacccccgacatgtgttncatgtcccggaatatggcggattaccngngaccagtntnggacttcacagctccaaagttgttggagccatccagaagctcagttggtgcaggaatcgtggtaccaactagtctatttcgcatggagctcaactactgccacatactgaagaaacaagaacacgatcgagcaaaatctggatttttcatgacattttcaacatcatcttaatgctacttttgatgatatcttaattttggctttgcactcacagtgtcatggcggagtcttttgttttgtttccaggagctttcattgtttaggttgttgtttggaattgaaaactgtgcaaattttagagagagagattacctgatgtgcggattgttcttgggaaggagatagatcaagaaataaaaattaactaaagttgatttgttttgaattaaattttaaattagtaat

SEQ ID NO: 136878 - DNA, 505 bp, Arabidopsis thaliana columbia
  unsure (1)..(505): unsure at all n locations
ttggttccttangtttgcccacaagccaggaggtcccntttccagnggttgggggatcggngaatctcgtaccagctggccatgctccnttgatccggggatggagagctcttngatgatgatccggaatgacaatcaatcaaatcctcaccatcgctggttggggaagatggcctccgccatgcctgaaccagnttgcgcgggctgtcggggtcgcgctgaagaatttgaaaataaattgaagaagcatcttttgtgaaggtgatgaatgaaggaacatgtggagagtgaagaagccttggctttggtagcgttgttggtgcctagacatttatggagttttattttgagttngtgtttctttaataatttactttggtcagttttatttcagaattggaatactcttgtctgagagaatttgggtttttattacatggatgtctttaaaaccttaattaaatcctaaattctataagttcaaagaattaatctaaaattcggc

SEQ ID NO: 136879 - DNA, 496 bp, Arabidopsis thaliana columbia
  unsure (1)..(496): unsure at all n locations
ggncgggngcccacaacacaagntcccccctcttaaggagtctgggttggncaaccgggatgcttaccatctcccaattcaaacccnccaattnccgggcagcagcaacattggtagcggaggcggatctcactgttnccggcggctgagaaccaccggtttgatggtcgggcctcgacgaaccaagtgttgacaaatgctgcagcatcatcaggattctctcctcatcatcacaatcagatttttaattctacttctactcctcatcaaaattggctgcagacaaatggcttccaacctcctctcatgagaccttcttgaatcttttatatttttaaggtttattattatataagaaaaacaaaaatgaacctttgaaatccccacatgttcttggtcatttcattaatcatcggcttatattttgcttattttcccctaaatcctcttgttaacttaggcgaacaaaaaaaattaatggaaatctttttccctc

SEQ ID NO: 136880 - DNA, 499 bp, Arabidopsis thaliana columbia
  unsure (1)..(499): unsure at all n locations
aacnnatcccgntaatttttccggncntttnaacccccnttaacccttggaatggtttccccnaagcatcggccaatttcncccatgacttctnttcccattgtgccacaaaggcttttggtggtcttattggcgcataccacgntggggtttcgactggggtgaagtcgtaacaaggtagccgtaggggaacctgtggctggattgaatccttcgcgatggacttcgttcctcttcccccaaccaagatagggggctagcttccttcccacccactggcggcgggcgggcttttggtcctttggacaggtagccgggggcgagtcacaactaaatccaatagttccattttccttcttgttcatcaatcggaaatcaagacaaaccgggcactacggtgagacgtgaaaacacccgatcccattccgacctcgatatgtggaatcgtcttgcgccatatgtactgagattgttcgggagacatggtccaagcccggtg

SEQ ID NO: 136881 - DNA, 499 bp, Arabidopsis thaliana columbia
  unsure (1)..(499): unsure at all n locations
aagacttcagctttccatcgcaaggcccccgttgaatgggntttcttcacgggaaagantggtttccccacctncagatttgcngcaggcttgaactgatgggcaaaagctgcaaatgggtgngctacagacccggttagatgcagagttctattggctcaaatgtgctctgtcaaattcaaagaatggatagttgttcttgccactcttttacaacggtctgaggttctttatgatattttccggtatgatctacggttgtggaaagcatatagcgtgacattagagtctcacttgntttcgctcattaccatgacttacttcagattttagaggcaaaactctcagcgacctcacgagaagaaagcaatagaggttccatctcttgataaatcattttatttttgaagctttttcacatcaaacattttctgcctgagttttcacgttcgtgtagataaacataatttgagaagaaataagaaatacatcacctcac

SEQ ID NO: 136882 - DNA, 354 bp, Arabidopsis thaliana columbia
  unsure (1)..(354): unsure at all n locations
ccccggagccttggntaancaccccagannnttcccgnggntgaagggnatgatgatgacccncanggaagacncatncgaagattttgctngactaaatctgatcaattttcatccttctcgttttctcgaatccggaagatgaagtttgactacgattgtaattgtgtctacttgtttggatttaaagtacattgcattataaaaataatgtgtgagtaaatagtttataagagtgtgaaggtcttcttggctngggttacatgttgttcgatctccggaattagcttcatggtgtctagaaacttttgttttttagaccaatatgttaagaataaaagtatgtagttaatt

SEQ ID NO: 136883 - DNA, 484 bp, Arabidopsis thaliana columbia
  unsure (1)..(484): unsure at all n locations
tattnccccccgcccagtaccggccgcattccgggaatctgggagaattcacttgcggaactccncagngccncnctggtgaagtgaggcattcctcctgtgaggtgggaaccctctgttggaccctgatcttcaccaggaagtcgtgnggatctcaagatggtaatggtattactgcatctgcaagcaagttgccttgaagaacttccggctaaaagggaaaaactaaagagcaaagacagtaagctcgttcaagctactttgtctanccttttcaagaaagctgaggagaaaacagctggaacttccaaggctaaatcatcctcaaaagcttaaagaaatcttttccagaagaaaatagaggtctgttgtttctttgctgtgagaatgaacagtttttagttcttttaggtatgtttgtgtgagaaattgctacaagactgatgtattcatcatgcagttggataatgtattcattatgctt

SEQ ID NO: 136884 - DNA, 501 bp, Arabidopsis thaliana columbia
  unsure (1)..(501): unsure at all n locations
tttccncgggaaccaattggcactggactggtctgacatctgnatttcccgagttctggatgccnaaattggggggcaacatgcaaaagcatttatttncgcccgcgacatagtgcggttttggcagaagatggtcagttgctatgctggggatggaacaaatatggacagctgggtctaggggacacgaatgaccggaacattcctacacaagtccagctggatggctgcagactgagaaaagtggcgtgtggatggtggcatacattgctactaggagattcacccacttgagttttcccaaccaatcaccaaatcctcagatacacatttccgggttttgtctgtaggtttgacgatgtacatacagacaggctttttgctgtgtatgtatttccttctttaacattaatccgtcttcatgttttttacttagggggagagctttgactttgtattgtgtagcaaattgcggaacaaagaataaaactgtttggtatg

SEQ ID NO: 136885 - DNA, 494 bp, Arabidopsis thaliana columbia
  unsure (1)..(494): unsure at all n locations
gatcccggcgcccccgnccnttaattgggacccgccngcccgnnccctgggaccccgggacntgntactgggggggaaaatcacnccgttgcttgccattcccggaaacccagtatgtctggncttaacccngcggcgatntaaaccctgtcttgaggaaagcggagacgttcagggacgtgactaattatcgacagtctctccgacggtgacgtcaccngtgaagatgaagaaggngatgtcnccgagtagggaggagctgaatcgaagagtagaagcgtttatcaagaagtgtaaggaagagagattggagtcgctaaaattggngaaataagtggcttaattaaacacgngattaattagctttttgtcttaataattaattgttaatcgttttttactatttaaatgtcttttatattttgtttttttttatatggactacaagtaatgaagcaaaaagagatttgaaccataatacatctaatcngttt

SEQ ID NO: 136886 - DNA, 548 bp, Arabidopsis thaliana columbia
  unsure (1)..(548): unsure at all n locations
cnaanncccggggtttcccnaggggntttnaattccccccccagggaaaaccttngggagggccctttnaaaagggggaanngggggggccnggaacccccgnngnccatggggggaaaaatgggantgggatnaaagtttccggggnatccaaagcttgccccncttgggggnagtccnatgaaattatcccccttagggngtttgaattgatccagaccatcagggaagtacccaagcctttgctcaagacgttgcagcagtctagagggttcggttctgagttcaggttcgagaattctgctggttcaggtgccaccactggagtcgcagatccgtttgccacgtctgcagccgctgctggggacgatgatgatctctacaattagtgataacttctttatcctttttttttttaagttttaaaactcgaattctctacttttggattactggggaaagtgatactgattctttcctcgtgtttttaagttatccgaatctcttgtgtttgggttttaatcaatgttcttaattttcgtttcaat

SEQ ID NO: 136887 - DNA, 389 bp, Arabidopsis thaliana columbia
  unsure (1)..(389): unsure at all n locations
ttttngannaccccntttccaangggtcccaangaagcccccgaggaccnggaaccngacctaggccgagtctcatccaaaggttcccatttttgggtcnccgtgaatangagaaagtgagagagagagcnagataaagggatggaattttatggtgaatgaaagatttggaggcaagaaaatggagttttggtgtntntgtgtttttaatttgtaaagttgaagaagaaagaggaagagtgcaaaacaaaagctcacgtcttttgaaggcttttctttggttttgacatttgttctctctacttttactgcacncgtttcttatacttgtnccaaaaactttttaaagttgtttactctcccttaagataaaaaaaagtttgttactg

SEQ ID NO: 136888 - DNA, 582 bp, Arabidopsis thaliana columbia
  unsure (1)..(582): unsure at all n locations
tttccntnaaaannacttccttaaattccaccctgtttgnagccaccttttatccccnttttccccagaaaccggcncttggtaaatnccccccgggttntggaaccccaagtgaccccacccnttggnaataatggtccccatggtactgaagaggaaagngattncgaaggtgcttccagaggataccncgtgnagncnccttgcggaagcttctctgtccggaggaaaggtttaaggaggttactgctctccgcctttgaagcccataggttgtagtaacccaagaggaggatcttgaaggaaccatagttcatcagcaaaactctagtggcaatgttaaccagaaaagcaacagaacccatggaggtccgatcacaaatgggacggccgccgagtgccttgtccttcagtgaacaatatggtgacttggtggtttgtatgtataattaaaagcctaaataagcaaactctctttgtagttgcatttgaagcttcttggtttatgtatgatggttgtgggcattttgtgcctagacttctggttctttgttttttgttatgagttggtgtttatgaatt

SEQ ID NO: 136889 - DNA, 579 bp, Arabidopsis thaliana columbia
  unsure (1)..(579): unsure at all n locations
acccccccaaagggccgntttgtttggaccncccttgggnttgttccaggnttttcccttccagacatncccccggtcaggctncnttcccgtggtgacnnggggntccntccaacgtccccnnccgattgtctccctgtgcttggngagatcttgncccnttgctggnttccggccccctgaagtccgtccttgttttgcagagattgtccaatcttctggaggccgccggaaactgaggttaatggccgaatgtgaggaaaagccccgtttccagatgttgcatgacgcaaccaatgacagtcgactaatctgttgtgaagaaagagagaggagaagaagaggnatgaacaaagaagagaacataaaagaaaaaaacagagagagagagagagaaagcaagaagggctttagatatatgtaagtttgtgtgtgtatctatctatctatatatatatatccgattgtatctcttttctcaagataggagaagtaacccaaccattttagactactgattttctagatttttgtattaagaaagaacaacgaaaaaattagatgtacggtgattgtctc

SEQ ID NO: 136890 - DNA, 591 bp, Arabidopsis thaliana columbia
  unsure (1)..(591): unsure at all n locations
accccgggtttaaccccnnnntccntnccccaagnggttccccnggcgggnccattttcntngcttgccaaacctggcggaagtttaggaggggaaggttccttttttgcccccnnggnaagggttctttccnaccttcctgttaaggncttccccnatcacaaagtnttctttcccccccaatnggcccttgnggctntgaaaaaaggtccagaaagggcttatcccaagtggaaattgncgaaccagggaggcngccatatcaggcatggttgggttactaccaaatccgcagaagaagattgctagagacacgaccagactggtggagttagctaatgagtttagccgcagtatgggacttagcatccctccggctatccctgtaaatattcttggcaagatgggtctcaaaaacgttcctggtattagagtcgctccaggttttgacaagaaacctgcaaagagaaattatcgttcccgctagattttctctttctttgcctaatggtattgtttgtgttgaactttattgcttttttgaagtttggcattttggtaaaagttaccttcttaagaatttcatttggt

SEQ ID NO: 136891 - DNA, 404 bp, Arabidopsis thaliana columbia
  unsure (1)..(404): unsure at all n locations
cntctccntgggaacaaccnccccccgantcnttcnctcnaggaccaatgtcaggcncccggttccggnaaaatgggnggaaattaattatcaaaggtaatttcctatcttctctctcttctctctctctcaatctatcccgtcttctcagtctgatctttagggttcgtagattggtgcttttggngtatagatttagngttatggtcatgccnctgtttatgaccggaagatttcttaacttctgtttttaacttatggataaattaagtcccatcaattaattataaacttatgccgatgagcacaaggnatgttaaaatcgtttttcacttttttgtgtttggatttatcgaatcatgtaaatactaaacattagngtnatttcacttcgatttgcaaat

SEQ ID NO: 136892 - DNA, 557 bp, Arabidopsis thaliana columbia
  unsure (1)..(557): unsure at all n locations
ttccccaaacccaccccnntnttnaccgggaannntacnttgcgnccccnggncccccccngngaacagtccccgggattgttcttccggnaaanccccccnaanaaccaccaagggggtgaaccccgntggggaatccaggggggnacccnagtttgtgtggatggagaaggaccttggnttaggattggncccaaccatgtacctggacatggccacaatcccccacttagtccttacttcttctggcctaggaaagatgcttgggaagagcttaagtctactcttgaagctaaaccatggatctctcagaagaagatgatcattcttcttaaccaagccactgacatcatcaatctctggcaacaaagtggcggcaatttaacttctcaataatctctcttttgatttctgcatttcaagaaattcactttgtctatgattattattcctatcgagagttttttgtttatctaaacaatatccaatcacattcaacataaaagattcatattattgcaaagagaaaatgataataaaagcaaaaaaaattaagc

SEQ ID NO: 136893 - DNA, 258 bp, Arabidopsis thaliana columbia
  unsure (1)..(258): unsure at all n locations
tcntctttcttcttctttttgngggtttgttantgttttcgtgattcntattaagctaagggatttgagngtatatatttatagtaaaaatagtaagacgacttttgataatgagtcttctttagggtgaagtagtgatgtgttttggtttgactattttnccnagttgtgtagcttatatactaactatattgggacaaaaatgtcngtacgcgctttgatgatggtgagatatatacaagattgattcncntttgg

SEQ ID NO: 136894 - DNA, 529 bp, Arabidopsis thaliana columbia
  unsure (1)..(529): unsure at all n locations
angggccngnaagtaccngtttggcanccncatgggtaccgcncactcctnacccgngttttgtntaccncggnnccnttcccctacaagtataggggactaccttttcccncgggtncccncccttggctctaactgtttacgggctacaagttcagcccgaggnccaaaccccntacttgttgttgccgatgaggaagaagaggctnctgctgaggctctgaagcttgaagacgagtttgaattgtaagtcatccactggaataatcgtgtcacgtgtgagtcagtaaaaagaaacatactttgtttgacaggatgattgagagtaaaccggatcatcagctgcctgctaaaccgccttctcttctttggtttttncctcttgttatctttcttagaatgcaatacctgttttgtttttacttgaattgttaggatacttatatagactctatgaatggcttgtcccccaatgcatagtatgtgtattactggtaacataaaacgcttggtgctgctcgttatactt

SEQ ID NO: 136895 - DNA, 379 bp, Arabidopsis thaliana columbia
  unsure (1)..(379): unsure at all n locations
taaaggcccccccgggggncaaaggctngcccccggtttggntgggggcccantcntccntggggncnngaccagnccntggcttgaatcaaaagtttggacctttcattanccgttccacaagaagcaaagtcagaaagattccgagaggtcgatgctaatctatttcattttatttgtttaatgctttgttatttttctttagaataaaaagaaaaaattcttaggggacaaaagagagttcgtttgtctctctctctgtctccaaagaaaaacagnggtgaaaaaaggtttcaaaacctaagaaaccttgaattacctcncctcacttccttgattctttactattcacaatgngtaatcgatttttttttttctt

SEQ ID NO: 136896 - DNA, 369 bp, Arabidopsis thaliana columbia
  unsure (1)..(369): unsure at all n locations
ancggggtntcccnnccngggggggnaaaccccgnnnnaaacccnttttncggccaaccatgggggggtgncgtgttgattggattccaaaaganggtgatggtgtagaaagcatggataagcttacctgaggaagacatgtccgtgtttgtcgatgaccaagagttgcttgcttatgccgtcctaaatcccccggtcgtggcataaacaagactactaccaattgctctacgctggatttaattaattattggctttcgcttttcgttgtgatttgaataaagtgaccaatcatttcaagttccatgttaattcagtttatatgttaccttgatcttgtttgtactctatatggttatttgttttgtc

SEQ ID NO: 136897 - DNA, 550 bp, Arabidopsis thaliana columbia
  unsure (1)..(550): unsure at all n locations
atntaccggcaacccccgntctttaaaaacccgtnagntcccnaatngccccaaanccgtggagggacctaccccngacgttnngggcnaaaaccgnttaggtcccncttgnacttccncccaatggctacggggccggancccnggatcgttgccgncagctaagttngggggaccattgggatattagncccataacaagctttnggggcgtattcccaacggggttccccttttgatccacccttgaagctacgtcgtttagtgacaacccaatgtctctgcggtggcccctttgacgacgtcatgttaataacaaggatatggtttctggttttactgaaccgggttattctttttgctgttgctcttgttcgttgtatcaaacttgtgatattttgcttttcatttcttcgtctttcagattttagtttctaaagctaagatatgttactggcaacggacaggtacaccgatccaatatggtttgcggtctatgtacaatgaatccggatgtaaaatcaaaagcaatgttatagaatttaatttc

SEQ ID NO: 136898 - DNA, 429 bp, Arabidopsis thaliana columbia
  unsure (1)..(429): unsure at all n locations
aaaantttcccggggggggggttnnaagncggcccctcccntttncttttnntcngcccggcaaacccaagccgggtggntgggatccatcccnntcanccnccngccatttggcaaattntagggtccaaaaaaccatggtggatnccttcctattaaaatcccaatatatttttccccccttctctccgtataagggtccaattaaatttatttatttgccctgtggagataaatttttaccataaaaaatgaggggatacttggatctgtacgaggcataaaaacgatttgttgttgttgtttgtttggaattaaataatacgctgtggatatgaataaagtcaggaattggaccttcccaacatgtatatgttttttcaggccgtgggactatataatggcccagtaatgatcttttattatccc

SEQ ID NO: 136899 - DNA, 511 bp, Arabidopsis thaliana columbia
  unsure (1)..(511): unsure at all n locations
ggncccccgggtttnccccccntttttcccccnccccaaggggggggaaaaccccnttcccccccnaaaattcgggcccccntttgggcnctaaaaaaattttccnggggtccccnnttntttcccaggggggntccnccaacnctacaaccttattccatgattccggtggtttccttatggancctanccaatccattggggattagtaggatggatttggtctgtaatcccattattatcattatccagtgggaaaaaaagaagaattcgtaatccggttgtnagttccggcaacgtattctgattcactggatttggaatctctgcatgcggtgaaggatgtgaaataaacacgtatcctcaacttatccccatcgatgagacacgttcttgagtttatcctttcttgggcctcttgtttgggcttcgttgaaagttgtctttgatgtttatgtaattgggtgtgatgttatgtattattatttcaataaaactgcngtttcagagg

SEQ ID NO: 136900 - DNA, 432 bp, Arabidopsis thaliana columbia
  unsure (1)..(432): unsure at all n locations
ttaaaccccccncatttgggcccnnaannnttttncccccaaaccngccggttttttaccccggcccaaatggccgggggggttttttttgggcccaatggccaccccatccttttgggcatttncccggaattgccaaaacccnggttggtttaaggccaccgggttaaagtgnggattgcncaagatgaagaggaaggccctcacatcacgtgttgaacctctcctctcttaaanccctttttttttatgtcaagagcttgttaattaatttgggncttataaatacaaatctttatattttttgttacattattgtggngtgcgattttgtgtncgttatttttttggacaaaattagattaatttgaagatgttacatattttagggattgttattgtaatgcatcttttgttaagcgaagataagng

SEQ ID NO: 136901 - DNA, 560 bp, Arabidopsis thaliana columbia
  unsure (1)..(560): unsure at all n locations
gggaaacaggctcccgntcgcgntcacggggtccgctctncncggctnttcttcaagcncgacacggcttcttcgagtccgattgccgatccgttaagaaggaggagagagagaaggaagggaagagaggtaagaagggnttagagagaccgagatctgtgactatgaggataaggnccaatggattccatgtccctggtttggtacccccgtctaagtcctcttctcgattgcctcctctgtttcctctaaggctccagaaaaacagagttgagagatgaacttgatcaacatatctgtttatctttttgtgacttatatatctgtttatcctttggttgggtttttgtgattagatggatctttgtgattgagatctgaggtgtgacagtgtaaatgtgatgggcattttcatacccgaaaacaataagaaatttcatcattgaacacatccatttttatgctttttcattatgtatttggattcgaaagtcttgttctttgttgtgtatctctgtcagtatctaagcctaaagttttcaaaggtttgggtttattag

SEQ ID NO: 136902 - DNA, 237 bp, Arabidopsis thaliana columbia
  unsure (1)..(237): unsure at all n locations
ccgggggggggaccttntcccggcttccctgggnatataacccccgcttctttcttcgttttttgggtttgtcttatcgaagaaactgaaagcatgtggttagcttgttttttgngtataccntctattttgttttgccgngtnacatactttctatgaagaagatgggnccttttggtttttgcttccnaataactggnttttcatgctgaaagtttttaaacctaaagtttgatt

SEQ ID NO: 136903 - DNA, 542 bp, Arabidopsis thaliana columbia
  unsure (1)..(542): unsure at all n locations
tntgnaccaatcatacgggcgacccgtttnccgncgtagttcggnattaggccnccnccattcccggaacccngcatntntcccccgcatcacacggtgtncaaaccaaatcttggattggtggtgctcgtccccggtagacttacacccgtcaaaagagaccgtggatgccagccataggagatgtattgacgaggccatggctgccacttccgttgggattaaatccgccggctgttgacggtgttatgacagagcttcaccgtcacggtgtctctgaggttcctccgaccgcgtcttgtgcctgaaacgcacaagatccgtaggcaagcgagaaccaaacaaaaattcgacgacatgtctttcaattattgtacctttatttttccaagggttgtttttgttttgacccttgttgtgttaagagttactctttacttaatcgtcccatgtgactaataaggagacccttttcatatgtatctagggtgctaagtacactctagctctattaacgcaaataaattacctatattttctct

SEQ ID NO: 136904 - DNA, 529 bp, Arabidopsis thaliana columbia
  unsure (1)..(529): unsure at all n locations
tnatggcccgtccnttggcatgggatcgcnngtgattgcccgggtcatcaccggggcctatcccccttttcacacatctgtgcaacagtcnccatgggaagccgcagngngaggacaactntggacctgagaagcggcaggccaatntctcaggtataatagntatgcaccagatgtagccatcaacatagacaacaacccgtttatcatggctagaacgggaatgaacaaagccgaaaacatcagtgaccggatcataatcgacacaaatctgttacaggcaactgccggaataggagtcgcagcggcagctgcagcagctgctcctggtggttctgctcaccggaaagttggagctgttcggtacngtatgtcaaagatgtactagttctccacctaagctgggctttcatcacacagaacattgtatgtttccatcttcatgtcataaaagaaaattgtctatgacacaaaaccatatgagcaaaaaatattttttttattaattgtgatccatcatttgtttgtt

SEQ ID NO: 136905 - DNA, 543 bp, Arabidopsis thaliana columbia
  unsure (1)..(543): unsure at all n locations
cccngganagggttngagttcctcanccaccgngttgagatttnttgacctgaaatccacnggtatggtaccccccngnctctaancatccataaggatctgaaagtgcccccttggancaatgaggatgttatggagaccgtgatgatnccggtgtgttgtccggtttgcaaggaagagatgattgtaggaaaggaggttgccagagttgcccttgtagacataagtcccatagtgaatgtattgttccatggcttgggattagaaatacgtgtcctgtttgtcgttttgagttgccttcagattgaagacttaagcagggcctttgaagaccctgaatattagggtttatgagacgaagaagatgatgactgacttgtgtaattaataggataacttgacttgtgtgtagagtttgagccagtaaaaaatatttacatatgttgtatgaacaaaattatgatttgtttttccctcttatactgaatctcttacaaaatttgttacattttttcatatattcttatgttcaacttgtatttc

SEQ ID NO: 136906 - DNA, 520 bp, Arabidopsis thaliana columbia
  unsure (1)..(520): unsure at all n locations
tgggatnnngatggnatttgcggancccccngctaacccaaattccccttctgnggtgatgatccatattgnggcttnggattgtatccancccngatttttgtnccccgcaaccnacagtcataagatggtcatcgactcctcgggttctgatgaaattctaagccaattggagaggcttttgcccggttttagcaaatgcatactatattagaggaatggcttggctgccagttaagactcttcagttggagcagatggcggtgacaggacaatcagaggagccgtccgttgtggccagccgaatgagactggtgtttagcactctcgaggtagtgagtcctcaatggccncgggtttaactatgatgttctgcagactgaaatatacgagttctaaggtatcttcaaaatgtttttatcgtcttgttaatcccattttgtaaatggttgtagaacaactgtaattcaataggtcactgtgttaatacacaaacatataaaattgtgaatttgcgacc

SEQ ID NO: 136907 - DNA, 523 bp, Arabidopsis thaliana columbia
  unsure (1)..(523): unsure at all n locations
aaaanccncnatccggnccttanatncncaattttnctgcagnggnattcttgcagggctntaaaaangtttttggaccgggcttttatcaggtcaggcccactcagatncgcatncntctcactcttgaaaatgccnccattatcattatgnccactcacccattgtcggaggacgagaacccgcattttcaggaaagacgacctctcaaagattgctgttggagttgttgtgcggtttcaggtgttggctgtgcggtttaaagagagaccacacaagagaagaaacgactattatgttcttgcaactttggaaggcaatggttcatttggtcccatctctcttacagggtcagatgagccatacatgtaacccaaacaaggcaccaaaagttaaaagtctttagatacttttttgcttttaggttaacctcagattcgttggggttgtttcgtgttaaactggatcgacaagaaatatttgtaaacaaagttgacagaaccaattacattctattaatttc

SEQ ID NO: 136908 - DNA, 549 bp, Arabidopsis thaliana columbia
  unsure (1)..(549): unsure at all n locations
cncnnccccgccagggttcccccctgtttttgganggcaatcctaaggggacccccggtccaaaccccncatttccagttncngggccagggcttacccggtggggtatttttcttggngctgctgagtccagtgcanccaaganccgtaanctggngtcttgttnccaaccggagttncagatggaggngaaaaagntgaatgcaacttatgtgattagcatagcccaggaaacttggttgcncccattttcttactcccctgaagatataatcgaggtgaatcagaagatgatgctgacattgacggcgagtataatgtattggactctaaagcaacctcttcatctgaataagcctatcggatctcctgatagccacaatggaagtttactcgatgattctacgtcagattcctctatagaataaaattgttttactgtgaaattatatattcttaagaactttatatgaatgatgttattaattattttgctcctttgtattttttgggtgtaaaaactatattaaaattgaaatgtcatcaacg

SEQ ID NO: 136909 - DNA, 538 bp, Arabidopsis thaliana columbia
  unsure (1)..(538): unsure at all n locations
cccccnccnaatttcccaaccccaattnccgngcaaacccngggtggttcngatgccggatggcccncggacgntcaactccgggntcaagctcaggctcgtccctgacccnttggaggacttgngatctctgnccttggagncctgcaagctctctgctaatgacatcaggaagcttcaggcgactgatctgccaaacttggtcaacttccgtcctgaataaaataatatgttcaaaggcaaattcacgaactctgtaaatagatcgatctcctctggtctcagactaagacactgctcttagatatatcgtcaaaagctatgctcttcttcggattatttgctgaagaaactgtaaataaagcttctttcaagctatggccggacgaaagagtcctccatggctcttctacgtggtcagctttcaggatctgtttggtttgtttatctactgaagtgaaccaacataaactgtcactcttgtaaatatatgtaaattcgaaatatcgactgtaatatataattgaatatcttgcac

SEQ ID NO: 136910 - DNA, 564 bp, Arabidopsis thaliana columbia
  unsure (1)..(564): unsure at all n locations
aaaaaaagaanggatggctgttgccnngcccgnaaggcactcantacggcgaaccaccgncnccatatggcaacggacttggattngcgagtcaggncccccagtcccaatacccggnttgtggcaggatccaccagtacttcattctcggtgcagccgaagtattctacttcatcggtcagctcgagtcttctacgacccaatctccagatgcaatgagaagcttgtgcagtgccttagctcttttgacccaatgcacttggtaactacttgagctcgttgatcctcacgctcgtgacttattttacaacaagaaatgggcaagaaggttggatttcggataatctcaattcaggtcatctcgattacttcttctggctcttggctggtcttagccttgtgaacatggcggtttacttcttctctgctgctaggtataagcaaaagaaagcttcgtcgtagtaatgctgttatctatctactttcattacatacaaaagtttgtttctttcaactgtaactgtctctgtatcaataacaacattgctgtgtacttttcctttc

SEQ ID NO: 136911 - DNA, 550 bp, Arabidopsis thaliana columbia
  unsure (1)..(550): unsure at all n locations
ancccccangttnttgagcncngcacncggaccccccncatctggcttngagaccccaactgggtccagagccccttgccgattccatgncccagagaatnctcggncggtggtaaggcncnccgcaaaaggtggacaaagctttccagtgtcncgagatggctctctgtttccaagtatgtcaagttaggaaaaatataaaatggagtttagtacacaaaagaacaaaacggacttcntgcgccgcgcccctggacagattcgtgtatatatatactcggggaaagcttgggtttctgatgatccagaggcgttcaaaagtgttttctttcttcttcttcttctggttgtctccatctttgtgttaaagatgtgaatatatgttttaggacagcttcatttttgttgaaagcttaaaaaacagggtcttttataatctctgtgattagtaccaaattgcagatttgcagaactacgtttttcttggtttgtcaggtaatgtgaaactgaataaaatgaatattatttgaatcaactgagattttacatt

SEQ ID NO: 136912 - DNA, 555 bp, Arabidopsis thaliana columbia
  unsure (1)..(555): unsure at all n locations
aggaaaanaancccccantcgtgnccntnttaggggtcacaatcanggaatcnttncggcatcccttngtcctcnggnccccttaaccggnaaggttcaaaggttccagaagaagtcagaaatgcttgagaacgcgcattccttcaangnccggctcgtgaagctgggattaccnccatgcttaatggagcttagcagcactgtggtctttgaccgncctaaagatgaagagtttgttaggaaggtggcagcttgcttgccaaggtgatatagctcatgtggtggttatgccaagtgttacaatcgagaagcttgataatttcctgaaagaccttgtcaaacacagattgatctggtacgaggatggatctcagcctccttgccttgcatcggaggtaggaaccaacaactgcatctgtccagctcacaagtgacggcaccatttctcatttgttggtattgttgttttctagtaagccacatctagtttaaattcctcatcactgtattcctgaacttggtttcaatcatcgtaaaattttgtcagtttctctt

SEQ ID NO: 136913 - DNA, 551 bp, Arabidopsis thaliana columbia
  unsure (1)..(551): unsure at all n locations
caaaggggtggtgtttggntgactggcggaccgtttgcctgagggntgcttgcgttttttaccggcctcnggttccaaggtnaaaagggtgaggagttctttaggggggagaaaggggttccaccggttgtaggaatcagtaaccgatcttgctcaaattatggaaggatctttctgcacttgtgatagatcngggtaccaatagttgatcggatagactataatancgaaaacgtcgctactactgttgaagatggtctcaaacaactacagaaggcagagcgaacgcagagacatggaggtatggtgaagtgcgcatccgtgcttgtcatcctctgtttcatcatgctgctactcttaatcctcaaggaaatattcttgtgatcgggtactataatccctggttagatcaataagaaaagttcgatccttgactatttcattctttagccccgaacatcgcatgttttcctcgtgcgattgtttctatatcggtagcgaacacattgtgtcagaggatgttattaagaaaagaaagttaaaaaaaaagt

SEQ ID NO: 136914 - DNA, 542 bp, Arabidopsis thaliana columbia
  unsure (1)..(542): unsure at all n locations
aanccttggnccctggccgngnttcctccgggtgcccaaaacccnaancggtttcaaaggattctccagttttagggggttcccggttctccttatcacggccgcattcgatctacttgtcgnctatttatcaacggtcncggtctccttgctcncccttagatcttgcccgtgtggtctgaattatatgnggagcggaatcaaatctttcgcatcaaagctgacggtgaacccacgatgagaaaggctcgaaatggcttaaaagcaaagacaacacgcggtgtctcttgcccactcagactaaacgaaaccttgcatcggaaagagtatcatccgggtatgattacgtatngtgtccgtctcccattcatagactttgtaaaatcattcattttaatgtcttccattaagctctggttgtgatcctattgtgtgtgttcgtgtagaataataatgtgataaaaatgtaaatattgtgatgtgatagttgaagacaactctttgggacggagggttcaatccactgttagtcttattgtctt

SEQ ID NO: 136915 - DNA, 543 bp, Arabidopsis thaliana columbia
  unsure (1)..(543): unsure at all n locations
cggatccggtccccgtcggcttcnccggccttntccaccagcancanttntcggcatcttcagtggcttaaccnggggtaagtcccaccctgcttttgcagaagtctgaacnccnctcctgaattcccagngtccntaaaccaaggngntatgatctacatgatgttcangcttacggacagatgctgaaagacgcaggctttgacgacgttatcgctgaggaccgtactgatcagtttgtacaagtcctcaggcgtgaattagaaaaagtggagaaagaaaaggaagaattcatcagcgacttctcagaagaggattacaatgacattgttggaggatggtcggcaaagcttgaaaggactgcatctggtgaacagaaatggggattattcatagccgacaagaagtaaaatccatgtttttatcccaaaactctggtgattcatttcccttcaataaaaccgttcctttggaggacaatatctgcttgtttactatcatggaactgcaaatcaaaagataaactcatgtgttgtttcgatt

SEQ ID NO: 136916 - DNA, 551 bp, Arabidopsis thaliana columbia
  unsure (1)..(551): unsure at all n locations
tttcggcttcatncnagcgttttcccattcatgcctgatccccaccgaaactggacccaaacagnccggtttacggancccnattactggccatntcncacagctaccatccgcttccnccggtagcccactgggactntggancgattaaaccagtccncggaatgggatcatatcgagcgcaaccaaacggatactttttcgatagaatgtcagcgacttggccctgaagagaaactgttgtttgcaaggaacagaagtgggaatcgtctgagtacggatatgtcgtcgtcaaatggaaactcagggaatgtatcggcttcttggggaatggtgattgtcactgcaggtctcagaggagagatacgaacgtttcagaactttggtttgcccattcggatttgataaaaactgtacagagtngtgaagaaaaatcgagtgaggtttgtattattgttagctgagcttttttttgttcctattcttctttgttacagatttgtttccaggaaaatggagagaaaaaaagagagaaagaaactatacagatc

SEQ ID NO: 136917 - DNA, 562 bp, Arabidopsis thaliana columbia
  unsure (1)..(562): unsure at all n locations
cccggcnccccgtncgccggatcccggttccaatcccaccattccaggcccngggtggctgaatnccgncattntgctaccngnccgnggagatttcccntaggggggaactggatgttggccaggcaattcccnggccnggttaaaggttnggtccgtagtggaatcagctaaggaaggtnggncatacagtacccgggtttatttcccgaggcgattatgcggagaacatatcccctgatggattagatggctcagccccttgcccatggcttgcggaccaccaccgatgattcagtttgcggttcagccgaatttggagaagatgcaatataacatcaaggaggatttcttgatattctagtctaaagccaagatatttcaaagtcaaaacgttaagtcgtcaaaaagcctngtgttatgatagattctaaataagtattgagggatttgtttgtatataatgttggttctttaaagtcttggatttggaaatataatgtgttcgttgtattcacgatcgatattttttttcacaataatatacaaaaagtaatttcag

SEQ ID NO: 136918 - DNA, 561 bp, Arabidopsis thaliana columbia
  unsure (1)..(561): unsure at all n locations
ccgggcccccnattggggcccacccccggtncggtgaatcccccnagtgatacccccggggttatggcttttggacccctgggaatngggcctggccngcccncaaggnagttgggataggcccacaactgcagtggacttcccagggccttcatncggntgtncaccnctaatggcataccgtcttgtggagaccgctangcaggccaaatncatgcagaataggcttgtaccggcttgtttgcgtcttcttgcaaagcttaattcgtaacaagatcatcaacgtgaaggatctattcatagaagttcaagctttctgcattgagttttctcgggttcgagaagcagctggtctcttcaggcttttgaaacaattggatgaataatttactctttcttcttcttcttcttcttctaatcatcttcgtctccattttattgtattccctatttttgtagctaaagaaagtactttattttgaatccaagacagttttcgctttttctagagtttcattctcaattcatatgtttttacaacaaaaatttctggttagactt

SEQ ID NO: 136919 - DNA, 456 bp, Arabidopsis thaliana columbia
  unsure (1)..(456): unsure at all n locations
tgttgggaggggaccagatttnntgnggggngngcaccccnaaaggggagagctttcaaagngtgcaaccccatcaaaacgccctcggntaggcaagcaaatgngngcccttcatctcttctgaagaaacgaaagcagctgtcaatggatgattatgtgagctcgggaaagcntaggaaataagaaggcttgtgttgaatccatcnctaagtaatcngaaagatttatgatcacttctaggtttgattccgaatcggngaattagttagaagaagcnccttagngacaaggatctaatattttgtacccgcaagcatcactgcattgtctccgacttctcttatttcttcaacgtgtattttactctattttgtttgtagaaatattcnccncattcctagtagtgcgtttttagtaaatctcaaatcaacttttgtggtcggatttgaacaaaac

SEQ ID NO: 136920 - DNA, 509 bp, Arabidopsis thaliana columbia
  unsure (1)..(509): unsure at all n locations
acaggccngtattaanctgcccntaggtaagcccatggctnttcctgctttccgtggcaaaagntgttcncttagggccaattntccgtgtgatttcttggancctggcgtccaccctgcntggngaactgagcgtcatttnccagaaccggatncaccngtggagccncgaaagaaccctccagaggaaacaggtccaaagatgattggagaagggcttgtgatcgatgaatggaaggagcctagagagagatatcttgcacagcaacaaggcgaaggagctgactctgtctgagagactaaaagagttttctcaggacaaaagcaagtgcgcttgtgaagatgaagaagaagagacccctatattgaatttatatgctaacttctagattcatgatgcaatatataaggatcatgctggttaaaaaagacaattaaggaaactttttcatgtaaaaaagaaatgtaaacttgggtttgatgataatgaattgttcatgataaggact

SEQ ID NO: 136921 - DNA, 513 bp, Arabidopsis thaliana columbia
  unsure (1)..(513): unsure at all n locations
tcccccacccttttgggcctgaccctggggatctgagtagctccccatcaagccntttacccatcctgcaancgggngctcaggcgatccctaaagcgcttncaaagccgcaaaggatcctggattagtgatccaagtgtttcctcagtctgtttgaatgttctatcccgcacagattgcttccatggattcgctctgagcacccttttggatcttctatgtgatggactgagaccaaccaacgagcataaagactcngtgagagctctagctaatgaagaaccagagactaacttggccaatttggtgtgtactattcttggtcgtgtagatcctataagagctaactattgggcatggaggaagagcaagattacagtggcagcaatttgaatatgtgacgccccaaaatcacacttgaaaaagacttgattattagtttttacgtaattaactgcttatttatgaatcacatgttcatgttaacatgtatcaaaacaatcttgatttctc

SEQ ID NO: 136922 - DNA, 500 bp, Arabidopsis thaliana columbia
  unsure (1)..(500): unsure at all n locations
cctggcagagccccccntaccttggtcgcgtcataaccccaaagaagngtgcccntgcgccgttaaaacctaccngtttcttgactctcttttcgctcagctggtctaaggagaagtcaaagtcagcnccggagttggagccnccacgagtagaaaggatgaggaggaagagctgcgtggtgactacacacgccgcagatnttcgcntctcaccaatgccggcgcgtggagtttaaacgcgcgtagaagaagctttgatgagaaagatttgaagaagagtgatcagaagttgaacataagattttgtgagagtctgtattcggaccaaagggttgagacaaaagacccaaatgcaggagacaagaacgatgtaattggtggatgcgagagtgattcaagttctgaatctgatctttttgagttggatttgtttgctaaatcaaacccctaattaagaacggtccggagaataattttctaatgtaacttcagtcttaatt

SEQ ID NO: 136923 - DNA, 490 bp, Arabidopsis thaliana columbia
  unsure (1)..(490): unsure at all n locations
acgtgggtntcagagctcgcactntctncgtgacgccggctcagaacncttgtggcnttgtctagctccgcntggtgctcagaagaccacgcattcctcaagatatggaagccttcgagggngcaattccgtcaagctctcgaccaagttccgcaggtggaccaagcgatagtcgatcctctagccgtctggtgacatcaactggaggagtcggaacagtaagtaaccgcgcatcaacaagccagagaatccaagcaggaaacgaatccaggacgtcgtctttttcgcgtgctgctagaaacactcgagaagatccattaaggaggagcttagagcttctcactctcagaaaatgaaacctgacaaacaagaaagtcattattatacgtacaatccaaaagaacaaacagacagataatcgtaagagaatctgcgtaaagatacattacaatgttccatatatactttatatagtttattttgtatatgt

SEQ ID NO: 136924 - DNA, 515 bp, Arabidopsis thaliana columbia
  unsure (1)..(515): unsure at all n locations
tntagggcaagntttcccaaccnattctcatcagcnttcccangccccgtttcccatttntagcccgcaaagactgggncanttggaacctgaagtgaagaaccnggagaaggatgagaagcttgatgggagatgcagctatgaccaaatttttccagcgacatatactcgagtgcagatgaagacatgaggcgggcaatggaccaaatccatttgcagagtcgaatgggacggtactgtcgacaaactggaaagaagttgggactaagaaagtggagagcactccaccagatggcatggagctcaagaagtgggagtattgatcttcttaaaatccccttttctggtttttgttaaaaaaaagtctgacaaatcttttgaacttttaaggtgtttttcttttttggtttctgctcgaatttgtctctctccattcttgcgttgtggtctcaaagaacgttctgatactttgattttgtattagaaaactaaaactcgcaagtctgttgttttgg

SEQ ID NO: 136925 - DNA, 508 bp, Arabidopsis thaliana columbia
  unsure (1)..(508): unsure at all n locations
atggcanccncacaatttgacgggatctttaaaacccngcacctttgcatatcngnttgngcttcttcancnccnagtctatcggatccttaaaggttaggantcgatcaacggggaaaacnaatccactggaaccgcttaagnacttgcttgaaggaaatgtattaaagcttcttcaatctccataaaccccttttgngcatttcacnggagtgttaacaatttcactggtctgcaaataaaattatcttatggaagcttgagaggcaagagatggtcaactagtcaaaccaccaccactctctcatctctgncntcttaaagttcgataataatttttggagaggagactctggttgttcatcaacagagtggtcatgagccacatgtattgcttgtgtatagagagatttagaaattaggaactttttcgtataaatatactcattgtactcagctactcactagactcatctctgttttagtaatattttgaatactgtatctc

SEQ ID NO: 136926 - DNA, 432 bp, Arabidopsis thaliana columbia
  unsure (1)..(432): unsure at all n locations
aaaccctnggnaaatnttccngggggaccaggtttcccgtgggggngacccttngttaggcccggntttccaaaatttanccggaattggtcaaggaccttgntcattcatcccaattccccaaaatctggtggagcatctcggtntaccgttggnccntcagggnaccnncaagnccttattgtgnagcccccgaacttgggggagggccaatccaattattacttccccaaggccctgcgcccgctcccaggagcacagagacactcttaaactggcaatggattgattcacagatgaacgaaaaggttattttttcctttttgtgctatataatataagtctttatgcatatttgatatatttgcaggcgttggtattaccgttatgtaatttttattattgctagaagaagaaattattggatctttg

SEQ ID NO: 136927 - DNA, 554 bp, Arabidopsis thaliana columbia
  unsure (1)..(554): unsure at all n locations
gncccttggaccccggtaanttccgccntttncggngtcccgntcgggngtaagagcaacannttttccncagtccaagccaaaacatcggnttcaccatcgcaaccgggcaaggaccccatcagatcgcctggaacctaatcgctggttcaaacccnggggttagatgctcccatcagcaatccgatcaatcccagatggangaaaaagcccatgaaggatctccgccgcttctaccagtagcgtgaaggtngtcngaaaccagccttgatgatgtgagtgaatgagacattacttttcaagagctctcattctcaaaactcaaaagtgttgtngttgtaactgtacagatgatgtctccactgttcattgggtctcctcttaactggtcagccattttttttctctttctttcaatgtgttagtctttggtngtagctgtcaaagtaatactcatgcttatgtacatcactggtgtacatgaagctctttagtngtcttcacaaaccattttagatgtatatatttcgtnataataagaaaaagcttatatg

SEQ ID NO: 136928 - DNA, 548 bp, Arabidopsis thaliana columbia
  unsure (1)..(548): unsure at all n locations
tccgcccnaaaatcccagcccnaacggncagctggtgngacctgaaaggcttncggttaagcncgcttacccctggnnccttggacccaacnccnctactgtggattctgtagagaagagncttttgaggataaggtccaactctaaccatattgtttggatgatcncggaattttgctggccccagaaggctgctcagtccattgtccagccagtcagaatgactctttcttgtggggcgaactaaatatgtttagcgtggccttggtaaaaaaattctgctctgatgcttcacaggagtttttggctgagatacctcaaggtcttaattggagtgttgcaaacataaatggaaatgcggaggcaggtctcctaactttaaaaactgtctgcctcattgagactcttcttggttataggtttggattgcatgcacacatttttgtttatgcttattatattggagttagatatgacgatctgaaatgataaaccttgaatgttggacattacttatatcaatacatattggagtacaatggttattt

SEQ ID NO: 136929 - DNA, 555 bp, Arabidopsis thaliana columbia
  unsure (1)..(555): unsure at all n locations
cncagtcttttgcggtccgggggatggaggnccatgtgagccccagttgtccagatcctanggcaattngctaggnccccctagagctgttcctccccccttgtgggccnnccgttgctngcttccagtgcggnacncggatagctgaaacttcgggttttggcccggtatnccgtaggaagatcaggaaggtccaagaagatcttccaatgtcttaaccagagagaatgaataacacacaatgcagcgttgcttgctgtttctgtttcctcgcattacccatatccgttgtataaatgtaaaagacaagtgtgggacggagaaaagcaagaaggttctggcgtctgtgttactgctgtctgtatatgaaatgatatggattccggagtttccgcttcgttgtacttgtaaccatatttcattgaacccggttgaaattttatttttccgattcgataactgtttagcgtctggtttgcagcgtaatttcttgtttgtgtaacaacaaatatgtctgaccatgtatagaacttgcgaattttcacgtttttaatc

SEQ ID NO: 136930 - DNA, 536 bp, Arabidopsis thaliana columbia
  unsure (1)..(536): unsure at all n locations
aanggggntcnccncacatgttcgcacngaacccatattaatccatgcttaccgngntggtntgatggccctggggtgatatggagtatatggtctggnctgaagggtgtcacagttccaacagtcagaaacttcgtacagcctggtcccctggagagtgangcgggtatatatgcagcgtgttatgataatacaggttcaagattggtnacatgcgaggctgataagacgataaagatgtggaaagaagatgagaatgcaactccagaaactcatcctatcaatttcaaaccaccaaaggagattaggcgcttctaaataacttgtatctgtaactcaaagctcttgttggaatctcactaatctcttcatgattctgtttcctagatcaacttttgagaggggacctttgttttgtggtggggaggaaacaaaaggccatgtactttatgtattttaagggcatttgtaattttttctatcaacaataatagatcatgtattgttgtttatgttgagagaactttgttactttt

SEQ ID NO: 136931 - DNA, 541 bp, Arabidopsis thaliana columbia
  unsure (1)..(541): unsure at all n locations
tgcggntcccgggtntaccccntttngcccaggaccccnttccgggtgggttaattccntcatccagggggatcctggatncttccgggttacccaggccccaatgggtcacaacagagtccggtggcntgatttgcgaccccntgaagtcatttgggaagtaacatccattttctcaaatggtctgttagatcccttggagtngtggcagtgttctcaggaacttatctgataccattgttgctctcgtcacaaaagaaggtgcacatcacttggatctacgaccttcaacaccagaagacccgaaatggcttgtggaccagcgggaagccgagatacggttgattcaaggatggatcgaaacttatcgagtagaaaaagaagctaaggtttctctgttaaaacgttcttggtaagagaacaatgaaaagaatcgtctcagtgtgtaactcggaatctgcaaactttgtattgcgaacacatgctttgaataaatccatgtaactatgtaaactctcaatgatcactaatcttttctact

SEQ ID NO: 136932 - DNA, 533 bp, Arabidopsis thaliana columbia
  unsure (1)..(533): unsure at all n locations
gggtgcccccnttttgggncccgggcccaacncngntcccaagggggcttccccnttttaacttaaaccagngtgcgggncncccnggactgncaacaggtgttccnggcctttccagggccaatgggnctaggctctggatcaatcnggacttaaagggntcctgcaaangncaactactttnttatatataatgtcccattaccacgagccacaaggtcgtagttgaaggcaaacgtggaggccacaattcaaagtttttcctcctcaaactcgttcagacaaagccagctgctagcaaaaccaactacccaaatctgcgaaaacaaaaactctccagtgttgtatctgcttatttctcttctcttttcaagtttggtgaaaaacacagtctcctctttgcttcatttcttctttctttcccccttatgtaaatgagtttagtcagaagtttttttatatagtaaagtttgggcagaaggtgaagaatgtaatcaaagtgatactctttcaacgaggagcttctttcaaac

SEQ ID NO: 136933 - DNA, 358 bp, Arabidopsis thaliana columbia
  unsure (1)..(358): unsure at all n locations
caaacantntcggtcaangcngcnctnacccctcccnttaggctcaccantcccncctcggaacccattggaaancccnaggctttngncaccagtggcccaattaaggntggccaggaagatggggtgggattgatccgataccgacgatgttgacacgtctctgcatctctaaaactaaaataattgttcctccatctttttgaagttctaattaaatatgtatgtatatagagtttgttttcgtcggtatgctcttctaaagagtcttctaggtggtggtgatatatgtatggttaaaatggcaatcatatatattaattatttcgaagttaatgattatgatatattttatatc

SEQ ID NO: 136934 - DNA, 361 bp, Arabidopsis thaliana columbia
  unsure (1)..(361): unsure at all n locations
tgttcaattggggnaaaagccttttcntggngggccgnannggntttttttgggaattcaggggccctngattcaggcagctcctgctggtacccctttgggccanttcaggtttacggcttcttaagttagcaattgaggaccggattagnccctgatgaggcaaaangcccacgaccaagnttcttcacttcctgatctgaaacatctttaagccnatgtaaattatatgtttttccagtgacctgaagaaacatataatttggttctgtgttctccgattcaagatcaagtttttcaatatgacaacttcactaaagagacacagtttgcngtgctcaatagacttgatttagttagt

SEQ ID NO: 136935 - DNA, 510 bp, Arabidopsis thaliana columbia
  unsure (1)..(510): unsure at all n locations
gaggtntatgncccccnttctngtccccctcagcaattggggaaaatttcggcctntcttgcgngaaccttnccngtgggncgngccatgggcttgcaatgccctcattccggcttggngctgcagtgatatcttatgncccagaagatgtgcccgtataagcgaggcctttgaagctgggattgtctggattaactgctcgcagccttgctttaccccaagcccccatggggtggtgtcaaacgcagtgggtttggacgagaacttggagaatggggacttgataactacttgagtgtgaagcaagtgactctctacacttcaaacgatccctggggatggtacaaatctcccaactaagtaatgaatacattgtcatggaaatggaaaccaaaccaaatgctgtctgttcaaatctttgtgcttttattatcagtctgtctagttcggtcctgaaactcttttgtaaaacctgttgaatttataatgaataaaagatgctttgctgat

SEQ ID NO: 136936 - DNA, 127 bp, Arabidopsis thaliana columbia
  unsure (1)..(127): unsure at all n locations
ccattagtntggaaaagtngaatcnaataaaatnaaatgaaagattcttgtgttgatgttacaaaagnaaagaaaagattcttgtgttgataagaaaagaaaagattcttgtgttgtatgcttcgtc

SEQ ID NO: 136937 - DNA, 533 bp, Arabidopsis thaliana columbia
  unsure (1)..(533): unsure at all n locations
ccttagggtggncatccaccccctggngtacatttngggtgttagcatcagtcttnccntagtcagcttcatgctnctaccccatggttgtgatggtcccccncngcggaaaaattgcaggccntcttcctcagattatcagccnacttggcccagataacttggacaccctgaagaagctagcagagcaattccagaaacaagctccaggtgcaggtgatgtcccagcaacaatccaagaagaggacgatgatgatgatgtcccagatcttgtagtgggagagactttcgagacccctgctactgaagaggctcccaaagctgctgcttcttagaggaggaggaagaagaaggagaagagctcacctgcaaaacccatcataaaaatgtttgtcgctcgacctcttctgagcactgtcagattcttgttttctctaatgcttgcgaacagaaagacttggttttattatcacttgatgctttttggtccgaacagcaattttccttttattaaggttagatcgctttttgtt

SEQ ID NO: 136938 - DNA, 486 bp, Arabidopsis thaliana columbia
  unsure (1)..(486): unsure at all n locations
agggggggtttnccccccccccccnagggggntttncccccnnanccnatttgggnaaatnttttnccccngtttttggaaaantttttggggcatttccccagngcccttggaacaatganccccccccgggnnccccattaaaccagtgatggggagtgattggaanccctggcaaanccccccgtagaaaggggatcaaaaaggggcaattaattcttcattctccaatttctctgtacagcttctgcaatagaaaagaaaaaagaacttggaatgctttggggtgatcactaactctggtgatcgcattgatgtatgatataagattataaggctgctattagtacgttagttctctcttttagagttatactgtttgtctcggcttaggttttgtttagttgtcctttacagttttactcatacactccattctttttgtagttttcttgactaatcccatatatacaagtttgctctacc

SEQ ID NO: 136939 - DNA, 567 bp, Arabidopsis thaliana columbia
  unsure (1)..(567): unsure at all n locations
cnnggntccntggggngagtgaccactttggaaagcttttcaatgcaaacaaccncccgtttcaacaaaggcttcatncccttgaaatgcttgcttcagcncggaactttncccggtaaccagattaaaggattgcttnccgatctcaactctcccactgctgcaaaagcgtcaaggaagtggttaccaaaggcaaaagcaccccggttcntccatcaccccttagctcagcatcatccagcagcccgcagcagntgccgcagctgcagccgccgccgccgcagcagctgcaacagccgcaaccaaaggtaaagacatggcgccagtatcgtaaaaataaaggagctagcgtttggtagagaaggcgttttcatgtatttgtgtatgttggggtaattgaattgggaataactctttattttgagagtttttagaatcagtgagaggctggtgagggttaagagcattaagcttaggacaatgagattaacatctcaggtttttctgtatctctatctcgtacacacggaatctcgctgcgaaatggtatgtgttcactttttctct

SEQ ID NO: 136940 - DNA, 561 bp, Arabidopsis thaliana columbia
  unsure (1)..(561): unsure at all n locations
ggtggccccccaacgtttccggaaacttctgnngactnancggnncatttacctttcagggccttcatagttctttgcccgaacatggcncctttccccaaaagggnggccttgaggctttaccnaatttcccagtggcattgttcgtggttctgatgnggttctggttngcaacaatgtctctaaaaccaaactgggngtgattataagccataagcacttgttcttctcattgttgtggacgggaatttgcgtgggcatggctgcactggtgagggccnatggcnggatcttctgtaaccgacctcgtctgcacaagcccagaggctgattcatttcgtgagatcaattaattaaagacatggaactcaagtcggagacaaaagttttctcccttcgattgttttattttattgtatcaaagttggaccttgtgacaccatctagaggcaattgtctcaggtttggatccctcatgatttaatactcccacagccatcaaatgactcgatacagttacacatctttcttcatgttcattctatgattactcggtccgac

SEQ ID NO: 136941 - DNA, 513 bp, Arabidopsis thaliana columbia
  unsure (1)..(513): unsure at all n locations
cgtnccgngtcccatacgttcggtttgatggcatgngatgtgatggancagggcacagttcaacctttnttggagaancaggattgtcncggaaggaccttatcgacaaggacttagtcgagaaggtgtggaacagatagctcctggcctagcttcgaagtttgattcaccgtactcattaccagtgattgctccacggcctctttacatccttaacggcgcaaatgatcctcgatgtcctcttggcggactagaacttgcgttaaagagagctgaaaaggcgtataaggaaacagcttctcctggaaacttcaagttcaaagcagaagatggagttggacacgaagcgacgagtttcatgatcaaagaatcatcagactggtttgacaaattccttaaacaagaagatatgacaacttgacagattgtaatattgtgaactaataaagaagaatcatcttcttctcgttaataatgtattcactctcgcaaatcaatatcattacaaatttc

SEQ ID NO: 136942 - DNA, 517 bp, Arabidopsis thaliana columbia
  unsure (1)..(517): unsure at all n locations
cntccccccccgcccccangggtgggattcttaaggggtntggaaccgtaggattggtcctacggtgaccggcctcgaaaggttcagtaggccgngtcagnggtcccttttgctggagatcggnccgaaantcttgttatcaaaggtgttccctttcagaaatcatgtcccatttatagtcaagattccattgttgcacagacgagtttgatgtaccaagctgagacagatttacgtagggagaagcaagttccggttaacgatatttcctggatccatcgatcattcactagtactcgcaatggttgccatatttcttcaaggatgaaagtgaaaaatcattcactttaaagttactgtaaaggaaaatgtaattcacaggcaaaaaaaaggcattttagtacattgcatttttaatgccttttgattcgatcggctcacacgtggaaatgtagatactacgagtttgcactttctcaattctataatctgttatggtctgatggagtttcgtctc

SEQ ID NO: 136943 - DNA, 529 bp, Arabidopsis thaliana columbia
  unsure (1)..(529): unsure at all n locations
agatcnccncatgggatcantttaccacnggcttttanggattcataacatggccatngcagcattcttggccccatgggtcctttctcaccactgtgtttgtacctgganccttatttgtgatgccatcggttgtggtattgcctcgagacaagttggacctggtgaacagggaaaagttcaaggatgcatatctggagtgaggtcctttggcaaagtggtggcaccatttgtgttcagtccattgacagcgttgtttctttcaaaaaatgcaccgttctatttccctggattcagcctcctttgcatctccttgtcctcgttgatcggtttctttcagagtctactgattaaagatgtccctactccaccattgaacaaagcaatcaacaaaacctcaggcgaggaagtgtgattatatgaactcatcatgtataaaagagaagagtgtatatatagccttttagcttgtgacaaaaatatatatgtaattgatctattcaaaatatgatcataacttcatgtgatt

SEQ ID NO: 136944 - DNA, 450 bp, Arabidopsis thaliana columbia
  unsure (1)..(450): unsure at all n locations
ccccccnaancttttnggggnntttngccccnaanccccnntttttgggggnccccnnccccgggggttttttcccccgttgnnttcccccttgggcccagttnnccggcgttgaggcccaatgttaccngacgtaacccgtgaactgcttgcggctgttaactcccactggcaagatattccatctcttcacacggctctatctggaaaattcgttttacggatttgctgttggtgcaccgttaacggaagagaagcatgtcactgaagcatggcagattatacagaaacatgcctccaaatttacacgcaacgaccattattaataatatttcaaaagaaacccactatcttttttatttcgatcaataaagtcctttattttcaacgatttccactggagggggacattgttatgctattaggaataaacttatcaaatcctctttt

SEQ ID NO: 136945 - DNA, 426 bp, Arabidopsis thaliana columbia
  unsure (1)..(426): unsure at all n locations
tncnggggntcntnngcngggaaaccccccgggntcccccaggttgcccttttgggaaanncgttttgggaaaaaaattttttccttccgaacccangaacttgggaaccnggtgaaggacctgggngagaaggngaaggagnttaaaggngtggagagcttaaaatgncggagatggctgcgaagttaggggatcttgatatgaaaagagctcgtctccacaaaagcttcacatttctgagctccaaggtcgacaagtttcaagggaaaccccttcttcaaggcatcttgtaaccaaccaattagtctgaatattcttttgttcatcttgttacccgcaaaataagcgtttgtgaacggtttgctttggaaaagttttatgtattatcaaattttcgtttctaaaaaaactcaagtcttaatatc

SEQ ID NO: 136946 - DNA, 560 bp, Arabidopsis thaliana columbia
  unsure (1)..(560): unsure at all n locations
anggaaccngggttcccngggggcccgttaggcccntttgcccggttancccctttcccgggggttgggcccccaccncccctgtgccattgncccccccgggntttcnccccntggcccgncggctagggncttaaggcatttgacccccattnctccctttggaaccccttcccccttccttacccccgtcaaatngcttggcccctgccctggaaagtagctcgtcccacgttcgaggagccccctgaccaatggaaaagttaacttcgaggtggctaatccacgtgcagcatgagatcgggaatgcgttggggtttgagtgcaccaacctcacgagaagagataagtacttgatcttggccggtaataacggagttgtcaagaaaaaataattgatttgagtagtttattttcttaattagggcctttttgtgtgacgtacactttatttcttataagattttttttctatgatgtatctatctttttttagttaaatgtaattatctaattgtgtgaccaatacgatatgtatatgtacatgtgttattgatatc

SEQ ID NO: 136947 - DNA, 550 bp, Arabidopsis thaliana columbia
  unsure (1)..(550): unsure at all n locations
actggntccccgttttgttggnggggtttnttttggggtctggtggttcttggcggtttccccccntctcggttgcccnttctgtcctttacccggggatcttaaactctggggtgancattnttcntggtggtatctggcatggtcggggggccnctctntgtataggcggctnttccggagggaaaagcttttctcgggctgcattcgcctccagttattgcctcnaccaatgtcatcatctcacccctaacnancnccacancagagttcattcacagaaaccgcaacccaagttctgtggcctccatagcaatctgcattggtgtcaacatcggcttatggcaattgatttgctcaacagtgtaaactgattcatgtcaagagaaaactntcatgtttagttttggaaactgtggtatatagcaaacatggaagtttgatagaaatgtcctgtaaggttctaaaaggagagaggctaagaggccatttgtatgctaatagtgaatcagtccaagttacgtatatacagccacctatttgggtcatc

SEQ ID NO: 136948 - DNA, 383 bp, Arabidopsis thaliana columbia
  unsure (1)..(383): unsure at all n locations
cccatacgggccccatttcctttctcccaagggcnttggcccttggnggtaaggngtccncctcccacgntttggcattacnatgggganccccaagccccttggaggttcaagtaaaactgttaggccttgtcaacttaactcnccaaggaagtgaatgttatgaccctttaagctngtgaggtatgaggaaagggcttcatcaatctcttctcatcatcctttgttctttaattcatgtttntttttctaagtcccttttggtctttttgttcctctttttttggctgcatcgtaacttctggtttaggtgaaatgcccaaggctgtaaanntattnggtgaactgtaaacaacaactttntgaattaaataanattttgt

SEQ ID NO: 136949 - DNA, 181 bp, Arabidopsis thaliana columbia
  unsure (1)..(181): unsure at all n locations
ggttaagncgttcaagttctnccctgagttgtggcatcagatgattggggaatcggnggagacagtcgatctggtttacggtgatatgctgagctggctcnagngtcgagctgaaaggaaggcacgcgccgccgttgatggaggagccgcttngagtcccttttgngtctttgggtgttgt

SEQ ID NO: 136950 - DNA, 517 bp, Arabidopsis thaliana columbia
  unsure (1)..(517): unsure at all n locations
ccccccnccccgctggccanttggaccacttccccaagacccatggatggcccngattcgaccntttggtccgnccnctccngnctgngtatgttttttccccctgcttcatgaagtgggcccctccngcttcnccagttgngatcttgacctgggatnactttttaatgaggccnggatcgttatttattaacgnttttatcgaagatgaaaacttctcggatccccggatatgggtctgttcctcgagttttcatagtgtgtaaagaggacaaagcaattccagaagaacgccagagatggatgattgataattttccggtgaatttagtgatggagatggaggagacagatcatatgccaatgttctgcaagcctcagcaactcagtgattacttcctgaaaatcgcggacaaattcgtttaatcaaatcttcatgaaactgtattggatttgatataataaaggtttgttgcaaatgaattaataatgatgaatatttttaaatttcaggctt

SEQ ID NO: 136951 - DNA, 437 bp, Arabidopsis thaliana columbia
  unsure (1)..(437): unsure at all n locations
cncccccgggggtttntcccggggggttttttncccaaaaggggnggnaaaaaccttggcccnnggaaagngaanccccgccccatgncccggggctttnagcccgggatnattgggcccccgatcgggnatagtaattgtggngaccttgggnggaccccgtagatcatgaccgacgaaagcgctttggtccgcttggcttctgtcatgatgatattgattgatccgttatgtaatcttttttgtgcattcacagtttgaatctattccacgtcgtatcatatcataaagtttaggatctaaatattagtccattagttaaaattatctaatgcaataaaacccatgggatgtttggattgtacgtaaggttaaaatattgcagtctttgctttagtggaagaattaaactaatatgatgtttttctttgtaacgt

SEQ ID NO: 136952 - DNA, 505 bp, Arabidopsis thaliana columbia
  unsure (1)..(505): unsure at all n locations
atccctttncccccccnaaattttttttnaanttnaaagggggnaanccccgattccccaaggnaaggnaanggntggnaaaaaacccttnaaggcccagttagggaaggggggnaagggganggngaagttgaaggnggccnttgttggggattngggagaagagaagaggagangccgataagaccagttatgtatatggatccgaacccccatagagacccgttgtgagtatcttgaagaggttttgtcgaaaatggtcgtggcaagaggacaaagaaggtcacaacgagcttaaaagtgacttaaactcttctcaaaactgtaagttagagcttagctgtgtttatttttgtgattggtgtttgtgttttgtttttctaagtcagaagaattattttgttggggtgaagtgtgatgattgttttgtagttgtaagatcataaagatggatttggactcatcattgttgttataatgttttctaagatatatatttatatag

SEQ ID NO: 136953 - DNA, 352 bp, Arabidopsis thaliana columbia
  unsure (1)..(352): unsure at all n locations
ccaaaannccccgnggggtaccccngcnattnnccaggttcccggttttccangggggtttttcccngcatttgcaggcagggncngcaccnccgtacaacgcgccaattccnacaagcagctgttatggcaacacaagccaagccacagacggttgtcacagcacgtgtggcaagcaagaagggtggtgcaggtttctaagcatgatacgctgatatcacaccagtggtagtgcaatccatagtatgtgctattcttcaacacgagttatggtgtacgtcttatagtcacagcgtactataactcattcactttttttctatttaattcagcgtacaagcttngttttgtc

SEQ ID NO: 136954 - DNA, 491 bp, Arabidopsis thaliana columbia
  unsure (1)..(491): unsure at all n locations
ctnncnggggaaaccaccngggngggggggggcttcccccccccccagggtttttgggggnancncttccccntncgcngccctntttttntnccnaaagcccccgacccnaagcncggctcagctatgcnctactttgggataccatgctcatcgcctcttacgcgtttttcgtgctgacccggaaccaatcgggttctacgcttgtctctggttcacaagactcatctattccctcggtaaagatcgattgattcagaaaaacattcaagagaagtacgaaagaaagaaggaaggtnatatagttaatgattttcacaagtttgtttttgctcaataggggtctcttcttgtttcgctctggttttggtttacaagtaacaaaagaaaaggttttatatgtaaaccttttctttttttagagtgtattctgtttgattttcccaaatgtcactttggattatcttccttaattgacaattatgtgattc

SEQ ID NO: 136955 - DNA, 573 bp, Arabidopsis thaliana columbia
  unsure (1)..(573): unsure at all n locations
aaaaggcncnttttccccnaatgttttttcaaccgggtgctggccttccaggaaaggcatcccantgcccnacccgttccntttnancctggcctggtgnacaattggtgggnaaaattncncccncatgaagcatncggcatcggtgnaacaaaccagcgtaagaggttaccgaagaggcccctttaggatctgggncggtcatatgtagttggttccaggggagctgtctttccccagtgagaggacccggtcgaaggcgtccatttttaccagattatggcactgatatgggatcaggatccaccgtcccaggtgatcctgcgggggcaagactgaagcccggaagcggttatggatatggtttaggggtgcgtgttgattccccgttggggccntacgccttgaatatgccttcaacgatcaacatgcgggaaggtttcactttggggttggtctgcggaactaaattttcctgtttcttttttagattcgataagtgttttgtcggcctttgtcgcacattcatctagatgatgcttgtctattttgataatttatatcatcttatgt

SEQ ID NO: 136956 - DNA, 450 bp, Arabidopsis thaliana columbia
  unsure (1)..(450): unsure at all n locations
aaaaggccgggccnngananccggnatacccncttttgggatgatttggaaaggggggatttaaggattccaattgggggaaagnngcttagtccganggaganangtaagggnttaaaaggaacccnattaagcctttgtgaaacaaccgcggtcnttcgaggcaagctttnaaaaagctgggttttagtncccatttttcggggccactgagaaaattncaccatccagaagttgtgaaanctcatgaaattgttaggcttcaacatcctcagacctcttcttgagtagagagtgtggacttaccacatttttgcaccgttttgaagttttgttacttgcaaattagacataggtctatatagaaggaaattgttgtatagatgagttcatattcaattattggttggttagtttcccttgtaaaccgtttttaaatggtgaagaaga

SEQ ID NO: 136957 - DNA, 471 bp, Arabidopsis thaliana columbia
  unsure (1)..(471): unsure at all n locations
ccccctgntgggggcccgttntngaanccccnttttcnggggtgccaacnccttcgggcaactgcaacgggaaccgtctgccattctgcttcagctccngctttatcattnccnctgntacaaacatgtcaaactccngnaaaccaaaagatctaaggttcaagtgaatcggcggacaaaaaagaggtagcngaatcccccactcctagctcctgtatccacatctgccactcgccgttcttctcgctttaagggtaagaaatgaaggtggagctctgttttccttttcncaagcatcaaggnataaacttaagcgtagatgatgctgcggaactttcgacaacaacagattgttgtttgaaattcctataaatattagaatgtcattgtaatcncgcttattgacaatgttgatttctttactagtgtggatgctatgcttatacnccaatcgatgatggagcttgtggg

SEQ ID NO: 136958 - DNA, 540 bp, Arabidopsis thaliana columbia
  unsure (1)..(540): unsure at all n locations
caacnttttntcnnggnagggtccccggttccggcgctgggcnagggttcccncncncntgntntgccgngccccggatccgctcgntttnaggtcgnggcgttcggccccccngccaagtcgtccccngccaaggcccaaanggccattcccccccccgngatcatccctcccaaaccngaaccggggagggagaagtaaaaactggttctccaccagattccaaacatcaaacacaaccaagaagaagcgcgtgtcagttttgttataagaaacagaaaaccaaaaaaaaaagacatccaaatgaaaaatcccttaatattatcaactccgttttgttcagctactatattactactactactactacgcagcctatgtctcttagtcgattgatgtatagggtcatgatcaaatcaacgatttaatccctatagtcccttgggattttttttctcaagtgcataggccttgtataactttctatttttagattggaatttgggattgatattagacattttccttttattattaaac

SEQ ID NO: 136959 - DNA, 565 bp, Arabidopsis thaliana columbia
  unsure (1)..(565): unsure at all n locations
tggcattcngtactttcagaggtcaganccttcccggantcccgacgttttcctttccctgcccctggnncncncgntnaaaacttttcggttcttatcccncttggaagccaaggttcaccccatccccgnngctttncactgctgcagatttcaaccccggtttcancccggttgtttncgctgaccccccgaggtagatcttctggctatggctttgtctcatttgctacttagagaagaagctgagaatgcaatccacaaaactcaatgggaaggagataatgggtagccctatcactctaaagtttngtctgagaagcgccngtgaatctgaagatggtgacagtgtagaagctaacaacgcttctgaagatggagacactgtagaagacaaaaacacttccgaagaaaacattgtggagtgactcttattattttctctgttatccgataggagcatgagaatctgactagagatcttattacagttttgaaataactactgctacaaagaacacaataatgaagatgtaacagaaattcagtaaactatacttcaatc

SEQ ID NO: 136960 - DNA, 563 bp, Arabidopsis thaliana columbia
  unsure (1)..(563): unsure at all n locations
aacccccccggttggnattcccagggcccggtnaanccccnaaaactnccnggttggggcattccccgntacccccgggttngnacccttnaaacccccccggttggggaattcccagtagtgccggttncagcccccnaaaaccnccnntggnttgggncattaccccagtaanccccggtatcagaacccgtcaaagacccaccggtttgggggaatttcccagtagtccccggtttccagaacccgcaaaacacccacgggttttggggagttccccggtaaacgcaggtgctcatgagcaacataacagcaacaaccccttcggcagcacgggcttcttgtgatcccatcttcgtatatttctcaaaatgctttatttgtctcatatgattctattgtttgtgagtagtaataaaatcacatcatcttctagtcttgcaaatcttgttctgctaatagagaaagactcctcgggattgattatataaatgaattttcattggtggaaaaaaaatgaaagatatatataactcattgtgttacattaacaaaataatttg

SEQ ID NO: 136961 - DNA, 563 bp, Arabidopsis thaliana columbia
  unsure (1)..(563): unsure at all n locations
ggttccctttcccattccgnagccgttctcanctcgggcnncttccggcctaccccncaaagnacccttgccntncncgccccgtcccggnatcaatctnncgaccnggctnttcctaggttccngaccaatccctttccncgaccttgtggattccgattttnggatccgtaattgancctgaagttaggnggaaagatgatgcccgttgccggaattagcgtttcgatgtttgcaacaggagagagatgttagaccggcgatggatgagattgtggggattttgagagggattaaggatgatgagaagaagcgtgtgttggtgaagtcgccggatgttgtggatattgaatgcggtggtggtgatgatgttggattgttgaggaatagtgttccgccgccgatttcgccggagactgataagtggactagtngttctgatacggcggcgagtttgtaattagggttnctgtaagtggttttttaatctgtgttaaaaaaggantcttctatttttgtgtttacattttttggttaccaattaaaatgacattactattaag

SEQ ID NO: 136962 - DNA, 615 bp, Arabidopsis thaliana columbia
  unsure (1)..(615): unsure at all n locations
aggtgnnggcggncaaaaacaangtgggtccccngggctgcanggaattcaggcacgagatattgttccttgtgacacaaaagggctactggcagtttgacatgggtgatgttcttattggcggtgcacccactgggttctgtgaaagtggctgttctgcgatanaanttctggtacatctttgcttgccggtccaacgactataatcaccatgataaaccatgctattggagcagctggagttgttagccagcagtgcaagactgttgtggatcaatacgggcagaccattttggatttacttttgtctgagacccaaccgaagaaaatctgctcgcagattgggcctgtgtacttttgatggtancccgtggtgtcagtatgggcatttaagccgggtggtggacaagggaaaacgccaaaatttgccnaaatggtgttgganatcctccgtgtcctccatgtnaaatggctgttgtgtgngcccaaacccanttggggaaaaacatgcccaaaaacncgaaatttnaccaacgccaaacggccnntgnnaacccccccccaccccaatggnnaanctccagtnactgggaaactggaaaaatccccctgttt

SEQ ID NO: 136963 - DNA, 551 bp, Arabidopsis thaliana columbia
  unsure (1)..(551): unsure at all n locations
cggcacgagagagaagattatggtttgtaaaagaaaactgaaataaaggagagttttttttttgttggtaactcgaagattcaatcaataatggattttaggattccatcttgtgaaccaccggcataagaaaatatgacaattgctttaacgatcggaggaaacgggttttcgggtctaccaggatcgtcgttttcatcatcatcttcgtcgtttcgattaaaaaacagcagaagaaagaacacgaagatgctcaacagatcaaaagtccgtttgttcttcttcatcttctgtaatgggtccgtataagactcttaagatccgncccggttccacctggataccgaggncaagaagctttcaggcaacccgctaaaaagttccaccnggtggttganangggaccaatttngggggnaagttccggcaattaccggggcttccgaattnggttnnccaatttaaaccccntnggnggggcngggattttcccgcccgntaaccccgggggttaccgggtaatncccanttcncccggggaaatgnggggg

SEQ ID NO: 136964 - DNA, 539 bp, Arabidopsis thaliana columbia
  unsure (1)..(539): unsure at all n locations
cggcacgagcttcaatccgataagatctggtctggtagactccgcgtcgtatcgtgcaaggatcgatgcgagatccgcctcgaggattcgaattccggtgatcttttcgcagcttgttttgtggatcctggacgtagagagaactctgtagagccgtctctcgattcgtctaggtatttcgttctcaggatcgatgacgggagagggaagtatgcgtttatcgggctaggattcgctgagaggaacgaagcgtttgatttcaatgttgcgttatcggatcatgaaaagtacgttaggagggagaaagagaaggagacaggggaaacgagtgagagcggtaatccatatttgatatccatccctgccgttaatcacagatttgaaggaaggtgaaccattaagatcaacgtgaanccgaaccaacaacaaatggccctggntccccaagtgnctttaagaaccgggncccaaacccttatnacttnccacccccaaactccggnnaacaagcncttcccccccaaancccgggtnaggtt

SEQ ID NO: 136965 - DNA, 407 bp, Arabidopsis thaliana columbia
  unsure (1)..(407): unsure at all n locations
cggcacgagtttgattgatcatttcaatggtcagtttaaagctggtgcactctgttggctttgcagaggtaaaaaggaggtgttgtgtggggactgcaatggagctggtttcattggtgggttcttgagcaccttcgatgagtagtagaaataagcttcttccaagaagactggatttgattacatggactcaaaaaaacactcttttataaaccttagaagaagtaaatctttctctctatcaatgctcttctttaccaaaaacatgtattactatttgttattgcacaccaaacttttgttgtatttttgtttttcagattcttctctctctctctctcggtttttggctncaacaaattgcnaaaaggctatagcaccccnatgggagncctggtgatgggttg

SEQ ID NO: 136966 - DNA, 540 bp, Arabidopsis thaliana columbia
  unsure (1)..(540): unsure at all n locations
cggcacgaggtggaagagacatggagtcgttctcgatggggaaattgcagctgtctgcttcaagcacggaaaatatgatttggctgcaaactcttatgaaaaagtttgtgccctttatgcgggtgaaggatggcaagatttactggcagaagtcttgcctaatttagcacagtgtcaaaagattcttgatgatcaagctgggtacatgtcatcttgtgttagactactttcgttggataaaggattattctcgtccaaggagcggcaagcttttcagtccgaggttgtnactcttgcacacagtgaaatgaagaacccagttcccttagatgtgtcatcattgatcacatttttctggaaatactggccctccactttcagttgtgtgatggaaccctgggnatcnacctgntactgtgtggagtgggttccctntgaaacaccctgatccngtaagcctacccttgggnccaccaacanactgcgaggggcaaggttaaaangcccgtgaactgggaancccgnaaggacnacactttt

SEQ ID NO: 136967 - DNA, 443 bp, Arabidopsis thaliana columbia
  unsure (1)..(443): unsure at all n locations
cggcacgagcgacaacggaggcgaagatggcgacagagccaccgaagatagtgtggaacgaaggcaaaaggcgattcgagacggaggatcacgaagctttcatagaatacaagatgagaaacaacggtaaagtgatggatctggttcatacttacgtnccttcattcaaacgaggattaggtttagcttctcatctctgcgtcgccgctttcgaacacgcctcttctcactccatctccatcatcccttcttgctcctacgtttcgganacgtttcttcctctgaaacccatcatggaagcctctgattcantcagaggtattcaagtctagnantttgaataaccacttngtttctcattgtgctctgtaataaaatnaaggctctaaaatgtttcggcttgatngtntngaatccaaattgngggaantgntnnaaantaa

SEQ ID NO: 136968 - DNA, 499 bp, Arabidopsis thaliana columbia
  unsure (1)..(499): unsure at all n locations
cggcacgaggatttatcggaagctgatctccgaggtgcagatttctccttggcaaatgtaacaaaggtgaatctaacgaacgctaacttagaaggagcgactgttactggaaacacatcattcaagggatcaaacattacaggcgcaggtgaaaaaagaaaagaaaactttcataataacaataagcacatctctttattacctctgagcttcacataaagtttgatacgtttgtgtgtataaatttgaattggatttagacttcactgatgtccctctaagagatgatcagcgagtatacctttgcaaagttgcggatgggtaaaattctgctgctcttatctcttagaatctatatcctaatattctgtctggaactcacagcagaatgtgnttaaattggttggatggttggtttgcctcccccatnagngtanngggcactggggatccaccgggggcacatcngttngactaaccntgaatggaacgttggctg

SEQ ID NO: 136969 - DNA, 544 bp, Arabidopsis thaliana columbia
  unsure (1)..(544): unsure at all n locations
cggcacgaggagagattatggttccggagggaatcaatggcggaggaagcatttctcagccatctccgacgacgtcgtttacttctttgcttatgtctcaaagtctttgtggtaatggtatgcaatggaatgctactaatcatagcactggccagaacactcagatatgggattttaacttgggacagtcgaggaaccctgatgaacctagtccagtcgaaactaaaggctctactttcacattcaacaacgttactcatctcaagaacgatacccgaaccaccaatatgaatgctttcaaagagagttaccaggaggattccgtccactcaacttctaccaagggggcagggaacatctaagggcaacaatattcctgntggcattccactcgcataaaagtctaacgctcctggtggcttggattnacgggcanttggnattccnaggaatggncacaagttggtgngggaacgatcgtngcttnanccaatgggcagccanggaatngntcgcgggnaagggaaaanancggggntgtntt

SEQ ID NO: 136970 - DNA, 542 bp, Arabidopsis thaliana columbia
  unsure (1)..(542): unsure at all n locations
cggcacgagatttctcgaagaagctatggcggatcaactcactgacgaacagatctccgaattcaaggaagcttttagcctcttcgacaaagatggcgatggttgcatcacaacaaaagagctgggaacagttatgcgttcactaggacaaaacccaacagaggctgagctccaagacatgatcaacgaggttgatgcagatggaaacggcactatcgacttccccgagttcctgaacctgatggctaagaagatgaaagacactgactcagaggaagagctaaaagaagcattcagggttttcgacaaagaccagaacggtttcatctccgctgctgagctacgccatgtgatgaccaatcttggtgagaagctaactgntgaanaagtggaagagatgtccgtgagcctgatgttgntggagatggccagatttcctttgaagagtttgccaaattattggtgncaaagtggtttgtaaaggtgttgttgtggttgtgttggtngtgtgccctttaacngtttngggttaccanacattt

SEQ ID NO: 136971 - DNA, 543 bp, Arabidopsis thaliana columbia
  unsure (1)..(543): unsure at all n locations
cggcacgagcgaaattgcagagtcaccatttctgatttcaccgctaaaccctaattcgacagccaatggatatagatgggtcgataagtgccatggattcttacataacacggttctcgttgcggcttctctcttcttcgtcgcttacttagcttacgaagcgaagaagagtctgtctaaactctcgaatcggagatcttatatcatgattgcttattatggttgtctttggcttgttagcttgctcaatcttgcttggtgctgtctccagggttgggaatgtactcctgggaaagaagttgtttggaatctgttaactttgttcacaacatctggaatgttgtttctggaagtaagcttggtggcttttctcttccaagggaactatgcaagcggtgcagaagcattaactagaacgtccnaaccccggggttnattggtccccttgattcgtcncaagggaatttcccctttggngtttgggtccaatgttattncacaatgaaatgngaaacgccaatggggaatggcaccaaacccccc

SEQ ID NO: 136972 - DNA, 210 bp, Arabidopsis thaliana columbia
  unsure (1)..(210): unsure at all n locations
cggcacgaggagagagagagagagagagagagagagagagagagagagagagagagagagagagagagagagagagagagagagactcgtgccgaattcggccnggtgntcngttcttatntccttccanctcggtgctttcatccctggttaccctattcaacctgtagtannccggtatccccatgtacattttgatcaatcctgngg

SEQ ID NO: 136973 - DNA, 528 bp, Arabidopsis thaliana columbia
  unsure (1)..(528): unsure at all n locations
cggcacgagcttttgcacatttctagggttccaatcaaaatctatctgcaacaaaaatggctaatcgtttcagatcagggatctccttcttcaagaccatcgccgtatcagattctgtctcctccgttagatccaagtcgcttttcccagcgttgagaacttatgcaactgcttctgctcaaacaaccgctaatgttaaggtgcctattgctttagttggtgaaaatgggaactttgcttcatggctatacattgcagctgtgaaaatgaattccttggaaaagattgagacggatctttctgagatgattgaggcaatgaagacagctcctatttttgctcagtttacaaagggtccctctgttcctagagggncaagattggctgctattagggntgcttgtganaaccaaagtttccgnacccaccaaagactcccccctttggtacctggnatgnaacctgaanncctagatccattgtnanaattntcacgtgcaacncatagggggtccaaagtttggncnt

SEQ ID NO: 136974 - DNA, 524 bp, Arabidopsis thaliana columbia
  unsure (1)..(524): unsure at all n locations
cggcacgaggatcaatgactgcaagaacgtagtaaaccgctggctcgctactaaacttgacccttctcgggttaaggaaactctcagaggattagcaaactgcaaaatcaatagagtttgtcctcttgtctttccgcacatgaagcatattggtggtaactgtagcaacgagttgagtaaccaaacgggttgttgccgtgcaatggagagttatgtgtctcacttgcaaaagcaaacacttataaccaacttgcaagctttagattgcgcaaccagccttgggacaaagctacagaaacttaacatcactaagaacatcttcagtgtttgtcatataagtctcaaggncttctctcttcaagttggaaccaagaatctggttgtctattaccaagcttaccgtcggatgcggtatttggaaagcacgggggaaancttncctgtgccncaatgcaaaatcccggcncgnggctnacctnccaaccccagcctacctgaaaaactgnnaacctgcctcantggcc

SEQ ID NO: 136975 - DNA, 586 bp, Arabidopsis thaliana columbia
  unsure (1)..(586): unsure at all n locations
cggcacgaggagagagagaactagtctcgagtttttttttttttttttttttagcaaaagtatgcttatttatttaacattaaagcaaaagcatcaaccatcatcaaaatccaacaagatagtgaaagatccaaccgccacttgcaactacactacacaactctgaaatacaaaaacttgcaaaacacagcccaaaacagaaactaacacacattgcttaggtgggaagacagttttttgtacaaaagaaaaacattccccgtcactttatccactctgataaagtacacaaaaacaaaataaaaaaaacaaagtaaggtggcggaagatcagggcaccatatttacatcacccggcatgtcacactccatcgggccatccctaacgggtggtggccccttgggnacccggtggncaaccagncgnggggnngggngattttgntgggtgggtttnaaaaatgttggcccgtnggnttgtggngggtcgtcccgggttaangggccccaacggtcccttcgggggnccgggtggtggcngtggtnaggncttcccgggtggaagncttggncncttttggccctng

SEQ ID NO: 136976 - DNA, 535 bp, Arabidopsis thaliana columbia
  unsure (1)..(535): unsure at all n locations
cggcacgagaaaaatctcaaatcaaagaccaagccagtcaccggaaaatgctgacgtgtatagctcgttcgaagcgagcaggcgatgaatcctccggtcaaccagacgatccagattctaaaaacgccaaatctctaacatctcagctcaaagacatggctctgaaagcatcaggagcttaccggcattgcacgccgtgtacggggctgcaaggtcagggacaaggacaaggcccgatcaagaacaatccgtcgtcgtcgtcggtaaagtcggatttcgaatcggatcaacggtttaaaatgctttacggaagatcaaacagttcgattacagctacggcggcggcggcggcgacnaacaacagcctagggtttggggnaaggagatggaagcgagacttaaagnatatcnancggcgaaggcctnccgnatnggcnattggnaaacccgggtncccggttntgttgtgggggnaaacctaaaaattggtccangttacccgngnttaaccttgtnttcccgggngatattaacg

SEQ ID NO: 136977 - DNA, 576 bp, Arabidopsis thaliana columbia
  unsure (1)..(576): unsure at all n locations
cggcacgaggagagagaaatcagcaaaagatataaaacgcaaaagaacaatgtctaacgttgtagtaatcgccgttgttctcatcgtagcatcgctaacaggacatgtgtcagcacaaatggatgtgtctccgtcgtcaggaccatcgggtgcaccagactgcatggcgaacctaatgaacatgacaggctgtctctcgtacgttacggtcggagaaggtggtggtgcggccaagccggacaagacgtgttgtccggcgctacggggctagtggagagctcgccgcaatgcttatgttacctcctctccggtgacatggcggcacaacttggaatcaagattgataaggcaaaggctctcagacttcccggagtttgcggcgtgataatcccgatcctcactttggtccctttttggaatccctgttgggnacctgnaccaatngaacgangggccnccaaccaatgncaaggtcnatgnaagtgaaatcccagagggtttngntggcccttggaaaaagaccntccaacagngcctntccctttccaacnnaaattccnaaaacgttcggttaac

SEQ ID NO: 136978 - DNA, 483 bp, Arabidopsis thaliana columbia
  unsure (1)..(483): unsure at all n locations
cggcacgaggggagctatgagtcttgaaggaacattggctggacttttagcatcattttttcttgcatctgttggctgcttcctgggtcagataactcctccagaagcagctgtatgtgtactagcttcccagattgccaatcttggagagagcataataggtgcttcttttcaagacaaagaaggattcaaatggctaaacaatgatgtagtcaacgtgatcaacataagcttgggaagcattgtggcgattttgatgcaacagtttatactccagaactgggtcaagtaaaacctgccacgaaggtcatgtattctcagtgagggtagattctttttttanattggtaaaccaccagccttacggattccagtggtgttgnaaataaaccctggtggggacaactaggngccaccaccaatgagggggaaacttctnggccantgccaacaattattggtggattatggnataaagtncct

SEQ ID NO: 136979 - DNA, 560 bp, Arabidopsis thaliana columbia
  unsure (1)..(560): unsure at all n locations
cggcacgaggtcgttatgatgtttactataatgatactataattttggacagagtaactgctcagtggaagcgcttaccaataggcaatgagcctcctcctcctcgagcttaccataccatgacttgtattggagctcgtcatcttttaattggtggttttgatggaaaattgaccttcggtgatctctggtggttagttcccgaagatgatccgatagccaagaggtcttctgtgcctcaagttataaaccctcctgaaattaaagagtcagagagagagttggacaaggaaagggggcaagatggntacagtattgntgacttgcaacagaaaaatgggatatctggtttcatccaggggttgcgccttcaaattcccggtggaggcagangntnaannaggtttggtggatttggnccaagtttanttgaggggaatntagttgataaccgggccccaatgnaccagattgccggccaacactntgcacnattggaanagccnccccggacnttnaaccnaaaancgttggcccnccccgggtncacgncttgaccc

SEQ ID NO: 136980 - DNA, 288 bp, Arabidopsis thaliana columbia
  unsure (1)..(288): unsure at all n locations
cggcacgagcggcacgaggagagaactagtctcgagttttttgctctctcgaagttccgtgcgactctctgctcgagcaagatctcctaccgatacaatgattatctcagaggctaaccgcaaagaaatctgcaagtacctcttcaaagaaggagtttgctttgcgaagaaggatttcaatcttgctaagcatccgttgatcgatgtcccaacctacaagtgnttnagcntatncagagtttcaaatcccaggggtntnttatgggganatttntccnggntgcaaaa

SEQ ID NO: 136981 - DNA, 334 bp, Arabidopsis thaliana columbia
  unsure (1)..(334): unsure at all n locations
ggcacgaggatcngtcaatggcnattatggacctcctcgagcaccgttgggaggagctagttggtgagatgccactcaagatatgtnacccttgcatcgaaagccacgagtggcggattgttaccggttgtgatcctaagaacactaggtggagttaccacaacggtggatcttggccagtattgctgtggacgctgacggcggctttgnatcaagacaggccggcctcnaatagcaangacgtgcgattgntcnaatcgantcacggctacaccganattgctggncggnnatactatgatggtaatcaaggaatgtacttttgggaaaacaa

SEQ ID NO: 136982 - DNA, 564 bp, Arabidopsis thaliana columbia
  unsure (1)..(564): unsure at all n locations
cgccacgaggtgataagtatagcaactctggacatagagtcaaaagtaacgagaaaggtgaagatttgtcatctggtaggagacactcagactcaagagtggaggataatgagaaaagaggttctcgctggggttttggtgaccgtcattcccgtgttgaaagaaaggaacatgaggaccctgagattagcaaggagaaggaggttcatgtcaaatcttcaagagaccgttctgatgggaaatgtttggctacagaggatcgagatactcattctaagaaactgaagggtttcatatcagacaagtttactactggcaatactaatgaagagaaaccagncctcaatcttaaagccttcccccggtgatgttgatgctgcaaaagttgcacctatnaggctcctgaatttgtgnataaaaaccttgttgaacgggtccctgcaacaggttaaagagagtntttttgggaaaaanaacccggnntaaangctnccaccgttggaatccagnccaattggncctncggaaaaagctcaactttgggnaacnnggttnccaannacc

SEQ ID NO: 136983 - DNA, 331 bp, Arabidopsis thaliana columbia
  unsure (1)..(331): unsure at all n locations
cggcacgagctttgttctgttcagcaaaactcaaccagattctctgtttaacgctgagcgtaggcttaccgttttatctgagtcttgtggggaaaagcaagttgctttgttccagtgtgagcctacaggagagcttagtttccaactaatgtcttccaagtctaagagcttaggtttcacttctttatcgttttcggagtttctttctccagtaactaaactctctgttgagaagtggttggagtnacaccaactaaaaggggaaaggnagatgntccganncccatcctnttngaanagtngnttgcctcgntttaaaccccgngaaatt

SEQ ID NO: 136984 - DNA, 520 bp, Arabidopsis thaliana columbia
  unsure (1)..(520): unsure at all n locations
cggcacgaggagaactagaagcaaaatcaaagacaaagaaaacgaaaatgttggcaatatttcagaaagcttttgctcacccaccggaagaactcaacagtccggcttctcatttctccggcaaaactcctaaacttcccggcgaaactctctccgacttcctctctcatcaccaaaacaatgctttctctatgaacttcggcgactccgccgtcttagcttacgctcgccaagaaacctctcttcgtcaaaggttgttctgtggactagatgggatctactgtatgtttctagggagattgaataatctctgtacattgaatcgncaatacgggttatctggggaagaactccaaacgagggcaatggtttgtggtncgaagcttatcgaanacttcgggatcgggggccctnnccaggangtnaaagtcctnanaggcctttagggaacctcngttcggtngcaanggaaccaaaattccccngggtntaagcngnggnttgtnggggangccttnct

SEQ ID NO: 136985 - DNA, 370 bp, Arabidopsis thaliana columbia
  unsure (1)..(370): unsure at all n locations
cggcacgagctgatgcatcatgggaaaaagaatcccaaatgagagattgtcttaaagaagtggaagatgaggtgatttatcttcaggaaactctcagggaagcgaaactgaaaccttgaaactaaaggggaagatgttggataaagaaactgagtttcaaagcattgctcatgagaacgatgaactcagagtgaaacagggatgattctctgaagaagatcaaggaactatcggngttactcgaagaagcattggccaagaaaccatnttgaangnnacngggtgagctcagtggagagtgaaaaagcctatgaatttgctgccaaanggnggttgagttttctnnnggnaaatgggttatanaangtcc

SEQ ID NO: 136986 - DNA, 431 bp, Arabidopsis thaliana columbia
  unsure (1)..(431): unsure at all n locations
cggcacgaggacaaactgttgccgttgtccacattgagagacccatggcctcctcagcagctgccaaccttgcattnatctcttnagaatcagaagagcaaatatattcttctgacaatcctagagctgaaactggaggacgggtatacganattnattgnaaatgttccagggggtggaaaactacttcacttccacgggaaggaattgccaatnaatggtagccgcaaactaattgtaaggaatcattgttgtggtctttagcccattccagtattaaatcatctncaaaatcattttcgctattcgattaattcatcaacatcatnttgacaacacactttctagctgnacttgaccacaggcttcaaaagctttnatttccggttctatnggttttgggnccttggggtnanaccatgnanccnctt

SEQ ID NO: 136987 - DNA, 550 bp, Arabidopsis thaliana columbia
  unsure (1)..(550): unsure at all n locations
cggcacgagaaaaaaaagtattaaaacaaaatcaataaaaagagaataaaaaatggtgggttctcacaaagcaagcggagtgcttcttgtgctactagtggttatggccaccacaatagcaaacgggacacctgttgtcgatacagcaaaaaatgcagctacagcagttgaagatacagcaaaaaatgcagctacagcagttggcggtgcagctgcatcagttggtgctaaagtaacaggtgccaaaccaggcggtgcatcacttgatgttaaagcatcaggagccaaaggagacggcaaaactgatgatagtgcggcatttgcggctgcatggaaagaagctttttcagcagggagcncggttacagtgccaaaaggtgagtntttggtggggncttgagtcaaaggccatnaaaggccagcactttngattgatgnattttaaggtccggtcggnaagccctngcctatccgggtggttntntgaacccgtgttccttnatgacaactttttcggaaggccccntgngccattttccaacggatactt

SEQ ID NO: 136988 - DNA, 433 bp, Arabidopsis thaliana columbia
  unsure (1)..(433): unsure at all n locations
cggcacgngctcaccgttcctnatccatttngctgacgcaaaatcgaatcggaaccctaaaatctctccgaaagccatgtctcctcctcctgctgtagtcactgaatctgccgatggacaacctgagcaaccaccggttaccgccattgctgaagagctggagaaaaagcttcagactgatgaaccgattgtagaagatgttaaagatgatgaagacgatgatgatgatgaccgangaagaggangacgacgatgctnaaggtgtaagtggaagttcaaagcagagtagaagtgaaaagaagngtagggnaggcgatgttgaagctcggtatgaaacctgtcactggttgtttagtcgtgtaaccttcatgagaccgaaaaaccgtctncttcttttnncctctaagcntnatggcctttaannggccnnatt

SEQ ID NO: 136989 - DNA, 560 bp, Arabidopsis thaliana columbia
  unsure (1)..(560): unsure at all n locations
cggcacgaggatccggtgatgggtgtggtatgcgaaatggtataccggagactatttggagagtcttcgagcaacatggcaccttaccgcgatatgaatgtccggtctaggcattctatacatgtaacgttgactctccccttctcctaaacgttgaccaactcctcttaagtcataaaccggaccagttggtctgctcggtacatttgaaccggactggggagctttctgtcctcgtccgtagatcgggacaagcgtaccatccggagacatcagatttgcataccggacattttggtggttccctcttatgatcgtattgatcgactccgttgtcttgaattgttggacgcataagtccacttgtgaatgcagggaanaggttgtgggtgtataaaaaatgntccaccagcangntgaccaagccgtgtgttaatgtttaanacacctggacacttgnnaaaattnancaaccatttgggttttnananntttaagnaactgttaancgaaatttnaanntccnaatgacaaacncagnctgggcatccaaagccang

SEQ ID NO: 136990 - DNA, 475 bp, Arabidopsis thaliana columbia
  unsure (1)..(475): unsure at all n locations
cggcacgaggtacaaacaatatagtatctaattagaatggtatctctaaagtcccttgctgctattctcgttgccatgtttcttgccaccggacctacggttctagcccagcagtgcagagacgaactgagcaatgtgcaggtgtgcgcgccgctgcttctgcccggtgcggtcaatcctgccgcgaactcaaattgctgcgctgccctccaagcaactaacaaagattgtctatgtaacgctcttcgagcagccaccacacttacctctctttgtaacctcccctcttttgattgtggcataagtgnctagttgaacaacattccagttccgagggttttgggggagttttggcctgcaaaacggccaagncggattaaattnaaataatgggggaatncncnattaaggggtttggttttnaattnggttngccaaaacttttggcaggntattgnanccgttnccaaggggg

SEQ ID NO: 136991 - DNA, 514 bp, Arabidopsis thaliana columbia
  unsure (1)..(514): unsure at all n locations
cggcacgagtgcaacaccatcgacggtgataggcctcggaggatcatccatcaccaccaaacccttctcttcatcctttttaaaaccaacattaagcgccaagaaccctttgagactcgccggtgcatcgggaggaagagtcacttgctttgagaggaactggttgaggagagatttgaacgtggtaggatttgggctgatcggatggctagctccgtcgagcattccagcgataaatgggaagagcctgacgggtctcttcttcgatagcatcggaactgagctcgctcacttcccgactcctccagctctcacttcacatgttcctggttgtggttggttacgtngcacttaggcctcttcctctncctcanctttcggacaaaatngggattnaangggcaaggactgaannttacttccaaagggtaaccnantcnntgtttccggtttgacaaaatcgcccccctttgggaaatgtgaaaantaactantcaaaacaacngttcctntc

SEQ ID NO: 136992 - DNA, 572 bp, Arabidopsis thaliana columbia
  unsure (1)..(572): unsure at all n locations
cggcacgagaaatattgaaaaagatggtgcacttcagatgcttgccacaaatattgagtatgatgagcataaaggacgcattgctattggacgactacacgcaggggtactgcgcaaaggaatggatgtcagggtgtgcacttctgaagattcctgtagatttgcaagagttagtgagctttttgtatatgagaaattctacagagtacctactgattcagtggaagctggagatatttgcgctgtatgtggcatagacaacattcagattggggagactattgctgataaagtacatgggaagcctctacctacaatcaaagtagaagagccaacctgtgaaaaatgtccttcctctggaaanacctctccattttnctgggccgtgagggggagtatgtaccaacaggnactttcgngncnggttaacccgggaccttgaaagaaacnncctatngaagtgnaaatggtggcaccagcncatcattgtagtggggggnaattcncattccacccgnngaacaccggggnaggnttanttttggtgccccgaagtccnnaagggncgnaat

SEQ ID NO: 136993 - DNA, 536 bp, Arabidopsis thaliana columbia
  unsure (1)..(536): unsure at all n locations
cggcacgaggtcaagcgagtctgaggaagatgagagtgaagacgaggaggaaacccctaagaaaaagagctctgatgtagaaatggttgatgctgagaaatcaagtgctaaacagccaaagacaccatccactcctgctgctggaggatcaaagacactctttgctgccaatctctcttttaacattgaaagagcagatgttgagaatttcttcaaagaagctggtgaagttgttgatgttagattctctaccaacagagacgatggttctttcaggggatttggccatgttgagttcgcatcttctgaagaagcacagaaggcgcttgaattccatggtaggccattgctcggtcgtgagattccgncttgatattgcccaggnaganaggtgagagagccnanaacccgnattcactccacaaagcngnacctncanaagtggtggtantggtggtnttnaaanaaatttccgtnaaggggtttcccgtnaccttcctggggtgncnaancnctttgggncattcagcatgggg

SEQ ID NO: 136994 - DNA, 375 bp, Arabidopsis thaliana columbia
  unsure (1)..(375): unsure at all n locations
attagagcacccggtattnggtctactttataatgagctagctaaaggagttccggcaatatttggtcattttctaaccacccntccngcaatccatnccatggttatcttcgtgtgtataaagtatntccctgtnccaagtgtgcctcagaccgagagatttcttttcagacgtgtatccccaagaagctatcatttatnccgctgtgtagccaggtatggatacaaagatntgcggaaggaaagtcaccaggcgtttgngcagatacttgattganagtctagaaaaatttatacgtaaggaagcacaggagcgtgcactttagagttnaccggagncccataatngattacaagnttctnaaggttgattcg

SEQ ID NO: 136995 - DNA, 360 bp, Arabidopsis thaliana columbia
  unsure (1)..(360): unsure at all n locations
ccattctctgtggccgtcaccgtcgccgtgaaatagctctcctctctctatctccnattcttggcggctgcatcggcgcgatcggagtccactacagcagcagcagctncctcgacgattcgnacgccaacaaatccactcgaagagttctttnagttcgacagaagccaagacgnagataaacctnttgtctatggtcgaggttggaaagcttcanagctncgtctcaagtcatgggatgatcttcanaagctntggtacgttcttntcaaagngaaaaacatnttgatgactcagcgtcagatgcttcaggctcagaacatgcagtttcctaaccctgaacgnatttcaaaggtgagg

SEQ ID NO: 136996 - DNA, 284 bp, Arabidopsis thaliana columbia
  unsure (1)..(284): unsure at all n locations
atttcatggggactcagtactatgaacggaagcaagagagggaagctagtnagtctgttgnnccgtttggccgtgaacaatcaccgggtattgttgttcccatgattggagaaggaacgaatgatgggaaagtgtttggtgaagaagacagtngtgggattcacattnttggcattcatnctcatnctgctcatcatagacatagtcatcctcctggtcatgnttcatgtgaaggacacagtaaaatcgacattngtcatnctcatnctcatgggcacgggcat

SEQ ID NO: 136997 - DNA, 284 bp, Arabidopsis thaliana columbia
  unsure (1)..(284): unsure at all n locations
aagcacgtatttggnagaagcgagtatcaaggaattggtctnataaatcttaacgataacgagattgatcgattcaaggnggtaacgaaatctgactgtgatcatgtagctttgcatctagattatgctgcaaagaacataacatgggaatctttatacccggaatggnttgatgnagttgaagaattcgnngtccctacttgtcctnctctgccttngattcaaattcctggcaagcctcggattgatcttgtaattgccaancttccgtgtgataantcagg

SEQ ID NO: 136998 - DNA, 207 bp, Arabidopsis thaliana columbia
  unsure (1)..(207): unsure at all n locations
ctttaaaattgagaaattttactttttagcccaaaacttttaaaacttatacnttgaacccnttagttctgagaaaatntncggaggagctgtaatttccgattacatagcgccggagaagattgcgagatcatctggaaagtcttcctggngaagtaatngcgtctttgacngctcaatctacgatttcgatngaaatttcgatga

SEQ ID NO: 136999 - DNA, 277 bp, Arabidopsis thaliana columbia
  unsure (1)..(277): unsure at all n locations
tttctctaacattcgatcttctgtttagnccttttcaagatncctttcgttgtttctnggcaaagataaggatcttaaaccagagacttgacttcataacttacatatnctttgaaacnctcttgctcatcgcngccccttatctaaagttccaacatgggttcaatccaaaacacagttcacnactgtngtgtctcaagagncaatcagattatgtacgcttacaacaatgccggagaccaccgcaacaacgagagtcttncagccgttatncttt

SEQ ID NO: 137000 - DNA, 251 bp, Arabidopsis thaliana columbia
  unsure (1)..(251): unsure at all n locations
tcctcttcggaatcgaagctcacgacgncgacagtaacggcatcggagaggtgttggtgttggtggttcatttaacttaacattttcgagaagagaaggcttttaatttcaaattcctcgctgaattttnttnctnctncttcgtcttcatcggaagaagaagaatccaaaaacttatctnatctgcagaaatataattntccttccccatggatttntngcnttttttgccataacggagctgggaaatt

SEQ ID NO: 137001 - DNA, 254 bp, Arabidopsis thaliana columbia
  unsure (1)..(254): unsure at all n locations
agaagattatttcaatgaagacagcgatgaagaagattcagcctctgcttctaatacacaaaaggaaaaacctncttctaatatacagaaagaacaacctaagcctcatctctccaatggagtggctgcaagccgnacttcttcaagtccgaggtctggaggcttggttgattatnaggacgatgaagatgatgatngactataaacctcctccgcggananagccagaagcctctnnggatgnggaaggcgng

SEQ ID NO: 137002 - DNA, 294 bp, Arabidopsis thaliana columbia
  unsure (1)..(294): unsure at all n locations
tttatgcagagcaaaagttnccaccgtttacttctatggntatatcacttggaacatctcgaaagaaccattcactacagctttgtctggatgatttggcaagagagagcttctgatgatggtgaagatgttgatgatgctgtaataaaagatgttgatgatgatgcttgtccatgaancagaattatgttcaagaacaagagaaagaagaagaagatggttatggctaggttttttctcaggcagttttccaaaaccaganagagagagagagagatgatgatgatggaaatg

SEQ ID NO: 137003 - DNA, 425 bp, Arabidopsis thaliana columbia
  unsure (1)..(425): unsure at all n locations
acttgtacttatatctgcatgcattatttgaagttagtcatgataccgggaaggattttaatgatatgcaggtagaactctatgcagaatacgatactaagatgctgcttccgtncctacgtagcagtcaacattacaagtnagaaaaggcatatganctttgtgtcaagaaagattttttaagagagcaagtntttgtcctgggaaggatgggaaatgcaaaacaagctcttgcagtcatcataaataaactgggggatatagaagaggctgtggaatttntntccatgcagcacgatgatgatctatgggaagagctgttaaaccantgtcctaaaccaagcctttaaatggttgggcttctttttngggcccncagttggganccttggnccctctttananttgnaaantnggncccaaat

SEQ ID NO: 137004 - DNA, 470 bp, Arabidopsis thaliana columbia
  unsure (1)..(470): unsure at all n locations
ctaaatctnatctttccattttnaagaagacttttaaatctgtctctctctctctctttgtaaatatacatatatagataagctcacatatatggcgactgaaacatcttctttgaagctcttcggtataaacctacttgaaacgacgtcggttcaaaaccagtcatcggaaccaagacccggntccggatcaggatccgagtcacgtaagtacgagtgtcaatactgttgtagagagtttgctaactctcaagctcttggtggtcaccaaaacggtcacaagaaagagcgncanttctttaaacggtgcacagatgttaggtncctcgtgggtttgcccacgggcatcattaattttttaanccctccatttccaattccggttnttttttccgccctttggggccggttgcctttaacctgcccttntnttnagncggnattnctttcgnccggaatttanatggntt

SEQ ID NO: 137005 - DNA, 400 bp, Arabidopsis thaliana columbia
  unsure (1)..(400): unsure at all n locations
aaaataaattgagtgcctcccccaaaaacaaaattggtagataacgagcaattgttttttttcagatttgatcctgaattttnacatttttttttttgcaatctccccctaatctgttgtttctcgcttctncttctgttaatcatctgtctttcaaaaagaaagaaaaaagaaaaattcgatttctgggtttgtttttgtcatacagaaaaaaatcaagcttatggaatttgnngtttaattttttngttttaatttgaaaggcagntttttccagaccggngatccgttttttcaaattnctccctgattttacccnccttttttcccttccttaggatntttaggtggaancgaggggggaaaattttttnatnnccccgntttttcngggtcttcc

SEQ ID NO: 137006 - DNA, 443 bp, Arabidopsis thaliana columbia
  unsure (1)..(443): unsure at all n locations
tcctttcttcaacacaagcgtctggactaaggaaagccaacaacaaaatctggtttcaagacggttggcaggagtttgtcaaccgtttctccattcggattggtttcagatacaaagttacagtctacattttcaatttatcctccacactctgagatcaaccaccattctagtagtgaagctcttatgcaaatggattccgcacagaatcagttcaacaaacgtgctcgattgtttgaagatcctgaactcaaagatgctaaggtcatttatccatcgaaccctgaatttactgaaccagttgatnaaaggttattggncggttnttcaagccatccaaaaggctttttttcaaaagnatncttaagcttgaaggaancgggcccagggtctttangnaggngnnggganggnagganggagggnttccttatncccgnggg

SEQ ID NO: 137007 - DNA, 436 bp, Arabidopsis thaliana columbia
  unsure (1)..(436): unsure at all n locations
ccagggnaagtntttgaactcttgagaatttatttgggagtgcctncatgaacgaactgcagtcgattggagaacctgtntctggaagagctatggtttctaatgctccaggggtcccgcttcgntcagaaaggtcaattggtgaactgagccaaagaaaccaaatnanacctgacggtccccccggagggtanctagcccttccagaagatggtaacttacttgcagttggcggtcatgcaaacccatcaaaatacatgttttttccaggttctcataatcaagagcctgaagtagctttaacatctttnacaagttaggctgccttgaacttctggtccaaggatcgnaaggncccacattgggtgggcaagatggctttttttttcccccanantnccaaacaattnngtgcccaccccttggttaactttna

SEQ ID NO: 137008 - DNA, 518 bp, Arabidopsis thaliana columbia
  unsure (1)..(518): unsure at all n locations
agaaaactaatggcaactcaagccgccggaatcttcagccccgccataacaaccactacttccgccgtcaagaaactccacctctnctcatcaagccaccgtcccaagtctctctccttcaccaaaaccgccatccgcgccgagaaaacagagtcctcctctgctgccccagccgtgaaagaagctccagttggattcactcccccgcagctagacccaaacacaccatcaccaatcttcgccggaagcacaggaggtctcctccgtaangcacaagtagagggattttacgtgntcaatggactnanccgaaggaccaaatttttgggatgccaacaggnggngcttgcggntaattgggggnaggggcccgnttttttttttaaaattgggggggggnaggaccagttgttttggntttttgggtncgggggtttttgggnnaaaagttcaaggtttctttttcccagttttttaaannggnntttcccctaacggggggggnttaaatttttttt

SEQ ID NO: 137009 - DNA, 507 bp, Arabidopsis thaliana columbia
  unsure (1)..(507): unsure at all n locations
gaaaagagttgggaaaaaaatggacgcaagcatgatggctggacttgatggtcttcctgaagaagacaaagccaaaatggcctccatgatcgancagcttcagctccgtgataggttcgtnacttagatcggtttctctgttttnaatttaggattctcccaaaaaaattnactttaagctccttgaaatctttgtccttatagttcaaagctaattagatttnctttagaatattgattcaaggttagtgtgtacttatttctggctaattatagatctttgggtccttatggttcattgataaacaaaagtttggattagagttagtgaaattnttctttaagatgtaactgtgtttgtcctnatttggtgtggttgttgtcaaaactcacaaaagntttcaccatanttnaggggtngnaccaccttttgcaatgcccatngtggtttngtggttnggccttaaccttggntccttttgttgnggnttgttttggggnatcnag

SEQ ID NO: 137010 - DNA, 338 bp, Arabidopsis thaliana columbia
  unsure (1)..(338): unsure at all n locations
gtcagtnccggccntgccgtaaagacatcgaganaacttgncagaaatnataccttctcttaaaatcaacgtcacttgcaaaacagaaggcgaagaaggcattcaagaaggcgatattatgacagtncaagcttggttcactctgaaacgtcccaatggactcataggcgctattcctcactcaccttactttcctttccacaaagaggtaaacttttggnttctttcttgcggattcaaaccatgtntggttctttcagnagggttaaattnatggatgaagctggtgctntagccgctgcatcaaacacttnttactngaaccaatggaccctttt

SEQ ID NO: 137011 - DNA, 363 bp, Arabidopsis thaliana columbia
  unsure (1)..(363): unsure at all n locations
gtctcacagaaagcgtccgtactcagttcaacaacnccattcttgtgaaccttgtttgggaagcagcaaaatntctgaccgactttaaatttnaaggaaaaatgggagagatagcccagatatccccagaagctgcctcgtggattcgtaacatccagcacagtcaatgggccacatacngctttnaaggaacaaggtttggacatctgactgcaaatntttccgagtcacttaatagttngnttcaagatgcgtcaggtcttcctataaatccaaatgttggggagtattcggtcgccaactaatggcnctntncaattgaacngcggtgaaacaaagcaatncaatgggtcttggtattnc

SEQ ID NO: 137012 - DNA, 534 bp, Arabidopsis thaliana columbia
  unsure (1)..(534): unsure at all n locations
gttctaatgatgtctttctctggtcttggagagaaggttctcgaacattacacttttgctaaggcaaacttgatcagaacagccgccacaaatnatctgctggactctggtattcagtggggggcagcgcctccagtaaaaggcatacgagatgctgctgttgagctgttacacactcttgtagctgtccatgcagaggtatttgcgggtgccaaaccactcctggncaaaattcttggcactttggttgaaggtctgattgatacttttctcagtcttctagacgaaaacagatcttgacgncctgagttcaatagatgcaaatgggtttctgccaatttnatgcttgagcttcgaggtatttttaaggcgggtacttgnaggccatattttancggtttattcaanccgnggnctctnaaaggctntgcaaagggnctttntttgggggaaagctttnggggggtttaagcggggccatttnggacaancccggggggggatcaanggganccaccnngtggaagtnaggtc

SEQ ID NO: 137013 - DNA, 438 bp, Arabidopsis thaliana columbia
  unsure (1)..(438): unsure at all n locations
aaaaaaaatggctcaagcagtgacttcgatggctggcttacgtggagcatctcaggctgtccttgaaggaagtttacagatcaacggctcaaaccgtttgaacatctcaagagtctcggttgggtctcagagaaccggacttgtgatcagggctcagcagaacgtgtcagtaccagaaagtagtcgncggtcagtgattggactcgtggcggctggtttagccggtggttcattcgttaaagcttgttttcgncgaagctattccgatcaaaagttggtggtcctccactttcctttccggtggnctacctngnacagataanttcagncccaagcaaagagactttttcatttggcatttnaaaggttagnttttnncaatacaaaccanttgtnaaccaacaggaaggctncaagctttggngcccaaagnattnt

SEQ ID NO: 137014 - DNA, 480 bp, Arabidopsis thaliana columbia
  unsure (1)..(480): unsure at all n locations
aagatagttccttagagctcacaatagatcatattaaggggtttctcgcgaatatatttcttgcagggatagacacaggggccctcaccatgatatgggcaatgacggagctcgttaaaaacccgaaacttataaagaaagttcaaggcgagatccgagaacaacttggcagcaataaggcgagaatcaccgaggaagatatcgataaagttccttacttgaagatggtagtcaaaggaacattcaggttacacccggcagctcctcttatacttccangnggancaatggcttacatcaaagttcaaggggtatgnatatttcctcccaagaggcggatcttttggtcaatnntttcnggcttttcgggnagnggttcccaaaactttttggccaaaccccggaannngttttgccccntcagggggtttttgggttgnnnctctttggttttttgggggncaacaatttnggggcttt

SEQ ID NO: 137015 - DNA, 341 bp, Arabidopsis thaliana columbia
  unsure (1)..(341): unsure at all n locations
caaccntatgggcttacttaatcatctctggnatgatactgtngctggtccacggccagtgaacggccttggcaagcttcgtaaacaccataccttcagtttccnacctagctccggcaatgatcaatcggaagctggaagtgcgagatcgtacggtgaggattcgctaccggaagaagcagtgaaagtnacacgtagtatcatgataattaaaccaccgggttaccaaggcaagttcagcttcagcttcgnctgccggttnaanttccgccgctatcaacttttttttcggcggtgttttccgttctttttaagcaaaacngngnngggtnaagggaccc

SEQ ID NO: 137016 - DNA, 590 bp, Arabidopsis thaliana columbia
  unsure (1)..(590): unsure at all n locations
aaagaaaacaaaatcgacgaactcgttgaatccggagaagaagtgagtnagttcgagaagatggtgtttgctcacggtgttgacaaagaaggacacgtcgtgatctacagttcttacggtgagtttcagaacaaggagcttttctccgacaaggagaagcttaacaagttcctcagctggaggattcagctacaagagaagtgtgtgagagctattgatttcagcaaccctgaagcgaagtcttcgtttgtnttcgtcagcgacttcaggaacgctccaggacttggtaaaagagccttgtggcaattcatcagacgcgctgttaaacaanttcgggggcaattatccctgaattcggccgctaaaaggagcttattcattcaaatggncccatgggtggtacattcccatactttcaaaacattcgggatncttttcatnacaatcccccaagggctttgggggcaagnttggcccttncntgggccatccaaattttnccgttnctttttncaaattnaattgnccnttnacaaagttcccgtaaanncggtggccttgnaaaagntctncttttnccnaggaccctt

SEQ ID NO: 137017 - DNA, 241 bp, Arabidopsis thaliana columbia
  unsure (1)..(241): unsure at all n locations
tggcttacaacaacaaatcttaaacgttttactttgtgctgcactactcaacctcaatggccgcctcaacaatggctctctcctcccctgccttcgccggtaagncgtcaagctttcccccgcggcatntgaagtccttggaagcggccgtgtgacaatnaggangactnntttccaagccaaagggcccatcaggcagnccatggtacggntctnaccgtgtcaagtactaggggaccat

SEQ ID NO: 137018 - DNA, 434 bp, Arabidopsis thaliana columbia
  unsure (1)..(434): unsure at all n locations
ggtgggtagtnagatgcatggctgagggaggacccacgaatgaagactcttcaccagcaccatctacctcggccgctcagccgttgccgaagtcaccatctcctcctcctcctatgaaacctaaggtgagcacaaagtttagcgacttgctagcgtttagcggtccagcaccagagaggattaacggacgtttagcgatggttggattcgttgcggcgttggctgtcgagctatccaagggtgaaaacgttttagctcagatctccgacggtggcgtctnatggttcctcggtacaacagcgatcttgacacttgcntccgctttgtnccngttttttaaagggcataaagcgttttaggtcccaagtccaaaggntatcaatgccgnnaanacggnttangctttttgaancggancggtttnngggnatnct

SEQ ID NO: 137019 - DNA, 450 bp, Arabidopsis thaliana columbia
  unsure (1)..(450): unsure at all n locations
ccttcttccgattctgtacccatatctcacgcttaattacagtattgccactcattaaaaccgtaccatcttaaccaaagcgataacccgtaccaccggttcagctatggaggatttattggaggagaggctaactcggactgactctgtcgggcataaacgagtcagagacgggttagacctcgactcgccggacgtgaagcggttaagagatgattttgttcgatgactcggggcttgacccagtgagtcaagatcttgactcggtgatgaaggatttcgngaatnaggtatcgaccacgacggnggcgttaaagtncggtnaaacttcagcccggatcttngntacctttttgaagggtttnttaatnnncggagcttggttttncnccccncggtttnggcancccaaaaacggaatttccccccnngttttttgggaacgtttgc

SEQ ID NO: 137020 - DNA, 460 bp, Arabidopsis thaliana columbia
  unsure (1)..(460): unsure at all n locations
agtagctaccactccactcttttcgtctctctctctttttctctctatatacgtcgccattgttgttgcattcgaagcttttatagaagaagtaatctctctctttctctatttctctgtattactttttttgtggagaagaagatggagaaaaacacaccggtgaggaaaccacacatgtcgacggcggatctactcacttggccggagaatcaaccgtttgagtctcccgccgccgtagcttctcgctccgncgccagatcgcaccagccgtcggatggaatcagcaaagtggtatttggaggacaagttacagatgaagaagttnagagctttnaacaagaggaagnctttgtttcaaattancaaggntggaaagggntncncaggggagtggaatanttccccctgtggtnttgaaggaaaatgattggnttntanngtnagcaaaggnnttatt

SEQ ID NO: 137021 - DNA, 406 bp, Arabidopsis thaliana columbia
  unsure (1)..(406): unsure at all n locations
gaaacacaaaaaatgcagaatcaaaggcttattaagcagcaacaacaacaacaacaacagcaacatcaacaagctatgattcaacaagctatgatgcaacaacatccttctntttatcatcctggtgttatggctcctcctcagatggagcctttaccaagtggaaaccttcctcctggttttnatccaactacttgccgtagtgtgtatgctggaaacattcatacgcaggtcacagagattcttctttcaagaggtttttgcaagtactggtcctattgaaagctgtaaacctcatcagnaagggttaggcatcatatgggtttttnttcactacttttgntnnganntntncctaggntnggtttaangnctnttaccgggagggcattttttttgggcaccc

SEQ ID NO: 137022 - DNA, 398 bp, Arabidopsis thaliana columbia
  unsure (1)..(398): unsure at all n locations
cctagacatcatcaatgatctgctggaagacgaacagtgcagcaacatggtgtataacggaagcatattcaatccacaaccgcaagtnttcaacgggcagtactcatcataccatggtgagttattgtctggtggcaggaccaggagtttcggagaggaaggattgcattacatggcacgtggaccatatggtacagacggaatgatgcngagacagtggcaaatnacggacatggacttgtngttgccagcaatgaggagcaatggaatggaagnttngnaccatcatcagcagctaattaccatcaccagttnacttttggttttngnccgntttgnaattccaagttttttacggcctgggtatttaaattngnttccaccggatttanggccat

SEQ ID NO: 137023 - DNA, 446 bp, Arabidopsis thaliana columbia
  unsure (1)..(446): unsure at all n locations
tttcaccacataaaaactcataaacctcgatcgaaccaaagctaaacgaaaaacttaaaacccaaatcttatcactactctaaaagaatctncatcatggcctcagtaacctcagccaccgttgcaatcccatctttcaccggccttaaagcctcaaccatcaaatcatccgtcaccgtcagaatccaaactgctgctgttgcatcaccgaagcttacagtgaagtcatctctaaagaactttcggagtcgcggccgtagcggctgnagctttcaaattgctttggnccgggaacggccattgcaatagaaggtcctnttngggagganggggnttggggtccgttaggtttttatttcccnaacngnttttctcttttaggctnaaaggggggggggaggatttttttttnnaangnacaaccggntngggtaccccccacaaat

SEQ ID NO: 137024 - DNA, 444 bp, Arabidopsis thaliana columbia
  unsure (1)..(444): unsure at all n locations
tttttnacaacaatctccgcctgtggtagctgtacnccgtgcggcggaggttgcccctctcccaagccaaagccaactcctaaaccaaccccaagccctagctctggctcgagcaagtgccctaaagacaccctcaagctcggtgtctgcgctaatgtgctcaacggcctcctggacttgacccttggcaagccaccggtcgagccatgctgcagcctcatccaaggactcgctgatgttgaggcagccgtttgtntctgcaccgctcttaagggtaacatttcttgggaatcaacttgaaccttccaaattatctttaaagncntactncctnnaattgttttgcagnaaaacaaacttttcttcctgggtttccaattgctaaaaancccattatttgggnttatnanttttnnaattcancttatggtgggaantaaattt

SEQ ID NO: 137025 - DNA, 552 bp, Arabidopsis thaliana columbia
  unsure (1)..(552): unsure at all n locations
ggcttacggtggatacctaggcacccagagacgaggaagggcgtagtaagcnacgaaatgcttcggtgtcttactcggtggtaacatcactctcctccgtggtattctctactggattgctcagcttcttggctccgtcgccgcttgtttcctccttagctttgccaccggtggcgagccaatcccagcgttcggtctctctgccggagtcagatcattaaacgctctcgtcttcgagatcgtaatgaccttcgggctcgtntacaccgtctacgtcacagccgttgatcccaagaacggtagtctcggaacaatcgnaccaatcggcataggtttcatcgttggagctaacatccttggcttggtgggagcttttcagcggagtttccatgaacccagccgttgnttttnggaccagccgtcgtaagctggnccgtggnccancanttgggtttaattgggttgggcnnttaatttggtggtggnttgccgaattattncgnntttttttnatggtgaaattnccangggaaatttntcnaccgnttntta

SEQ ID NO: 137026 - DNA, 477 bp, Arabidopsis thaliana columbia
  unsure (1)..(477): unsure at all n locations
ttaccccagttaaagactacacaactcagtatcatgtcatgtttctatcacaaattctacacacacaatcttgtatgtnactgtgaccttatctcatttnctttgctcttttcagccattttggcaggtcataaattattcaagcagtcgaggaagaggggttgttggtgttctagaagctaattttgttgagccaacccataacaagcaggattttnagaaaactgttcttcttcagaagcttgaaaaccgtttaaaggaaatnacggtggagtattggagctgccattgtgtgttgnttgggtatcangtaaataagaagcctcgtctttcagataccccaaaaaagttcaanctgccgggtaggcaagcattaaggtncncctcccagggtttccaaggagnttttcccncaaggggatnccaanatttttccccnngggttcaaccnagccnatncttttgnggaggggggaa

SEQ ID NO: 137027 - DNA, 410 bp, Arabidopsis thaliana columbia
  unsure (1)..(410): unsure at all n locations
ggagagtacttctagctcgatgtgttgtttccagtagagggccaggcctccacccccagggctgtgcggagatatgagtaaatggtttgagaaattcgaccattgaagttttttaagcaccacttcatcagggtttttcgtctccatgaggaataggatgtctggagagattgttttctgaatctctctcagtcgttgaactgtcatgggattccccagcccacagcagttccagcttgcaagttttaaggaagaggnggaggtggattnggaaaatccaccnttcccnttcaaaagtggcttgggataaattggccttntagggaggngccttttcttngaagaagccaagattttccttgcaaacccctggngnttttngtcgtnntctaagnaagnggnttnacttt

SEQ ID NO: 137028 - DNA, 502 bp, Arabidopsis thaliana columbia
  unsure (1)..(502): unsure at all n locations
gaactacaacatagacgggaacaaagagatgatagcgtttggaatgatgaacatcgttggttccttcacatcttgttacctcacaaccggaccattttcaaggtcggcagtgaactacaacgcgggttgcaagaccgcaatgtccaacatagtgatggcgattgcggntatgttcacactcctcttcctcacaccgctttttcactacataccactcgtcgtcctctctgccatcatcatatccgcaatgctcggactcattgactatcaagctgccatccatctctggaaagttgacaagttcgacttnctcgtctgcatgagggccctacggttgggggtcgtattcggcagtgtagnggatttggctcgntcgtagccgggtggngggtatctntnaggcgngggttttttcctngtttttttttcggggggcaaaaanttgcggggnaagggngaaaattnccnaaacagattntttttttgggncccctnnggngnt

SEQ ID NO: 137029 - DNA, 366 bp, Arabidopsis thaliana columbia
agaacaagaactaaactactactagtcttcaccaagaataatatatcaacacacatagtatactcttcttggaaggcaaggaacatgaatcaagaagctgcgagtaaccttggacttgatctgaaactaaatatttcaccgtcgttggattcatctttgctcactgagagttcatcgtcatcgttatgctcggaggaagctgagggtggaggaggagaggctaaatcaatggtggtcgttggctgccctaattgcatcatgtacatcatcacttctttagagaatgaccctagatgccctagatgcaacagccatgttttgcttgattttctcacaggaaacccatagcaagaagagcactaagtt

SEQ ID NO: 137030 - DNA, 438 bp, Arabidopsis thaliana columbia
  unsure (1)..(438): unsure at all n locations
agcagaagtgtgacaagacgattctggattctggatacagctggaagagaattaaaagaaaaagaaaaacacttccaacgaagaagatcgatttgcttcgagtctctgaaagaagaagaaaaaataatggggcgtatggattatctagcgatgaagaccgacgacgtcgatacggtggcgttagtcaattccgntatggaagagctcaaggtcgctgcgaagaaactntttagcgatgtttcgaagcttggtggnttaggcttcggtgtttcttttctcaaatnnctcgcttctttcgctgccatncaccttnttaatttttgggttcgtnccaatctgggntacccaaannngggtttaccatcaattccctaattacccttacaatncttnccttagcccttccntnggtggtaattttcaaccttcctcnagtgg

SEQ ID NO: 137031 - DNA, 414 bp, Arabidopsis thaliana columbia
  unsure (1)..(414): unsure at all n locations
aaaaagtccgaatccagtttgcaattaataacttcccggcggcaaaatccaaaagggtttgcntctncgtgctctgcttcantttcaattggttgtgtatgaattaagtgcaattctatctgttgcagcagtgaatttntgggttattgaatttgggagtaatgagtggtgttccaaagagatctcacgaagagggtgttactcatccatctncttcttcatcagtagcaaaataccctcacgaggattctggntctnaccctaaatcgccgcatcagcctgtaacggcaccaccggctcaggttcattcataaccnatcaaccaggcccatcaagnatcccccaatcttcaaatcttcaatcttaagcctttaaccctnancctcnaggggggntttcctttancccttnnat

SEQ ID NO: 137032 - DNA, 518 bp, Arabidopsis thaliana columbia
  unsure (1)..(518): unsure at all n locations
ggatattgaaagaattgaaggagttgcaaagagaccctcctgtatcatgcagtgcaggtccaacaggagaagatatgttccactggcaagctactataatgggtccgaatgaaagtccttactccggaggtgttttccttgtcaatattcatttccctcctgattatccttttaaacctcccaaggttgtattcagaaccaaagtgtttcacgcaaacatcaacagtaatgggaacatatgtttggncattctcaaagnccaatggagccctgcccttaccatttctaagggtttgaaattctatatatgtatttaggttaatttgtcaatatttttcctataattccctantatcaggatttgggnattntaacccanggaggttcccaataggggaacnccaaatttccttaaccattttggggnatttttagggggcttcctccctaaaatggcnctnttttnancaggtcccaaacccttnngggcccttttgggccaanggnngnccnnattt

SEQ ID NO: 137033 - DNA, 540 bp, Arabidopsis thaliana columbia
  unsure (1)..(540): unsure at all n locations
ctcgaaacccttacctaaaaccctaatccgccacatccgtgttttagcctcacgacgaatcacgatgcaacgcagactcgtaaggttaaaaaaagagtatatctacaggaaaagcttggaaggtgatgagcgtaaggtctatgagcagaagcggctgataagagaagcccttcaagaaggaaagccgattcctactgagctccgaaacgtcgaagccaagcttcgacaagaaattgatcttgaagatcaaaacacagctgttccgcggagtcatatcgatgatgaatatgcaaatgctacggaagcagatccaaagatttttttgacaacttctagggatccaagtgctccgnttcatccgattcactaagggatttgaagtttgtnttnctaactctcagggnttaaattcgtggtagtnaaggcattttttgggtcattgaactttttcgtnccntgntttttccttgaggtttnattggttnatggnncctggggtcccnatgggcncataannntcattnccnttggccnctnaaa

SEQ ID NO: 137034 - DNA, 427 bp, Arabidopsis thaliana columbia
  unsure (1)..(427): unsure at all n locations
gaaatgaaccgtgcttcttcaccacttatttttcatgggattctactaaagctactgtgcaagggaattcctaccagaagaaggcagcattattacttggtacacaccacgttgtggaggatcagtctagcagtgggaaccaaggaccaaggcaaagggctgctgctttagctgccttgacttctgcctttaattcttcttctnggagaacaagctctccgagccgagacagatcaaatggaagtcaagggggtncaagacaaagggctnaagctttagccgncttaacatccgcattcaattcttcaccatcatcaaaggcnaccttcccggaagntcaggattgacaagcccagggtggttancaaaggagcngcaagaagtggctntntttttnccaagnttcttaactncntgngaagnngga

SEQ ID NO: 137035 - DNA, 456 bp, Arabidopsis thaliana columbia
  unsure (1)..(456): unsure at all n locations
agatccgttctttggagcgcgtactacagtatggagagcagaacattcgacgtgcagtgccnttggctcttggtctcctatgtatatcaaacccaaaggtgactgtaatggacactttgagcagactaagccatgacagattcagaagttgcaatggcagcaattatctcccttggattgataggcgctggaaccaacaatgcaaggatagctggcatgcttagaaatctctccagctattattacaaggatgcccagncttcttttctgtgtgcgcatcgctcaaagggtttttncatatggggaagggtctcttaactctnaatcctttccactccgaacgggcttntttcctntnggncaacccggactttccttgggtataaggngncaattttttgcaatnnnatncctttntnattgaaaccccntttttacttggggngaatttccact

SEQ ID NO: 137036 - DNA, 300 bp, Arabidopsis thaliana columbia
  unsure (1)..(300): unsure at all n locations
gtttgtttggaggcttaaatcgcgcttaaggtggtctcggaagagtgatcataataatattcagtgtagttatgatctccggagctatcatctgantttcgacgacggttggtctcgccgacggtgattttaattacatagacgttgctattattgtctatatatggagcctttncttttcatattttgtagtaaattaaatnctcaatctgaaaagatgattttttttgtttcgtgttttcttgcatacaaaattgcaagancttgatattnctattcataggctttaacttttgatcc

SEQ ID NO: 137037 - DNA, 468 bp, Arabidopsis thaliana columbia
  unsure (1)..(468): unsure at all n locations
ctctttgctctctcgccctctcttgctcttctgggttcgtnttcctcggctagggtttatcagtggtttgtnaatggaggcttcatcatctcaaccatccgattctnctnatcaaactgcttccaagttcctttctnacctcccgtctcgaggtttcttgtcttctaccgtcgtctcttccaatccgggaagcttgcgggtctacatttgtaagcatgacacatctcccccagaaggacagcttatcaaaacaaaccagcaaaatatactaatcagatctctcttgttaaagaagcaaaaaggcggntctaggttctaaagnctcaaaaaggaactcctgaagatgggtcctaacaaagaggggctgcaaaataggagctctttganggcagaagttcagnttaaanagnctggttatgnatnttggccaggnaggtcnaagcantcggaccaggcgaaangganttc

SEQ ID NO: 137038 - DNA, 269 bp, Arabidopsis thaliana columbia
  unsure (1)..(269): unsure at all n locations
gatgaggcttaatggggattcgggtccgggtcaggatgaacccggttcgagcgggtttnacggcggaatcagacgattcccgtnagcagctcagccggagattatnagagctgctgagaaagacgatcaatacgcttctttcatccacgaagcttnccgcgatgccttccgacacctttncggtacaagantcgctcttgcttaccagaaggnggtaatatacactaaatnatatttntctgagtttccatgagatttttnaattattt

SEQ ID NO: 137039 - DNA, 336 bp, Arabidopsis thaliana columbia
  unsure (1)..(336): unsure at all n locations
aatcaaaaaaggaacttgatgcacttctctcagacgaatccctagccagcgttccattcctcattctaggaaacaagatagacataccgtatgctgcatcagaggacgagctccgttaccatctcggcctntccaacttcactacaggaaagggtaaagtgaatctaacggattcgaacgttaggccattggaggttttcatgtgcagcattgtcaggaaaatgggttacggagaaggtttcaaaatggggtttctcaantaccatcaaagtangnccaatncancaccgtttgnggtngtgtattaacgccggnaaagcnttnttttcnaanaaa

SEQ ID NO: 137040 - DNA, 407 bp, Arabidopsis thaliana columbia
  unsure (1)..(407): unsure at all n locations
aaaagagaagagattgcggagaagaacggagggaggaattttaattctnacggtgactgttgtcctcctctaaggacttagggtttgatttgaatagancaaatttctcanatctncgtattccttgcgaggttgtgataatttgggagttgcgtgggttgctacgaaggagagtgatggatgctcaagcgaagaagaaggccatnttccggnctaaactcaacgccaagaagaaagacacccgcatagattctcctctcgttaggtacancgaatcanaccagccttgtgtgtcgagtttgcaatgtcgtcttgnaatctgaatcactctgggatgttcatcaaagcttctcgtnaagcaccacggtgggcntttgatnagtctcaanggnttngttcagcgggna

SEQ ID NO: 137041 - DNA, 466 bp, Arabidopsis thaliana columbia
  unsure (1)..(466): unsure at all n locations
gaagaaaagaacagagaaaacagaggaagaggtgagatggaggaacttgtagggcttctaagaatccgagtgaagagagggatcaatcttnctcagcgagacactctaagcagcgacccttttnttgtcataaccatgggatcacagaagctgaagactcgtnttgtggaaaataactgcaaccctgagtggaacgaggaattaacccttgcnttaagacatcccgatgaacctgtgaatctaatagtntatgataaagatacattcacatcgcacgtcaagatgggagatgcaaagataggtattaaaccatttntggnaggttcacaaaattggggttttcnaagaccttcccagnttgggaccaggngntcaaaagagnagntttttgcccccaccaggggggaaanctttttttggctttaagcngagncagttttcggcttcccataanttgggcaaanat

SEQ ID NO: 137042 - DNA, 330 bp, Arabidopsis thaliana columbia
  unsure (1)..(330): unsure at all n locations
aggctgtnaagctgccgcatcaaatgtcctcggaagcggccgtgtnaccatnaggaagactgtcgccaagccaaagggtccatcaggcagcccatggtacggntctaaccgagtcaagtacttggntccattctccggcgagcccccgagctaccttaccggtnagttccccggtnactacggatggnacaccgctggtctatccgccgacccanagacctttngccaggaaccgtgagctagaagttatccacagcagatnggccatgctcggagccctaggctgcgttttccctnagctattggctagaaacggagttaaagtncgga

SEQ ID NO: 137043 - DNA, 426 bp, Arabidopsis thaliana columbia
  unsure (1)..(426): unsure at all n locations
ccgggaattacccgggtncgtacccacgtgtccgctncaatnnttnagagaaggcaacttccggctctcagcgnagcaaagaatccgttacaagcaccgctgaatccgtcacggcttctctcactgatgctgagaaaaccgttaaccaaaccgccaggagcactctaactnacgccgagacanccgttgcagcatctnttgaaacggtcaagaccgaggctgcagtngnaccagncaaagcgtctggtgtgtctacacaggtcggtattngtcacaaacttttacatgtttttnatcgtcccagcaaaactaacaagncacgtttttaattttgaataggctaaggntgcagtggtcaaagcttttttntagaggtatagaaggagccaaatctttgctttcaaactttcgaagcgaggagcagcg

SEQ ID NO: 137044 - DNA, 407 bp, Arabidopsis thaliana columbia
  unsure (1)..(407): unsure at all n locations
gtgcatctcaagatgggagattaatcgtgtggaatgctctaacgagtcagaaaactcatgctattaaactcccttgtgcatgggttatgacatgtgctttctctccaaatggtcagtcggttgcntgtggtngattagacagtgtatgtcctatctttagccttagctcaacggcggacaaggatggaactgtaccggtttcaagaatgctcactggtcacaggggatatgtttcgtgctgtcagtatgtcccaaatgaggatgcccaccttatcaccagttcagggtgatcaaacttgtatcttatgggggtgtaacctacctggncttnaaaacttnntgnttttttggcggtggattttcaagcntnggcaaanctncctgntnngtncctaagggtcttaaaa

SEQ ID NO: 137045 - DNA, 426 bp, Arabidopsis thaliana columbia
  unsure (1)..(426): unsure at all n locations
gaagaacaacaacactaagcaaaaaagaaaagctcaagccgagagagacaatgncatcaacattcacgagctcaagcagtgttcttaccccaacaacattccttggccagactaaagcctcaagctttaacccccttcgtnatgttgtntctctcggntctcccaagtacactatgggaaatnntctttggtatggacctgacagagtgaagtacttaggacccttttccgttcaaactccgtcttacctcaccggagaattccctggcgattatggttgggacancgncggttttatccgcagaccctgnagcctttgncaaaaacagaggctnttgagggtgntccattgggaggatggggcaatttttggggagctttttggttgcattaaccccntgaaagtnntttcaaaaagtngggtnc

SEQ ID NO: 137046 - DNA, 501 bp, Arabidopsis thaliana columbia
  unsure (1)..(501): unsure at all n locations
ttcaaccggagctctgatattgaccctaaaaaactgtttcaaaatctgtnatttgcaggctgtaaacttcggagctaactcagaaaatatgcaagtnttggtaactggattggacccgaacgtgatgagagtttcgggatcaaagaagacagtacttacctctaccaatgtgatggatgaaaatnccttctcacagccagagaaggttgtaccacatgaaagcttgctagagttggcagaggaggatatgaccgttgttctcccgccacattcccttttcttcattcgatttgttgaaggaatcttgcaaagataagnattgccaatttctgatttcttccttccccatcaggaaaaacttnccacttgtgtgaaggggggaaccaattgccaaagggaaggtanccaactttncatggtcaaaaaantcttttntngggggttcaaaatntttatntccattccnntaaaatgctttataaacggncccnttgnggnnna

SEQ ID NO: 137047 - DNA, 443 bp, Arabidopsis thaliana columbia
  unsure (1)..(443): unsure at all n locations
gaggtattcttgaacaagaacgtggaccgtgcgatcaggacactctcggtgtttatagcaatctagctgctacctatgacgctatgggaaggatagaggatgcgattganatattagagcaggttctgaagctgagagaggaaaagctcgggactgcgaatccggattttnaagacgngaagaaacgtttngccgagcttttnaaggaagctgggcggtcgcggaactacaaagccaagtcgctccagaatctgattgatcccaatgcaagacctcccgaaggaaagagtcttcttgctaagaaaatnggncccagccttcggttttcaaagttccttnagggnaaaaatttattccattnttaaaaataaaatcnatccccccatnttatattcnaatantttnanttttaattggttnattggtaatattttttaacctgg

SEQ ID NO: 137048 - DNA, 433 bp, Arabidopsis thaliana columbia
  unsure (1)..(433): unsure at all n locations
gggtgacggagctaatactactgtggaagctggtggtttaanctngccgtcgccgccgtcttccgtnaccagtnaagaatcaggagcttcttctaacaacgatcacggtggaaatggaatccatgatgagatcggagtccacgtggcgagatccgacggtggtgagagttttaagcgtgatatgagagagcttcacgagctcttgtctaagcttaatcctatggctaaagagtttattcctccttcacttactaagccagttgtnaatggttttaacggcggtttcttcgccgttaanaaatggcttttttgctgccggaaaattttcccccgtcaacgnagncgggtagctttnngtcgggaagaagtccgttccggacaaccaagggggaaccgggggaattnattccnttngggccaantttnggnntta

SEQ ID NO: 137049 - DNA, 417 bp, Arabidopsis thaliana columbia
  unsure (1)..(417): unsure at all n locations
ctcacaacaaaatctttgaaatggcgatctctaaggcttccattgttgtnctcatgatggtgattatctccgtcgttgcatcggcacagtctgaggcaccagcaccaagtcctacttctggntctagtgcgatctcagcgtctttcgtgtcagctggagttgcagcagtcgcggctcttgtttttggctcagctcttcggatctaagtnactgtgatggtgatttcgtacagagattgtttttgcggtataggccattcatcattattcgtcgtctcgtgtgtattccgaagcaagcttatagnatctcatttttctattttntccctcnttcttcttcgnntttctatccttaaaccttccataatcnnntattgagggnnatnactatattcctttttttagaggaantattggg

SEQ ID NO: 137050 - DNA, 460 bp, Arabidopsis thaliana columbia
  unsure (1)..(460): unsure at all n locations
ctcatctncttcttatctccctccaaagacggcgactgtataatctatcatttcttcacagtaacgctttcatcggaagatctcgccggaaaaaaacttctctctgagatcagatctcttacgattctcagctcaatcttatctttncctttgttgtgctgcttttnactctcttctgcgcgacgaatttggccttgttttttgtttgtttgtcgtatccgacgcggaggtattgagaaaccgtggcttaagacggaggnagaagatggaagctaacgggattnagaacttgacgaatccgaatcaaggaaagagagtttataaaggagncatcataagcaatgagctttgtggataaatcaagtgtagcnctaccgnnttgttaaaacataatcaaacggttcctngtccanaattgtngtgggcactttttnaagaagnatttnatcaggccccagna

SEQ ID NO: 137051 - DNA, 426 bp, Arabidopsis thaliana columbia
  unsure (1)..(426): unsure at all n locations
accggncccggtaattacccggngtgcgnacccacgncgtccggtacggtcaccaaggaggaggaggacgataccaaggaggcggtgggcgacaaggaggagggggaagtgggggaagttactgccgccacggctgctgctacagaggttacaacggctgctcaagatgctgctcgtatgccggagaagctgttcagactcagcccggtcactaaaacaatatattaaccaatcaccaccatgcatgtattgcattatgtatgtatgattttaagtaaaccatggtgcgtttgtaatgaactgcctcaagtttttnaggcactatagattaagaagagacctatgggaataaagtttgattatgtaatgttttatgtggtttnagttgtaatactngctgtttgcataataaaatcgtttgtagtt

SEQ ID NO: 137052 - DNA, 440 bp, Arabidopsis thaliana columbia
  unsure (1)..(440): unsure at all n locations
atttgtttatgctttaaatttggtgagactgacgaaagaatgagcaataatccacaaggaggattttnatcttagtcgacaatatttcgttgaatccaggntttttttggtttcattttaaaaagctttgtaaataataacacataatttacaggnattccngtggcatttggcaatagagatggaaggtcaaactcatgatgctcaaaacaatgttcctgagcatgncaatccattgatgaatgtgaagngtccatcaagnaacttgttttctaaggaagatgcacaatgtttgtctgttttttgcaacgggggaatggttncagattgtttagaagcagtccccaaggtntcatntgnggcccttanttttccnaggcaattttttcccccaaaggggggggaancttttggggnctnnttcttaaaagggtcaaaaa

SEQ ID NO: 137053 - DNA, 456 bp, Arabidopsis thaliana columbia
  unsure (1)..(456): unsure at all n locations
gaatatcgacggcgacaatttctctctccggctaacttttttctagagaaagctatggcggacgaagaagatgagttactggagacagaactaagttacgaccagaaaaaggaaatcgccaagtggtttttcctcaacgntcccgctggagaaatcaattacgtcgctaaaggtacttagatgcatcgtacatacatatttccgacgattcctccgatgtgtccctcaatgagaagatttaaaggcggtttttagcgatgaggaagtgtacaatgaagcagncatggaagcatttccagtntaccaacaaaactcacatgattttnccttnaaatgcccantggagctggttnatgtnattgntctcaatcttacagntgaaattaaatgaaaaatgaagtaccttgntncaagnaanttncccanggttggccttaggttgntcaatttnaacaa

SEQ ID NO: 137054 - DNA, 431 bp, Arabidopsis thaliana columbia
  unsure (1)..(431): unsure at all n locations
tgtgactgctgatcacggaaacgcagaggacatggtgaagagggataaatctggcaagcctgctttggataaggaagggaagcttcagattctaacctctcacacactcaagccagtgccaattgctattggaggtcctggtttggctcaaggagtgagattccgtaaagatctggaaacaccggggcttgcaaatgtagctgcaacagtgatgaacctccatggatttntggctccctctgactatgagcccaccctgattgaagtagtggagtagaagaattgagagccttatcagtttttgaagagagggctgaaactctctagttatccttttgttgctttttctaataataagaggtttacacacagnctacttgtatttttnattttggctttaggccaaaacattgnaattccatctttgaatg

SEQ ID NO: 137055 - DNA, 395 bp, Arabidopsis thaliana columbia
  unsure (1)..(395): unsure at all n locations
aatccttcaagatttcaacacttactcctgtcttcttcaagtncttccatgcatcaacctggtgcaatgttaatgtctgcagcactgacgagctctcacagaaactacgctgtggtagaggatatagcagatgcaaganaatttnntntttgcttcatctgtccagctgaaaacgttggaggtgtgattggaaaaggcggtggtttcattaatcagatcaggcaagaaactggtgctactattagagtcaatacctcagaaactgatgatgatgattgcntcattttcatatcatcaaaaagagttctacggnggntcaatctccagcggntgnattgcagcaatacggttttcaacngcggttgcagnnnggnaattttggaaaaggttgcaaa

SEQ ID NO: 137056 - DNA, 434 bp, Arabidopsis thaliana columbia
  unsure (1)..(434): unsure at all n locations
ttacaacacggaaaccgtggnacgtattgagcaacaccaagggacagatgtctggcattctactcagaagacttgatacgggtgaagaaactgagctggaggcaaaaggattgttttatggaatagggcattcgccaaacagtcagttattggaaggccaagtcgaactcgacagctccgggtacgtcttggttcgggaaggaacatcaaatacatcagttgaagggtatttnctgcaggagatgtgcaggaccacgaatggagacaagctgtaactgctgctgggntcaggatgcatagctgcttttttcagccgnggagnttncctcacaantaacaatcttccttgttggaatttcaccagcctcaaaccttnaggnggnccaggaaaggattttncacaacgggggtntnccaggnaaaatttttgnant

SEQ ID NO: 137057 - DNA, 376 bp, Arabidopsis thaliana columbia
  unsure (1)..(376): unsure at all n locations
ggcgttgttgcctcggtcatcgaaggaggaagcaagggattggccaagatgttcgtcgttgccggaaccggtgttgccaaaggagctcagaagtcctcggacttctattgcaagcatcgcaaagcctacgacggtcctcaaggactctcggagcagcagaaggagaagctggagtcgcacgacacggtgagcggcaaattggaaggctcgaccganagtttggtgaagggcaccggnagccgtggtgctcggcgtgaagaagggcttccnattcgtcggggacaaagtntcggacaccgtcaacagcgncacgnancccgtnaagaacaccgagttngtncaagaagaagnatgngaagaanaagaanaagnaggg

SEQ ID NO: 137058 - DNA, 353 bp, Arabidopsis thaliana columbia
  unsure (1)..(353): unsure at all n locations
gggaactntcaacaattcaaacagcgggaacttgagattgcaaggtagttggctcaaaggcttacttaacacagccaaaccctccactagtacagagatagggaacaaagatgaagatgcaaatnatgcagtcaccaatcagaagaaacaaagccgtgactctaatgtnctactgtttcantagcaaccgtaccgntccaccacaatgcattcggttagctgtatatccaccggtctaagagtcacgcactattctcctcgtctgtacccattactctgtatcaacgttggaacctgtnatttttctttgagnttttagctcacgngtgctttttntttaaaaananttntnt

SEQ ID NO: 137059 - DNA, 420 bp, Arabidopsis thaliana columbia
  unsure (1)..(420): unsure at all n locations
ctcaaatccaagactttcatgcttcggtctgatgaaaaatagtagagacggaaagagttatagcaccaacctggcgttcactcctccagagtatctcagaacaggtcgtgtgacaccagaaagtgtgatgtacagttatggaactctgttgcttgatcttcttagtggaaaacacattnctccaagtcatgctctggacctcatacgggacaggnacattcaaatgttgatcgactcatgcttggngggtcaattttcaagcgacgacgggactgaactaatacggttagcttctagatgcttgcagtatgagccccnggngcggcctaacccgaagtcttttagttacttcaatngatcccccctacagaagggtnctttgagnntccttnttnatnaaactnnatgggaatccaagna

SEQ ID NO: 137060 - DNA, 460 bp, Arabidopsis thaliana columbia
  unsure (1)..(460): unsure at all n locations
agagttttggcgatgaagaagaacgcactttggctactgtncattctggtgttaccggcgatagctgtggtaggaaaccggagaagaaggtaacaatttcatcctctgggaggaaggaagatgaccttntaaccggtttgcccggccaaccaccggttaacttcaaacactacgccggttacgtgaatctggggcctgaacagaagcaaaaggcactttnntattggttcttcgaagctcaacaaaactnttctcgtcgtcctctcgtcctttggctcaatggaggaccgggtttgctcatcaatagcctatnggagctgcacaagaacctagggcccttttttttgttcaagggnaaagggtgggaaaattttccctnaaaanaatttttttttgggaanaaaaggggccaannntttttttnttttgaaagcccccntttgggggtttgggntttcng

SEQ ID NO: 137061 - DNA, 432 bp, Arabidopsis thaliana columbia
  unsure (1)..(432): unsure at all n locations
gcatcagaatgggttacaatgactttggagatttctattacgcatgtggtatgctcggagatgctttcaagaactatatccgaacacgcgactactgcactacgacaaagcacatcattcacatgtgtatgaatgcgattcttgtcagcatcgaaatgggtcagtttactcatgttacaagctatgtgaacaaggcagagcagaatcctgaaacccttgaacctatggttaatgcaaaactgcgatgtgcatctngattggctcatttggagtttgaagnaagtacaaagctagcttgcttcgaaaagttccttagntgntaanccccgnacctttgggaattnccctttantggaggnccattnnnccccnaaaaganttttccccccccttnnggggggcctttttttnccccggggaaaattttttttt

SEQ ID NO: 137062 - DNA, 457 bp, Arabidopsis thaliana columbia
  unsure (1)..(457): unsure at all n locations
atcatgaacctccaattaaggtggatgagtatgcttttaattcgaaaggagaagtttcacgtaatgatgaaatgaaacagcagtctacacacttcaaggatatcaggaaccaacttctagaaagactgaatttcggatattctggttctgattcgctggatcagttgcagattataaaaggacagcgaccttgaggaattgcgagaactaggatctggcacatttggcacagtttatcatgggaaatggcgaggcactgatgttgcaatcaaaaggatcaaatgatcgatgtttttgctggcaaaaccatctnaggcaaggacgnatgatccgatganttttttggaattaggcacaggaaccttagctgggctttnnaccatcctaacggncgttncttttttantgggggtttttccttggnatcnncctnggggggtcnttttngnaaanaatt

SEQ ID NO: 137063 - DNA, 383 bp, Arabidopsis thaliana columbia
  unsure (1)..(383): unsure at all n locations
aaaaaaaagagggaaaatctccttgttcaatagtcaataagttagccgctatcgatctttagaaagatccgtcgatgagtccatcccatggcgaccggaccaccgcatttncctcgacggatctagtcatgttgagcatgacatgtttcaggcttaaccatatggagaagggatgataacgagatctctctagacgtggatgggattttcggttcaaagatggaatattcatataaattcacatgcggattatagttaaatcggaataaagttttgataagtggactctccttacctaagtggggatggtagtccagncttgtatcaatatatatattttggggctaacttagcatgcattttggntcattatcaaatgtgtt

SEQ ID NO: 137064 - DNA, 427 bp, Arabidopsis thaliana columbia
  unsure (1)..(427): unsure at all n locations
caaagggaatgaactacttacacaccagccacccgactgttgtacatagggatttaaaatctccaaaccttcttgttgataaaaattgggttgtgaaggtttgtnattttggattgtcccgcatgaaacaccacacatatttgtcctcgaaatcaactgcaggaacgcctgantggatggctccagaagtgttgaggaatgaaccggctaatgagaaatgtgacgtgtacagctttggtgtcatattgtggggattagctacttcacgngtcccctgggaaaggtttgaacccgatgcaagtcgttggagctntnggnnttccagaatcgacggctttaaatcccagatggtatcgntnttaactnttgganagataatccgngatttttgnaacggnncncattttgggcatcgtttaanagttgt

SEQ ID NO: 137065 - DNA, 390 bp, Arabidopsis thaliana columbia
  unsure (1)..(390): unsure at all n locations
agtaattggntcggatgatgatgatgacaatagggattatgtcgagactttatacatgtatcggtctcttgatggtccaaggaatgatgcaccaaagttcgtcacgattttatagaacgaggagcatttccgtgtttccgttttttaagacgggaatgaaatgggtaagtgtaggaagctcagatgatgatggtggtggcatcagaggcacactncatgattttttgatgatgaatgattggtggttggggnctttggaggaatgcaagatttgttggnatcattaatttncctttttttaatttttggggttcaaaaagattnttaattttgggnggttaaggttggnccaatgggattgnttntnctttttggggncanccggnnttt

SEQ ID NO: 137066 - DNA, 402 bp, Arabidopsis thaliana columbia
  unsure (1)..(402): unsure at all n locations
catggnttctttaaactactaataatggatttttgttgtgtcttaatgaaataatgggagcagctgaagcaagagcattgtggcaaagaacagctagtcgttgctttgttgttcatgaggatnctaagatggctccgaggttagcttgttgccaacaccaacaatcttcttcgggcaacaccgaaaaaaacagcttttcttcgggaagttttggagattcctctgatttcncttgtgataccaaatggtggcttaaggggtcaactggatttnatgagggggttacaaacncctttttttgaagnttcccaattcaaagaaattcccctgaattttttgngccttnaacngggntnccgggatggngggggntcnccncttttttttttgaaaaaaantttt

SEQ ID NO: 137067 - DNA, 383 bp, Arabidopsis thaliana columbia
  unsure (1)..(383): unsure at all n locations
gagatatggaatcaatcggagtccttatgatgtgccccatgtcctcctacctcgagaacgagcttgagaagcgcttcaaccttcttcgcttctggacttctccggagaaatccgtcctcctagaaactcatcggaactccatccgcgccgtcgttgggaatgcttctnccggcgncgatgctcagctcatcagcgatctgnccaaccttgagatttgtatccagcttcagcgtcggggtcgacaagatcgattttggggaatncaaaggaaaagggatccgngttaacaaanaaccccganggtttttaaccgaagaaggtnggnanatttttggcaatcggggntttantcctgggnttttcctttngnagggtttttttaa

SEQ ID NO: 137068 - DNA, 315 bp, Arabidopsis thaliana columbia
  unsure (1)..(315): unsure at all n locations
actttgtgctgcactactcaacctcaatggccgcctcaacaatggctctntcctcccctgccttcgccggtaaggccgtcaagctttcccccgcggcatctnaagtccttggaagcggccgtgtgacaatnaggaagactgttgccaagccaaagggcccatcaggcagcccatggtacggntctaaccgtntcaagtacttggntccattctntggcgaatnaccgagctaccttaccggagagttccccggagactacggatggnacaacgncggantttcagctgaccccgagacattnggaaggaaccgtg

SEQ ID NO: 137069 - DNA, 389 bp, Arabidopsis thaliana columbia
  unsure (1)..(389): unsure at all n locations
tccttcaagaacacaaagctagacagaaaaaaaaaaatgtnttcctcaaaattaaaaaatctgacccaagaaaacatttctaagatcaacggccgtccggttcttcaaccgaagtcgaaccaagttccgacattagaccgacgtaactcactaaaaaaatcgcctcctaagcctttgantccaattgcatcaaagntacccttaccaaggccaatttttctaatctttccttctttggtttccaacacaaaattcttaaggaaaccgggcgggtntttnaagggacttnttaggggntgggtnttcaaaattgggacccgttgtttttnccggggnncantttttngnggggttcaaagaggggttttgccctnggggggttttttaaa

SEQ ID NO: 137070 - DNA, 458 bp, Arabidopsis thaliana columbia
  unsure (1)..(458): unsure at all n locations
catcaacataagagagagagaagaaaaaaagaattacaattaataagaacaagatcaagaatcaagaatcaagaaaatgggaagagcaccgtgttgtgataaggccaacgtgaagaaagggccttggtctcctgaggaagacgccaaactcaaagattacatcgagaatagtggcacaggaggcaactggattgctttgcctcagaaaattggtttaaggagatgtgggaagagttgcaggctaaggtggctcaactatttgagnccaaacatcaaanatggtggcttctncgaggaaggagncaacatcatttgtaaccnctatgttactattggtagcaggtggtctttaatttgctgcacaattnccgggnaganccgccaccggtttttaaaaaantttttgtncncgngggtttngaangaggttttttncaancaaaaggnagggtttccnc

SEQ ID NO: 137071 - DNA, 393 bp, Arabidopsis thaliana columbia
  unsure (1)..(393): unsure at all n locations
ggtaaaaacacgggtgataaagaacaacttgaatcctgtgtggaatgagacgctaatgctttcgatacccgagcccatgcctcctctcaaagtgctagtgtacgacaaggatacattctcgacagatgatttcatgggagaggcagagatagacatacaaccattggtgagtgcagcaaaagcatacgagacatcgagcataaaggaaccgatgcagctgggaagttnggtggcgagcaaaggggaccncatttgtgagttatgggcataatcttacttnnaggcgggnaagttaacaaggcatttcactttggggtnccaaaattnttttaagggggtgttcttttaggtcccnccctttaaatgnnttcccnntcacctncaatggttnna

SEQ ID NO: 137072 - DNA, 417 bp, Arabidopsis thaliana columbia
  unsure (1)..(417): unsure at all n locations
caaactccatagctagctagagagtaaaaagaacaaagatgtcgaaagaagtgagcgaagaaggcaaaacccaccatggaaaagactacgtggatcctccaccagctcctcttctcgacatgggtgagctcaaatcctggtctttctacagagctctcatcgctgagttcatcgctacactcctcttcctctacgncaccgtcggtactgtcatcgggcacaagaagcaaaccggtccttntgacggcgttgggttacttggnatcgctttggggtttcggtggtattatcttcggccccgnctanttnaaccnccggtatttnttggngggcaaaattaacccacctgtggactttggggcctttntttggncccnaaaagggtttttttgggggnngcctttggtaaanaanagc

SEQ ID NO: 137073 - DNA, 407 bp, Arabidopsis thaliana columbia
  unsure (1)..(407): unsure at all n locations
acacataggatgctggtttatgagtacatgancaatgggaacttagagcaatggcttcatggagacatgattcacaaagggcatctcacttggnaggctcgcatcaaagtncttgttggcactgcaaaggcactggcttatcttcacgaagctattgagccaaaagtggtgcatagagacataaaatcaagcaatatactgatggatgacaactttgacgcaaagttatctgatttcggtcttgctaaattgcttngagctgattcaaattacgtcagtnctcgagttatgggtacattcgggtatgtcggacctgaatacgntaactctggnctcctaaacgnaaagagcgttgtttcagctatngngttgtncttttngaagctntacttgaaggtntccnctng

SEQ ID NO: 137074 - DNA, 433 bp, Arabidopsis thaliana columbia
  unsure (1)..(433): unsure at all n locations
tgttttgaagatncctcaacttggtataatacttatcagtggtttgccaccagatgtgtattactcaaacatgggatacacagatcctatacctctttattttcctgagtattctgaagaggatcttcgtcaaatttncttgagaaatcaacctaaccgaaaattgtactctgcattccttgacgttgtgttgaaaccattctgtagagtcaccaggagagttgaggaactgtctactacctnctcattattgttcagaaagttttgtgagccacttgatgatttaggggtttcaccaaatgaaggcatgaagngaaggctatntaggccatcttaaggccgnttattggcncaattgttttaaatgggggtttncangggctcttagtcacccccnantgntgggggaaanccnaggcgggatnanggcnaa

SEQ ID NO: 137075 - DNA, 220 bp, Arabidopsis thaliana columbia
  unsure (1)..(220): unsure at all n locations
aatccggcgacagtggtggggagaatctnatggacagtgataaacttcatacagtgcctgaggtggctgaagaagagggagataaggatgagtaccatgatgcttcggataagcagtagcagcaaggtttgacttttgnatgcaatgtcantttcaaatttacttagggattattnatatncaatcaagnaanttactcttntccggatccaagcttttt

SEQ ID NO: 137076 - DNA, 413 bp, Arabidopsis thaliana columbia
  unsure (1)..(413): unsure at all n locations
ctttttggtgaagacagccatgtttcaaagattattactcttccttctcattgctcttctgctccaatcttctttccttttagagatttcctctgctctcaaggaaggaaaaacatgtataacaaacagcaactgtgacgctggattacactgcgaaacatgtatagccaacactgattttagacctagatgctccagaacccaacccatcaaccccatcaccaaggcaaaggggttgccttttaacaagtattccatgggttaaccacacacaaatttttttngctcggtttggggggaagtatcaacgggcccggttnntgcnattttttggggnccctnacttaaccnggnaaagnttnaaattancaangcccacctcnatnaatgggtgttaagnggggttttttncc

SEQ ID NO: 137077 - DNA, 456 bp, Arabidopsis thaliana columbia
  unsure (1)..(456): unsure at all n locations
agagaactattggtcacccttgaagtcgttgacgacatcgtatgggatgggagtnatagtctccaagccttgagctcatcattttncttcttcctcagcttgaactccacagcacatcttgactgctgcacatgctccacaagaacatggatcctcttccttatgatcttatcgccaatctgataaacccacctcaagcaaaaactcaaaaatcagtgtagagcagatattgtcatagcttctatagngccaaagaaagaagagtaactaaatctaaactgtgaaagtacaaggttagtgtatttgtcctttgatgntttatagggttgctaatcacagtntntttgggggcccaggaaagtttgnttnnttcncaagtnangggtgaaaanttaaggggggtccngtttaaagcccctttnccccagggtttggggccnaaanacnccccttttt

SEQ ID NO: 137078 - DNA, 425 bp, Arabidopsis thaliana columbia
  unsure (1)..(425): unsure at all n locations
ttttgaacagagtcggtgacgtcaaaacgttaatacgatgtcgttccgtttctaaacgattcaactcgttagccactcagtctgagtcgctccttctccaactcgatcagatcctcggagccaccgaatctgactccgagatcgattctcctatcgctagcttcttccgatctctcttcaaatccattcacggtctccttcctcctatcttctccaaaccagctaactntgacgnaatcctaacccgatctccgaaaacttccggctcagattctctccggatttgaacgggatccggaatctngaggtgggatttatacgggtggtggatntcaaagcttttaggaaaaggncgccgccgtttnaagtggaaagggntgangtttcngggaaaattntnaaagnagncttngtnaaanggtngg

SEQ ID NO: 137079 - DNA, 362 bp, Arabidopsis thaliana columbia
  unsure (1)..(362): unsure at all n locations
gacaaatctcaaggatgtgatactagaaggaaaagatgcattcagctctgcccacgacatgagacttttcgnatatattagttcggatgaccagttctctaagttgtttcaccgcgcaatgtcggaatcttccacaatggtcatgaagaaggttctngaagaatacagaggatttgaagatgttaacacttttggtggatgtaggagggaggtatcgggcaccatattagggtctcatcactttccaagtatccccataatcaaaagggtgttnaattccgncttnggctcaaggttttaaccccaagntncccttttttatcccagggnccaaaaacntttaacntaggnantatttnncc

SEQ ID NO: 137080 - DNA, 409 bp, Arabidopsis thaliana columbia
  unsure (1)..(409): unsure at all n locations
aaacgcttaaagaatacaatcttattgatggtggagttgcagctaacaacccggtaaatttctaaatattggatttatcatttatgtagcaatagggtttttatacgaagaatataatatatcancaattattatggacttaaattgaataattataacatgnncacacaatgttagactatatttcattttttactatggaatttcttataataatcgntacgggttttctgtaaaaancttggaatagntcatgnnataggtggnttatatntcaagtatagggctttttttggccatttggggaagtaaccaaatgnggntctcaaggngggagccaagtgactttttccccattagggccnaatggtttncggggagggttttttgtgnctttttccgctttgga

SEQ ID NO: 137081 - DNA, 467 bp, Arabidopsis thaliana columbia
  unsure (1)..(467): unsure at all n locations
agaaagacttcacatttnaccattatttgctctgagctcaggtcagcttttctctcttcccctctctcctctctcttctactttatggtacagttgaattaacaatgccattgaactactacttccatgaatgtatctnctttacacttgtngtcttaagtttctattttngtctgatccagatctagtttctnctcttgtgtcttgtgaacactttagcttcttactgtctttatgtttgtggttgttgtgtcggtttgtttttcatttttccagtaatgttgaagaaacaagttcaagatctgacttaagnaacttacactagtttttaagtttgctagtagctntataattcttttgatcccggtaaangaactcaaaaggatcattcgnttctttggaaaacaagatccgggntcctnagnannnggggtccttgaataaaannttcggtnatttggaatccc

SEQ ID NO: 137082 - DNA, 415 bp, Arabidopsis thaliana columbia
  unsure (1)..(415): unsure at all n locations
gagccagtggcagtcaaaagcggtcactacatagtagaagtcaagcctcagggagtgagcaaaggntccgtgtcagaaaagatattttcatcaatggccggaaagggaaaaccggttgatttcgtgttatgtattggagatgacagatctgatgaagacatgtttgaagcgattggtaatgcgatgtcgaaaaggttactctgtgataatgctctagtctttgcatgcacaagtttnggcaaaagccaagcaaggctaaatactnctttggcggtnctactgaagngacatncattcnttgaattctnttagctgaaggcatnaaagggttcaaaactttttnntatgnggggaccttttttgaaggccccttttatttttgganccccnattttttttccnaaattggctnaaa

SEQ ID NO: 137083 - DNA, 463 bp, Arabidopsis thaliana columbia
  unsure (1)..(463): unsure at all n locations
gaggtcatgtatgactatgaggacaganttaatcaagctgtttttcctggactgcaaggtggtccacataatcacactataacgggtctagcagttgctctgaagcaggcaagaactcctgagtacaaggcctaccaggatcaagttctccgtaattgctcaaagtttgctgagactttgcttgcgaaaggatatgatttagtgtctggaggcactgataatcatttagttttggtgaatctgaaaaacaagggaatagatggntcaagagtggaaaaagtattagaattagtacatattgcagcaaacaagaatactgttccctgggngatgtttcttgcccatgggttcccnggttggcattccgtnntgggggacaccagcccttaaaatcaagaggggttcctttnngggnaggnttttccaaaaagtggnggggnatttttnttttngccnnaaanna

SEQ ID NO: 137084 - DNA, 302 bp, Arabidopsis thaliana columbia
  unsure (1)..(302): unsure at all n locations
caaaagccaaataatagaaagagtatggaagaagatgatggagacgcgtctacgccgttttggcttcaatcacgccgcaataacacttacttccgccgcactgcaagtntcggtggccgtacaaccaccatcgccactcaaatattcttcgccggaacagctgcaatcctcatagtcgtcttcattatccctcctttcttctcctctgtttctnagattttccgncccnnatttagtccgtnaaagnttggnttatnctcaacttcggtcttggtcctttttcggcggtcnttnngggtttt

SEQ ID NO: 137085 - DNA, 326 bp, Arabidopsis thaliana columbia
  unsure (1)..(326): unsure at all n locations
tgtccattttcgtggcgaagaagattttttaaggtcttttcaagaaattatggaatctgcagggatccagcaactgcttgctgctgaacgtgaagctcagcaaattgtcaatgccgctaggaccgcaaaaatgactagactgaagcaagccaaggaagaagctgaaacagaggttgctgagcacaaaaccagtacagagcaggggttccagagggaaactcgaagcgncaagtgggggttcaggtgcaaacgtgaaggaggtttngcaaagagactttttnccaaatttgggncatttttnggnccnggtncnngggnttttnncc

SEQ ID NO: 137086 - DNA, 377 bp, Arabidopsis thaliana columbia
  unsure (1)..(377): unsure at all n locations
ccaagagccgagaagaagcccgccgagaaaaaaaccgccgctgagaaaccggtggaagagaacaaggctgctgaaaaggctccggcggagaagaaacccaaggcggggaagaaattgccaccaaaggaagccggtgacaagaagaagaagcgatctaagaaaaacgtcgaaacctacaagatctacatctttcaaggttcttaagcaggttcattccagatnttcggatttnaggcaaagccattggggnttatgnaccagttttatcaacggccatatttgnggaagctagctcaaggaattttncggaaccttgttaggttccacaaagnaggcnnnccctttnaattttggggggntcccaacngggtttttng

SEQ ID NO: 137087 - DNA, 295 bp, Arabidopsis thaliana columbia
  unsure (1)..(295): unsure at all n locations
caacgttaaggccaagatccaggataaggagggcattcctccggatcagcagaggcttatttncgccggcaagcagctagaggatggccgtacgttggctgattacaatatccagaaggaatccaccctccacttggtcctcaggctccgtggtggtatgcagattttcgttaaaaccctaacgggnaagacgattacncttnaggtngngagttctgacaccatcgacaacgtcaanggccaangatccaagacaaaagngggtttttctcccggaccancagagggcttnctc

SEQ ID NO: 137088 - DNA, 406 bp, Arabidopsis thaliana columbia
  unsure (1)..(406): unsure at all n locations
ccaaagacaaagagagaagccataaaaaccctaacaacatccattgttgaaactntctttggcacaacaccaaacacacaaaatatggccatcccctaaagaaactgaagctcaagaaccctctgantctatcagaagatctcaccaataaagggttttgagaggttcaagtttctctttatgggatggccccaaacacaagagtactcacaaaaggtaagaagaagaagagatctcttggagattatgattgtaaatgtncgtgtgtgggtgttgtgtaaatnatnatcatcatcatcatcatcattatccaatatnataattntccaatatgggggatgttgtcgntgttgagggttttttttttnaattggggccgnttaaggnttccntgnanggtttnntt

SEQ ID NO: 137089 - DNA, 395 bp, Arabidopsis thaliana columbia
  unsure (1)..(395): unsure at all n locations
aggtttcttcagagggttaggtgttgggagtatcgccagcagccttccattgttcgtcttgttcgtcccactcgtcccgacaaggctcgtcgtctcggctacaaggccaagcaggggtttgttgtctaccgtgttcgagtcagacgtggtggacgcaagaggccagtgcctaagggtatcgtgtacggtaaacccaccaaccagggagtgacacagctcaaattccagcgtagtaagagatctgttgctgaggaacgtgctggtcgcaaactgggaggcttaggntttttaaactcctactgggctnaaattgnggggcttttnccttaaaagtttnttngggtttttnncctttgnnnccccncaaaaaaaaaatttcccnnccaaanatcccc

SEQ ID NO: 137090 - DNA, 425 bp, Arabidopsis thaliana columbia
  unsure (1)..(425): unsure at all n locations
atttcggtgaaagaattaagaatcgatcggacttggagaagagaagagaagatggttggcgcgaatctgaaagcggagacgatggctctaatggacaagagaacagccatggagacggagatgaactctattgtcgaacgtntctgcaatcccggtggtcctggtctctccggcaatctcatcgactcggagggatttcctcgggaagatattgacattcccatggtgagaactnagcgccgtcgtcttgctgagttaaggagtnagcacggggagataacggaaaagntaaatgttgaacattcaantttttcattcagtggggcctacattttagngcttcatnccacaaaaanttnaggnnccaanagaaaaaatttttttcaggtcctnaaaaanttttttttnntccccccantaaaaat

SEQ ID NO: 137091 - DNA, 431 bp, Arabidopsis thaliana columbia
  unsure (1)..(431): unsure at all n locations
aatctgttcactgctacggctcctttcctctcactctcgaagccattcaccaaaacggcatcgtaccaccagtgttacgcctcttcttccaatccgccggagcctgagtcttcttctcctcctcctcctccgcctccgtctcaaccgctggcatcgcaacagaagaggaagaagaacgttnagacgacggattgggtcgcttctttccttgacccggcggttttggaatcggcgcgggggtctttgccttgggcggggttttnttggctttcgggtgtaaatcttccgangcaggttcaagnacttcgggatttnaggttttttaaaggaagtagctaaacaaccannagattttnaggaagaaggggaaaaannatttttttttncccaaangggaatnaagggacttttttantcaanggggttngngg

SEQ ID NO: 137092 - DNA, 302 bp, Arabidopsis thaliana columbia
  unsure (1)..(302): unsure at all n locations
ggaagctaaaggcctagatgacgttnttcagatattgggaggtattgcaggtaatttggacgcgagaaaagcgtgtaaagaagcgttgaagattcatgaaaaattcctgaaaaaggctaatagtaagcattaaggaatgacattgcctgacctttaactatccgatttttttagaccgatgtctatatcgatcttcgcatgaaattgggtcgacagccgaggtcgntagttctaataaagattgggggnggtatcngtgnggatccccntgttnatttnnccnttcnattccgnaaactttc

SEQ ID NO: 137093 - DNA, 315 bp, Arabidopsis thaliana columbia
  unsure (1)..(315): unsure at all n locations
gttttgaaantctcaacaatganccaaaccaaacaacaaaaaaacatncttaataattctctttctgttatgtcgatgacggnggattctcaatctgattatgcttttcttgagtccatacgacgncacttactaggagaatcggagccgatactcagtgagtccgacagcgagttcggttactcaaatcttgttgtanccgggttcagangcattaaacccgntgttacgggaccgnaaacccctangcttttagcaaaacttgttaatncctttgtttttcaacccgtnggaggctttgtggggaggaatttt

SEQ ID NO: 137094 - DNA, 366 bp, Arabidopsis thaliana columbia
  unsure (1)..(366): unsure at all n locations
atccnaaggntaatccggtatcttatccgatatcatatgtggttccaccaaataagctgatgaagataagaaggcagcttctgcccctacttgctctaaatcagtatcagaacgcttggaacaagaggttcgcgacacaaagatcaaatttnttgggaatctaaaacaagaaactgaggaagagcgttcagagtggagaaagttgtgtacctgtctcaagtctgaatacccaganctatacnccattactagctaagatcctggaaggttttactgtctcggtctgatgctggggncaaaaatcagcccntcncgggggggntttttaggaagnntgcaaaccgggtgtnngttnggaagtttttt

SEQ ID NO: 137095 - DNA, 387 bp, Arabidopsis thaliana columbia
  unsure (1)..(387): unsure at all n locations
ttttcctaagatcaagaagccttgtcccccaatttacaaaccaccggtggtgatccctaagaagccgtgtccaccaaagattgcacataaacccatctacaagccgccggttcccatctacaagcctccagtgcctatntacaagccaccagtggttatccccaagaaaccgtgtccaccaaagntacacaaggccatctacaagccanccgtgcctatctacaagcctncagtggtgattccaaaggaggcattttcctccantttnacaagcggttnttnaaaggacccgggttcntttttttaaaaccaatttttttaggccncccnnnggggggggtttcaaaggaacctttgttccacttttcaaatttttcaaattttccc

SEQ ID NO: 137096 - DNA, 351 bp, Arabidopsis thaliana columbia
  unsure (1)..(351): unsure at all n locations
tttcgcagctgcctccttttcgtttgccactttttgatcaagcgaaactccaaaacacagagccatgccgccgaagttggacccgagccagatcgtcgatgtgtacgtccgtntaaccggaggagaagtgggagccgccagttctctagctccaaagatcggtcctctcggtatcgcaccaaagaagatcggagaagacatcgcgaaagagacggccaaagaatggaaaggacttcgtgtcaccgtgaaagcttaacgggttcagaattcgttaaagctnagggtaacccgtggnttcccatttncttgnaanttttnggnnantaaaaggnttttnaaggnccccaagng

SEQ ID NO: 137097 - DNA, 350 bp, Arabidopsis thaliana columbia
  unsure (1)..(350): unsure at all n locations
agtccttcggtttttgctggctggtgaagcgtgttgtcgaagagagaaatctcaagctgttgctggtcctggtcatagtgtagcagtcacatcgaaaggagaagtttatactttcggatataataactctggacagctaggacatggtcataccgaggacgaagctcgaattcaacctgttagatcattgcagggagttcggatcatccaagcagctgctnggtgctgcttcggncaatgctaataagcggatgacnggaaangttattcgnntnggaaaaaaacccttccgggggagcntnnttnccgggggggaaaaagggttttaanccccttnaaaancccccaac

SEQ ID NO: 137098 - DNA, 386 bp, Arabidopsis thaliana columbia
  unsure (1)..(386): unsure at all n locations
agctgttcctcgaggcagttacgaatatnaagtttgatgaggagcccaactatgccaagcttatctcgatttttgatactcttatcgagccatgtgctatatctagaccaattagaattgatggggctctaaaggttggccaaaagcgaggaagattgcttatcaatttggaagaggatgaacagccaaggaagaaaattagaatcggcagtcctgccacacagtggatttcagtctataaatgcaacgccgtcctattgaaccagggntatcattcnaccgttncagccttaagcctttgannagcattttgggaaaagttatttggggntggcccttttcaaaangncttntngnggntnnatcagctaaatcttttgggccca

SEQ ID NO: 137099 - DNA, 431 bp, Arabidopsis thaliana columbia
  unsure (1)..(431): unsure at all n locations
gatttaggttttnntcttcttctctccgcaatttggtaaagcaagtaagacttaggtacttcattaattactgaaaacaagaaaaagaagaatccagatgtgtggntcaaacggttggactttccataaatnatcgaacggctgggcatttctacactcatgtagggtcggacacgtgccttacgntcttcttaaatacagggntacaaatgaagaaggcggtcaccacaagncatcctccaatagatggttatttgtatctgtaggggagtnacanaggtaatggnggaatttcatgccncggatgctgaaaccatccctcttgccagcaaattttccaaatgggtcaacatnggggataacctacggcaattatgtccnanggggttnttcacggtggttttgaatcnggggccctaactngggtttcc

SEQ ID NO: 137100 - DNA, 324 bp, Arabidopsis thaliana columbia
  unsure (1)..(324): unsure at all n locations
tctcactaaccgattcatcatgggcgagaagaagaacgaaggagataacaagaagaaaggaggagataacaagaagaagaacgaaacgccttccatcaccgtcgttttgaaggtcgacatgcattgtgaaggttgtncttctcgaatcgtcaaatgtgttcgatctttccaaggtgttgagactgtnaaatcggagtcggctacagggaaacttacggtgaccggagcattagatccggtgaagttaagggngaaacttgaggngangncaaagangnaagtcgattnggtttctcctcanccaaaaagggnaaanggggaagg

SEQ ID NO: 137101 - DNA, 324 bp, Arabidopsis thaliana columbia
  unsure (1)..(324): unsure at all n locations
atccgagctagtgaagatggcttccatggcgtcaccgaccacttgcttgtaccaccacaaatnccggagaaaacttgttttctatgcccgtcgtatcagtgcctcgattccagagacttcatatgacaaacatccgaagctaattggtcgaagagatatcattcttaggagcagtgaattagctatgatcggagccatattccagcttagtgggaaaaaaccagattatctaggagtacaaaagaacgggaggttggctctatgtcctgccactaaataactgnaatcnccatttnntnggattattaatnntncgggnnnaat

SEQ ID NO: 137102 - DNA, 364 bp, Arabidopsis thaliana columbia
  unsure (1)..(364): unsure at all n locations
tgaaaattaaggaggtagactcatgtaacataactnttaccaatagaggaagaagaaaaagttagcaagagtcggttacttgtnagaaattccaacaaatnccggaggatttatgcacatcttggagcatctgataagaggaaaaaattatgtncgctctcacatttctaaatccaaatccaagacttccatctccattgtnccttgccaagtctactcctgaatcancgttgagcagaagaagcagagctttttncatcttctaactcttatccttggagaccggaccttagatttaaatggnttcaaggctcanncnagnttcaagttccgggggattttggaagggggggggtttnggnat

SEQ ID NO: 137103 - DNA, 422 bp, Arabidopsis thaliana columbia
  unsure (1)..(422): unsure at all n locations
aaacgnccaaaccaagaagaagaagatggtgaaactggagaactcgaggaaacccgaaaaaatttcgaacaagaacatccccatgtccgatttcgtggtcaatctggntcatggtgatccaacggcgtacgaagaatactggaggaagatgggtgacaggtgtacggtgacgatacgtggttgtnatctcatgagttacttcagcgncatgacggacttntnttggttccttnagncagagctttgaagattcgatcaaggactttcacgggtgttgtttggtaaacgctncgacgggagggatccggtanaatagtgggtttgggancccgntttcaacggaagctttttttaaagcccgccgttcaagggaatttttttttaattaggccnnggggtaaaaccnttttaaagtttgttng

SEQ ID NO: 137104 - DNA, 352 bp, Arabidopsis thaliana columbia
  unsure (1)..(352): unsure at all n locations
gcgattcaaggcaaggtctacaacgtctccnattggattaaaactcatcccggaggcgacacggtgattctaaatctcgttggtcaagacgtcaccgatgctttcatcgcatttaatcccggaaccgcttggcaccatctcgaccatcttttcaccggttaccacatcanagatttccaagtctccgaagtctcacgngattaaccgtcgtatggctttccgagntttcgtaaacttgggtctntttcggaaaacaaaaggtcaaggttancttttntacanttttaggcctttngttggncggccaaatnttcccncgggaggtttctnttacngggtgtttttggggttt

SEQ ID NO: 137105 - DNA, 445 bp, Arabidopsis thaliana columbia
  unsure (1)..(445): unsure at all n locations
acttaaaacccaaatcttatcactactctaaaagaatcttcatcatggcctcagtaacctcagccaccgttgcaatcccatctttcaccggccttaaagcctcaaccatcaaatcatccgccaccgtcagaatccaaactgctgctgttgcatcaccgaagcttacagtgaagtcatctctaaagaacttcggagtcgcggccgtagcggctgcagctttcaattgctttggccggaaacggcatggcaatagaagttctcttgggaggaggggatgggtcgttagcttttattcccaacggcttttnctataggctaaaggnggnggaggattnttttcaagnacaacggttgggttccccncaanaaatnntgtctttcggntnaaggcgggggttccccaaatgggggtgnangggggncaaaattttntntttgggnggga

SEQ ID NO: 137106 - DNA, 236 bp, Arabidopsis thaliana columbia
  unsure (1)..(236): unsure at all n locations
atacaacggccaccgcnttgcaatggntcatggcgaacttggtgaaaaacccggatattcagaagaggttatacgaggagatcaaaagcntagttggggaagaagcaaataaagtggaggaagaagacgcgcaaaaaatgccgtatctagaggcagtggtgatggagggtctccggagacatcctccggnacatttnnncctcccccacagtgtcactngggccactnttttaagg

SEQ ID NO: 137107 - DNA, 390 bp, Arabidopsis thaliana columbia
  unsure (1)..(390): unsure at all n locations
aaacaataaaccatacaaaaaaatatgaaaatcctctcactttcactactcttgctcttggccgctacggtctcccacgtccagtcttcggcatccgttccagggctcatcgaactcctcgaatcgaacaccatctttgggaacgaagccgaactcttagagaaagagggactgtccatcaactaccccaactgcagaagctggcaccttggtgttgagacctctaacatcataaacttcgacacggtggccgcaaatttgcaaaggctnttttnaagncttcntgatnaatttcaaacagtaccatttggggtttcaaaatttttanacaaaanggggntatttttttgnggaaaaggnnttttccnntaanaagcggntcccccaaaa

SEQ ID NO: 137108 - DNA, 325 bp, Arabidopsis thaliana columbia
  unsure (1)..(325): unsure at all n locations
tttccacaagttttgtttcaattgtataaaacaatggntcaaagttntttcaagcaaggcctctaagcaacgttcctcagtgacatgtcctctctgtaaggtctgcttcttggaaacgctcttttntgctcacaacaccttgaagaacttgtttacaggaatgaccataacttatgcagacagagaatttatccatcatccacaacttcggtgggtgtccttttaagngggattanatcggncccgnttattcccaaagggtttttttttnaaccaaaagggcccnggggttccaggtttncngggnttttnttaaccccgaatt

SEQ ID NO: 137109 - DNA, 228 bp, Arabidopsis thaliana columbia
  unsure (1)..(228): unsure at all n locations
taattttaacgatgacaacaaggatgagagcaaggtggattttaaaaagattgtaagtgaaaattggaatganccaccaaaaagagagagaaagcncaactnttctnaagttgaatacttcaagcaaacgttgcgacaaggtgctccagctaaacctaaagagcctagganttccacgnatgccccatttgcatgntttaaagtcctttaacattcagagggntgnct

SEQ ID NO: 137110 - DNA, 394 bp, Arabidopsis thaliana columbia
  unsure (1)..(394): unsure at all n locations
ccacaatacaaaacacaactttcatatataacaaaaaaagttatagaaatggccaaagacgtggaaggacctgagggatttcagacaagagactacgaagatccgccaccaactccgtttttcgatgcggacgagcttaccaagtggtctttatacagagccgtcattgccgagttcgtagccactctcctcttcttgtacatcaccgttttaactgtcatcggttacaagattcagtccgacacaaaagccggtggggtttacttcggcgggnttcggnatccttggaatccggtgggctttttgggggaaaatctttaancctnnntnttttnncccccggttttcagngggggggcnnaaaaaccccggggggggnnttttttttttnttt

SEQ ID NO: 137111 - DNA, 459 bp, Arabidopsis thaliana columbia
  unsure (1)..(459): unsure at all n locations
ggaggtgaggactttnaccacagggtgatggagtacttcatcaagttgattaagaagaagcaccagaaggacatcagcaaggacaacaaggctcttggtaagctccgaaggaatgtnagagggcaaagagagctctaagtagtcagcaccaagtccgtgtagagattgantcactctttgatggtgttgattttnctnagccactcaccagagctcgtttcgaggagcttaacaatgatttnttcaggaagaccatgggacctntnaagaaggccatgggatgattccggtntacagaagagccagatcgntnagattttcccttgtttgggtggaagcaccagggtccccaaaggttcaggcaactttttnaaaggacttttttttaagggtaaaagagnccaaacaaaggggttttaanccccgncggaggtttttttncctaatgggngcnttcct

SEQ ID NO: 137112 - DNA, 388 bp, Arabidopsis thaliana columbia
  unsure (1)..(388): unsure at all n locations
taggtttcaacggagactcactagtcgatctcctatcctttcttctacccgcccgaaatccgtcgaaacttctcttctttaccattgatttgcctcgtctcagctcaattctcttccgttgctgcttcgtttagttgttgcttcgcttcagtactctggtggtcggagagatgaatcacggccaacaatttggtgaggcaaagcatgaagatgatgctgctcttacagagttccttgcttctctgatgggttatacncccactattcctnatgatttaggtgggggcactacttggggtaaaganngggnttttaaagttncccnaangnnccggttttaggggtaaaggcttnntttccctggggggcacnaaaaaananttttttt

SEQ ID NO: 137113 - DNA, 400 bp, Arabidopsis thaliana columbia
  unsure (1)..(400): unsure at all n locations
caatcgccttcttccacggcggctctccgtcacaggtgtcaggtcccaatctctctctcgcgctgcgacggcgaagaggcttggtacataatgttgaagctttggagatggtaccagcgatgcctgacggttcatcctgtgaaaactcaggtcatcagttctggatttctttggggatttggcgatntcaccgctcaatacatcactcattccactgcgaaacgncgtcttcttcgncttcaccgttagtcatttttccgatcttccttctctctctcttaccntcgattnaaggtttaaaattgggggttctctccganttcgtgcggggttnatgaaaataagtttttnaggggttttnaaatttgcaaacncatggnatcccctgnaggnttnanng

SEQ ID NO: 137114 - DNA, 303 bp, Arabidopsis thaliana columbia
  unsure (1)..(303): unsure at all n locations
gtctctcatagatccatccatggcttccttcgtggaatctggttggcagtaccttgtgacattttagcgactttnaactggcatgtattgggagttttctcctccatgaaagngtgtttttnttatctggactccctttcatttttnttgaaaggcaaggctttctcagcaagtacaaaattcagncaaaaaataacacacctgcagcccaagggaaaatgtattactccgcctgttgctttaacaattctccgtaaantttgncccngatgttgggctcntnnccctgtcttncgaggccat

SEQ ID NO: 137115 - DNA, 326 bp, Arabidopsis thaliana columbia
  unsure (1)..(326): unsure at all n locations
ttcaatctatctctgaatctctcactctcctacccgaaaaccatgaactccaacgaccaggatccgattccgttcagacccgaagacaacaacttctccggttccaaaacctacgccatgagcggcaaaatcatgctaagtgcaatagtaatcctcttcttcgtcgtcattttaatggtcttcctccatcttttacgntcgttgggnatctcctccgtggttcgtagacggtnatctccggtcgttcgnagcccgtaaaccttggggttanggtgggnttttttaaacngnnnttcntttcaancggnggaaaatttcgtgggggg

SEQ ID NO: 137116 - DNA, 419 bp, Arabidopsis thaliana columbia
  unsure (1)..(419): unsure at all n locations
gctactaattgagcctaggtttcctttgtttggtgggtggaaaacttttttcacgataggttatggtttgccacttaccgacttcttgtttgcttcggaaggaaagcgattccttaatatctcctttggctcccctatacttgaccttgtcactgaaaaacttattgtacaggtggttttacctgaggggtcaaaggatatatcagttaccacttcattcgncgtcaagcagtctcaagaggtcaaatattcacatttngntatagctggtaggcccagttgtttgtgctngnaaaggacaacggttgtccctggttnacaaancagnattttccagggctcctataaagttccagnaaacatnaaactngctgnggggggccntttanggtaaacccntgggtttttcaatttgttca

SEQ ID NO: 137117 - DNA, 288 bp, Arabidopsis thaliana columbia
  unsure (1)..(288): unsure at all n locations
gtattatcaaaggaatatccaactctagcattccatgcaagttttaacaagtctttcggaaagttttgaggcagtttgctcgtctaaagagtgacaagcaagccatatctntgggatttnttgggtatccgaatgttgggaaatcatcagttatcaacacgctgcgtactaaaaatgtttgcaaggttgctccaattccaggagagactaaggtctggcaatacatcacactcactaagaggnttttttngattnattgnccnngggtngtttaccanagcccgggnt

SEQ ID NO: 137118 - DNA, 391 bp, Arabidopsis thaliana columbia
  unsure (1)..(391): unsure at all n locations
gaagaagaagaaaggattcgtnttccttctnccacaccctttctgacacctcatctcccctcccaccttctccgtcccgttccgnttctccatcagatcctcgattccgatccaacagttcgaattcagtttccgattctnatctgatcgaaccaatactcactgagatttgatcggcgattatggagtctatatctccggtatcgaatcagcttcttcagccgacgacgacgagctctaattccgatcgntctcgtcngtaagcgtaagaagaaatcatcgccatcatcggttgagaaatctccatctccgncaaatatcggttggggaaattggagnattcggggaaggcangaancangnnttctttaancggggggtttagttaang

SEQ ID NO: 137119 - DNA, 309 bp, Arabidopsis thaliana columbia
  unsure (1)..(309): unsure at all n locations
cacaattagaaatccgaacccaaactcatcaattttacaaattntntcttatctctatggntcgtacccaccaacccgaatctccgacggcccgacccggaaacaccgtggtcctctccatcgattgtttaaaaggaagctccaaaagcgaagaatggagcggcgatatgcttcaaaccggagacatagtagaagagatccggatcggggtcaaggncccggttcaacttatttttaaaggttcngtttaaaggnggntaaaatttgnttntgaaaaanttttcacaaaantttttngggggtaaaaaa

SEQ ID NO: 137120 - DNA, 458 bp, Arabidopsis thaliana columbia
  unsure (1)..(458): unsure at all n locations
tttataggcacacttgattacatatttaacacagcggacacgtaacagtggaatcgttgttggaactnttggatgaagagtccttgaggaaggacacagctcttccatctccagaatggtcttctgatcacattgcacttttggctgaatttngctgcatgcccagggccagacgaaacaatattttatagagatactgcagctgtaataacccgataccaaagactggttccaatggatatgggttaagctaccatgaagtaggntagcatgggccatgtccctgggggttntccccgctngggtttttcggttgttttcctacnccggaatcaaaaggttttatttaacngnctttgnttcctttgggttttnttttnccaaaggaattccccctttncccaaaaatttttgtttccnccgggntttgntttaaaaaaagnnaacaaattgggttt

SEQ ID NO: 137121 - DNA, 454 bp, Arabidopsis thaliana columbia
  unsure (1)..(454): unsure at all n locations
aatatatcgtcttcttcctcctcgaaccaaaaacatcagtctctcctagtctcagcgctcgtgaaaatctgaaactctgcgttcgaattttcgaagaacattagagatctggtattatctggntccgatctgttcaccatggaggagaagaagacagaatcaaccaacaagaatgttaagaaggccaatctattggaccaccactcgatcaagcacatccttgacgaatccgtctccgatatcgttacgagccgtggctataaggaggatgtgaggttgagcaacctcaaactgattttggggacgattatcatccgttgttgctcttggttgctcaattctacaacaaggaattccctgnggancagggnttttttgatttggatgcnaccnntttntttgaggnttttaantnngggtttaaaccttttttttnannnnagggggaaaatnc

SEQ ID NO: 137122 - DNA, 404 bp, Arabidopsis thaliana columbia
  unsure (1)..(404): unsure at all n locations
gctggagcagcagctgctntggnactttntctagcagaagttgcagcagaagcaaaacatgcatctnaaatggttggaaccatgggtgttgcactatctgtntgtncgcttccaggacaggttacatcagatcgtttgggtccagagaaaatggaacttgggcttggagttcatggggagcctggtgctgctgtagtcgacattcaacctgtggaagttgtagtgtcccatgtncttcaacagatactgagtccagagacaaattatgttccaattacacgtgggtaacagtgtggttctatgattaatggcttaggtggtaccctntaaatggancttattnattnctgcttggnaaagcattcccaaattaccanttgggaanntggggtttcccgttnaaa

SEQ ID NO: 137123 - DNA, 388 bp, Arabidopsis thaliana columbia
  unsure (1)..(388): unsure at all n locations
gcgattccaatcctaaagctcccgaattcaaaaatttgaaaaattcacaaacccaagtnccgatttcatcatcttcttctccgcaagagaactcgaagatccccaaatccaaatcctggtctgtttatctcattctctccacgaccgaacccatcaaaacatatgtnggaatcaccaccgattttnctcgccgattaaagcagcacaatggagaaatcagaggtggtgcaaaagcttcaagtgcaggaagnccatggctttgtgcttgcattatcactgggttcacttgtttaagncaaagtttntcggtttgnatcnaaaatngggggntcttttncaaggaaggtttcccggggggaaannaaaaccgggggggtttgtnccaagg

SEQ ID NO: 137124 - DNA, 380 bp, Arabidopsis thaliana columbia
  unsure (1)..(380): unsure at all n locations
ctcgtattgtttgacagtgataggaacgaaagagagttcatgaatgaaatngttctcgagattcaaaaagcgctgtggcaaatcgcgatgaagggaaacccaaaggtagaatcgaattcaaaaggaggatttctggtccctgcaaggagacttaccattgctcactctgataatcctgaaaaatggacctggagtgctatctatgacagaccacacaaagcagacatcggaattgcaacgatgattaacactcacggcttgataaaaatnaagtggggnttttcacacggggaaaatttgtttcccggggaaaanttccggggtgggtttttntttgtgngccctngtttncacatnttttggggntngnanattnnggt

SEQ ID NO: 137125 - DNA, 309 bp, Arabidopsis thaliana columbia
  unsure (1)..(309): unsure at all n locations
agcagaattgaagaaaaacatggagagaggagtttnttattatctatggattccttttaagttcatccaccaaactttcggntctnttttactcaagcttctcggtttgcnatctccatctgatcatagttttccggaggatggggaggaggaagttaaggttgtggaagtntcgtcgaggggtcttcccgggaaaaagaatgtactaaagaagtcgagagaaagttccggcaagcccgggagnacccaccaagaaggccgtttaagttttcaccttnacctannaaatttttccgggngaattntccc

SEQ ID NO: 137126 - DNA, 455 bp, Arabidopsis thaliana columbia
  unsure (1)..(455): unsure at all n locations
ctcttcgttcgtttcatctcccaattgagtttaacgacaccaaattcgtctcacggccttgtttcctggcgagatccttcccggtggttcgttgttcaagcaccagagacgtacctaagcttgaactcttcagccgcggaaaattcgaccggattcttcaagatccgccacttattgaaaaagccgaatccgaactctcagattactgttcgacgcttgaaggtgatgactcttacagttgctggagagcttactttgaactcaaagatctcgaaagagagaagccaaaggttgaaagttgagaatttgattttgcaaacaggtgggtttgaanccgtnaaccgggngtttacatggggttccttcaatggggaaagttaccaaanccnggnntnggttttanatttggggnngagnnccttttggggaaaaggttttttttncnctnaaantcc

SEQ ID NO: 137127 - DNA, 413 bp, Arabidopsis thaliana columbia
  unsure (1)..(413): unsure at all n locations
ccgacttttgttttccagtttcttgggaaagaagatttcgagccgacaacaaaccgaacctacggttctatcttgagtaacctaacctttgtnaagacgtttgcttcagggattcttgttccaaagtnttacatattgccacttgatgacgaacagtacttggttccacatacatccttagttcaagatgctcacaaagcaggattacaagtatatgtttcaggtttcgcaaatnacgttgatattgcatataactacagttccgatccagtgtccgagtatctatcttttgtggncaatggagatttctctgtcggatggtgtgccccctgatttncccaatnacngnatttggggccgttnactgttttnncccanattggccgaaacggtnaaaaaaaaggggtttnntt

SEQ ID NO: 137128 - DNA, 457 bp, Arabidopsis thaliana columbia
  unsure (1)..(457): unsure at all n locations
gtacattcgaggaactaccagcgtatganctctctatgcaatcagataaggctgttattcttgaccatggcacagatgtatttatttggttggnagccgaactgtcagctgacgaggtgaagagtgctgcagtcttagcagcttgcagaacgttagctgaagagctaactgaattccggtttccagctccacgtattctcgcattcaaggaaggaagttcccaagctagatattttgtttgccggcttatacccgcacataaagaccctccttatgagcagggagcaagattttcacaggtaaggacattgacggcagagcaaaggatgaaactaaagngtagttttttagngtttnatgagccnattttttcggatggntaggggtttnaagnaggnccccctgncccgggggggaacatttaatcttgntnancgntttttttncccccttnntt

SEQ ID NO: 137129 - DNA, 400 bp, Arabidopsis thaliana columbia
  unsure (1)..(400): unsure at all n locations
gattcatatccgcaaagttttgatcgaaacatccgttgattctccccacgttcttggagttgccccanattcttcggacaatgtttgtatcgaggactcaacaatcaacgttggccacgacgcggtttctctcaagagtggttgggaccaatacggtatacactacggccgtccaaccaccgctgttcatattcggaatctcagattaaagtctnccaccggtgctggnatctccttcgggggcganatttcangcggggtctcggatttnacccctnagcgngttttanatanacaggtntctcataggggtagcctttagaaaccccccanggganaagggggggttaancccgnaaaatttnaaaatttcgcggggggttttttaaaaggtttttca

SEQ ID NO: 137130 - DNA, 472 bp, Arabidopsis thaliana columbia
  unsure (1)..(472): unsure at all n locations
aagaaggtgtacgttggacaagcccaagatggtatctnagctgttaagtttgtgtacgacaaaagccctgaggaggtcacaggagaagaacatggaaagagtactctactcggattcgaagagttcgtacttgactatccaagtnaatacatcaccgcagtcgatggcacttatgataaaatcttcgggagtnatggctcagtcataactatgcttaggttcaagactaataagcaaacgtctcctccctttggacttgaagctggcacagtcttcgaactcaaagaggaaggccacaagatcgttggtttccatggaagagccgatgtcttgntncacaaaaattggggtccatgttcgncccttatccacttattgatggggcctttancccttantccnaggnacnnaanaggtttcnaaactttcttcnaaatttccaatnngggnttttaagccctggggaaagggg

SEQ ID NO: 137131 - DNA, 256 bp, Arabidopsis thaliana columbia
  unsure (1)..(256): unsure at all n locations
attgtaaaggtagatgtggagaaagttggagcggatacggttctttatgtntcaaagcacccggttctattnccatctttnaatcaacacgagtggtcttcacacgacgtgggttcaaagaccttnnncttggtatcaaaggagagggctttaanctcagggacttacagtataggtntttacggcttcaaaggaacagtcaagtaccaggtctcagtactggtccaagaaagcatttnatggagctaagnttggg

SEQ ID NO: 137132 - DNA, 666 bp, Arabidopsis thaliana columbia
  unsure (1)..(666): unsure at all n locations
tctatattaattgttagcaaggcatcttcatctctctttatataggcatcatttgtttcttttgtgattttgtctcataccagataaaacaaagtaagaagaagatgaagatgcacgtatgttttagtgtgattttnatgtttctaagcatctncttcatcaatggtgctttgtcgaagcttgaaaggttgaaacatccggtgaagaagaaatctgatggctctctgagttttcttgttatcggagattggggacgcaaaggtggttttaatcaatctctcgttgcacatcagatgggagttgtgggagagaaattagacatagattttgtgatatcagtaggggntaaatttctacggcggcgggtttaaaagggagtcaatgatccctccctttgaagncnctttctctcatatctacacttcatcctaggtctccaaaaancaattggtnttcagggggaattgttgangcccaactnagtaaagtcccncccnaaaagattggngnttggttttttcgagancctttgtcttatcccaggatggnggnttttcctcggggcnaaaacccttttnggnaaacctcccttncccnnggccccttttgttggggatgcttccngnnaaaanacccaacccttcctgttaggttggggtaaagcgg

SEQ ID NO: 137133 - DNA, 269 bp, Arabidopsis thaliana columbia
  unsure (1)..(269): unsure at all n locations
ttttcttattaattatcaacaccatgatgacctattcttttnattgattttngtngttgttgttttgtttaaactgtnctgtttgtagaggttagagaatatgtgggaatctnatcctcttgtgtactcaaatttggttgagatactgagaaaagaagccaaggagggatcctctaggaaacctaaaagttgtagtagagctgctctttggctaacgagagcnatggattttnncattggcgctattncaacgnctggtgaaaagacat

SEQ ID NO: 137134 - DNA, 565 bp, Arabidopsis thaliana columbia
  unsure (1)..(565): unsure at all n locations
atcaaggtccacaaacaaaaaagctatatgtcaatttggctgaactctggccaaatagattgatggattatcgtgggatcaaacatgcaattttccgggcaaaggagagacgaaaagcattgtatggaaaccttgcgaaagagatggttcaaacaaagatgaagaagagtatgaagcagttggtaccaagaacagactgtactgctcagcccaacaccgaattagtggttcanagacaacacagtggggaaaaaaaattgattgttgatccaaatgcaaccagcacttccgtggtcactagtcaaactatggttgacaggtcaaatcagcagcagccctgagaagcttaaaggggntttcaaggctcttggcaaatccctnccaggggggancaaggagttnggncaaggggganaggnccgggggctntaattgggctngggaaaccaagtcggtttttttccccttnaggaggccccgnnccttccccaggccacggtttnatcccanntccttcaggnttnttgacnattcccnggggcaaccccngggccctnacttttcc

SEQ ID NO: 137135 - DNA, 433 bp, Arabidopsis thaliana columbia
  unsure (1)..(433): unsure at all n locations
acagaacatcactaccaaacatctccagctcagtttcttcaaaataaaaacagttaatctctctaaaacaattttttgttttctctctctcttaaataaccagagagttcagaatcattttnattctctttgtaatctttagttgttgtacctaacatcatggctgaagaggaaccgaagaaggtgacagagaccgtgtcggaaccaactccaacaccggaagttccggtggagaaacctgctgctgctgcagatngttgctcctcaggagaagnctgtggttccaccntcccggttcttccntttccgggnaccggcaagagggtggaagcaagnnggctcttaagggcttattgttcccggtngntcccttaaagaagtangnggganggggaggaatggnagggttcaatttaatnggggattccttgnt

SEQ ID NO: 137136 - DNA, 580 bp, Arabidopsis thaliana columbia
  unsure (1)..(580): unsure at all n locations
gccttatctctcgatttcttcatcgaattccccaaagctctctnatctctcgaccaaaacccaaatgtctccgtnatcatcctctccggcgccggaaaacacttctgctccggtatcgatctcaattccctctcttcaatctcaacacaatcctcctccggtaacgacagaggacgatctagcgagcagctacgccgtaagatcaagtcgccgctattnacggcgcgtgtatcggtggcggtgttgatctgattaccgcttgtaatattaggtattgctctnaggatgcttttttctcgattaaagaggttgatctagcgattgttgcggatcttggtacgctccagcaattaccggagtatcgttgggtatgctaacgccatggaaattagctttaaactgctcgggagattctnctggaggtgagnaaaaggatncttggtttggtttcaaagtttcggntctaaannggggcttgaaacggngtagtacaancnctnagnatagggggnagntccttngctttacagggcaaggnattttttnagagcaggngtnagtttgncaaggcttcttttgg

SEQ ID NO: 137137 - DNA, 605 bp, Arabidopsis thaliana columbia
  unsure (1)..(605): unsure at all n locations
gagagctgagaatttgaagcaaacaaaaaaaaaactcatatttgaatttcgaaatcgttcttacaaaggcgtcgttgtgacgttgcttctgtctgcttcaatctcttctcttcttctcataccaattccaagacctgaaacagtcctagccaaattcctctccatctctcccactcccaatctcatctgctcatgacgacgagccagtcttctcaacgcgtttctgattccaagccaatcatcttccacatcatcaccatctgcagcaatcgtagccagatccgataatctgattctcatctcagcctctgagccaccgattcccaccttcgccgtcgtagggagctcaaatctacaaagcggncacgagttatgatccgagagccaagggacggtgcaatccggagtggtattatatggcttacacggtaatcttcgngcagattcttccgntgntgnaatcctcttttgnaaacggnggaggggtaaannggatttggtctgaatcatcgggngggcagngnaagaaggcgggntctnaatcttnggggtcgggtncggntntaagggttaataacggggaggngntnangcggggatnngga

SEQ ID NO: 137138 - DNA, 234 bp, Arabidopsis thaliana columbia
  unsure (1)..(234): unsure at all n locations
ccgatttaagttctcgcccagagttagatatgattagatctgtagatggactcgtttctttgtttagatctctgagattttggatttgtatggttagatggactgatctaggatatgaatcggccgntagtaaaggnttcaatttcagtgngcttggtttgggtttagccantaattttanaaccgggaggattananggttcccntggggttcccctgaaattaanggaccgg

SEQ ID NO: 137139 - DNA, 210 bp, Arabidopsis thaliana columbia
  unsure (1)..(210): unsure at all n locations
gaacgagaccgnccgcattactcagaccatgagtaccctcctagcagaaggatagcatctnantgggcccatacagagccgctcccaaaacctcattatgacagacgaccacctctcantccacctcgtggtggcagatggggacgagttttgagagnnaggagcagatccccgccattnagagatgttccaccaccggcattnagagat

SEQ ID NO: 137140 - DNA, 566 bp, Arabidopsis thaliana columbia
  unsure (1)..(566): unsure at all n locations
agcactggtacatgttgtggatggttcagctccacaacctgaacttnngtttnaagctgttcgtctcgaactcgaactattcagtcctgagatcgccgagaagccttacgtagtggcatacaacaaaatggacctcccagatgcttacgagaagtggccaatgtttcaagaaactctccgtgcccgtgggattgaacctttttgtatgagcgcagtacaaagagaaggtacacatgaagtaatctcgtccgtttatgaactcctgaagaagtacagagcagccaatncagaacccaaagcattgttcgatcaagcaaatgaggatctggaccatgtagctaagaagattgattaaggaacgacgagcagccattaatgagtttgaggtcttcccgataggtaacctaggggcttggatttagttggagccgggcttcaaccgtttttccagtnnntaacttgnagtccatgggttcaggcaaaaagggtttagcatnnactttattcntttggggtgaanaatncctnnnggannttggggttaagaaggggttccncatnnnggg

SEQ ID NO: 137141 - DNA, 578 bp, Arabidopsis thaliana columbia
  unsure (1)..(578): unsure at all n locations
agaagagacaatggtgaaaatnatgtgacagtnaagatcttgtnctgtggagtttgccacactgatttacacaccatcaaaaacgactggggatactcgtattacccagtagttccagggcatgaaatcgttgggatcgctacaaaagttggtaagaacgtgactaaattcaaagaaggagatcgtgtcggagtaggagtnatcagtggctcgtgccaatcttgcgaatcttgtgaccaagatcttgaaaactactgtcctcaaatgtntttcacatacaatgcgattggttccgatggaaccaagaattacggtggctattcggagaacattgtggttgatcaacggtttgttttgcggtttncggagaattttaccgagcgattcgggtgcgccgttgctgtgtgntggaatcactggggatagtccaatgaaggattatgggatgncttaggcagggangnatttnggggttctgnccttggtggnttggcaannttcttttaanntggnaaagctttnggttnaaagtacttcaataagcctnttctcggagcagggagccttaanacttggnc

SEQ ID NO: 137142 - DNA, 296 bp, Arabidopsis thaliana columbia
  unsure (1)..(296): unsure at all n locations
ggagctatatccctgaggtgaggtctgagaggagtcaccaccttacaagacattccgctcttgtnacaaattctgtttagttttccaaaaaagatcatctttgtttttagtaagaatgtagtcactaagtcagatatcaatgacaaataccaaagaactagtgtttttccgtgtttcatccatacatagatacttatcctgtgtcttttttagaaattcctttttgtatgacgnttcaaaattttnattgactattgttagtggtatatctttnaggtaataaacggggtataatc

SEQ ID NO: 137143 - DNA, 290 bp, Arabidopsis thaliana columbia
  unsure (1)..(290): unsure at all n locations
ctcaataaatcattccaattctttaatcaaaatgtggagcaacaagtncttctnccttctnccagttgtatgcatcgtagtgttcgcnacttctnaaccattgcnatcaccacaaccttcccaactagattgtnggtcatcactagaagttattcccgactgtntcccggaaatttnccgatcgataacaaatggacagttcgggaatgtaggtccttcttgctgccatgcttttataggtctcgatactgaatgcatccctcanatgtttatcttcgntcccctcatcc

SEQ ID NO: 137144 - DNA, 504 bp, Arabidopsis thaliana columbia
  unsure (1)..(504): unsure at all n locations
acgcgaccaattgattctccttctcacaagcagttggcgttaactcttgtttatctaccanttgaaagatgttttacgatggatacgcttatcatggaactacctttgagcagacttaccggtgttatccctcatcctttattgataagcctcaaattgaaagtggtgacaagattataatgccaccatcagcccttgatcgtctagcttctttgcagattgattatccaatgctctttgagcttcgtaatgcttcaacagatagtttttctcactgcggagtccttgagttcatcgcagaaggaaggcgtgatttacattncctactggatgatgcagnattttactgttgcaaagaaggagncatgggtgaggagttnagaaattgtcaactntttccaaanggggnccctacggngaaacttgcnaaccccaccacaaacaggacttttntngggtataggctnaccccgnaagccattnttggggnnccnnatttngggg

SEQ ID NO: 137145 - DNA, 484 bp, Arabidopsis thaliana columbia
  unsure (1)..(484): unsure at all n locations
taaaagagctcaaaacacacgaccatctttccgctgtcttcttagcttcttatctaccgtaatcatgccaacatcagcaacagcggtggctccatcaactggatctgtccagaaaaaagatcaagactggcgtgcgattttntctcccgagcaatttagagttctcagggaaaagggcacagagaaccgaggtaaaggagagtataccaaactgttcgacgacggaatctatagttgtgctggttgtgcactcctctttataagtccaccactaagttcgactctggttgtgggctggccttccttcttcgnatgctatccctggtgccattaaacaaacggccganggcaggaggggngaagnatttggngatcaangtncgggggcatttttancgggccattttaggntaatgtttgtcaaaagggggaagggtttttnccnnagnggnccngttgagnggccnctttggttaaacangtg

SEQ ID NO: 137146 - DNA, 504 bp, Arabidopsis thaliana columbia
  unsure (1)..(504): unsure at all n locations
actgattggggcaacaagcttctnttcttaccggctgccaagaacatgtctatgcttgtggttgagtcgagcccatggaatgctaatnattttgggatcccgtacccaacntacttccacccagcaaaggactcagaggtttttnaatggcaagaccggatgagaaacctggaaaggaagtggcttttctcgtttgcaggagccccacgacctgacaatccgaaatctatcagagggcagatcattgatcaatgtcgaaactcaaatgttggcaaattattagaatgcgattttggggagagcaaatnccatgcaccaagnagcattatgcaaatgttttcaaagctctctcttcttgcctncagccacaggggggncttttnaaacccggaagnntcggcattttnactcaattnctttccggtttgtanacccggtcttntttccatccggggttnagccttcanggaattaaangngggattttccccaggncctttaaaa

SEQ ID NO: 137147 - DNA, 426 bp, Arabidopsis thaliana columbia
  unsure (1)..(426): unsure at all n locations
gaaaacaaactttaaacaatggctggagaggagttgttgaaacttttcgagcaaaactggtcagagaggccaatcttcaagaaagacaaagagaatctgaatggaaaaagtagagagaagcgtggagaaaaagagattctagaggaacgacgagaagaagaagcactgaagaatttnccggtgagctttcttgtagagagggctatgagtnacgagacgatgatgacgacganttccaagacaagtttgtttagttcttcatcagatgatttgtncttgtctcctagatcggtcttacccgttaaaccaacggcgnttaagctttaaaacggntccttttccggaaaanaagtcaancgggttccacgnttttcgggaaagnggggngccttcttttnaagangaaggaaagccccagnnnaanga

SEQ ID NO: 137148 - DNA, 383 bp, Arabidopsis thaliana columbia
  unsure (1)..(383): unsure at all n locations
atggatgtnctgttggctgtttatcgagatggaaaggcagagtataagatcactagggaccacctcaagtccttgtncgtggagcttatccttggaggcactgacacctcagcgcaaacaatcgagtggacaatggcaangatcattaagaagcctaacattcttnagagattgagaaaagaaatcgattcttttgtaggcaaaacanggttgattcaagagaaggatctaccgnacctcccttntttgcaagcggtcatcaagggagggctaagntttacaccnaccagcaactctnttggggagggaaagtcacagattggatgtncggtttggnggcttnttncggtcccaaaaggccacaacancttttttggttaaat

SEQ ID NO: 137149 - DNA, 420 bp, Arabidopsis thaliana columbia
  unsure (1)..(420): unsure at all n locations
ccgagacagagagagagagagagagagagagagagagagagagataaagggtcgataaggtctttttccgtttccttgacctctctgggatttggatttcgatttggatttcgatttcctcatctcatcgatttgcttctcaatctctccaattcgattctcctctggaaatttcaatccttttnatattttccttggtgatttctaagataattaagatcgagaaaaggaggattttgngagagaaagcatccatccatcggtggccgctatgagcgacaaggaagctattgtgggatccntttttggtcggagggctcttnaagaanccctnngtcaatcgtctnaaccaatttttncgntatgggggcttgaataatacaaggaaggtncttttnaaaggccccgnggaannaanaa

SEQ ID NO: 137150 - DNA, 383 bp, Arabidopsis thaliana columbia
  unsure (1)..(383): unsure at all n locations
tcaaacatcatcaacttatcgntcttctccaacaagaatcatcaaagcccaaagaaacacaacagagaataaaaaaagaaatgacaaaagttcacccaaaattcccaagcacatgcgaagagagcttgtntgatagcaaagcagcagttgttttaacggtgtggaagaagtcccttcttttcaactgcggcggattcacggtttacaacggcaatggagagcttgtntttagagttgacaactacatgaattgtcctagngncaacatcgtccttatggatgctttcggntttcccctcctctccattncgccgcaanaagttnagtntttggagatttctggatngtattcgnttggngaaacanggagnggtcccattatt

SEQ ID NO: 137151 - DNA, 352 bp, Arabidopsis thaliana columbia
  unsure (1)..(352): unsure at all n locations
cttgtttggactatgaaacggttgtngcaacttgtcctnctcttgcggttagagcgaaagatgcgaaaacggtgattggagaatgtaaagatggagaaggagggaggtttntaaaaacnatgatgacgttnctngattcggtagaggaagaggtgaaaatagcgaaaggtgaagagaggaaagtaatggagcttgtaaaacgtacaacggattatnatcaagcaggagctgttacaaaggggaagaatccacttcatttgtttgtnatcgttagaggttttcttgccatggttgataaagtttnctttagatattattgngaantttncngnggaggaaggtttgttagtcc

SEQ ID NO: 137152 - DNA, 402 bp, Arabidopsis thaliana columbia
  unsure (1)..(402): unsure at all n locations
agactgactctctctctctctaactcttcattctnctctctttnaccttctctccaagaaatcttcactttctctctagaaaaaagttggaagctgactcgataaagactctcttttnctncttcttcctgcaaatggcgatcgnggatcaagagaacacaatccgtgaaatcaaacctaagaacagaagaatcatgggagctggtggtccggaggaagaggagaaccggtggccgccatggttgaaaccttttgcttaagnggcattctttgttcattgcaagtttcattggggcctctcataagggtgaatgcaaatatggaatttnnttgggcttggacccaatgggccccntttgctccnctttgnctttgcttcattcnaaggnttcattngnnccc

SEQ ID NO: 137153 - DNA, 357 bp, Arabidopsis thaliana columbia
  unsure (1)..(357): unsure at all n locations
ggaaacaagaggcagggaagaaggatttcattgagatactcaagactctngaatctaagcttggagacaaaccttactttagtggcgatgactttggctatgtagacattgcgttgattggattctacacatggtttccagcatacganaagtttgctaacttcagtatcgaatctaaggttccgaaactanttgcttgggttaagaagtgtttgcagngggagagcgtggctaagtccttccctgancctncgnaaggttactgaanttcggtctctaagctcaggaggaaatttttttcctccgtaaaaaanggttcctnttggccaaaatgggtccgggccttnaananggncc

SEQ ID NO: 137154 - DNA, 260 bp, Arabidopsis thaliana columbia
  unsure (1)..(260): unsure at all n locations
gtagtttgcttgtaagggtttagagagttgatgccggagtatcttccagctatntttccggtgtgcgctaatctnacctccctgaacttcagtnatgctaacatttctcctgacatgttcaagcccatcatactcaattgccacaaactccaggngttctggggccttgattcaatatgtgatgaaggnctacaggcagtttcagccactttnaaggaactccgtgaactcaggntctttcccttttnatncccgggnag

SEQ ID NO: 137155 - DNA, 326 bp, Arabidopsis thaliana columbia
  unsure (1)..(326): unsure at all n locations
tccagctagtgttgtatcatatnctatcaattcaaaggaatataaggagtggntcgttaacaaaggtcttgcttctagtagtagtagcagcaatttgaataacagagagtctgaaccttccgccttctcgacttggcgttctctgtcgatggatgttgattacattcaacacgcggtgtatggttctnctcaagacgntagaaagtctccgcatttaaccatttctttcagcgnccgcncttctccttnctctacntgccactgaaggtaaagtggaagtnctcctgtgaccgggttattttgcaaacgnagtttnncaccncttg

SEQ ID NO: 137156 - DNA, 239 bp, Arabidopsis thaliana columbia
  unsure (1)..(239): unsure at all n locations
cacgcgtccgcacatctcctattgcaaacgaacataaaacactacctaagagatcaatatggctggagtnatgaagttggcatgcttgcncttggcctgcatgattgtggccggtccaatcacatcgaacggctgcgntaagctntggctcagttaacagcaactttgcagccgtgcattgggtacgngctncaaggtggtgtcaattccccancgtgttnctccggcgttaaaaaacc

SEQ ID NO: 137157 - DNA, 257 bp, Arabidopsis thaliana columbia
  unsure (1)..(257): unsure at all n locations
catctttctcataaacatgatgaagaagagcaagctgatcgcaaaggcatggaagcaaatgtcaagcagagttgccaaacaccgngtcgncaccggaaatcctaaggttcantntcatataccacatgacgtacccaaaggggcaccttgtggtgtacggtggtaaagatgagggaacttatnagagggtccgttataaagatcacgnttcttcacggtcccatnttcagagntttnntttgatcaatcaaaagatg

SEQ ID NO: 137158 - DNA, 355 bp, Arabidopsis thaliana columbia
  unsure (1)..(355): unsure at all n locations
ctaatctcccngatcttcgattcattgtttcagaaatccccaattactgtctctgtgcgtaaaatctctagagaaaccttaaaattttccgttcagagaaattgtcaacgaaggtaatggcgtctggtcctatagctggtggtggagtttcgaagacgnagcataaatggagtnatagtggcaacaaaagcnaaaaacggtccaagcccacggtggcggattcgaattcncttnggtttngaagataatcatcagatgatnaaggtaagtttaagctcaatttnccaagcttttaagttaaggacctttaagggggaancttcaanctttgncttttgggaantttaggngcttt

SEQ ID NO: 137159 - DNA, 365 bp, Arabidopsis thaliana columbia
  unsure (1)..(365): unsure at all n locations
caacttggntctggtgcagcgaagaagtctacttctcgtagtagcaaggctgggcttcaattccctgttggtcgtatcgctcgatttttgaaagccggtaagtacgccgagcgtnttggtgccggagctccggtctatctcgccgccgttcttgaatacctcgccgctgaggtacttgagcttgctgggaacgcagccgngagacaacaagaaggccccgtatagttccacggcacatttcaggttttcctntngagggaatttattgnagggagcttaaagcaaanttnctttgggagntttttgccaatttgcctaaattggggggggnttattnccttaaaaatcccaaaaattnnccttnt

SEQ ID NO: 137160 - DNA, 426 bp, Arabidopsis thaliana columbia
  unsure (1)..(426): unsure at all n locations
agaatnacatctggctatagaaaccagtggtcatggagctctaaaggaaaaccattggctcgacgatggggcctatctcatggtaaaaatcctgaacaaactagctgcggcccgagctgctggtcaagggagtggcagcaaagttttaacagatcttgttgaaggtctggaagagcccagagtggctttagaactgaggcttaaaatcgacaagaatcaccctgaccttgaaggaagtgatttccgggagtatggagagaaggtnctgcaacacggtgtcgaactcaatagnaacaaatccaaaatctttataatagctccagtttaactacggangggatnccccggttncggggcttttgggtggatgnntttttntnaannttttttttccangntcccntttttccctttaaaatggtnncc

SEQ ID NO: 137161 - DNA, 309 bp, Arabidopsis thaliana columbia
  unsure (1)..(309): unsure at all n locations
aaagaagttcaaaggngaagggatgccacttcactacagcacaaagaaaggcaacctntttgtnacttttaaggttttgtttccgtcttctctcactgacgatcagaagaagaagcntaaagaagtctttgcttagtgctcttctctcgctttcgctctctcnctctttagaagnttggggattaaagagaagaacatgtgatggtccnaatgtataacatgatnaggttttantatagaaagaaaaaagttatggggagacaaagtcgncaggncgtttttgatcaagttgtcattnttgtttgccct

SEQ ID NO: 137162 - DNA, 388 bp, Arabidopsis thaliana columbia
  unsure (1)..(388): unsure at all n locations
ggttttgccaattaccaccaaatggagcttcgttcccgccgccggagtttttccgtcgaatntnagctccatgggcactacctttgttcctcatcactttgttcaagtacgaaatatcacttctaaggaaaaaatggcaaaatggaagaagaagtggagacctaggactccaatcacatcaaaagtcaagaaagtcaagattaagttttatncgtcattcaaagacaggtttaaaccactaaatgatggtaccatccgtcgctggaaagaaggcaagcggcacaacgnacatttnaagtcaaagtaaatcgaagcgtagattttaggcaacctnggnctaggtnccacccagcatntnggaaantcanttgangaaactnaattttnt

SEQ ID NO: 137163 - DNA, 307 bp, Arabidopsis thaliana columbia
  unsure (1)..(307): unsure at all n locations
caaatnttaaacgttttactttgtgctgcactactcaacctcaatggccgcctcaacaatggctctctcctcccctgccttcgccggtaaggcgtcaagctttcccccgnggcatctgaagtccttggaagcggncgtgtgacaatnaggaagactgttgccaagccaaagggcccatcaggcagcccatggtacggntctgaccgtntcaagtacttgggtccattnttttggcgaatcaccgngntacntttaccggagagttcccccggaganttacggtttggaacaccgcccggttttttaa

SEQ ID NO: 137164 - DNA, 379 bp, Arabidopsis thaliana columbia
  unsure (1)..(379): unsure at all n locations
aaacaaaatttgtttgtncgtttgatctttcttaaaaatatgaaaattaacatcagagattccaccatggtccggcctgccaccgagacaccaatcactaatctttggaacnccaacgntgatcttgtcatccccagattccatacccctagtgtctacttctacagacccaccggcgcttccaatttctttgaccctcaggtcatgaaggaagctctttccaaagcccttgtccctttttaccctatggctggtcgcttnaagagtgacgatgatggtcgtattgagatcgattgntaacgggtgcccggggtttcnctntcggttnttgntgataacnccttnctggttaatcgatgnnttttngggggntttttgc

SEQ ID NO: 137165 - DNA, 272 bp, Arabidopsis thaliana columbia
  unsure (1)..(272): unsure at all n locations
aacaacaaatnttaaacgttttactttgtgctgcacnactcaacctcaatggccgcctcaacaatggctctntcctcccctgcnttcgccggtaaggccgtcaagctttcccccgcggcatctgaagtcnttggaagcggccgtgtgacaatnaggaagactgttgccaagccaaagggcccatcaggcagcccatggtacggntctaaccgtgtcaagtacttgggtccattttttggggaataaccgggntacnttncggggagttttcc

SEQ ID NO: 137166 - DNA, 283 bp, Arabidopsis thaliana columbia
  unsure (1)..(283): unsure at all n locations
caagcncaagctcaagttcaagctcaacatcaccaaggtttcagctttcaatacacngctcctcctgctcctcctctgcngcaatatccttacttgcctcaccagccacacttcagttctcagcagcaatttagctctcagcaacnncctcctccaatcctctccntcccaacctctctggctctatctttaccntcatcatcatcaccgtcctcttcaacttccacntcagctgcaacaacagcancaaaaacagtagttataactncagcaacaaagnaag

SEQ ID NO: 137167 - DNA, 401 bp, Arabidopsis thaliana columbia
  unsure (1)..(401): unsure at all n locations
agccagctgaacagacttcactctctgcttngttctatncccatctntcaaaagaagcgggaatncctnatggtgtgctcaacattgtaactggttttggatcaactgctggagctgccattgcctcccatatggacgtagacaaagttagtttcactgggtcaacagatgttggaaggaagataatgcaagcngcagccgcaagtaatctcaaaaaagnttcccttgaattaggcggggaatcgccacttctcatattcaacggcggtgatattgncaaagccgcgatcttttcgcttttnggnttgcttttncaaacaaggggtggaaatttncgtgggggngctccttggggngtttttttncaagaagggttttttcggntaaggtttttgggggaa

SEQ ID NO: 137168 - DNA, 350 bp, Arabidopsis thaliana columbia
  unsure (1)..(350): unsure at all n locations
gcgtnagggaccnggcctggaantnccagggtcngcccactgcgtccgcagaaatgcaacgattattggttggtgaaattttgggaactgggaaaacttttcgatggcgacttcgaagcttcaagctatctggaatcaccctgccggacctaaaaccattcatttntgggcaccaacgttcaagtggggtattagcattgccaacattgcagactttgccaaacctncagaggaaacttttcctatcctcaacaaatcgggggttanatgcacttggtgttattttggtctnggttanaagcatggtaatcnaatccgaaaaaacttggnaccntttttcagnggttaat

SEQ ID NO: 137169 - DNA, 444 bp, Arabidopsis thaliana columbia
  unsure (1)..(444): unsure at all n locations
aaatccaaatcccaaaactttcccgagaaaactaaaaaaatggcaccaaaagccggaaagaaaccagcagagaaaaagcccgcagagaaagctccagcagaagaagagaaagtagccgaaaaagcaccagcagagaagaaaccaaaagccggaaaaaaactaccaaaagaagcagtcaccggaggagtcgagaagaagnagaaacgagtcangaaaagcacagagacatacaagatctacatcttcaaggtgttgaaacaagttcatccagntatttgggatctcaagtaaagctatggggtttttgnccagtttttttcaatggtnttttcggggaacttttcgcaagaagcttcaaaatttagctngggttttattagggancctcnggtttntttntttggggggttncngncannttttttngccttggttttcccnggg

SEQ ID NO: 137170 - DNA, 288 bp, Arabidopsis thaliana columbia
  unsure (1)..(288): unsure at all n locations
taagacaccagcttacttcgataaccattatttcatcaatctgttagaagggagagggttgttgatttcggataacgntctggtctcagaagatcatgaaggagagatctttcagaaagtttgggaatatgcagttaatcaagatcttttcttcatagattttgtggaatctatgttaaaaatgggtaatattaatgtncttacaggtattgaaggtgaaattagggagaattntagatttgtcaatatctgaaatcaaacatcaatcaatacaanttgtttgcactt

SEQ ID NO: 137171 - DNA, 417 bp, Arabidopsis thaliana columbia
  unsure (1)..(417): unsure at all n locations
cttacaacaacaaatcttaaacgttttactttgtgctgcacnactcaacctcaatggccgcctcaacaatggctctctcctcccctgccttcgccggtaaggccgtcaagctttcccccgcggcatctgaagtccttggaagcggccgtgtgacaatnaggaagactgttgccaagccaaagggcccatcaggcagcccatggtacggntctgaccgtgtcaagtacttgggtccattctctggcgaatcaccgagctaccttaccggagagttccccggagactangggttgggaaaccgccggattttcagttgacccccgngacntttggaaagganccgtgagctaggaagttntncacagaaggtnggcaannntnggagccttnggttnggtttcccctaggttttttggt

SEQ ID NO: 137172 - DNA, 427 bp, Arabidopsis thaliana columbia
  unsure (1)..(427): unsure at all n locations
ggcctggaattnccagggtcagcccactgtgtccaatcctaagcaacaaggccagaaaccacttgactcaccttacaggccaagtaaaggaaatnaaacaacatatgaggaaagttttaatcagttatggagtatgtccggtgaaagttgtccaattgggtcaataccaattagaaaaacaacaaagaatgatgttttaagggcaaattcagttcgacggtttggtcggaaattangaagncccattngacgtgattcatccggaggtggtcacggngcatncggttggtgtttgtaaaatgggagganccaattacttntgggngcttanngcaaagcattttacgtgtgggcgccacgttgtcacttgnttgctttatgnagntttaggtttatnctcangtttttgggctccatctttttggtt

SEQ ID NO: 137173 - DNA, 501 bp, Arabidopsis thaliana columbia
  unsure (1)..(501): unsure at all n locations
ctctcgtnttcctttactccgtcaaaaccatgtttctaagtcagtnccggagctgtaaacctttgctcgagtctcgtctacctttgctccgcctctntctctctaaatgtctcgatcagtccttcaaaaccacggctagtagcgaatacggtagtaagatcaacaaagtcacaaagcatgtcaatgaggaggatggtgcaactttctatgttactcgaaggggggcaatcgatagtnctgcccctgctgaatcaaaagcatatccaaaagcagctaatatcagttcaatcccatagtatgaggggatcttttctgggggaaacagagggaaggctacttcagacggtttggnactttttttgccctgagggatcatgggtggagagggnttgccataaaatgttatttttanggttncntagggttttggggggtnctttgatcccganttngggggntgcatttnttttggggnaaattngntccccaaanngttttngg

SEQ ID NO: 137174 - DNA, 408 bp, Arabidopsis thaliana columbia
  unsure (1)..(408): unsure at all n locations
aattcaaaacggagttgagcgtgccatacaggagtcttcttgtaatgctcttcttctcaaggtgaatcagattggtacagtaacagaagccattgaagtagtgaaaatggcaagggatgcccagtggggtgtggtgacatctcatagatgtggagaaacagaggactctttcatctctgacttatctgtgggtctcgcaacaggtgtgattaaagctggtgctccttgcagaggagaacgtactatgaagnntaacccattnctacgggtagaggaagagccttggggtcaaagcagttntatttccttgaggaagnttttgnaggntttctctncttnaaaccaaaatnncncnctntgggtatttaaatnttacactttctcgggctttacttccantgttcctcg

SEQ ID NO: 137175 - DNA, 439 bp, Arabidopsis thaliana columbia
  unsure (1)..(439): unsure at all n locations
catatggaggaatctncgcatcgcctgcttacgtcttcgagcctaatggtttactcaagggtaagaaggctactactcacccagtggtgagcgacaaactttcggacaagagtcacattgagcacagagtcgtggtagatggaaatntcataacaagcagagctccagggactgcaatggagttttcacttgccattgtcgaaaagttttacgggcgagagaaagctcttcagctcggaaaaggcaacacttgtntgatttcaaacaatgaaagtatgngagtggcttgaataaaaaagaaggctttgcctttnaagttatctcttctccccttggnaattanctttcctttatggntattttgccaatttgggccttgnctnagggnttggggggnnacctttttgccctttttaaaaggnttnancggggtttttct

SEQ ID NO: 137176 - DNA, 481 bp, Arabidopsis thaliana columbia
  unsure (1)..(481): unsure at all n locations
gttccattgggacacaccacaagcccttgaagatgcttatggnggattccgtggtgccgagattgtnaacgatttccgcgattatncggatatttgcttcaagaattttggagatagagtgaagcattggatgacattgaacgagccattgacagtggtgcaacaagggtatgttgcaggtgtaatggctccaggaagatgctccaaattcacaaaccctaattgcacagatggaaatggagccaccgagccttatatcgttggtcacaacctcatcctttctcacgggagccgccgtccaagtcttccagagaaaaatacaagggnttctnnaccaaggtcaaagttggtatttcttttnaacggggggttggaaccttgccatntccagatcccctanggttggntnacttngggaagggccatggccttcaaattgntttnttttttggggccctttttnnngggaanaccccgnttg

SEQ ID NO: 137177 - DNA, 486 bp, Arabidopsis thaliana columbia
  unsure (1)..(486): unsure at all n locations
gtactttggggtagagttgaagtgtgagagttggagacagtgcagcatagtgatgaatcaagatatggagcgttacagcaggaaagattcaaggggtaacttattcctctcgcggacagttcctcctaaggacgtagcaaaacaagttctctatcgaaaaccggaatctctagtctgtaggtatatgttgatctcaagtcttgaacaagagaaagctcgctggaagaggaggtttgggggattcaatgtgtggaggaagaacangggttctttgattctttgtgatggcaagagnaaggtgaaaaaatgattctgtaaataaatcctacgttggtagcatgtaaaaancctttttccaattttaaatgtggaatgaataatccccattntncagtaggcagattcccganttcctttaaaatttttatcccancaattttttctggtcaattnattaatccaagggccaaaccatcatttttcttt

SEQ ID NO: 137178 - DNA, 408 bp, Arabidopsis thaliana columbia
  unsure (1)..(408): unsure at all n locations
ccacaatacaaaacacaactttcatatataacaaaaaangttatagaaatggccaaagacgtggaaggacctgagggatttcagacaagagactacgaagatccgccaccaactccgtttttcgntgcggacgagcttaccaagtggtctttatacagagccgtcattgccgagttcgtagccactctcctcttcttgtacatcaccgttttaactgtcatcggttacaagattcagtccgacacaaaagccggtggagttgactgcggcggcgtcggaatccttggcatcgngtgggctttttggtggcatgantcttncatcccttgtnttanngnnaccgcccggtatntcangggtgggtcaacattaaaaccccttccggttgacgtttaggtnttnttnctt

SEQ ID NO: 137179 - DNA, 372 bp, Arabidopsis thaliana columbia
  unsure (1)..(372): unsure at all n locations
gaagaagaataagaataagaagaaagaaaattgaatggcggcaagagccaacaacaaatacacctctatcaacttcaaccacatccttcacaaagntcctccttcatcttcttcatcttcctcctctgcttctaattcctccgtngctcgttccaatggccgtatgctcgtcctcaccaaatnttccnccaaacctntaagatctccctccgctgctcccaccaccactacggccggacctcctatctntacagctccgaggatttcttcaaatcaaggcatcttntgatccagatccgngtcaanatcttttttttggtcccttagggnatncagggtctnngttcccgggnttttttttccaattggggc

SEQ ID NO: 137180 - DNA, 441 bp, Arabidopsis thaliana columbia
  unsure (1)..(441): unsure at all n locations
aacagnttcgcatcaaaccctaagaaactgaagatgaggccgatcctgatgaagggacatgaacgtccattgacgtttctaaggtacaacagagaaggagatctgcttttttcctgcgccaaggaccacacacccaccctctggtttnccgataacggcgagcgccttggaacttaccgtggtcacaacggtgctgtttggtgctgtgatgtctcccgagactcgtcaagattgatcactggtagtgctgatcaanactncaaaagctgtnggatgtaaaaanttgggaaaagaatttgttcacttttcaaagtttaaatgcccctacngggggctttgggatttcntttttgggnatcngcctttcanggnnttaaccnctgggccaatttttggacccgtaccnctgtttttcattttaaagggtttttngggaantcc

SEQ ID NO: 137181 - DNA, 534 bp, Arabidopsis thaliana columbia
  unsure (1)..(534): unsure at all n locations
ggcctgaagtncccgggtctgcccactgngtccnggtcgtggagatttataatgcaagactttcttcttcttcttcttcttcttcttcgaaagcttgagagtnctgcgtaaaaatnggtaatacgtattgtatctnaggaggttgtattgaacaagctagcgttggtgtggtcgaacgttggggtcgattcgagcatatagctgaaccgggatgtcatttcttcaaccctctcgccggtcaatggctcgccggagttctctccactaggatcaaatctcttgatgtcaaaattgaaaccaaaactaaggataatgtgttttttncaagctggttttgttcgatttcagtatcgtgtaggtgaaagcttagtgctgantgaatgcggttttaatnnagctttcaaaaacccntaaaggnggcagttcccaaagcttantgtctttnaatntgggtnaggggcttttgggcccaattnattgaccggntttaatgcccctttttttgancaaaaaaggggtgaagnttncccaagg

SEQ ID NO: 137182 - DNA, 269 bp, Arabidopsis thaliana columbia
  unsure (1)..(269): unsure at all n locations
gcgagtatggcgaccacacttcattgtntctccacactccatcttcttcctcgcactcatcaccctaaaaccctaaactctntcaaaccaatcaccaccaaatcacaaccatgtaaaaccccagaaataccctccactcccaacgctcttnagctccttaaatnatcctctctccctctngcagtcatcgcattgccttttttnctcgacccacaggatgcagcagcagctggaggngaattcggnntattagaggggagatcatntgc

SEQ ID NO: 137183 - DNA, 337 bp, Arabidopsis thaliana columbia
  unsure (1)..(337): unsure at all n locations
tnagggaccgggcctgaantccctgggcngcccactgggtccggattctgataatggcttctttnctaacaaaacccaaacccgttttcctctgtncaccatcgtnatctccaagaactttgaacacagcaacaccgtcattgaatttaaccagaatttnattcacccatcaccaaaagcttgctcctttnaagcctcctagtctcgttgttgcattctntgaaaagggtttgaagagagatgtcaccacagctgctgcagcgacggagggagattacagaaggntaatgttatctnatgtnttggtgaaggaagaaggnaaaagtagtttggtggg

SEQ ID NO: 137184 - DNA, 427 bp, Arabidopsis thaliana columbia
  unsure (1)..(427): unsure at all n locations
catctccactcgaatccggaagaagaacaaaaaccaaaaaaaaaaaccagaaaatcagagaaacataagcgaaccgacagagaaaaaaaatgtcttcgccaagcaaacgcagagaaatggatatgatgaagctgatgatgagcgattataaagtggaaacgttcaacgatggcatgcaaganttctatgttgaattcaatggtcccaaagacagtctctatcaaggaggtgtgtggaagataagagttgagcttccagatgcttatcccttataaancttccatcctgtttgggtttcaattacttaaaattttatcattcctaantgnttgatggaacttgtccgggggttcttgttttgnttttggatggngnnttaacccaaacttgggngggccnatnttccnnccttgttgaannnttnttt

SEQ ID NO: 137185 - DNA, 492 bp, Arabidopsis thaliana columbia
  unsure (1)..(492): unsure at all n locations
agaacacaggtacttcacttctgcaccngctcctactgacccggctaagctcccaaagcccgttcctaagcaggatggtaaatnatcttacggtaaacatgaggccattacagtgcaatcaccaccacgtaagcttagaagagtgatgcctgagcgtgggagggttgatagtttgaagtctcatgttgacaaggatcaacaagcacccatgtcattagatttnaccatcctcgctgagcgacctccaaacaggccaacaatcaccagtgctgatagatctcatctgaagaggaaactcgatcttaagttncagtaagacttgttggttatgcactcttcttttagcttctccattttanatgtcctggtggaaccacaaccattgttaagttggcaattttnctgctgcttnngnaatctggnggtttnttnctttcccatttttangntttgttncaacccagggggccctttngtttcccaantggnnat

SEQ ID NO: 137186 - DNA, 420 bp, Arabidopsis thaliana columbia
  unsure (1)..(420): unsure at all n locations
ctggaagaggatccttagcaggcttacttccatttnctgatnccaatgcagtcgtgcttgaaatggcaaatnaagttttacctgtagtgaaggcggtgnctgtcctggctggggtgtgcgcaacaaatccatttcgtcgtatggactatttcctgaagcagttggagtccattgggttcgttggtgtccagaactttccaactgttggtctctttaatggtaaattttagncaaaaatctttnaggagacagggaatggggatatgggtccttnaaagtttgaaatgntcttcagaagcgcacaaaattgggggctttttgaccccttccatattgntttcaaacccaaaaanaaaggtggtggaattggcaaaaancggggtnctggtnttnattaggtagncccncaatggggtctaa

SEQ ID NO: 137187 - DNA, 399 bp, Arabidopsis thaliana columbia
  unsure (1)..(399): unsure at all n locations
ccatgggaacttggactaacagaaactcaccaaacacttatcgcaaatggactaagagaaagagtcattttaagagtcgatggaggcttaaagagtggtgttgatgttctaatggctgcagctatgggtgctgatgaatacggattcggttccttggcaatnattgcnactggttgtgttatggctcgtatttgccacactaataattgcccagtgggtgtagcaagtcagagagaagaatttacgtgcaagattccctggnngtacctggtgatcttntcaaactaatttcttatacgtagcagaaagagggtnaagaggtttttttagncacaatttggggnttcaaccagttttaggttgccatcnatttggccgggccagagttncntnngnncc

SEQ ID NO: 137188 - DNA, 434 bp, Arabidopsis thaliana columbia
  unsure (1)..(434): unsure at all n locations
aaaatnggctttgagcagatgaaaagaatctccatcttcttctctatctcttggctatctctctctctaaactattcactcacacagtcattcttcgtcttcttctgtttcatgcaagattcaaaggcctcacctgcaagaaaaccttggtaccagagagctatggcggttgcnagattcgcaacgaattggagaacaatccctaaatcatcatcacaacaacaaccagagaattttngtccgtntcgaaaccctagcgtcaacagcaagtcatccaatcataaccaaatttatcaccagctgaggaaatgctcgtttctcaagggtagctgcgnatttttttcacttagggggtttgncctcttgnggtccggtttggtccataanggnggcgntttttcgggnttcangnccccnccggggaaggangtnna

SEQ ID NO: 137189 - DNA, 512 bp, Arabidopsis thaliana columbia
  unsure (1)..(512): unsure at all n locations
gaagaatccgagagcatgaatcgtaaagaactcggagagattggttctaagcttgtggttttttttcanagcaatgataaagagctctcttatgatgaccttttggactcaacaaatagttttnatcaagctaacatcattggctgtggcgggtttggtatggtttacaaagcaacgttaccagacggtaagaaagttgcgatcaagaagttatccggtgattgcggtcaaatcgaaagagaattcgaagcagaagttgaaacactctcaagagcacagcatccaaatcttgttcttntccgaggattctntttctacaaaaacggccggcttttaatctacctcgtatnatgggaaaccgggagcttaggcttattgggtncacgngcgttaacggcgggtcccagcgttntttaaggtggaaannccgttttnngaatcgcccaanggtcctncaaaaaggggttnnttttccttncattnanggggtgtgcccccnaaattttttcccc

SEQ ID NO: 137190 - DNA, 319 bp, Arabidopsis thaliana columbia
  unsure (1)..(319): unsure at all n locations
aagaaaataaaagatttgtagaatcaactaagaaaatggctagcactatnatgactacattgcctcagttcaatggtcttcgagccaccaaaatctctgcagctcctgtacaaggcctggcaagtnttcagcccatganacgcaagggaaatggagctttgggtgcaaaagtgtgacttcatcgggttcatcaccaaattcttantaatgggtancgtcggcngnccctngatgtttgttccgcgggggagatttcggactttncggccattcagcccaattggggaaggccggcnacttggnctttaggttnggaggc

SEQ ID NO: 137191 - DNA, 379 bp, Arabidopsis thaliana columbia
  unsure (1)..(379): unsure at all n locations
accacttttaagttttaacgnttagatgatcaacgttgctggaagtaggaaaattagataagagtactgatcaaatcctaagagagaatntccggcgtcacctcggagcctattgctatggatgccactcggttccagcacactccttactactgcnaagagaatgtgtatctnctctgcaagacgttgtgcgagaatggtgtagcggaggcaacgtgttctnatttgtttgtngttttnatctccaatgagaagaagcaggttccactttggcatcagaaagcttagtacccagagcttatnggggttntactttggggttatcatggtaancntntttcccaagggnggaaagaaaggtnnttttaggccctttggg

SEQ ID NO: 137192 - DNA, 489 bp, Arabidopsis thaliana columbia
  unsure (1)..(489): unsure at all n locations
gccgatggctctacctaaccagcaaaccgtggattaccctagcttcaagctcgttatcgttggcgatggaggcacagggtagaccacatttntaaagagacatcttactggagagtttgagaagaagtatgaacccactattggtgttgaggttcatcctcttgatttcttcactaactgtggcaagatccgtttctactgttgggatactgctggccaagagaaatttggtggtcttagggatggttactacatccatggacaatgtgctatcaatcatgtttgatgtcacaagcacggcttgacatacaaaggaatnttccaacatggnanccgtgatcttttccagggntttttggaaaacatccccaatttgttccttttgtnggggatnaaaagttnattgttgaggnccagggcaagtcaaggcccaagcagggnaannattncccanggggggaggncccccccgntttttngggntntttt

SEQ ID NO: 137193 - DNA, 485 bp, Arabidopsis thaliana columbia
  unsure (1)..(485): unsure at all n locations
acgtcatagatctaactccggaagaagaagaagatgagtgacgaaacgacgtcatctccgtccccagctccggcgaagaagaagcagaatctgggatggatggagtggatgaggggatggagcagtgttttcggggagattctcttccagaggatcacagcttctnatttggagaatcctcttcctcttccttccgtcaacgacctcacttgcgttgtcactggctccaccagcggcattggccgtnaaaccgcgaggcagcttncagaagctggtgctcatgttgtnatggccntaaggaacacaaaggcgggttcaagagctnntacntcaattgcagaacggattgtcttggtaaaaggttcccactcaaatattnnggcaattgggntttnatcttcctctcacttggattttttccngganattttctnagggtttnaacgtcggttaaggccttttaattttttgttnaaaanncttgg

SEQ ID NO: 137194 - DNA, 468 bp, Arabidopsis thaliana columbia
  unsure (1)..(468): unsure at all n locations
gtttcttggatgccgtggggctttccccggtcggggaatacatnccgagtttggcatggataggtaagattacgggttcanatggtaagctagagaaaataaccaagcagtttggtgattttatagaaaaagtgttgcaagancatgaggatacaactnccgacaaagaaacaccagatttttttgatatgttgctaacaattcaaagagatgagactgcacaatgccaattggataaaagcgacttaaaagtcatcatatttgaaatgtttttagggngcacggcaacaacttccgcggtaatagagtgggcgatgacacggctaatgngaaatccngaatntttnaaggaaccttcaaggttgagnttccgttccagtttcgaggntgnattcctatgtntccnggaaaaggagtttgaaaatttgnccncctttaaacctgtngtncaggggggtctttcggttg

SEQ ID NO: 137195 - DNA, 257 bp, Arabidopsis thaliana columbia
  unsure (1)..(257): unsure at all n locations
tgtnaaagtntcagctgggaccntagttactgtaaccaattggttatttggttggattatcacatacactttcaattttatgctagaatggaatgcatcaggaatgtncctcatcttctcaatggtctccgccagtncgatcgtatttatatacttttnggtaccngnggcaaaaggccggtcacttgaaggaatacangcactgctcaacaactctgtgcaataatatcattttcntttttcctttttggggaaat

SEQ ID NO: 137196 - DNA, 592 bp, Arabidopsis thaliana columbia
  unsure (1)..(592): unsure at all n locations
aacaatttcaaggactatctctacccagggaatgttggctgtgtacaactccttgtctgaagaaggtaaaaaagattttaagactgcatacagcgcatccttctatccttgtatggagattctctatgaatgtnacgaggatgtacaaagtggcagcgaaatccgaagtgttgtcttagccggtcgtcgcttctatgaaaaggaaggcttgccagcattccctatgggaaatattgaccngacaagaatgtggaaggtgggtgaacgcgtcaggaagtccagacctgctggtgacttgggtccattgtatcccttcacccgctggggtttatgtagcacttatgatggctcagattgagatcttttagggaggaaggtcactntttactcaggaaatcatcaacgggggtntgatttnaatccgnggcctttttaaacccntttttnacgccagggnggttccctcatggttgcaactntttaccncagaaannttggtccngggaatngggncccgggtttctaaaanctgccccaaaagtnttttgggttggcaatgncanaataacagnccnnttagaacttttttgcc

SEQ ID NO: 137197 - DNA, 558 bp, Arabidopsis thaliana columbia
  unsure (1)..(558): unsure at all n locations
gtacagtgnaagcttctgagatactgctggtgaagaagaaaagagatgaagtgtttctgaaggaccgtataccccttgaatttgcgattgctggttatgtgggtcttgcagctatctcaactgccacaatcccaataatatttccaccactgaaatggtactttgtcctgtgttcttatttcattgcacccgctctcgccttctgcaactnttatggaacggggctcacagactggagcctagcatcaaccnatggaaagatcggtcttttcataatcgcttccgttgtaggaagtgatggtggtgtcattgcgggtttagctgcctgtggtgtaatgnatgtcaatcgtctccaccgcagctngatctcatgnaagncttcaaaaacaggttaccctcaatttatnaacttnaaagtccntggttttaagccacttgtgggaccccaatgggctgtgtaatcgtccactaacatnttgntntntggctgcccttaanattgggnccatggccgnnnaagaccttcgnggnttccctgaaatgggtttnggattaggg

SEQ ID NO: 137198 - DNA, 325 bp, Arabidopsis thaliana columbia
  unsure (1)..(325): unsure at all n locations
cacaagtntcactctgttttttgtatnctttgaagtgcatttnnttctttnacaaggtgaaggaagagttcttgcactatatcggagtgaactatctctacgctccatctatttnatggcttctnatgcttcaatcagctccaatgatggaaccaaatagcgttttgtatcagacactattctggatctttnctgttccagtcttgacactagacataaagctttatggccagtggttcacaacggagaagagattttnntcgatgctagcaaacccgggcaagccaagtatcggtaatcgnaaacntcgtgggctnaacggggg

SEQ ID NO: 137199 - DNA, 504 bp, Arabidopsis thaliana columbia
  unsure (1)..(504): unsure at all n locations
acgttttccagctcttgttctttcgattctcagagaagacttttcagaacatcctccaactttntcagataagcaacaatggtgaaaggtcccggtctctacaccgaaatcggcaaaaaggccagagatcttctgtacaaagaccacaacagtgaccagaaattcagtatcaccactttctctcctgccggtgttgccatcacctcaaccggaactaagaaaggtgacttattgttgggagatgtcgcttttcagtcgaggcggaaggaccattactactgatttgaaaagtttgcactgattctacttttctgatcaacggtanccgttgatgaggctgcacccgggctgggggcaatttttaaggnttaagggttccctgnccaaattttttggaangntttgggcnnaaatttttntaagngcggcggngttttntnnaaaacaggggtttttcttnaggccccnttgnaanttttggggngggtggccaaatttttgtgg

SEQ ID NO: 137200 - DNA, 430 bp, Arabidopsis thaliana columbia
  unsure (1)..(430): unsure at all n locations
accaaaccaatcacttcactctctctaatcaaaaagcttttaacctcagccgttaaatctttctccgatcatgccgaccagaaacatcgccattggtggagtccaagaagaggtctaccaccccaacgcacttagggcggcgctcgctgagtttatctcgactttaatcttcgtcttcgccggatcaggctccggaattgctttcaacaagatcactgacaatggagccaccactccttccggcctcgtcggccgctgccttagntcatgnttttcgggtctctttgtcgntggctctgtttgggngntaanaatttccggtggncacgggtaaanccctgcccgttaacctttggggggttntaaattcnggggggggnaaaaaataaatttttccccccgggggggantttnnttancngggtttncc

SEQ ID NO: 137201 - DNA, 362 bp, Arabidopsis thaliana columbia
  unsure (1)..(362): unsure at all n locations
aaaaaaaaaaaaaacacaaaaagtttcaatggccgcctccacaatggctctntcctcccctgccttcgccggaaaggctgtgaacctttcccccgnggcatctgaagtcctcggaagcggccgtgtgacaatnaggaagactnttgccaagccaaagggtccatcaggcagcccatggtacggttccgaccgagtcaagtacttgggtccattctctggcgagtcaccgagctacctttaccggagagttncccggagactacggntggggcaacgttggancttttaagnttatccccgagacattcgnaaaggaanccgtgaagttagnaagttnttccacannaaggtgggcttatttt

SEQ ID NO: 137202 - DNA, 452 bp, Arabidopsis thaliana columbia
  unsure (1)..(452): unsure at all n locations
gtaggcaagcaagtggtatcatcaacaaacaaagcacttctcttttgattcgattctctctttaccttgaagcttcaatatcaaccaaatcttttttctcaaaatctcaaagaatctctcaaactcagtctcctatctgtctctctgcaaactattaccaaccagataatttagatatggaagctactcagaaacatatgattcaagaaggatcttcaatgttttaccatcaaccatcttcagtcaaacaaatggncctttctgttcagncatttgattcttactggcacacttggattcctcttcaggnaccaagnnttcatccttgtcttaacaaccaaaaccaacttnttttttnaaacccncaaggtttttnccncctaaatggaaaggncccnatttttttaagggccannancaaacaaactttttnaagggggttnncaaattaa

SEQ ID NO: 137203 - DNA, 395 bp, Arabidopsis thaliana columbia
  unsure (1)..(395): unsure at all n locations
acgtggtgtancaaaggntatggcattcaatggaagaaggccactttnngaacttacccgntaaaggcaaacccttgaacctccatacaaatcctcacgcagacccagcggaggntacattgtatcggattcttaacaagaacgggtttnctcccgaatgggtggagctcaacaaagngataagaaacaaagcaaaagaatggagagtttcactgaagaaagcatggacaatgaaactcgaggaagaccaatcgggatgggaagngagatcagatttnctgaaaaacgaattgaaacaatccaattacatggtatttcaggtnaatctgtcgttcctttcgggcccgtcaaattttttggccttnagttgnggaaagggntttttccgntttaaa

SEQ ID NO: 137204 - DNA, 418 bp, Arabidopsis thaliana columbia
  unsure (1)..(418): unsure at all n locations
cacgtaaaatggcgtctcttggccaaatcaccctgccacgcgcgccgtcgtcggagattggcctcttacgccgtcgatttgagcggccgatcatcagaacccggntcggattcaacggccggattgcgagcgtattgactaacgcaggggaccaagcggtgtcggtaaaagcgagtntgagccagaaggtgattnaagaggaagccaaagttattgtgggtacctacgcgcgggctccagtggttctctcgagtgggaaaggttgtaaatttttngaccctnaaggnaaagagtatctgggatttgtgcatcttggaatcgcctttgaaatnctccttnggcatggngatncccgaattgggttntgagctttcancttngcaaaattggggtttttttcccnntttaagcaantttt

SEQ ID NO: 137205 - DNA, 452 bp, Arabidopsis thaliana columbia
  unsure (1)..(452): unsure at all n locations
ggaatcagcaggaagagagagacatagaatcaggtctcagtttgtgcattcagcttccaatctaattgtgaatgcctccctatgtaagctccacgaagattcaaatgcgaacctagaacaagctaaagttcaggcttacaaagagaagacagaaaatgaatctcccacatcaacaatatgtgaggaaaagttgcaagagagttcagatggnaaaaatcagacaggtgaaattagtagttctcctttatccataactcctggngacagacctatcattggaatggttgctgctcatttgnatnaggaagagcattctcaaatttcancccaattggtggggatggtaatngggttncccaacttttcaaaccaagttncaaaggggncccnaaagntgggtttggnttnaacncctttcgnggggggtttgggngggcctttnagaaggnggg

SEQ ID NO: 137206 - DNA, 455 bp, Arabidopsis thaliana columbia
  unsure (1)..(455): unsure at all n locations
gcgttngaggcataatccagggatctctaccgattggactcttgaggaacaatctctattggaagatttncttgtcaagtacgcgacagaaccgtcggttttncgatatgcgaagattgctatgaaaatnaaagataagactgtncgagatgttgccctgcgctgtagatggatgactaaaaaggaaaacggaaagcgtaggaaagaagatcattcctcgaggaaaagcaangntaagaaagaaaaagctacagattcttcagccaagtcctcatctcatttgaatgttcatcctaatggtccttcttatgctccgcctatnatgnctatcgntaccgntgatggtatttcataataaagctatttggtgggtgttagtggngattttttnggggcaaaattgctcaaaatnttcaatcaanntttcaacaaaatttttaagtttnccagctnca

SEQ ID NO: 137207 - DNA, 450 bp, Arabidopsis thaliana columbia
  unsure (1)..(450): unsure at all n locations
cccttnacaaggtcacttaaacccaatgtttcagctcgccaacatcttcttcaacagaggcttctccatcactgtaatccacactaagttcaactctccaaactcttccaatttccctcacttcagtttcgtatccattcccgatggcttgtctgaacctgaatcctatcccgatgtcattgagattctccatgacctcaattccaagtgtgttgctccttttggtgattgcttaaagaagcttatatctgaagnaccaacagcagcttgtgtgattgttgacggtctttgggacttcactcacgggttttanccggggaattcaaatttncccgnggnttttttttncggancggttaaccccttaagttttngggnggttttctaaaaggttcaaggttttacgggggaaaaagggnntntttttttttnaaggggcctnnggnnggt

SEQ ID NO: 137208 - DNA, 429 bp, Arabidopsis thaliana columbia
  unsure (1)..(429): unsure at all n locations
agaagatcaatgacgttgaagaagcttgacgcgaatccatcgaccttagaatcgattttacaggaactgaaatcagacgagacaaatcgtagcaagatcaatttcatactcttcctcgccgacaatnatcccaccaccggtcaaagctggtgtccagactgtgttagagctgaacctgtgatttacaagactctagaggaatttccagaggaggtgaatctaattcgtgcttangccggagaccgaccgacgtggcggacttcggcggaatccttngagagtttgattctcggtttaagntaaccggnggtacccaaactntttgtttcgnttgggattngtganctctttttaaaggaccggcttttaaggtncattaaaggttaanccttcccncaanttnaattnttccccttttttgnaccaanc

SEQ ID NO: 137209 - DNA, 518 bp, Arabidopsis thaliana columbia
  unsure (1)..(518): unsure at all n locations
ttcgtntctctttctacggttcaaacattaaaaagatagatggagaagaggagctctattaaaaacagaggagtacttagattaccaccagggttccgatttcacccgaccgatgaagagctagtggttcaatatttacgtcgaaaagtaaccggtttacccttaccagcttctgtaataccggaaaccgatgtttgtaaatccgatccatgggatttaccaggtgattgtnaatcanagatgtatttttttagcacgagggaagctaaatacccgnacggaaaccggtcggaccggtctaccggttcggggttattggnaagcggcttgtctcgataaagcagatcggtaagnaggagctttttccgtnggggntnaaggaaaaccccttgttttnttcaaaagggtaancccccaaacggggcaaggacttaactggggtttttcaannaaaancgccttttttgtttacaaanaaggttttttttttttggccannnatnaatttgggttttttt

SEQ ID NO: 137210 - DNA, 345 bp, Arabidopsis thaliana columbia
  unsure (1)..(345): unsure at all n locations
agataaggaaaccatgtctgtgtcagcgatctttggtaccggaatcgtcaccgtcgctgcttctccggttctccgccaatttcaagttccaaaattgggtaatggaggtggattagggatggtgattgagtgttcgtcgaggccacagaagaaatcgacagcttatnacaggaagacggggccgaagaagactcagccttgggncattaagagaaagcctactntgtatgctcctcttccttctcttccggcggaattgagtccngttanctctttgctttccgacgnccggttgttcccccngttcctnncttttccctnccggnanantttggtttcaagggt

SEQ ID NO: 137211 - DNA, 421 bp, Arabidopsis thaliana columbia
  unsure (1)..(421): unsure at all n locations
agtagtaccgtgagggaagggtgaaaagaaagagaaaaaagaaagatatggcaggactcatcaacaagatcggagacgcactccacattggaggaggcaacaaggaaggtgagcacaagaaggaagaggaacacaagaaacacgttnacgagcacaagantngtgagcacaaagaaggtatttttnacaagatcaaagncaagatccacggtggtgaaggtaaaagccacgacggagaaggcaaaagccacgacggtntgaaggaaaagaaggaggncaagaagggggaggaancatcatgatgatggtnaccncagcagcagcattttccagcggccacggntttaaggtttanggaaattttnggggggttcccttttaattaaaacanntnttggtttttggcttttttttaatttaa

SEQ ID NO: 137212 - DNA, 406 bp, Arabidopsis thaliana columbia
  unsure (1)..(406): unsure at all n locations
aacaatggcggctgctgcgaaggagatcctacggcgaccagtggcggcaacaataaggctaaccgttccggcgggaggagcgaggccagccccaccggtaggtccggcgctaggtcagtacaggcttaacctgatggctttctgcaaagacttcaacgctaggactcaaaagtacaaaccagacactccgatggccgtgacgntaacggcgttcaaggncaactctttcggattcaccgtcaagtcttcgacgggtgtcgtgggtacatcaaggaaagcagcttgagtcgntaaaaggaagnacancgcccgggtcattttttcggtnacgcggntnttttggnttaggcnaagttttccganatccccgaaggttnaagcanacggnttccctttttttaaantt

SEQ ID NO: 137213 - DNA, 414 bp, Arabidopsis thaliana columbia
  unsure (1)..(414): unsure at all n locations
ccgtttctnataacatatccggtttcatacatagcaaacgcctttnatcttggacgtgttttcattcatttctggtctgttaacttcaaatttgttccagaacgagtttttgtgtgcaaagaatttgcagtatgcttgctcattgctcacctttttctccttgtggcgttcgcaaattataagtggtgcaagcatgaaggcgggattataggcttcaagcggtctaggcatttcttcttgacantttccgtctttcantctcggntcaagtgatggatcaagccctnacgggntttattacggaaagnancatgttcggnaaggggccangttttntttggggnaatttcaatcngggaaatggaatttttccccgggcctcttggaactaaccaggtctnnactcaaagggac

SEQ ID NO: 137214 - DNA, 426 bp, Arabidopsis thaliana columbia
  unsure (1)..(426): unsure at all n locations
ggaaagaccggatggntcggtggtctgcttggaaagatatgtgataagnaaggaattgcttacgagtatgggaaaggtcggttggaggntcgatcttctcttctgcaggatattcagagtgttaagccaacccatgttttcaattccnctggtgtgactgggagacccaatgttgactggtgtgagtctcacaagaccgagactatccgtgccaatgtagctggcacattgactctagctgatgtctgcagagagcacggactcctaatnatgaatttcgctactggttgtatattcgaatatnacggcaagcatccggaaggttcaggaatttggcttcaaggnggangnnnacacccaactttaattggnnctttntactcggaaaccaaagccatggtcggggggnncttaaaggggtttcna

SEQ ID NO: 137215 - DNA, 456 bp, Arabidopsis thaliana columbia
  unsure (1)..(456): unsure at all n locations
atttggtgaaattgattggttattgttgtgaggaagaacatagaactcttgtttatgagttcatgcctcgtggaagcttagagaatcaacttttnagaagatactctgcctcgcttccatggtcaacaagaatgaagatcgctcatggagctgcaacaggacttcaatttctacacgaagctgaaaatcctgttatctatcgggatttcaaagcctccaatatcttgttagattccgattacacggcgaaactctctgacttcgggttagccaaagacggaccngaaggggncggcactcatgtgtcaantcgagtnatnggcacacaaaggtncggagntccngaaatacatcatgcccggtnaatttaanagcaagaaggttccggtttaaanactttngggtttnttttccaaagggtttttcccngcnggggtncttttgccaaaaaggggt

SEQ ID NO: 137216 - DNA, 405 bp, Arabidopsis thaliana columbia
  unsure (1)..(405): unsure at all n locations
ctcgtcggagcgtatatctcagacacttacgttggccgcttcaagaccatcgctttcgcctcattcgccactctcctcggactaataacaattacactcacagcatcgtttcctcaactccacccagcatcatgcaacagccaggacccactcagttgcggcggtccgaataagctccagatcggagttttgctattgggactctgtttcctctccgtagggagtggaggaatacgaccttgtagcatcccttttggggttgatcagtttgaccaacggactgaggaaggggttaaaggagtggccaatttnttcaaatggnattacatggctttcactgngggtntggtcataaaaanaccngnnntngtttatncccgggnaaaanaatgggnnacggtttna

SEQ ID NO: 137217 - DNA, 300 bp, Arabidopsis thaliana columbia
  unsure (1)..(300): unsure at all n locations
tttaagcatctntntcccttcaaagaaaatatcacaaaaatggcaaacgtctccnctttgctcaccatagctcttctcctttgctccacgctaatgtgcactgcccgccccgaaccggccatctccatctctatcacgactgctgccgatccatgtaacatggagaagaagatagaaggaaaattagatgacatgcatatggtagnagnaaacttgtggtgcagacggncggagnttncntaatgagggggnccttgggcggtcataccggttacancttttncccggaggaggaggcat

SEQ ID NO: 137218 - DNA, 481 bp, Arabidopsis thaliana columbia
  unsure (1)..(481): unsure at all n locations
ggggctcgcaggaattctgtctgcgtctccgaaccaattctnttcttcttctctcgatccgatccgttttctacttctntnaatttcgaaccaattggatcgcatctnacgggggcgaggacgaggaagaagaatttttnctccgggataattgtctcatctnatttatatcggaaaaaaggtcgcttgccggataggacacgatccactttcataaaggagagatttttacagattcagtggatgccatggatgtncctagctcttggnatgctttacggaaacaggctagaaagattgaaagctcagcttgacggngcagattcattcataatccgtagncctttgtttcaaccaaaaggnttttatccaaagtcaagatgggttcctnaggggtnatattnaaagcctnggaattttacctttacttcttagggaaccttnaaccaaggttaatcccccantttnaaacantggggtt

SEQ ID NO: 137219 - DNA, 432 bp, Arabidopsis thaliana columbia
  unsure (1)..(432): unsure at all n locations
gaaaggttgaaaccattagtaaagaaatcataaagccatcttcgccaactccaaataatctccaaactctccaactctcaatttacgatcacatccttcctccagtttacacagtagcctttctnttctacaccaaaaatgatttgntctctcaagaacacacttcccacaaactcaagacttctctgtctgaaaccctgaccaagttctaccctcttgccggaagaatcaccggagtaaccgtcgattgtaccgatgaagggagctatctttgtcgatgntcgtgtcaataactgtcctntcactgaattttttccagngccctnattttggngggcccccaaanagtttgctttcctttaaaacggggggggacaaacccctttnttggggttntttaannggggggctttttnttnttngnggggngaa

SEQ ID NO: 137220 - DNA, 315 bp, Arabidopsis thaliana columbia
  unsure (1)..(315): unsure at all n locations
gcggcgcattcagagattcaaactcagagaaaatggtggcgacaggcttattcgtggggctaaacaaaggacacgttgttaccaaacgcgagcaacctcctcgccctaacaacagaaaagggaaaacaagcaaaaggactattttnatcaggaatctcatcaaggaagttgcgggtcaagctccctatgagaagaggntcactgagcttttnaaggttggtaaagccaagggagctcttaaagttnccagcggaaantngggacctcccangggggttaacggaagnaaaagaggggnttttttnggtnttntcc

SEQ ID NO: 137221 - DNA, 350 bp, Arabidopsis thaliana columbia
  unsure (1)..(350): unsure at all n locations
tggcttacaacaacaaatcttaaacgttttactttgtnctgcactactcaacctcaatggccgcctcaacaatggctctntcctcccctgccttcgccggtaaggccgtcaagctttcccccgcggcatctgaagtccttggaagcggccgtgtgacaatnaggaagactgttgccaagccaaagggcccatcaggcagcccatggtacggntctnaccgtgtcaagtacttgggtccattctctggcgaatcaccgagctaccttacccggggagttcccggaggntnngggntgggcaacgccggggtttttaannttcccccgggncattttgaagggaacctngng

SEQ ID NO: 137222 - DNA, 365 bp, Arabidopsis thaliana columbia
  unsure (1)..(365): unsure at all n locations
ggcccgaattncccgggcagcccactggntccgggtangcttcaccggccnggaaaaaccgtctgccttcaccggagctggtggatacatcgcttcttggattgtaaagatacttctcgagagaggttacacagtcaaaggaaccgtacggaatccagatgatccgaagaacacacatttnanagaactagaaggaggaaaggagagactgattcttttgcaaagcagatcttcaggactncgaggctcttaaggcggcggtttatggtttnaaaggnggttttaaaaagggttttcccttaaaccnggggttcccggacnaatttgggggcccccccccntnatttgggccccnttttttaaaa

SEQ ID NO: 137223 - DNA, 202 bp, Arabidopsis thaliana columbia
  unsure (1)..(202): unsure at all n locations
acaaaaaaaaacttgcagaagaatgaaagaaaaagcaataaccctccaaaccaaattntaaagcntcaaatttggaatattcccttttttcttccttcccttttttttttttnaattngccatttactcattattgancttatgtnagacgncctcctctgtttctttctncctcgtaacagtaaagggtcttccttttaaa

SEQ ID NO: 137224 - DNA, 327 bp, Arabidopsis thaliana columbia
  unsure (1)..(327): unsure at all n locations
atcgcttgaagaagcgattgaaatagttagaaatcgcggtgggatcaagaaagctcaagaattagcaaaggagaaagctgaacttgcgttaaagaatttaanttgtcttcctaggagtggtttcanatcggctcttgaggatatggtaatgtttaancttgaaaggattgattagtttcaaagggtatttggcagaggaaactgtaacaacactctttacttgtncaaaacntcaaacacagattttttttttaaccgtatnncataatggngtaataaccaaaaatncatgcttatnatngcaaantaaaggtaacncaatttttt

SEQ ID NO: 137225 - DNA, 271 bp, Arabidopsis thaliana columbia
  unsure (1)..(271): unsure at all n locations
gttcataaatccaaaaccactcatttttntattactgaaattttnttnagagaagaagaagaagaagcaaaatggccacaagcgcatcacctttnctctcaccaaccacattntccactgcaatctcccacaaaaaccctaactccatctaattccatggccttcgtcccctccgtctaggtggctcctcctccgncctacccaaactatcaaccaccaggagggggccacggacttnacggatacggagnaggtggaggccactntggng

SEQ ID NO: 137226 - DNA, 340 bp, Arabidopsis thaliana columbia
  unsure (1)..(340): unsure at all n locations
aaagctaacgcatagagagagccatatcgtcccaaaaaaaagcaaaagtccaaaaaaaaacaactccaaaacattctctcttagctctttactctttagtttctctctctctctctgcctttntctttgttgaagttcatggatgctacgaagtggactcagggttttcaagaaatgataaacgtaaagccaatggagcaaatgatttctagcacccaacaacancacaaccgcaacaaccacccacatttattggcanccacaacanggccaaanggcaccggattccaatgggggttccggggggntttcccnaananggggtttnnggtnggnactt

SEQ ID NO: 137227 - DNA, 318 bp, Arabidopsis thaliana columbia
  unsure (1)..(318): unsure at all n locations
aagttggtttcgagtaactcacagactacgggagatacttcgagtttggaagctgctgatgtatatnttgttnattcggaaatacagacaaacccggttactcataagcagagatctgtttctccttcgcctcaaatggctgtncccgatgtgtttaaggaagcnaggtctgagcgtaaganatttnctactccacatccaagaagagtggaatcggaaaagggaatgaagcctaagtnatctcataaaaacncctttgacaagngntcatttaacttgcgggctccttcangtcctatcagaggtcttgggaccttt

SEQ ID NO: 137228 - DNA, 461 bp, Arabidopsis thaliana columbia
  unsure (1)..(461): unsure at all n locations
gttaatgcaaatcattgaggtcttggatgaacgtgcgcgtgatcagcgtctcattgcattactagaaaaataccataaatctcaaaagaacagggttttggtatttnctttatacaaggtggaagctgaacgtctcgagcgttttcttcagcaaagaggttggaaagctgtatctatacacggaaacaaagcacagagcgaacgtaccaggtctttatcattgttcaaagaaggatcctgcccgttactggtggctactgatgttgcagcaagagggctttgatatccccggacggtggaagtttgtgataaactacaantttnccttttaacaaccaggggtttttgttcacaggatncgggngggccaggnagggccgggttaaaaaggggngttttaccaaaaccttttttnaagncccctttnccaaggggnttttnnaggggnncnttttaanttt

SEQ ID NO: 137229 - DNA, 463 bp, Arabidopsis thaliana columbia
  unsure (1)..(463): unsure at all n locations
tttaccaacttgcgttcgaagcaagaaactgctcctccatcatcttcctctattgatcttcttcatattctcaagtttactccaaaaagtgcgaggtagagaagaggaaactacaaaccaagaacattaaatggattgctcaatctgcaccacaatgccatctatattaagaccaccaagaaacacaatatgtggatcatgctacgaaggggctagaacaacaattgcgctgctcaagaaacttgagggctcgaaagaagatcgtcantgacaaatcgnaccataattccaccatcaaataatggctcctctatttcttcgnctcctttgttttctttgtgagccgcaanccattaggggaggtgntcaaatggggtgnaaaaccttgnaaggaaccctnggangnccaggnggnaaggatnngnctttnttaaggcaggtttttntncgggttttaaaggac

SEQ ID NO: 137230 - DNA, 570 bp, Arabidopsis thaliana columbia
  unsure (1)..(570): unsure at all n locations
aattaatagttgaaagggccaaagatagagatgataaagacaggaaggagagatagtagagggagctacttgggagatgttgagactctaatccctaaccacaatgactctctttcctctgttctctccacctttaactccattggcatcgatgtcgaagccaccgtcgctctcttaggtgctcactcagtgggtagggtccactgcgttaacctagtgcaccggctatacccaacgattgacccgactcttgacccaagttacggcctttacttaaaaaaacgttgcccaagtccaacttcgggacccgaacggcgtcttgtanttccggaaacgatcggtgagnncttcgnatgggttgtaggcaacatgtntttncaaagaccatcaattggcccattaaggggncttntttggtnattgatnattgagnttagcccccggtttccagggcccgaacngtttttnggcaanattggcttngggcaattgggtantttcaatggnagttttaagggggggnaagngtttttcccgggccaanccnntttaggggggccaagggggtta

SEQ ID NO: 137231 - DNA, 266 bp, Arabidopsis thaliana columbia
  unsure (1)..(266): unsure at all n locations
ggatcttgatcatgacttctattcgaagaaatcagagattaggcatatgatagaatcagaggggattccatatacatacatttgctgcggactgttcatgagagtnctacttccatcgcttgtgcaaccggggcttcaatctcctccaacagataaagtcacagtttttggagatggaaacgttaaagctgttttcgtgaataatgtcggtgttgcagcatttnctatcaagncggntaggtgatccnngnacantgnataagncc

SEQ ID NO: 137232 - DNA, 394 bp, Arabidopsis thaliana columbia
  unsure (1)..(394): unsure at all n locations
ctccgatgagaatnctgatgaagatccggagattaggttttcggtgaaggatgagggaccgattggaaggactttnaaggaagcgatggtgaagaaggggaaggagattatnctggagaaggttagggtttatntggaggctatggcgagaggaggcccgtntagggatgaattggaatcgaagaaggttgcnccgaaatcggtagcggctggntcagctacggtggcggtggagaagtctggtgctgccccggtggtgtctgctgctgcggtngagagtaaggtagttaaggagaagaagaaggcgaagactaaggaagggtttaagacaattactatgaccnagaaagtttaatttncaagacctaagggattttntntnnaaattttnaat

SEQ ID NO: 137233 - DNA, 436 bp, Arabidopsis thaliana columbia
  unsure (1)..(436): unsure at all n locations
ataccggataaggtttgcatggtctctaagacctcaggttcttcctcacagtcctttctaaagaatcatcatccatggatgtacgttgtttgatctctccaaatcttttgaactcgaagattaaagtttccggcaatactcatcaccttcccttttnttccctctccaagaaacaccaagcttcttccgcagccattaatggaggagggagctcaaaaacagtgaagcgtctgatcactttatctcctagtgaaggcaaatggaatggaaattggaagnctcagtacggtgtctctttgcggtgatcttcaacttcaaagaccttgtttaaagatgggcctcccaattncccgnggtttttttggnccctttntttncaaagggacggggggnatngggccntttnantagnttggaggatnaaggnnttnttttg

SEQ ID NO: 137234 - DNA, 396 bp, Arabidopsis thaliana columbia
  unsure (1)..(396): unsure at all n locations
ggacaatgcaaacgtctacattgcaatggagctatgtgaaggtggtgagcttcttgacagaatactagcaaggggagggaaatactcagagaatgacgcaaaaccagtgattatacaaattctgaatgtggtagctttctgtcatttccaaggagttgttcatcgagaccttaaaccagagaacttcttgtacacttncaaggaggaggatttctcagcttaaagcgntagactttggcttatcagactttttcaagaccngatgaggggctaaccggntattagtggggagggcanactatgtaggctnccngaggttcttcaaaagntcattttcaacaaaaggcgggtttttttgggcanncggggtcanaggnaaacatnccnctnttgggg

SEQ ID NO: 137235 - DNA, 532 bp, Arabidopsis thaliana columbia
  unsure (1)..(532): unsure at all n locations
gacgagagagctaaagcaaggagcaaccctaaccatggcgactcaaccagctactgaatctgtgcaatgcttcggaaggaagaagaccgcagtggccgtcactcactgcaagcntggatctggtttgatcaagctcaacggttgcccaatcgagcttttccagcctgagatcctccgattcaagatcttcgagccggttcttctcctcggaaagcaccgtttcgctggtgtgaacatgaggatccgtgtcaaggtgggtggtcacacatcccaggtttacggcatccgtcagagtatcgcgaaggctcttgttgcgtactaccagaagtatgtggatgagcaagtcgaagnaggaggattaagggtatctttggtgagnattatnagncctttccttttnggggancccagnangttttancccaaaaattttngnggcccggggccccttntttnnttnccaaaggtttccctttaaaaaanggggtttttttttttttttaaaaatnggnaancccaangttttttgggg

SEQ ID NO: 137236 - DNA, 530 bp, Arabidopsis thaliana columbia
  unsure (1)..(530): unsure at all n locations
catttncttaccactcaaagagtgcgcactcattatcatcgtttgaaactaaacatggcgacggagaaaagcaagattctggtgatcggaggaactggttacatcgggaaattcctagtagaagcgagcgccaaagctggccactccacattcgctctcgttagagaagcaactctatccgatcctgtcaagggcaaaaccgtccagagtttcaaagatctcggcgtcacaatactacacggagatttgaatgatcacgagagcttagtgaaggctattaaacaggttgatgtggtgatatctaccnttgggagcattcaaaatctttgggtcaaaaccaaggttcaattttccggccatcaaaggaagccggtaatgtcaagagantctttnccgcctgagttttggggtngattttggtnaggccgngttcggtttagcccgttaaatgggtttttcaagggaggttcagtncggggncccntccgagnggngggattccnncatttngttnttccgttcnttngggt

SEQ ID NO: 137237 - DNA, 419 bp, Arabidopsis thaliana columbia
  unsure (1)..(419): unsure at all n locations
taaaaaaccgtcaaaagaggctaatggtcatgctcagggcgtaaagactgatgttaatggattgcaagctctcanagataatccagaagcaatcagaactttccagaatttaatttcaaaaactgatcccgatacacttgctgctctaagcggaggcaaagctggagacatgtcaccggacatgttcaaaactgcgtcaagtatgataggcaaaatgtcacctgaagagattcaaaaantggttcaaacagcctcttcgtttaaaggggttaccctttcggcccgacttgggcctcttnccgaaacgggtttttcanccccacctgncatggttaaactttgcatcttanattntgggntaanttttccccnnagggcgttaaaggggttttttacctgggntnggntttttnaanaaa

SEQ ID NO: 137238 - DNA, 508 bp, Arabidopsis thaliana columbia
  unsure (1)..(508): unsure at all n locations
cgaaggatgctcaacagatcaaaagtcgtttgtncttcttcatcttctgtaatggatccgtataagactcttaagatccgacccgattcatctgaatacgaggtcaagaaagctttcagacaactcgctaaaaagtatcatcctgatgtttgtagaggaagcaattntggggtacagtttcagacaattaacgaagcttacgatattntnttgaagcaaattaaaaatcagatggaagggacggaggaatttnagccgttcgatgtatacggcgagggattgaacggaatgaatgatnccanattgcngcacggtggggagaattgnttggattggagggagcagggaccccgtggttaccccctctcacggtaatcccttcggtttattaacggntgttttccctattaaatttcgnaagaattatcccaatttgtttaaataccatntgggggggcttaaagnccccntntnatagggaatttttccngggnantngttcttaatg

SEQ ID NO: 137239 - DNA, 368 bp, Arabidopsis thaliana columbia
  unsure (1)..(368): unsure at all n locations
ctcgttttatttacacattaatccgaaaatnccatgctttaccaacctctcaggtctgtttataagtaagtnccatagcatgaaggatctgacttggatattgtttgctccaaatcttgtctacctatacattggcgattcaagagaagtgggagaaataataaacaaagagaaagcaaccaatcttacaagtattacaccatttctgaaactaggaaggttgtatttgtatgatttnccgaagctggagagtttctacnggagtccnctcccctttncggttttnttgaccatggntgttggcaacttgtccaaagnttgagnaaggttccattaaatnncttcaaggtgtccccattaggtgnagg

SEQ ID NO: 137240 - DNA, 229 bp, Arabidopsis thaliana columbia
  unsure (1)..(229): unsure at all n locations
aaaagtcgaagaagaaaagtntcatgaacttctacaaattctnaatcacttcgtcgaaacantcactcataaaccctaaatccaaaccaaagatctcgatcagtacaccatcaatatctcangangaagtagaagaaaaaccaatcgtccagtcgaataaaagtcatcaaaaccatgtgatgagggatatatncganttagagnctacttgtagtaggaatnatgaaag

SEQ ID NO: 137241 - DNA, 275 bp, Arabidopsis thaliana columbia
  unsure (1)..(275): unsure at all n locations
ggcaatgcttacngctgttaatggtgctgttaaactcgtggtagataggccatataaggccgggaatcctatagtngtntggtgtgggccacaaccaaatncaaaattccttctaanctatggatttnttgatgaggataacccttataanagagtaatagttgaggcagcgttgaacactgaggatcctcaataccaggacaagagaatggttgcncaaaggaacggaaanttatcccaacaggtatttnaggttcgtttgggaaaagaaagng

SEQ ID NO: 137242 - DNA, 430 bp, Arabidopsis thaliana columbia
  unsure (1)..(430): unsure at all n locations
gaagaactctacagaccaagcactatcaaatgctcgaccagacaacttaccgactgatacaagcagttcttttgtccataacctgaagaaatctgtnagggaagcggctttattgattccttcttcagcaggctcatcacgggatagtcaatccgatgagggctccgagcattattttgtacctctttcagcaactggcttttcccgttttccatcagaaaccaaagccctgcctctnanagggtcgagagcacttacctctctnagcgagccttcgtttnttgaacccaatgttcccggtagcttttcaccaagcaagtacaggggtatacctganaaggtattgtggtcttgnntnattcaaagtttncnggttatggggacggggtttttttgnngggttntggancaaacagngtaggtttttntt

SEQ ID NO: 137243 - DNA, 483 bp, Arabidopsis thaliana columbia
  unsure (1)..(483): unsure at all n locations
ggcgacgtcgatgcagtggatcatggcgatcatggtgaagtatccagagatacagaggaaagtatacgaggaaatgaagagtgcgttcgccggagaagaaggagaaagagaagagatcagagaagaggatttggggaagttgagttacctcaaagctgtgatcttggagtntctaagaagacaccctcctggtcattacttgtnttaccataaggtcacacacgacaccgttttgggtggatttntcattccgcgccaaggtactataaactttatggtaggagaaatgggccgggacccaaaaatatggggagatnctctaacggttcaaagccagaaagattttttagaggaccgggngaagccatgtaatttttaataattccggggaccttgnnnggtttaaaaattaatncccntttggncccggcccgccggntttttncccggttaangngttttnnttgcttnaacttcgaaatt

SEQ ID NO: 137244 - DNA, 326 bp, Arabidopsis thaliana columbia
  unsure (1)..(326): unsure at all n locations
tcgtcttcttcgataatctccctcttgtttcaatcaagaatgattganttatctacttnatctcctgcggagatcacggtnatggnatccgtgtnctgtntttncctctcnatgcacttnactatgcagcttgtatcccagcatctgtttnactggaagaaacctaatgaacagagagccattctaatnatggtccttatggctcctgtttacgctatcaactctttngtgggcttgtaagatgctaaaggaagcaaacctttctccatgtttctagacggccggtaaggaatgcaatgaggcacttgtaaatnctaaaatcctgg

SEQ ID NO: 137245 - DNA, 457 bp, Arabidopsis thaliana columbia
  unsure (1)..(457): unsure at all n locations
caacgtgaaagagcaattccaggttctccaaagcaaactggataaaaaggacgaccggcgtgtgaaagagctgtttgatgacatggagaaaatnaggcagcaatttgaatccatagcgaggccaacgttagagatagagattccatcacctagaagcagtgttacgtcccctaaaagcagtgctacatcacccaaatctcccaagcctagcagtagtagcatgaatgcttcaactgaatctactcagacccaaaagccagagctgagcaattctcctcaggcacccaatcctgcagctggttccagtcaagngttttaacccctgaaggccggacntagccgagcttggaatcttgantttnggtaagggtnggctngtgnattacctctttcaagttgngggttnntngggttgggaattnggnttnancttggggaaagaccttcnggtnggttt

SEQ ID NO: 137246 - DNA, 455 bp, Arabidopsis thaliana columbia
  unsure (1)..(455): unsure at all n locations
taaatctaaaccgttatcgatacggcaaaaatacaaccccaaatctatccatctntctctctatctatcttttttttcctcggcaatggcggaagctaaacccagaaatctgagaatngtnatgttccctttnatgggacaaggccatatcatccngtttgtngctttagcccttcgtttagagaagattatgattatgaacagagccaacaaaaccaccatctctatgatcaatactccttcgaacatccccaaaatacggtccaatcttccacctgaatcctccataagtntcatagggttacctttcaacagctctgatcatgggctttccttacggcgggcgngaatttngnttctgttccttnactcttntggtaacaagncttcttnaagnttntagggtggtttgtgagccctttgggggntttatgcggggtttttnaggagaaggg

SEQ ID NO: 137247 - DNA, 402 bp, Arabidopsis thaliana columbia
  unsure (1)..(402): unsure at all n locations
gatgcaactgggcgacaaaaggtgctacttttggcgaggacaaacatagctctaatggaaaaagtgttgtagaacttactaacggatcttnagaggatggtagagagctgtcaaatgaagatgcccctgaaaacaatcctcaatttacaactgtctatgtaggaaatctctctccagaagtaactcagcttgatctacaccgtctattctatacccttggtgctggagtnatcgaagaggtccgtgtccagcgagacaaagggtttggttttntaaggttntacnntcatgacgggggctgctcttgctattcnaaatgggcaacggttcagcctttncnctttnagncaggcaggttaaggngttncctggggggaaccaaaccccacttccntttngggc

SEQ ID NO: 137248 - DNA, 417 bp, Arabidopsis thaliana columbia
  unsure (1)..(417): unsure at all n locations
caaaacacacagagagaagaaaaactcagaagaaaagccaaagagtgaaacaaaaatggcgtcgacgactctntcaatcgcaacaacaatccgttcctcatcttatcctactctcgcttccatcaatcacttcccttcccgaaccaccaccatcgaattcccctctngcttcggtggtggttcatcatccacattgacccaccgtgcaacccatctccgtccaatcgccgccgtcgaagctccggagaaaatcgagaagatcggatccgaaatctcatccctaaccctngaagaagctcgtatcctcgtcgactatctncaaggncaaattcggtgtcttcccactttttttagnccccgcangnanggngggttttttgtttccanccgaangttngcncggcgggttttnntggg

SEQ ID NO: 137249 - DNA, 411 bp, Arabidopsis thaliana columbia
  unsure (1)..(411): unsure at all n locations
cttcantctctctaatcaaaaagcttttaacctcagccgttaaatctttctccgatcatgccgaccagaaacatcgccattggtggagtccaagaagaggtctaccaccccaacgcacttagggcggcgctcgctgagtttatctcgactttaatcttcgtcttcgccggatcaggctccggaattgctttcaacaagatcactgacaatggagccaccacttncttccggcctcgtcggcgctgccttagctcatgctttcggnctctttgtcgntgtctctgttggngntaacaatttncggtgggcacggtaaacctgccgttaactttgggggtcttaactcggggggtaaaaanaaattttncctncgggggattttntntnctnggatnctcaaanttttttggg

SEQ ID NO: 137250 - DNA, 414 bp, Arabidopsis thaliana columbia
  unsure (1)..(414): unsure at all n locations
ggtttctaaataatattttatatgtattttgcattatataacactaacatattacatcaaagtttatagtgatatcactgattaaaattaaatgattatagatatgtatatgancaatatgaatcatgcaggatgtaatgctgatatggggtgagcaagatcaagtttttcctttaaaaatggcccatgacctcaaagagtaagacccttgattatatncttcctatttgatctaactaaagttaatcgggtaaccaatacctatgctacaaataccaagagtgcgnttttgngancgganttttggggatttggnatagtnaccgggttntttcanattncgggggggttttgttttgnatantttncccngggtttttggggggcnttagggggccggtaaaaggtttttcc

SEQ ID NO: 137251 - DNA, 389 bp, Arabidopsis thaliana columbia
  unsure (1)..(389): unsure at all n locations
aatttcctctttttaattgttctttnattgattaagtttttgtggttctgtttgtataagtncaatatgacaacaactactgtnatcttgatgttcttatggtgtgctgtttctctaatgtttttggtgaaacagagacacaaattccagctcaagtgtaataagatacatgccaggtaggtttagtgtctaaagacgaagccgttcgaatggctgatgatgctgaacttnatctgcgtgctacaatcaaagtgaacggtgaatacggatacggatacgccaaagcagaagttggagtacataggctggtgcgtattanccccgntttnanagtgggaaacgggggccacacnttcgttttnnggnttttnnnagtttttcccatttct

SEQ ID NO: 137252 - DNA, 485 bp, Arabidopsis thaliana columbia
  unsure (1)..(485): unsure at all n locations
aatgtcgtctccggcgactactatcaccttctttntnttcttnactctctnatccttctnctacatcacttcttcactccagaacaacaacaacaacaacaacaaacacacagcaaccgttaactccttaaatatcccctccgncgcggcggagattacgctagtaaacccaaagcttccgccgcggagtctctccctcacatcctccaaaaaattcgaaggatcttcaaatctagtccacctccgttaccacatgggnccagtcctctaatcttctccgatcaacatctacgttatctggtacgggncaatggtcacggccanacaaatcccctaatcaggggtttcctcaatttctttctccggnnggttaaaggaactttttccctccggaatccggaattggtgggggaccggttttttttttnnaaaggtttaaaccgggttcccaangggttttagntccggnttnnattngcgggggg

SEQ ID NO: 137253 - DNA, 279 bp, Arabidopsis thaliana columbia
  unsure (1)..(279): unsure at all n locations
ggctcttgaaaacaggagctatagggcaaactatggatgaaggtagagccataaacctctcactttccgctcttggagacgtgattncagcgttaaggagaaagaagggacatgtgccttacagaaacagcaagctaactcaaatncttaaagattctctaggtactagatcaaaagtnctgatgcttgtncacataagtccncgtgatgaagatnttggtgaacantctgctctctcagctttactaaacgtgcgagnnntgtagagtctaacanagg

SEQ ID NO: 137254 - DNA, 530 bp, Arabidopsis thaliana columbia
  unsure (1)..(530): unsure at all n locations
ctnaacaatggcgccttctccgatcatcttctccgttcttcttctcttcatcttctcactctcatcatctgctcaaacacctttccgtcccaaagctctccttctcccagtaacaaaagaccaatctaccctccagtacacaaccgtcatcaaccaacgcacacctctcgtccccgcttccgtcgtcttcgacctcggtggtcgagaactctgggtcgactgcgacaaaggctacgtctcctccacttaccagtctcctcgntgcaactccgccgtctgctcacgtgccggctncacaagctgcggcacatgcttntcccctncgagacctnggttgtaggtaacaacaatttcggggggaattccggntaanaacgttaaccggnaccggaaanttccgggggantttgcttttggnnggtggggnttttccaagtcccattaagggttccatttcgggaaaggggggttaaaatccaaatttgnntttggttttggggggaaggtttttttnaaaggnnttgtanang

SEQ ID NO: 137255 - DNA, 433 bp, Arabidopsis thaliana columbia
  unsure (1)..(433): unsure at all n locations
acagtttttgtctcattcccgatcagatctcaacgacgacgagccatggcttcaactttcagcggcgatgaaactgctcctttcttcggattccttggcgctgccgccgctctcgttttctcctgtatgggagcagcgtacgggacagcgaagagcggggttggtgtagcgtcgatgggtgtnatgagaccagagcttntaatgaaatcgattgttcctnttgttatggctggagttttaggtatttatngtttgatcatngctgttatcatcagtaccggaatcaaccctaaggccaaggcttactatctattcgatggctatntcancatctnttccgggcttcttgtgggcctcnttggtcttttccnccggnnatggctnattggaaattttcggcnatncccncttttaagagcggattgancaacaa

SEQ ID NO: 137256 - DNA, 441 bp, Arabidopsis thaliana columbia
  unsure (1)..(441): unsure at all n locations
ggnaccctnaccttgcacaaggaagccaagaacaggttccgtactgattataatttgttcaatctcggatccatggctctccccatagacctccctggctttgcgttcggcgaggctcgcagggctgtaaagaggctaggggagacgctcggcatttgcgcgggaaaatccaaagcgaggatggcagcaggagaagaaccagcatgcctaatcgatttctggatgcaggcgatcgtcgcggagaatccgcagccaccgcactcgggagacgaagagatcggtggtttgctcttcgattttntctttgccgctcaanacgngtccacgtcatcacttcctctgggccgtgacgntttctttganttcanaagccaanaggtgctttaacaagantaagnngaaggaattngccaagnnttttgnttaaccttaggtnccaac

SEQ ID NO: 137257 - DNA, 377 bp, Arabidopsis thaliana columbia
  unsure (1)..(377): unsure at all n locations
acttaatttnacactcttctttgtgtttnctcttccaccttctttttcggtatatcattcaacaaaattctctcttcatttctttatttngtngtttttttnatnattattgaaatcaagagaattaaaacagaggctctgcaaaagaagatgatcaaaacaatcacatctctacgcaaaactctggttctacctctncatttacatatncgtacgctacaaactttcgccaagtacaacgcacaagcngcatcggctttgcgagaagagcgtaagaaacctctttatcagtaagtcctctttttccatgatccagccagggncatataggtatttggtttaccnnttgggaaaaggcnctggtttcaaaatngngg

SEQ ID NO: 137258 - DNA, 451 bp, Arabidopsis thaliana columbia
  unsure (1)..(451): unsure at all n locations
cagcgccagcaaaatggttcttcagaggaagacagaagaggctgcaatggctaccaaaaggttgaaagagttgttagaagctcgaaaatcatctcctcgtgaacactcagctggtacaaatggctttggaacaaatggtcagacaaatgagaagtcattgcagcgttggcttgatcatgagttggaagtcatggtaaatntgcatgaagtacgtcatgagtatgagaaacaaagccacgtacganctgcactngcggaagagttngctgttttaagncaagtagatgagtttgcagtnaaaaggattaagtcctccaagngggaagaatggctttnnctagggctttcatcgtttgtcaccctaatgccaagggnttggccccttattntcttccccttgggnacatgcttcgttaatatcntcccaattnnttttgttancgntttgnaa

SEQ ID NO: 137259 - DNA, 473 bp, Arabidopsis thaliana columbia
  unsure (1)..(473): unsure at all n locations
cataacaatggatgctggatcccttgttctaatggatttattatggtctgatcctacagagaacgatagtatcgagggtttaagaccaaacgccagaggacctggccttgtcacgtttgggcctgatagagtcacagaattctgtaagaggaataaactacagctaattatcagggcccatgaatgtgtgatggatggattcgaaagatttgcacagggacagttgattacggttttntccgncacaaattactncgggactgcggacaaatgcaaggagctatattgggtggttggcagaggatttggtgatttttccccaaagttaattcaatcctcttccaacctnccantcttattttccaggggacctttccagaacaattttggngncnncggtttgggttcaaggggcttnaatnttccaggggccnncggnttnaaaaaagggggaaggcncaaacnngtttttc

SEQ ID NO: 137260 - DNA, 433 bp, Arabidopsis thaliana columbia
  unsure (1)..(433): unsure at all n locations
tatagaccttattcatgtgaaagcttatttctttcatggatcaagcggtgagaatgttgtggctggtgatattcctgctgatatggagggtttggttggggataagaggagagaattgatagagacagtctctgaagttgatgatgtactcgccgagaaatttctgaatgatgaacctgtatctnctgctgagcttgaggaagctattcgtagagctaccatagcacaaaagtttgtncctgtatttatgggtagtgcattcaaaaacaagggagtacaacctctactagatggtgttgtcaagttttctcccttctccaaattnaagtcaataacctatggcncttgncccnggataataatnnagggnngggtaaccnttgactggntnctcccaaatggnccccttntgggggctgggttttcaaantna

SEQ ID NO: 137261 - DNA, 457 bp, Arabidopsis thaliana columbia
  unsure (1)..(457): unsure at all n locations
ctcaaaagcctatttgggggatcatcaaccttctatcatcaccatggatccttacaagtatcgtccttcaagcgcgtacaacgccccattctacaccacaaacggtggtgctccagtctccaacaacatctcttccctcaccatcggagaaagaggtccggttcttcttgaggattatcatttgatcgagaaggttgctaatttcaccagagagaggatccctgagagagtggttcatgctagaggaatcagtgctaagggtttctttgaagtcacccatgacatttcaaacctcacttgtgctgattttntcanagcccctggtgttcaaantccgggttatttgtccgttttttnccaccgttntncanggancgngcccagtntttgaaaacccatgngggggtattcgggggttttntctnnnaagnttttacnccccgnggggggaaatttt

SEQ ID NO: 137262 - DNA, 426 bp, Arabidopsis thaliana columbia
  unsure (1)..(426): unsure at all n locations
caagggttatagatcagctgttgagtcaaccagccaagaagagtctctgatgagtttcgcaatatgggagccaccacatggaccatacaagtcatttaactacccatggaagaactatgtcaagctcagcggcgctctcaagcattgtgcattcactgtcatggcattgcacggctgcattctctcagaaatccaggcaccagaggaacggagacaagtttttcggcaagaacttcagagagtgggcgtagaaggagctaaattgttaagagagctcggtgaaaaggtgaagaagatggagaagctaggaccagtcgaccttntctttgaaagtncaaccttagctncttgaagnnttncaggcaccaagttccgncaagaaatnttancntntttggtaaattcccnaattnntgggnnnttcgg

SEQ ID NO: 137263 - DNA, 336 bp, Arabidopsis thaliana columbia
  unsure (1)..(336): unsure at all n locations
gattgattgatccagcgattcgtctggctggctcggtttccgcgggaaaaccttcttcttcgttgaccttacacgagttttgttgattcggcagggggatcgacgacggagatggcgattctntacgccctcgtggctcgtggcacggtggttctttctgagttcaacggcaactctacgaatgcanagcaaccatngccaaaaaagatcctcgagaaggtcctngggncaacggcagnaacggtttcctaattttaagnttcnttaaggtttccccgntaaaaggaccccttgggccnaaacctttttttttntccccnaaaaaacccccggaag

SEQ ID NO: 137264 - DNA, 380 bp, Arabidopsis thaliana columbia
  unsure (1)..(380): unsure at all n locations
tcatcgattatnagtttctggatttcgctactacagatttgtcccgtcttgagttacgaaatcatgatacattttgtncttctagttagccggcaaggaaaggtaaggctcaccaaatggtattctccttatgcacagaaggaaagatctaaggttatacgtgaactcagtggagtnattctaaatcgaggtccaaagctctgcaattttnttgaatggagaggatacaaagttgtttacaaaagatatgcaagtctctactttctgcatgtgcattgntcaggagggtaccgggttagagggnccttgaggtncatccatcactttttttgngattntnggnncgcnattttggaagtttnggtccccaaaaaacccgg

SEQ ID NO: 137265 - DNA, 481 bp, Arabidopsis thaliana columbia
  unsure (1)..(481): unsure at all n locations
tgttaatcccttagatcttcttttcaaatttcaatggcgtccggtgatgttgagtatcggtgcttcgttggaggtctagcatgggccactgatgacagagctcttgagactgccttcgctcaatacggcgacgttattgattccaaggtctgttacacgccgagatcggactccgagtgatatcgatgatctcatcctcgacggatctgttccgatcttgtgtttctctgttacttgattcgattacnctgttactattctcgtnctttgntactactactactactaactgtnactttgtatttttcccaaatcgggtacggtcanctttcctggcttctngtgagcccggagaatcgatcggatttntttgnaatttgggaaaanttgttgnaggtctaaangcttttggncaagttttngtggnnttgtnttnccgaaccggggtttggaatatttggnaacagncaataaacggccg

SEQ ID NO: 137266 - DNA, 454 bp, Arabidopsis thaliana columbia
  unsure (1)..(454): unsure at all n locations
aaaggaattctaacgaatatatttctcggagggatagacaccggagctcttactatgatatgggcaatgacggagctcgctagaaacccggaagtgatgaagaaagttcaaggcgagattccgagaccgccttgggaaggaaataaagggngattcaccgaggaggctatcattaaagtcccttactttgaacctagtgatcaagggaacattcagattacaccatccagtttcctcttcttctnccaagggggaacaattggttcacatcaaaggttcaaaggctatggatattcctcccaaggagannggttcttggnnaaangtttgggggtnaggnggggtncccaaaattttgggntaaccccggagnggttttaacccccggggnntttttttaaaaggcccctgggggtttntggggcccaaatntttgggnctttanccctttggg

SEQ ID NO: 137267 - DNA, 402 bp, Arabidopsis thaliana columbia
  unsure (1)..(402): unsure at all n locations
tcttcactgtcaccaaaacgttagaacaagacgcaagattgaagactatttctaagtggcaacaaatttcatccaagattattgaagagatacacatccgagtggtactcagagcagctggaaatgatggaaacaagactntgacaatgacctacctaggtcagtttcttggcgagaaaggcaccttgctgaaggttatggagaaggcttttccagaactagggttaactcaaaaggattgtactgaaatnagctggattnaagccgcccttttccatggtgggtttncaacaagggtctncnattgnaaattttgcttaactcaaagtcggccnttagggaaaaggtttcctttcaaaggnaacggccgggnttttcgttaaaananccnttttnccngng

SEQ ID NO: 137268 - DNA, 467 bp, Arabidopsis thaliana columbia
  unsure (1)..(467): unsure at all n locations
tacttctcctcgtcttttcaaagatattcaggaagaatcgtgccgagaggatggcatcaatgtgtccaattttggtgccacggaacagcaagatgttggtggaaacggccaatttggtgtagtgttggtccatggatttggcggaggagtgttttcttggagacatgtgatgagttctcttgcccatcaacttggctgtnttgtcactgcatttgataggcctggttggggattaaccgccagacctcataaaaaggatttggaagaaagagagatgccaaacccttacactctggntaatcaggtagncatgcttcttgcctttttgccacggaaatgggatttncttctgtaagnctttggttggccatgattnattgnnggtttctttnctcttaaagggntgcacaaagntttcnttgaaccaaaaagtncccttnaaagcnaanggngnggttttcctaaaa

SEQ ID NO: 137269 - DNA, 438 bp, Arabidopsis thaliana columbia
  unsure (1)..(438): unsure at all n locations
taaagaatcattcttggtttctnaagaacttgccggtagagatgtatgaaggatcattgatgatgaatggtccatcgactcanacagtagaagagatagtgtggatcattgaagaagctcggaaacctatcaccgtagctactggactcgcaggtgctggtggctctggtggaagcagtaatggtgccattggaagtagcagtatggntctcgatgacttggacacagatttcgacggcatcgataccgctgatctcctttcccctttgtnaacaattgtatcaaaaacccaagntttcatgnttcttaaggctncttgatactnctncacattgntggttccacaggcggggaatataaattntncncctaaaatggnttaattaggggggtggnaacaattgncttttggtttncaaaaatgttcctgtttgggca

SEQ ID NO: 137270 - DNA, 359 bp, Arabidopsis thaliana columbia
  unsure (1)..(359): unsure at all n locations
gttggaagctctttgaaaactcctcccttcgaattctccgtctctttctctctgtatcgagatcgaatcggcaatggctgcttcaagctccgttttcacagtatncccgtcgcgaaatcttgcagctattcctcttcatcagtccctatctccaccgttgcttagatccagctccgtcgcgtttcgtcccaaacgaagatccagctcactcgtcttatgctcaactgatgaatcaaagagcaccgcagagaaagagatnccaatcggactaaggtatnaggnggttncgacagtaatnggcatcaataaggtncaagggnattttgncctnaaagattncccanttttttntnaagttg

SEQ ID NO: 137271 - DNA, 503 bp, Arabidopsis thaliana columbia
  unsure (1)..(503): unsure at all n locations
attttaagattctnactttctctctaccaccaaacctcccacaccaccgtcaccggagctatgacctcaaaagactgtggctctcacgacagccactcatcatgcaaccgtaaaatagtgatctggacgatatcaataatcctcctcttaatccttgtngtaattctcctagtttgggcaatccttcaaccatcgaaaccacgcttcgtcctccaagacgccaccgtcttcaacttcaacgtctccggcaatccaccgaacctcctcacctcaaatttccaattcactctctcctctcgtaaccctaacggcaagatcggtatctactacggccggcttgacggcttagggtttttanccggnggcaacagttaatttgncgngtccanggttacccttnttagggcaaaagnaggnaaggtttggtccttnggctttgggaaanccgtnctgngggtcggaaanggttttttttggttagggcnttaagngggggnannttg

SEQ ID NO: 137272 - DNA, 380 bp, Arabidopsis thaliana columbia
  unsure (1)..(380): unsure at all n locations
attacagaatttgatttcgctgctgggaggcatgatgtggcagttgtatcagaagctgcatttgaaaactgtgagaaagagaaacccattagccacatgaccgttcctccggtcaaaattatgntaaacaccactggaccacaatactttatctgcaccgtcggtgaccattgtcgttttggtcaaaaactttccatcactgtagttgctgctggtgcaactggaggtgctactcctggtgccggtgctancccagcaactgggtcaaacccaaagtacttggggganccacttcttccaattntggggtggggnccncaaaaaacctttngggttttngngggancnattanttccannttgggaaaatcccngttccc

SEQ ID NO: 137273 - DNA, 435 bp, Arabidopsis thaliana columbia
  unsure (1)..(435): unsure at all n locations
cctaatgggtccggtttacactgccttaaaaaacgantttattacgcaaaccaaatcggttctnaggcttgtagacgacccggatttcgtnttccaagggacaatggacctttntaacaaggttgggtcaacgacacggcccaatttttngggtttacccatggttagtttaatgtnccgtggcgcggagatgagtgtntcgggtcagaaactnttgtaccgggtaaacggagccgggtcggaaggaaaagaagaagtatatttcttcacgtttggnaactctgatctttttggggatagaagcatttttnataggtcaccntcatcagcaaacgngtggatggngtttattnacctaatcaaagggttngttccctggtaacgcaatttattttccttgnaacggtncggttaaaagattattggcctttttaa

SEQ ID NO: 137274 - DNA, 410 bp, Arabidopsis thaliana columbia
  unsure (1)..(410): unsure at all n locations
aacaacaaatcttaaacgttttactttgtgctgcactactcaacctcaatggccgcctcaacaatggctctctcctcccctgccttcgccggtaagncgtcaagctttcccccgcggcatctgaagtccttggaagcggccgtgtgacaatnaggaagactgttgccaagccaaagggcccatcaggcagcccatggtacggntctnaccgtgtcaagtacttgggtccattctctggcgaatnaccgagctaccttaccggagagttccccggagactacggatgggacaccgccggacttttagctgaccccgngacattnggaaggaaccgtgnggntngaagttttccccaagaaggtngggnaatttttgggngcccnanggttgnggttttccccgaagttttt

SEQ ID NO: 137275 - DNA, 418 bp, Arabidopsis thaliana columbia
  unsure (1)..(418): unsure at all n locations
caagaaactaaccgaatccgctctgaaaaaatcaccggtgaatctgaagaagacccttttcacgctagtcgcgagtatcgtgtgtaggctcgcgttcggggtgaatatccacaagtgcgagttcgtagacgaggacaacgttgctgatctagttaacaagtttgagatgctagtcgctggtgttgccttcactgatttcttccctggagtgggntggcttgtagaccgaatctcaggtcagaacaagncactatacaatgttttctcagaacttgacactttcttccaaaacggtgctcgatgatccatattaagcctgggagncaaagttctgagganccctnacggncgtagattttnatnccttnaanctanttnaaggtgnaaggggaaagattgggggatnttttnaaaantt

SEQ ID NO: 137276 - DNA, 405 bp, Arabidopsis thaliana columbia
  unsure (1)..(405): unsure at all n locations
cacgtgtccacactttttcacaaagttatctaaaaacaaaaaacaattaattagcattcgacgtgtacatatcactcgccacgtgtacaagagccttggcctttttgcttcttcttcttgtctattaatatcatctcctgattatactctcttttgaccaagctgcttcttctccatctatccaacatctcaaatctcagtaatcttgttcctttcgattctgttttggacgttttgtaattgnttctcaggncatcagnttaccgcggccggggacgggcaagngaccggttgcaaacggncgggntattggccnnggacannagatgggaaaaagcgnctgacnggcaaacaaaaggggaaaacngnggttccaaaaaaagnggggcgggtttggcggaancg

SEQ ID NO: 137277 - DNA, 383 bp, Arabidopsis thaliana columbia
  unsure (1)..(383): unsure at all n locations
agaaaatttcacagcaaaatttttntcgagaaaatccgaagaagacaaaatggcggatcagctaaccgatgaccagatctccgagttcaaggaagcttttagcctattcgacaaagacggagatggttgtatcaccacaaaggagcttgggactgtnatgagatcacttgggcagaacccgacagaagccgagctccaggatatgatcaatgaagtggatgcagacgggaacgggacaatagatttccctgaggtnctgaacctaattgcacgtaaagatgnaaggccactnntttcanagggagnggctttaaggaaggccttcaagggggttttttaccaagggncccnnaaccgggnttttaatttttggnggggnttaa

SEQ ID NO: 137278 - DNA, 235 bp, Arabidopsis thaliana columbia
  unsure (1)..(235): unsure at all n locations
taaatttcttngagaaaaatgtnttgctgtggaggaaacnccggatgtggatctggctgcaagtccggcaacggttgtggaggttgcaaaatgtaccctgacttggaattctccggcgagacaaccacaactaaaacttttnttttgggcgttgcacctncaatgaagantcantacgaggcttcaggggagagtaacaacgctgagancgatgcttgcaagtttggntctaact

SEQ ID NO: 137279 - DNA, 563 bp, Arabidopsis thaliana columbia
  unsure (1)..(563): unsure at all n locations
catcaggttgttagaggtgtggtggaaagtcttaaaatcattacccgtcaggcgagtttgagagttgcagagtatgcttttctctatgccaagactcatggaagagagagagtttctgctatccacaaagccaacattatgcagaaaactgacggtctctttctcaagtgttgtcgtgaggttgctgagaagtatcctgagatcacttacgaggaggtcgttattgacaactgctgtatgatgcttgtnaaaaacccagcactttttgatgtcttggtgatgccaaacctgtacggtgacattattagcgatctgtgtgcccggatttggttggaggnctaggatttgactccaagttgtaatatttgggggaagatggtttagcccttncctgaagcagttcaacgggttcttgcancctganatcncttggnaaaaacctttggngaacccaacccgggttncttnttaaggtggggtattnatttttnggcccccntaaggtnaacggccaagngggncaantccccaggggaattttnacnnccttggnggggggaant

SEQ ID NO: 137280 - DNA, 315 bp, Arabidopsis thaliana columbia
  unsure (1)..(315): unsure at all n locations
agagaaacatgttttgcagcaaggttcaattcttggtaacttggaagagattggtgtattgaagaggtgcaacataaatntggaatnttgcgaaannatctggaagagaaagacgataatactncgccacggtttgttgaatttggcgctgggagaggatacttaacacagatgctagcagattgctatgggatcaaaaaagtgtatctagttgagagggaatcttacaagcttaagggctgataggtcattttaggcaaaagggagnancttagtattnanngccgttttaagattcnnttttttggggttttt

SEQ ID NO: 137281 - DNA, 406 bp, Arabidopsis thaliana columbia
  unsure (1)..(406): unsure at all n locations
ccaaacttcactctcttaccttgcctcttgcttcaaccncctaagcacattcttatctctttctgaaacgagttcccaaatnagctctacaaaaaccaggatcttgatttctcatcagttaaacatgggaactcctgtcgaagtctctaagctccatttctngctcttccctttcatggctcatggccatatgataccaactctagacatggctaagntctttgccaccaaaggagctaaatccactatcctcactacanctctcaaatgccaagctctttcttcgnggaacccatcaaatcattcaaaccaaggcaaacccgggggctnggngggcaatcanccattccagnntccttaaattntccctttgaacagnggtttgggtttgcctgatnggnttntt

SEQ ID NO: 137282 - DNA, 311 bp, Arabidopsis thaliana columbia
  unsure (1)..(311): unsure at all n locations
ggagaagaaggaggagccgaagaaggaaggtggtggcgagccgccaaagaaagaaggagaagctccaaaagaagaagggaaaaaggaaggagaagcaccgaagaaggaagaagagaagaaagaaggtggcgataagaaggaaggagagangaaagatcaaccacaagcgcaccgcaaccagttgtnccgccacctgatcatgtnttgggacttntaaaggcgtataaagcatataatccttacctaccancgtntttcttcgnccaaagcatcgaggaaanccctattnctttcttttanatnttgnaaat

SEQ ID NO: 137283 - DNA, 444 bp, Arabidopsis thaliana columbia
  unsure (1)..(444): unsure at all n locations
caaacacaaacacaaacagagaatcaacgaagaagaaaaatggtgaaggtgatgtgggtttccgttttagctctggcggcggcgattctccttttgacggtcccggtggcagaaggggtgacgtgctcgcctatgcagctggcttcatgtgcggcggcgatgacgtcatcttcgccgccatcggaggcgtgttgcacaaagctgagagagcagcagccatgcctttttgggtacatgaggaaccctaccctccgncaatacgttagctnccctaacgcaaggaaaagtctncaacagttncaagattccttccccaanctgttaaggaaatnttaatcatgnttaattagtgccaagtttcggntggttatagggggtaaatncntgggtntaattttggnagnactntnaaaaaattaattggggggtgnttatttgtggttt

SEQ ID NO: 137284 - DNA, 399 bp, Arabidopsis thaliana columbia
  unsure (1)..(399): unsure at all n locations
gtaaaggtggcaaaanaatacaggagtcaagctgacaatgttccacggaagaggtgggaccgttggacgaggaggtggacctacccatctngctatttnttntcagcctccggataccattcatgggcaattaagggtaacggttcaaggtgaagttattgaacagtctttcggagaagagcacttatgctttaggactcttcagcgtttcanagctgcaacacttgagcatggaatgcatccaccggtttcccctaagcntgantgggcgtntcctcatgggttgaaatgggctatnaatttgcccactgaaggaatacccgttcttgttgtttttcaaaggaggccccgtttttntttgaagtaacttccggtttgggaaanaccccanangctncg

SEQ ID NO: 137285 - DNA, 442 bp, Arabidopsis thaliana columbia
  unsure (1)..(442): unsure at all n locations
gcgtattctcaggtcataatttctggagatccacaggtcataatttctgaagctatacctaaaacatggcaaaaaagaagaatccacaggtttttatggatgtatcaattgatggagatccagctgagactatggtttttaagcttttccctgaagtcgttcccaaaacatcagagaatttccgtgcactatgcacaggggagaaaggcatcggacccagaagcggaaaacctttgcattataaaggntcctttttccatagaataatgaaaggttcctcagcacaggccggtgactttntgaatcgaaatggtacttctggggaaagcatntatnccgggaaattttccagatgnagccaccgnaactaaggccattnggnggnctgggctttnatcctntggggggtttnagcccgtgcnaagttnggnncaaacnttta

SEQ ID NO: 137286 - DNA, 523 bp, Arabidopsis thaliana columbia
  unsure (1)..(523): unsure at all n locations
ctgctgggtttcatgaggactcgaacttaggtttcacaatagttgagtacatattccttttcattagtccagttttggctcgcatcgtgcctgccttctacataccgacaagattcttcagaatgcttctgaacaagttagcccgtgactttcacaactatcctgctcttggtggattggtccaaactctaatgagttatgtagttggtggagacagctcgaattgggtcggagtcttaggattgcctcactacaacatgaacgacatgccagctgtctccttccgtgtggcgcaacatcttgctcagatcaaacacancggtaaaattcaggatgtatgattatgggaggagatcagctaacatggggggttatggttttcctgaaccggtttnatcngagggnngttttacaaggttaatcgttgtncctntgggtttagnnaggggnnaggancgcaaggnancccgtcccttttggnggagancccttnaattttttgagngttcccgggncggtntcc

SEQ ID NO: 137287 - DNA, 228 bp, Arabidopsis thaliana columbia
  unsure (1)..(228): unsure at all n locations
gttcattccaaagggatttnctcctgctgtgttctctcagaggaggctctcaacttatcagcccgaaagagagtcaatgtaaaggtaaaaggtctaaccaaaaataggtaacttcaatagctactttagacagtgactattattaacatgaccaaaatcatagaaagattaggcaaaaagtaacttgaggatttgattgtaaaagtttaatgtcaacttttttcctat

SEQ ID NO: 137288 - DNA, 426 bp, Arabidopsis thaliana columbia
  unsure (1)..(426): unsure at all n locations
ctttactatttctttccttaccaaatatagcaacaacaaaaaaacgttttctgtgatggaggtcccgattataaacagaataggcgattttaacatggggataaactcgataaacgacccgtcgtatttatctcgagctttggcagtctccggtgtcggaaagttacatcaagcttatagtttttggaaatggggcgccttattgctacttgcatttttngcttcatttacatcgttaacntcaaggatcaaggctttagtctttagattaaggaatgtaaacgggtctctaccttcccaaaactnttttaatgtaattcccggcagcgnccccggnttgggcctttntnngcaaactnttttaanangggggggaaagnttgggggcnggtaccaaaggaggntggccncgggcaatgggnggtt

SEQ ID NO: 137289 - DNA, 420 bp, Arabidopsis thaliana columbia
  unsure (1)..(420): unsure at all n locations
gctacgagaatcgtcaataagataatggaaacacagttgaagcaacttccatttattagaccagagggaactaacgagcttaggaaaattgcagtcagatttgaggagaaactattcaacaatgcctctaatcagacngagtaccttcgtcaaatatgtatgangatgctgaatatggagactaaatcacaaaatgcagctggttcttcctccgctgatgataacaccccaccgttggttccagagccttctgttccggacaatgaacctgccgtgaacactgggtgactggngacctcaacagccacagggtttaangccggaggatntcaattnttttnttggncacatttaaggaaaattttttcccaaatttttnggggaaaaaggggnttttccggnnntaatgggaantttctt

SEQ ID NO: 137290 - DNA, 381 bp, Arabidopsis thaliana columbia
  unsure (1)..(381): unsure at all n locations
gtaaccntggacaacatttacatgggtcaggacgagaaccattaccgtggactaagagagtncagattgcactagactcagctagaggtttagaatatatccacgagcacacggttccagtttatntccatagggacattaaatctnccaatattttgatagaccagaaattccgagcaaaggtagcagatttcgggttaacaaaactgacagaagttggaggttcagcaactcggggtgcaatgggtacatttggttacatggcaccagagactgtttatggagaagtntcttgcaaaantagatgtatatncatttgggagttnnnccctttacggntttgntttctncgaaaggttncggtttttcaaaaattnccag

SEQ ID NO: 137291 - DNA, 468 bp, Arabidopsis thaliana columbia
  unsure (1)..(468): unsure at all n locations
ccaaaagcaataccaaatgcaaacacaccacatgcagcaacaacaactccatcacttcgtctttgtccacggctcatgtcatggagcatggtgctggttcaaactagctgcaaagtcaagctcgatggtcaccgtgtgcaagctatcgacctnggtggctccggtgtcgacacgaggcagctccatgaggttcgtttggtgtcggcgtatctagagcctttgatgagtttnatggagtctctccctgaaaacgagaaagtggttctttttggtcataagctatggtggcattggaacttcttttgctattggaaaggttttccgncccaaagtnttttttcgggaatctncccctttttggtttaaantncgggacccttgnttttccntcggggggttttannttaaaagggttttttnnggggatnnccnangggttttcccatattggcccttngggtttaaatt

SEQ ID NO: 137292 - DNA, 361 bp, Arabidopsis thaliana columbia
  unsure (1)..(361): unsure at all n locations
aattcctagttgggttaaccgccttgcccgaatcggcttcatgtgcaactgtgtgcttcctgcgactataaacgcgaccaggtttggaaacaacagagtcaatcaagacaaatcatgtgaagcagaaaatnagaagaagaaactgacgagtgtatcgagcagagagaggtctaccattgctactccttcgtngtcttcttcgtctccttcagttcaagttcgcggttgaagcaggaaaaggcgtcctcgtgctctgcaaccttcatcgccattnactctcggatcttcctccgtttgactataagtaaaatgnaatttgggcttttgtttggtaaatcccatttttgnanctttcaactng

SEQ ID NO: 137293 - DNA, 406 bp, Arabidopsis thaliana columbia
  unsure (1)..(406): unsure at all n locations
aaagcaatcttcttctcttttcacagttctgtttctccctctctctaaatgatggcaaacaactgtaatttagtcagtgttctatgtgtaattttggtattgaccctctttcacaaccccatcactgtngccggacagaatagtccggtggtcgccttgttcacctttggtgancnccaacttcgacgccggaaacaaacagactctcaccaaaaccttagtcgctcaaggtttctggccgtacggaaaatctcgngatgatcccaacggcaaattttccgacgggcntcatcacntccggantttcctcggtaaaattcatgaagnttcccgttcgcgattcgggncgggnngttttaaaaccngaacggtaaaatngttttnacggggggggtaagtttcgncg

SEQ ID NO: 137294 - DNA, 463 bp, Arabidopsis thaliana columbia
  unsure (1)..(463): unsure at all n locations
caagtaacattctcagcttctagaaggttttctcaccaacccccaaattatgagaaaattacgaaattggctaaccaactacaaaagaatgattcaattcaccaaacgaattaaatgaagcattaaattgagagtaaatnagttttcgttagagtgaaactcacgtaagttttgagctgacgaatgaagcttgagaaattattatgcttgangtattgaggaagaagatctttagcaaactctgctgttttccacacggcaaaagctgttccttcttcgttcccatgaaacggcggcggtctgtgcctatggtcatcaacctagcttgataccggtttgctttaaaaacgggggccggaacctnnttcttttgcggcggccggtaaaaagccntaattttccgggngnaccttttttttantttnnccccccggaaaatttannccnggaaannannnttttt

SEQ ID NO: 137295 - DNA, 342 bp, Arabidopsis thaliana columbia
  unsure (1)..(342): unsure at all n locations
aacaattgtngggtttttcctctctctagcaagattttntctctctagttctttgattataagtatttttnccggtgtataaaccaagaaatgggtagtagtttttncgggagaccaaaaatgggtggntcttcgtnatcatcaccaacatcttcttcttcttctccggcaaagagagggaagaacaagaatggttctgacaagcctaagcagcctcagagaggtctcggcgtcgcgcagttagagaagattaggttacacgggcgagtataacttgcaaccagcnttcaaatacctnccccntnttnatcaatccctnaaactttttccaggggggttntt

SEQ ID NO: 137296 - DNA, 527 bp, Arabidopsis thaliana columbia
  unsure (1)..(527): unsure at all n locations
aagaaaagtaattctctgtttgtgtagttttctttaccggtgaatttnctcttcgttttgtgcttcaaacgtcacccaaatcaccaagatcgatcaaaatcgaaacttaacgtttcagaagatggtgcagtaccagagattaatcatccaccatggaagaaaagaagataagtttagagtttcttcagcagaggaaagtggtggaggtggttgttgctactccaagagagctaaacaaaagtttcgttgtcttctctttctctctatcctctcttgctgtttcgncttgtctccttattacctcttcggcttctctactctctcccttcctaggattccgtttcgcagaggaaatcggaggtcttagctctttatgagccagttattancccctcttgtgctcagaaatctccaatggnaccattttnttggtgacaananccggttttagnnctgnaaattgnggaaataaaggnngtnttnggacnaaacnttggttttcccnaaattncnttaacctctcncca

SEQ ID NO: 137297 - DNA, 507 bp, Arabidopsis thaliana columbia
  unsure (1)..(507): unsure at all n locations
tcttccctcttctctcttctcttcatatgtgtagggtcgaagcaagaacgacaccgtttcaagggttgcaatttgcaaccttttgattggtctctcttctctttgcccaaccaaaaacaacctttgatgatataaagatcagccaactttgtccatcccaattctctcttttttttttttttgtttccctaatgttttagacaaacacaattttccataattatttatttattcaatttttatctgtttttgggttacatatatcatcatcatcggagnctgccatatttgttaatcgngntattaatttaactaaatgtctcaaacaagctactncccgtcancgttcggggncacggctttcaccaaagtgttcgtcgggggggtttagcgtggggaactccttnccncnggaatgggcngtnacttgnacagttcggggggntntttaggcgnnatnatcaccggtaaaaaaccggaaggntaaaggnttcgggttgtanggtt

SEQ ID NO: 137298 - DNA, 459 bp, Arabidopsis thaliana columbia
  unsure (1)..(459): unsure at all n locations
gagatgggaagagtgctgcttttnataaggattataggaggtttgttgttgctaagtctgagaattgtagtgtgagtnttgttgggattggtgagtatcattcgggtttgaatgcgaggaagaggaagaagaatcagaaagctgggtttnagaaaactggtgggaagaaagatgatttcnctttgcctgttgttggtgaacttntgaatnattctcttccnatggttgagtctgatagtgtgtttaanactggcaagtatttggtttatgttggtggtggagataggtgtaagagtatgaatcatttnctgtggagtttcttgtgtgcncttggggaagctcagtatttgaatagggctctagtgatggattttaaccncgtgnttggcntccaaccaaaacttcggccttggcaaaatnaggnaggcaaggntttcaaggttaccnttnaatttcggg

SEQ ID NO: 137299 - DNA, 577 bp, Arabidopsis thaliana columbia
  unsure (1)..(577): unsure at all n locations
gggtctttcagttggttcgtcccttgttgaagaagacaagcttgaattggctacagaactccttgccaaagctaaggccaaaggagtctctcttttgttgccaacagatgttgtagttgctgacaagtttgctcctgatgccaacagcaagattgtgcctgcatcaggcattgaggacggatggatgggactggacattggtccagactctatcaaaacttttaacgaagctctggacacaacacaaacagtcatttggaatggacctatgggagttttcgagatggaaaagtttgcggctggaacagaggcgatangaataaactagcagagctaagtgaaaaagggagtgncaacggtaattaggaggaggngnctcagtggctncagttgnggaagttggggttgncagggntcatgagtcacatctccccttggtggtgggccanctttgngcttttggnggaaagncttcccggtgtaccnccttnttnngaatccngcactgttttgaacnttnccnctttnnggaacgtgttnttaaaggtttttcggttaaccccttcaaactttcttg

SEQ ID NO: 137300 - DNA, 477 bp, Arabidopsis thaliana columbia
  unsure (1)..(477): unsure at all n locations
taaagangcaaaatcttgagtagaaacaaattttcctgtatctctctctcttgtaatctccgacgaagaaacacagttttatggcaaccaccagatcgaagagctttcagttgatcaccagcttaaggaaacacctagttaacacacgcgcttccacacgcgccaccgnctctgctctcttcccttcacgtcggagtggacattcctcggcgtatgacaagaacgtggaggatgaattgcatgcaagtncagtacctgacggagttataaagccagattctgataaanattggtctcctcaccccaaaaacaaggngtnttcggtcccctctanggcttgagcaacagcggcaacngcngaggggtgcaacaaccagggcaacaagcagttcttggtgggtnnacccnccttgggttttggcccaaaaaagttnttggggggttttgnanaaaggnttaaccntgttttaaggntnc

SEQ ID NO: 137301 - DNA, 405 bp, Arabidopsis thaliana columbia
  unsure (1)..(405): unsure at all n locations
ctcaacgacgacgagccatggcttcaactttcagcggcgatgaaactgctcctttcttcggattccttggcgctgccgccgctctcgttttctcctgtatgggagcagcgtacgggacagcgaagagcggggttggtgtagcgtcgatgggtgtgatgagaccagagcttgtnatgaaatcgattgttcctgttgttatggctggagttttaggtatttatggtttgatcantgctgttatcaatcagtanccgaatcaacccctaaggccaagtcttactaacctattcgatggctatgctcannctctctttccggtcttgcntntggnctcgctgggcttttccgccgggaatggctaatttggaattttccggcgattccngtttttanngcggannnnnc

SEQ ID NO: 137302 - DNA, 379 bp, Arabidopsis thaliana columbia
  unsure (1)..(379): unsure at all n locations
caaggttcttacttcataattcatggagactggaacaccacttatagcggagaccattgccctcactgaaaagaaagtcgccatggctttagatgatattatcaagttggcaaagagaaagaccaatgtgaataagggcaagaaaccaaggagagaaaagaacaaaaaccaaaactttaatggtgctgcgagaaataatacctctaatgtgcgccatcatatgaactcactttctgctgttagacagggtgctgttggtaagagaaggtctaggttccaaggaattcaatttncctgtaacaaccaacattngctcgtaaagnnttttaantgngnggnnccnntcgattttncccgggtagnnctttttaantggtgg

SEQ ID NO: 137303 - DNA, 527 bp, Arabidopsis thaliana columbia
  unsure (1)..(527): unsure at all n locations
gcctttcggacaatggtttcgagttgacccttcttggttataatcacaaattgaggatcttgctggaaactgttgttggaaagatagcaaattttnaggttaaacctgacagatttgctgttatcaaggaaactgtcacaaaggagtatcaaaattacaaatttcggcagccatatcaccaagcaatgtattactgctcactgatattacaagatcaaacctggccttggacggaggaactggatgtcctttctcatttggaagctgaagacgtagctaagtttgttccaatgttgttatcaaggncatttattgagtgttatatagcaggtaatgtgggggataatgaagctgagtcaatggtcaaacatattggangntgtctttttaacggtcccaaaaccgttttgccgncctttntcccgncccannacncanctaanngggtttcaagtccgggggaggntnaaggtttnttnccccnaggtgggttnnacccccgggtgaaacntccttggccctttttc

SEQ ID NO: 137304 - DNA, 482 bp, Arabidopsis thaliana columbia
  unsure (1)..(482): unsure at all n locations
gttttttccagacgacatagtcgtgtttcggngtttctgaaatttgtaaaaatcgaaagattggcttcgcaatcgagacaaggaacaactctagaacatggatgaaagagatcgagaaattcgtgcttctcatggtgattctaatgctggtaatgtcgttagtcaaagcatagagaatactagagaagaagattctggttcatgtgaaggctttgttgaagagagcaaaagacttgaacccgggacaacaaaagcatggtaaatatttttccttatgncacaaccgtttttctttaggaaaccgggggttttgggtaaccncgtttcaagtccccaccccattgttaaggaaccctaatnccttggagggganntgtcccaanangggnctttggttttcaattggcancttantttccccttnaaggngntttttgggnttagncccccctttttttttttntagnaaaagggggtttcca

SEQ ID NO: 137305 - DNA, 466 bp, Arabidopsis thaliana columbia
  unsure (1)..(466): unsure at all n locations
acgnaatcaacgccgcggcgaggatgagagtggcagcgagcgaaaaagcagaggctgagaaaatcattcagatcaaaagagcagagggtgaagcagagtcaaagtacctntcgggactcggaatcgctcggcagagacaagcgatcgtggacggtctgagagacagtnttctagggttcgcaggaaacgtgccagggacgtcagcgaaggatgttttggacatggtgatgatgactcantactttgacacaatgagagatatcggagcaacttctaaagcctcggcggtgtttatccctcacggtccaggcgncgtcgctgacgtggcaacgcagatttcgnaattggnttattacaaggnccaccaatgccttcctaaatcaacttaaagtaaaatttgtatttngnnnttcncctataanaattttggcaaacnnccntatttaaaaanggttaatttaacctt

SEQ ID NO: 137306 - DNA, 481 bp, Arabidopsis thaliana columbia
  unsure (1)..(481): unsure at all n locations
ggcgttgagcaccagcatcagatctgtctctaagatcatttcttcttctgaagcatcagtctccagatctgtgactagaagcttccactcgactggagttaagaagatgagcggaggaggacatggtggttacgatgaatactacctccacgcaaaacacatgtacaatttggaccgcatgaagtaccaagctctcaagatgtctctcggtgtcttcaccgctttcagcatcggtgttggggttcctatcttcgcagtcgttttccagcagaggaagacccaatctggttaagtccctcaggatgctcttgttcacaggtttgaataattttgnatggtttccnnaaaactcttgctttttgnaaagaagggntttttttntnccccttngggatctttgggccnaangntttnntcggtattggggaaaggtgttctngttnttcccccnttaaaccggggttgttnaatgntaaaanaa

SEQ ID NO: 137307 - DNA, 353 bp, Arabidopsis thaliana columbia
  unsure (1)..(353): unsure at all n locations
accgatctggtctgatccngttnactcgggcaccttcctcgactctnttgatgagcnacttgcgattgcnggagacttgagatccatggccggagataaatccgtcgccgtctgtnaatcccgtgccgatgagctgattcaacaggtgatgtttaggcttcaagaagagtttggatttgtaatggaccgagcccctgantcgtttnantcggacgatgagttccccggcgaagaagacaacgacacaagcgacggggtaatcgttnctcgtccaatcactgattacaaaatcgtgatcgaggcgttncaatctagcgttattgggcgatcttaaacngggttcnttnttcgca

SEQ ID NO: 137308 - DNA, 391 bp, Arabidopsis thaliana columbia
  unsure (1)..(391): unsure at all n locations
ggagaagaagaagaacagatcaaatacgaggagagatctctaaagagatttatcgtttcaaatttnttcacgttgagaagtttaatttagattaaacaacaaaaagatgggttactggaattccaaggttgtnccaaaattcaagaagttattcgagaaaaatagnnctaagaaggctgctgctgctgaagctaccaagacctttgatgaatctanggaaacaatcaacaaggaaattnaggagaaaaaggcagaacnccaaccaanggtcgtgggnaccctatgaagccacgtntgcagaagtcaaggcttttggtgagagncccnanggtgggctgggtttttnggaaaacttnacggcttttcaaaaattacctcgggggggctttgt

SEQ ID NO: 137309 - DNA, 405 bp, Arabidopsis thaliana columbia
  unsure (1)..(405): unsure at all n locations
cagtgatcctgcatcaaatncctcgttactgtggaaaaggaccaagccaccgcctaatgtaactagatacaacttaacctcatttgccattactctgaacgagctaacacctgggttacaggagatacttcctcctacagactctaggctcagaccagatcaacggcatcttgagaatggtgaatatgagaaggcgaacttngagaaacaacggttagaaagaaggcaaagaatgtcgcggcaacttcaagaaagcggttggagaccgngattggttttagagacaagggtgaaaagcgncaaccttcaaagtncacggggttggttntttgggnnagccccgaggggcaataggacctngggattnnttttccccganaantttnggggggtttcanaaaaagg

SEQ ID NO: 137310 - DNA, 334 bp, Arabidopsis thaliana columbia
  unsure (1)..(334): unsure at all n locations
aaaaatgggaaaatcgattccggtcaaaacagggctaagaggagcttccgcagcagtagctggattcatcaaatcctcaataccgatccgacccatttcctccatggacagttccgacaaanattcatcttccaccaccaccaccagcgaaactgcccgangtttcgttccgctttcatcggtggtttctnattgtnngaanggtggtttaaagacactcttgaggaagctaaagctgggaacatcactatgcaggttttnttaggtcagantgtattaccctgggtatggggtncctaaggntncttaaaaaggggtgnnttttggttttcgg

SEQ ID NO: 137311 - DNA, 453 bp, Arabidopsis thaliana columbia
  unsure (1)..(453): unsure at all n locations
ccgtatcattcacactgttgtctgcaactgctgcacaagcgtactccaactggggcaaccagggtgaaccaacgccacagtgggtccagggtgcactacaacaaattgctgcacaggctgctgctgattccaccattaatccatggacagctaccagtctgaccacagacaactccggttctggcttctcaagcagtggcagagtgttggctgcaacacagggtgtgactncaacaccggttaagggtgaatcaaagggtaaagagtatagcttgggtttcagcttgcagttattctgcctgtagcagcagcaatttncaatcggntgccggtgcttacatgtacgggcaagnaaaaaaccaancgttnaaggcagtnntncaataaggtttncttgggngcaccccnngggcccnaagntttggtgggtttaantncaattttgnataaccc

SEQ ID NO: 137312 - DNA, 451 bp, Arabidopsis thaliana columbia
  unsure (1)..(451): unsure at all n locations
gaaaaccctaacaaatcctcctcttgttccgccactgccgccgccgctactcaacggtggtgaattttctacacggtcagttcgatcctctttttatcgacaatcctacacaaatccataatcatggccgccactgcttcctccgaagcttctgaaggaccagtgatgggtctcatcaacaagcgtctccgtgctctccgtaagaaatacaatcgaatcactcaaatggaagaatcgatttctcaaggcaaaaccctaaacaaggagcaaggagaagtcntccgttctaaaccttgccgtggtaatcctaattcggcngggcttttaaaagaatcccgggttcctttttccgcccgtttttnncaangggaattnagccttgggtannttnggttttaaccggggtttnnncccgnttaaaaacncccgntttttngggaaangggggtnc

SEQ ID NO: 137313 - DNA, 330 bp, Arabidopsis thaliana columbia
  unsure (1)..(330): unsure at all n locations
ctgtcaaaaagaagcacagacaaccgaattctgattgcagaggcaggagccatccctgttttggtcaagcttttgacctcagatggtgacactgaaacgcaggaaaatgctgtcacttgcattcttaacctctccatatacggacacaacaaagaactgatcatgcttncaggngcagtcacatctatagtgctagtcctccgngctngnaggcatggaagctagaggaaancggtncagcttactcctntttaggcctttcggtaagcttgttngggnccaagttcntttttagggggggaanaaggtcgcgttaattggccctanggg

SEQ ID NO: 137314 - DNA, 377 bp, Arabidopsis thaliana columbia
  unsure (1)..(377): unsure at all n locations
aacactaaacatatagtctcttcgtgctttctcaagaaccaccnagagataacccaatggaggcaatgaagatgagactctttgtggcggttttggtggcagcgatggctttctctgcggtgcaacaggctgcngcggtggaggctccagctccgagtcctacctccgatgcttccttggccatccccgctttcttcgcctcggtagccactttggcctttgggtttctcttctagacaaatttgtttttgtctttttaatgttataaaaatcatatncttgttttttaatntcggttttnannncttatgtactgttctaagaatttcccacattttgaatcaataaaaattatcctcgggtcacttttttttttt

SEQ ID NO: 137315 - DNA, 397 bp, Arabidopsis thaliana columbia
  unsure (1)..(397): unsure at all n locations
ggactgagccacatggacctgatttccaaagtaatgatgaaggaaatnatggtggcttctnagtgttggttccttgtnatagagctgttgttgaaggctctagtaataataataaccagctcttgagtgctgtcaagaatctccccaatggtttgcctcctggtatgaatcacccctaatttgtggtcttggtttggtgtagtgaattaccatagccttctctcttgggattnatggtctattggatataatncttgtgggttttggtttagtgnacgaccaaagttgctctctttagagggtttctttttcacattnancccatgtgcaaattgnccacagncttcncantttagggtttnaancagtttttggcccaaaaccaangggaaacttt

SEQ ID NO: 137316 - DNA, 362 bp, Arabidopsis thaliana columbia
  unsure (1)..(362): unsure at all n locations
tcaaatttcaatggcgtccggtgatgttgagtatcggtgcttcgttggaggtctagcatgggccactgatgacagagctcttgagactgccttcgctcaatacggcgacgttattgattccaaggtctgttacacgccgagatcggactccgagtgatatcgatgatctcatcctcgacggatctnttccgatcttgtgtttcnntgtnacttgattcgattacnctgttacnattctngtnctttgttacnactactactactactgtaactttgtattttcccaaatcgggacggtcatcttccnngcttcctgtaagcccggagatcgatcggatttttttgnaatnttggaaantttt

SEQ ID NO: 137317 - DNA, 486 bp, Arabidopsis thaliana columbia
  unsure (1)..(486): unsure at all n locations
atggtcagaaagttgtcaaaggcaatccaaatccaaggagttattacaaatgcacagctccaggatgtacagtgaggaaacatgttgaaagagcttctcatgatctcaaatccgttataacaacttacgaaggcaaacataaccatgacgtccccgctgcacgcaacagcagccacggaggcggtggtggtagtggtaacggtaacagcggcggttcagccgcagtttctcaccattaccacaaacggtcatcacttcagaggccgccacgtnggaggattcgncagncaagttaccaactancaatcaagtcttcctttttagccgtcccttttaggctttcagccacattttggggncctccttnctggtttcttcctttcggnttttgggccaaanccggttttggntaatctttcaaattccttgggttngcngntnggttaaagggaaaatnccgggntttncttanccccgattttnnca

SEQ ID NO: 137318 - DNA, 291 bp, Arabidopsis thaliana columbia
  unsure (1)..(291): unsure at all n locations
cagagaaacaacgcggctatgaagcagtggatgaaattccaaagcatccgcaaaaccattcaacttgggaagaagttaagagtgagcgggagcatatcaagaacagctacgcagaggttnaaatgaaagagcctgtgaatctacccacgncantaccaatcccacagcctgagctgaaagnctttntgggaaaagagaagaatgaactcatattgccancttcaaaatgggcgaganacgatgatgaagctnatgattgaacaaaagnnggagctcctntttcaggaaagt

SEQ ID NO: 137319 - DNA, 347 bp, Arabidopsis thaliana columbia
  unsure (1)..(347): unsure at all n locations
caagtagcctatcgcagggcgaggaagctggagttttaaagctagaaatnccaaagcaaacncttgttgctaaatncctcnccatgagtaccttaagagctgtgactaaagttatcggtgggatnctaatcgtcgtctttnttgctaaaccatttatggtaaacattggacncttatcagtttcagctggagtnccttctttctactcagtatttgcagtgatccctttggttagaaacttgaagaacacgttatcnggcacacttctgtcggaaggaaagccaaagcaaggttcgctttctgaaaagnttcnctggnggtttacaagggatnttaccggttgacca

SEQ ID NO: 137320 - DNA, 376 bp, Arabidopsis thaliana columbia
  unsure (1)..(376): unsure at all n locations
gcgcaaaagcgtttggnggcagcacgatgcagcgtcttcggtagcagcagcgattacagaatncaaacatggtaatnggaaatcgaagggtgatatatggttgatgttcacaggtccagacagagctgggaagagcaaaatngcgtctgcnttatcggatcttgtttcgggtagccaaccgataaccatcagtcttggttctagttctaggatggatnatggtttaaacatccgtggtaaaacagcgttggatagattcncggaagggtttaggagaaatcctttcncggttattgttttggaagatatccgattgaagcgggatatatnccctncgtaanaacgtgaaggatagcgatttnnancggngggggat

SEQ ID NO: 137321 - DNA, 282 bp, Arabidopsis thaliana columbia
  unsure (1)..(282): unsure at all n locations
caccaactttatagctatctccgtnataagaaaccnttgcttgaggagcaaatactagaatttttggaagcaatggaaaaatatccattacattcaaatggtctttnaaaagtncctaaagttctagcagacatagtagagtctaccattggngctatcttaatnggactgcacctccaccgtgaccgtctggacggtgataaaaccattgtgggngccantantacatttggacaaatttgttggtgccntccaattgactgnactcatttgtgttgtgtc

SEQ ID NO: 137322 - DNA, 418 bp, Arabidopsis thaliana columbia
  unsure (1)..(418): unsure at all n locations
gacagatcataaaaaaaaaccaaacataaaacataaaactctgtcctttttttgtcttcttgtaacttttcttgttaaaaatcaatggcgtcatctagcagcacataccggagctcaagctcttccgacggtggtaataataacccgtcggactccgtngtcaccgtcgacgnacgcaaacgtaaacngaatgttatcggacagtgantctgcacgtaggtcaaggntgcgtaaacaggaacacgttgatgatctaacggtcagttcantcagctntcaaacggcaaccgtcagatcttgaacaangctcaccgtaacatctcagctttacatgnagttcccagccgtnaacncttgtttaaccgttcaggttggggncttagacccnntccatttttaaagggntcgttnatttttt

SEQ ID NO: 137323 - DNA, 391 bp, Arabidopsis thaliana columbia
  unsure (1)..(391): unsure at all n locations
gaagctcttgaataaccctggcttgaccatttatcatgtaaaaagccatttgcagaaatatagaacggcaaggtataaaccggagacttcggaagttacaggtaaggngttaaaatactttaacataatactactgcactttttctaagctttaaagtattggtcactctctagaagaacctaaactctcgacaaacagcttacggatgtatgaactttatttatttcttgcacaggngnacctcaagagnagnagatgacatctattgaaggtatcaaatctcttgacatgnaacgnaaggatcttcagtcttcttactgcataacaaaaccagtaaatctttcnttcggantcttcaggatattcnttgnatgnataatttngncangg

SEQ ID NO: 137324 - DNA, 378 bp, Arabidopsis thaliana columbia
  unsure (1)..(378): unsure at all n locations
cacaaacaaacaataactaaaatggctttgtcttccaaaaccctaaagtcaactctnttcttcctctctattattttcctctgtttcnccttgatccnagctcacggcggcatagacgacggcgacgaagaagaggagaccaaccagccacctccggccaccggaacaaccaccgtcgtgaatctccgatcgaaaagcttggtgcttgtnaagatctactgtattataatactcttctttagcacattcttagccggagtttcacctnactttttaccgnttggancgnggtcgttttttccttccctgggaacctnaaatttttccggggggggtanatttnccttnggggaccgnttttaaatccattatcccnaa

SEQ ID NO: 137325 - DNA, 309 bp, Arabidopsis thaliana columbia
  unsure (1)..(309): unsure at all n locations
gaaagcgtgagangcnccttgcctatcncctggtctnatggaaaccgctaaaaagcctaatgctactggttccacaacttctccatattggaaaanatgcttatcgcttcctagtagacaagctgcaaaactgtctcctgtggtttctacacaactttnagctggggtgcctggtgacccgcctaataaagattatncaaggtncttgtccatgcccggaagnaacaaagttattgtgngatccatatcttttgccaccacaaaagcccgtgtttccagtgagacaagtgcagatnaagntttttccgt

SEQ ID NO: 137326 - DNA, 414 bp, Arabidopsis thaliana columbia
  unsure (1)..(414): unsure at all n locations
ttggcttacaacaacaaatcttaaacgttttactttgtgcngcacnactcaacctcaatggccgcctcaacaatggctctctcctcccctgccttcgccggtaaggccgtcaagctttcccccgtggcatctgaagtccttggaagcggacgtgtgacaatnaggaagactgttgccaagccaaagggcccatcaggcagcccatggtacggntctnaccgtgtcaagtacttgggtacattntctggcgnataaccgagctaccttaccggagagttccccggagactacggatgggacaccgtcggaatttnaactgancccgaggnattttgaaaggaaccgtganctagaaggttattccacaagcangttggggaattgttcgaggnccttanggttgngnattttcct

SEQ ID NO: 137327 - DNA, 471 bp, Arabidopsis thaliana columbia
  unsure (1)..(471): unsure at all n locations
gtcggnacaatgcttcttgctgtcacnctttggatctgcggagagactctgggaataccaagtgttgtagctgccatgatcggtctctccatacttcttgtgctaggtgtccttaattgggacgattgcctaagcgaaaaatcggcatgggacacattagcttggtttgctgtcttggtgggaatggcaggacagcttacaaacctcggtgttgtaacgnggatgtcagattgtgtagctaaagttctacaatctctctccttgagttggcctgctgcgtttggacttcttcaagcagnctacttcttcantcactaaccttttcgnaagcccaaaaccggtcacggttggagcnctttttctcaagcttncccttgcnaatggatatagcagcaaggttttnccagggattnttagcttgcacttngnttttnggatncaacanccaatctttttttgggncttngcccc

SEQ ID NO: 137328 - DNA, 515 bp, Arabidopsis thaliana columbia
  unsure (1)..(515): unsure at all n locations
gcccactgcagtccggcagaaagaactcaacanggctcacntggatgatctagtcactgacaataacctccacgcttctncgggcaggaatttaagcgacagtgaaacagagagcgtggagttgagttcttggacaagaactggtggacctttaatnagaacagcttctgctaataagttcattgatttttttcagagtcttgatatcgacattgcattggtcagaggatttagtagcagtcccaattctccagcagttcctcctggtggctcgtttacttcaagcccgagatccatagcgggctcattcgggtatcggattcaaacagcaatagcaacaaattcttnggacaagncactttcaaggcattancaggttactntaaggggattcttttttaaagccttagnngancgggttaacgggnttttttttttaaaacgggngtttaaaaaggggganctttnggnntccccccccgntttggggccccaaaatancagggtttncccgg

SEQ ID NO: 137329 - DNA, 437 bp, Arabidopsis thaliana columbia
  unsure (1)..(437): unsure at all n locations
acctgatttgagctgtttctttctctttcgaactctccgtcacttccatttcatttctatttgaatcttctcaaagctacacagatctctgaaatcgaaaaagcttgagctgtgttaatggcggaggagaaatgggtggtgatggtgacggcgcagactccaacgaatatcgccgtgattaagtattggggaaagagagatgaggttcggattcttcccattaatgatagcattagcgtcacgcttgatcctgatcacctctgtactctcaccaccgtcgctgttagtccttcctttgatcgggatcgnatntggctcaatngcaagggaaattncgcttttntgggaggtaggnncccagnaatttnctttnagggggaattccgaagtcggccntttntttttngggggttnaanaaaaaggggttccaantttc

SEQ ID NO: 137330 - DNA, 375 bp, Arabidopsis thaliana columbia
  unsure (1)..(375): unsure at all n locations
atgactctggccctctctctcttctctctctcaaaattttcagagagagagattgacatcaaaccaaaattttcgacgacggtaaattgatgtcgtcggtgatggttgaattgccgtccggtgtagtatccggctttcgtctgacatatattggcttccacagcagtacatggtcggcccttgtctagcatcatcggctctttcagcggtgatggctagctcacggtgttaatccggcgtagttcggttttnttttcctttttgggtttatatcacgggttacgtttcgacccgttgatttgtntttnagnnaaananttnnattnggggaatnttgtttttgggaaaaggnggttggttttnangcccaaagtt

SEQ ID NO: 137331 - DNA, 463 bp, Arabidopsis thaliana columbia
  unsure (1)..(463): unsure at all n locations
actcttcgttcgtttcatctcccaattgagtttaacgacaccaaattcgtctcacggccttgtttcctggcgagatccttcccggtggttcgttgttcaagcaccagagacgtacctaagcttgaactcttcagccgcggaaaattcgaccggattcttcaagatccgccacttattgaaaaagccgaatccgaactctcagattactgttcgacgcttgaaggtgatgactcttacagttgctggagagcttactttgaactcaaaagatctcgnaaagagagaagccaaaggttgaagttgagaatttnaatttttgcaaanaaggtgggtttgaaaaccggtaaatcggggggttttanaagggggttggcttcaatnggggnaaggttnccaaancccaggnatgnggtttaaattttgggggnngggntccnnttggggngaangggnttttttttcc

SEQ ID NO: 137332 - DNA, 318 bp, Arabidopsis thaliana columbia
  unsure (1)..(318): unsure at all n locations
attgtaatcaaccaaagtcgaaaaacagagttattttgtcggatcaaaatggtgaagattganataggaagtgtgggtnactcctttagtgtagcatctctnaaggcttacttgtctgaatttatcgcaactnttctctttgtgtttgctggcggtggctctgctcttgcttttgccaaggttcacaatccgatgcagcctttggcccccnttggtctttntcggcttgtcggctgtggctcaangcctttgcccctttttnggttgggtgttttcccataggccggccaanaatnttcggggggggcaanctttnaa

SEQ ID NO: 137333 - DNA, 403 bp, Arabidopsis thaliana columbia
  unsure (1)..(403): unsure at all n locations
agangatgaagacgaggaagaagaagacgatcctgaattatcggaagcgagatgacgaagaagacggtgaaggtaaggnctatcgaggaggaaattatcatcggaattaacagctggttcaacgaaacaccaatcttcttcgtcgtcttcatcatcgttttctccgtcttgttcttcaaaatcaccnatggtaacgtcaaagagattagaagaagaagaatcgtgatccatacgttcgaggaaatcgacacggcattggggacataacagagnagaggaatcggaatcgggaatcggagggagnngaggaggggtaaactcatttcggnatttcntngccncccgtaaagttccgccggtcaaagnttcccccttngccggnnggtttttttgtnttgttnaa

SEQ ID NO: 137334 - DNA, 499 bp, Arabidopsis thaliana columbia
  unsure (1)..(499): unsure at all n locations
atggactcgcagccgatgcaaggncaacaacaagnccaaccatggcaaggacgacagggacaacaaggccaaccatgggaaggacagggacaacagggacaacaaggaagacaaggccaaccatgggaaggacagggacaacagggacaacaaggacgacagggacaacaaggccaaccatgggaaggacagggacagcagggacaacaagggttccgtgacatgcaccagaaggtggaacatgtnagacgcggagacgtctttgccaacactncaggctctgccactggttctacaactnaggngnacagccactttttcatnattggtnttttttgncattgccaanttcccaaaaccaanttggcccgaaacccttgggttttccttttggccggaaacaaccancaggggggttttggggttttaaagaacaacaagnccngnaaatttttgggggggtttnncgggncaggttatggtttagctttaaattttc

SEQ ID NO: 137335 - DNA, 418 bp, Arabidopsis thaliana columbia
  unsure (1)..(418): unsure at all n locations
gatatttcaccaccctactctcaaactcacgtggagcccgttaatggttatccttctgacaacaagagatgcgacgattcctctgttcctgccaaatatgatgatcttgtccgtaactctgctctcttctgggaaaagctccgagctttcctcggattaaccagcaagactttgaaggttcctactgtgggaggaaacactcttgatctgcatcggcttttcatcgaggttacgtctcgaggtggtatcgaaagggtggtgaaggatcggaaatggaaagaagtgattngngcattcagttttncgacaacggtaacaaggtgcatnggtttgttttcaggaagtatnatctcaaagtttctttttcanctggacaacntntttnccccgnaaaaaaccgnngttttaagnncnttca

SEQ ID NO: 137336 - DNA, 282 bp, Arabidopsis thaliana columbia
  unsure (1)..(282): unsure at all n locations
tgtaatcacaacaaactggtcaggaccaacanagtatctnacagagcggaatggttacccgttggtggtagaggagatgagtgaagtnaaggaaggtccttttaangggcatcantgggcagagccatctttggataanctgagggttctaatnaggcgtgtaatgagtaaccctgatgaggctaaggttaaaggaaaacgtggaagagatgacatggtcaagattttnccncctnaggntgttgctaaggttttagcgggtccaaatagcggggatctttt

SEQ ID NO: 137337 - DNA, 412 bp, Arabidopsis thaliana columbia
  unsure (1)..(412): unsure at all n locations
ggacacttcgggatagagaaattgaactcagagctgaggtatctgcaatccaagcgaaaggcaaggagatgagcaaagcagagagtgagaccggtgaggaaggccctatggtcacggagtcagacatccaacacattgtgtcttcatggactggtattcctgttgagaaagtatcaaccgatgagtctgaccgtntcctcaagatggaagaaaccctccacaaacgtatcataggccaagacgaagctgtgaaagccataagccgagccattcgccgtgcacggttttggctcaaggattcctaaccgtnccatcggtaagtttcanattttncggggtccaacccgntntttgggnaattttaggntttcccaaanntttgggnnttnaanttttgggttcccggannccc

SEQ ID NO: 137338 - DNA, 425 bp, Arabidopsis thaliana columbia
  unsure (1)..(425): unsure at all n locations
atccatcacatctcctcttgcaaaccaacgtaaaacactaactaagagatcaatatggctggagtgatgaagttggcatgcatggtcttggcttgcatgattgtggccggtccaatcacagcgaacggcttatnagttgtggcaccgtcaacggcaacctggcagggtgcattgcctacttgacccgaggtgctccacttacccaagggtgctgcaacggcgttactaaccttaaaaacatggccagtacaaccccagaccgtcagcaagcttgccgttgncttcaatctgccgctaaagccgttggtcccggtnttaacaattgcccgtgcaagttggnctttcttagnggatgaaaagnccaanttttcctttnnaaantaggggcaaaaccaattttaaannccgnggggtttnngngcngg

SEQ ID NO: 137339 - DNA, 463 bp, Arabidopsis thaliana columbia
  unsure (1)..(463): unsure at all n locations
aataactgtcctctcactgaatttntccagtgccctgatttcgacgccctccaacagttgcttcctctgaacgtagngnacaacccatacttggctgctgccacgtggcctttgctgctcgtnaaggcaacttacttcccatgcggaggcatggccataggaatctgcatcactcacaaaatcgcggacgcagcctccatctcgactttnattcggtcctgggccgccacggntcgaggagagaacgatgccgcagcgatggaaagtcctgtatttgctggagcgaatttntacccaccagccaatnaggctttttaaggttcctgccgatgaacaagnccggcaagaggagcagcggttacaaaagagggttttttnttggaaggttttaaggtnggaggtntttagggcccaagccnctttttttaggaaacaattnggccccccctcnggggnggggnng

SEQ ID NO: 137340 - DNA, 381 bp, Arabidopsis thaliana columbia
  unsure (1)..(381): unsure at all n locations
ggaaaatagggaaagccatgcgcatagaggttgatcgaagtggaatgattccaaggttgaggttccatgatcgtnaatcgtatgcaagcaataaaaccaaggagtatgatgacattgccatcaaattcttatcctatgtgctcctcctccttgtcattggcttgtccatatattctctcgcttatnaacgccacaagagctggtattcttggatactatcttcactaacaagctgtgtctacatgttcgggttcatcatgatgtgtccncaagctatttcatcaaccttcaaagnttaaatnagtgggnncattttcccntngggggcaaattggnctttcaangttccctaaaancccttttttgggnggggnncttttg

SEQ ID NO: 137341 - DNA, 467 bp, Arabidopsis thaliana columbia
  unsure (1)..(467): unsure at all n locations
aaagaatggcttccgcggctgttgcatcgatggttcttgaccctaaagcatcaccggccttgatggatctatccaccgcagacgaagaagatctctatggccgcctcaaatcgcttgaacgacaactagagttcaccgatatccaagaagaatatgtgaaagacgagcaaaagaatctcaaacgagagctgttacgagcacaagaagaggtcaaacgaatttcaatccgtgcctttggtgataggtcagttcatggagatggtagatcagaacaacggcatcgtcggatctactactggctccaattactatgtcagaattctcagcacaatcaattagngnactcttaaagccttcctgnttccgtcggtnnttaaccgtcaantccaacggcctttntgntgttttnccnccggnggttnttntagattccctttttngccattttnnagcttacggntcctcna

SEQ ID NO: 137342 - DNA, 208 bp, Arabidopsis thaliana columbia
  unsure (1)..(208): unsure at all n locations
aacctnttnacctnattntccgttgtttcctccaatnaacttgtttttncngtgggtgaaactggctcactacaagtaactccaagaacagaggtgatagattcacctggtctggaacgaggtataacatcgatatgtgagagattacatatccatggattacaaagaggncttaagcacattgatagatatgcacattcactaaagt

SEQ ID NO: 137343 - DNA, 411 bp, Arabidopsis thaliana columbia
  unsure (1)..(411): unsure at all n locations
ctttctccctcctctgctctctcatctacttcctctgtatattcttcgcacaaaattaagttactaaatccagtttctgacaatggaaacaaaccatttatacactttgtctacacttgtngttatgctgctagtgtcagtgacaccgacagtgacatcaaaagacgaggttgtttcttgtacaatgtgttcttcatgcgacaatccatgtagtcctgtccaatcatctcctccggcaccttcttcttcaccaccgtcaacccccacaaccggatgncctncccttccttttcctccaaggttcggnngggggaagtttttnattttaacccccccttttnnancccgggggggnanaanaccccccccaaanggggggggggaaaaattttttnttttncccgncgggtt

SEQ ID NO: 137344 - DNA, 400 bp, Arabidopsis thaliana columbia
  unsure (1)..(400): unsure at all n locations
tggcttacaacaacaaatcttaaacgttttactttgtgctgcacnactcaacctcaatggccgcctcaacaatggctctctcctcccctgccttcgccggtaagncttcaagctttcccccgcggcatctgaagtccttggaagcggccgtgtgacaatnaggaagactgttgccaagccaaagggnccatcaggcagcccatggtacggatcttgccgtgtcaagtacttgggtccattctttgggggataaccgagctacccttaccgganagttccccggagactacggatgggacaacggcggncttttaagttgaccccgggnanatttggaaagaaaccgtnacnttgnangtttttcccaaaagntggggccattttttggngccctangntt

SEQ ID NO: 137345 - DNA, 363 bp, Arabidopsis thaliana columbia
  unsure (1)..(363): unsure at all n locations
tcggaaagaagaagtttgagactctatcttaccnccctgaccttagtgacgttgaatnggctaaggaagttgactaccttctccgcaacaagtggattccttgtgttgaattcgagttggagcacggatttgtgtaccgtgagcacggaaacactcccggatactatnatggacgatactggacaatgtggaagcttccattgttcggatgcaaccgactnccgntcaagtnttgaaggaagttnaagaatgcaaggaagnagtaaccctggngccttcataaggtcatcggnttcggcaaacacccgtaaggtccattgaatcagtttnattggcttcnaagnccccaaggtttaaccgnag

SEQ ID NO: 137346 - DNA, 356 bp, Arabidopsis thaliana columbia
  unsure (1)..(356): unsure at all n locations
ttttaccctaaacctcaagcngtcgtctccaaagttccccctcagagacgaaaaaatgaagaccattttntcctcggagactatggacatccccgacggcgtcgccattaaggtaaacgccaaggtgattgaggtcgaaggtccacgaggtaaactcactcgtgacttcaagcatctgaatctcgatttccagttgattaaagnccaaagtcaactgggaaangtcagctttaagatttgattccttgggttttgggtccncgtaaggccaaagtgcnttcggnttagaacctgcttttaagccaatnttngaataaacctcaatgnctgggggttanctcaanggttttccttna

SEQ ID NO: 137347 - DNA, 270 bp, Arabidopsis thaliana columbia
  unsure (1)..(270): unsure at all n locations
gtaancttcttcttccttgaagatttgatttcattttcctctctttnagatccctattctnatggcttctggatcttactggtgctatagttgtagccgattcgtttgggtttccgattcaatctcttgccctgattgcaacggtggtttcctcggactcatccaagagnctctcgattttcaaaaccttncggatttcctttaaccaccaaccaaccaccaattnaaacaatngggaggccccanttnggntttccccttccttccctt

SEQ ID NO: 137348 - DNA, 261 bp, Arabidopsis thaliana columbia
  unsure (1)..(261): unsure at all n locations
tgtgttgaagcagttagaatctgcgaatcttcagaagttttatttcgagaataagctcgagaatncgacgaaagataccacgaatatgaagttcaggaaccccaagtatttatctatattgaatcacttgaggttttatttacccgagatgtacccgaaactacataggntactgtttttgggccgatgatgtgggttgtccagaagganttaacggggcctgtgggnggttnntatngnattgggaaantaattgngcct

SEQ ID NO: 137349 - DNA, 437 bp, Arabidopsis thaliana columbia
  unsure (1)..(437): unsure at all n locations
atcgaaccaactaacacaaaagaaaagaaaaaaaaacagagtatcaaacatgtcaatcttgctctgtttcctctgtcttttacctgttttcttagtttctttatcaatcttgtcaaaaaggctaaaaccctcaaaatggaagcttcctccgggaccaaagacgctcccgatcatcggaaacttacacaacctcacaggtttgcctcacacatgttttcgaaatctctcacaaaagttcggaccagtgatgcttctccacttcggattnggtccccgtagtcggtgatctcaatcggaagaaggagcagaagaaggttttaaggccccangnttttganttgttngnagccgnccaggggcttttgggggcaaaggattntncttttttnaaantttaagnnnattggtttcgccccttanggggggggnttttaaaa

SEQ ID NO: 137350 - DNA, 475 bp, Arabidopsis thaliana columbia
  unsure (1)..(475): unsure at all n locations
tttttntggcgtttcacagagagagaaagaaataggagattntttttncttgtggtgagagaagatcgcatcgtgtgggtagcgtttcaaacaagtaaaataataaaaagaataaaaagtttccgtcactttctcgaggaagaaggggttttggtgtgagtcctttctttgcgtttgttttttcattttccgatctcgtaattntcgtgttattcgccggaaaagttaaagattcagatttaaaggttgggnatnacattcacagaatttcgttgattggtgtgataataagccattgatcaacaatcttctttttgtggcaatcacataatcgtgttatgcattctnaggaaatngtgtcgcataagttttttagaagaatttggancgcaactnccntggaccnttccattcaagngcacccagtccgcccgaagagggnagnntncggnagnggtaagaaagaaggtgttaa

SEQ ID NO: 137351 - DNA, 478 bp, Arabidopsis thaliana columbia
  unsure (1)..(478): unsure at all n locations
caagatttcatatttnatgggtgtactatcctggtccatggtttctccagagttgtgtttgaaatactaaagacatcagcgcaaaacaagaaacnntttcgagtgttgtgcacagagggaaggccagataaaacaggtgtactgctagctaatgagcttgcaaaacttgatattcctgtgaagcttctgatcgattcanccgtggcctatagcatggatgaagtagacatggtgtttgttggagctgacggagtagttgaaagtggcgggataattaacatgatgggaacttatcaaatcgccctcgtcgcacagagtatgaataaaccagtctatgtagcttcagagagttacaagtttgcacggntctncccgttggttcaaaaggncttaggaccagccttgnggcctattgattcagnatnccngtccncataaggttnggnagaaagtctncaagggctnnannctccctaga

SEQ ID NO: 137352 - DNA, 328 bp, Arabidopsis thaliana columbia
  unsure (1)..(328): unsure at all n locations
aaagcaaaaaaaaataaaaaatcgcacgtttntncttcttcttctctctcgcaacaaatctgtattagggtttttaagaaatcttcatttcgtgattttaaaattnatttgtatttnattttnttgtngctttggaatcatcngcaaccaccatgatttctgattcgatcaccaacgcttctgctacttcagctccaaccgccagggatttcggaaaaangaaaaggacgaacaggtctgccaaatttgaaacagagcaagctaggtcttcgtcgtgaacaatggctttctcaagttncgntgatntacaaagggggatanggnggga

SEQ ID NO: 137353 - DNA, 316 bp, Arabidopsis thaliana columbia
  unsure (1)..(316): unsure at all n locations
tactatttagtccttcgcctnccgnttccgccactctcgctcactggatcatcgccgtccggngaaaatctntcacagctgaaggacattctcgtttccaattttgttaaagacgaagccatgaagagtctgatatggttaacagcagangaggctgcaaagatcagaggaaaagttctttctttgtatcgacaattacttaggagcattaactngccaaaattgcagcttagttatgcttcaagactttcgaagaaagctganggntaggaccatctncttgtttggctctncggngatttcgnaacacaattgt

SEQ ID NO: 137354 - DNA, 455 bp, Arabidopsis thaliana columbia
  unsure (1)..(455): unsure at all n locations
ggcgttcaagatgcatgacgtgatatgggagattgctctatctgtatccaaacttgagaggttctgtgatgtatataatgatgacagtnatggtgatgatgctgcagaaacaatggagaattacggtagtcgccatttatgcattcagaaagagatgacacctgatagtatacgtgcaacaaaccttcactctcttttggtttgctcttctgctaaacacaagatggaattacttccaagtctgaaccttctgagagccttagaccttgaagactcttccatcagcaagttaccagattgtttagtaactatgttcaacttaaagtacttgaatttgtccaaggcacaggtgnaggacctgccnaaaaatttccctaaactcggcaatttggggcggtggncncaagnaccccnggttgggncncccntcgggnttgggattaangggggngggt

SEQ ID NO: 137355 - DNA, 308 bp, Arabidopsis thaliana columbia
  unsure (1)..(308): unsure at all n locations
gactaaactaagaccagggatttggaattttttggagaaggctagcaagctgtacgagttacatctttacactatgggaaacaaattgtatgttacagagatggccaagctgcttgatcccaaaggggttctatttaatggacgggtcatatcgaaaggagatgatggagatcctcttgatggagacgaacgagtacctaagagcaaagatttagaaggagttatgggtatggaatcgtctgtggtnatcatagntnacttttncnagtttggccctnaacncaaatgnttttnanagcctttttnaa

SEQ ID NO: 137356 - DNA, 428 bp, Arabidopsis thaliana columbia
  unsure (1)..(428): unsure at all n locations
ttttctaacaagcaaaaacnccaacctttactttatttttnttttgttttgtaaccnnctcagatcttaattctcaaagaagtatgaagagagaaagatctgatttcgaagaatccctcaagaatattgacatngctaaatgtctgatgatacnagcacaaacctccatggtcaaacagatcggtttgaaccaacataccgagagccatacaagcaaccaattcgaatgcaaaacatgtaacaagagatttttntcgttttcangcccttggtggccaccggggcaagccataagnangccaaagcttcaccggttgagcaggaaagattgtgaanattttttggcaacgggtttntnaaagggaatccatttttcaccaaagtnttnccntatggcggtcaaaggttttgggncccgccaaggtttt

SEQ ID NO: 137357 - DNA, 312 bp, Arabidopsis thaliana columbia
  unsure (1)..(312): unsure at all n locations
tcctccttaaacctcagaaaagaagaagaagaagaagaagaagaaagttgaagtntttagggatgatggctatgtncgtaagacgagctctatctagtcgtaacgcgattggttttctnanaagaagctccgttgttgtncaatctcgtnatttcnccttcatttcttcacccaatctcatgatgatgggaggccgagatctgcaattngatttgtccatgcccggatttcctcagagattctggtcgaggctttncaaaaggcaaaaaatcaaaggccgnttcaggnccagggatggtcgncggagttcca

SEQ ID NO: 137358 - DNA, 307 bp, Arabidopsis thaliana columbia
  unsure (1)..(307): unsure at all n locations
tcgtaaaanagcccactcttactataagcaagcngtcaagatgtccccggaagattgtaatgtgcaagcttcatacgcaaggtttctntgggatgtggatgaggacgaagaagatgaagcattaggagaagaagaagagaacttnagtnatgaaactggccatgtgcctccaactaccatgttccgtgattttccccaacacacttctattaccgcatcatcctangacacatatgaacaccttcgtgaaatgtccgtattttaggnaattaacntatttnggnggcttntttaattccccntactc

SEQ ID NO: 137359 - DNA, 247 bp, Arabidopsis thaliana columbia
  unsure (1)..(247): unsure at all n locations
tcctttggttgtnactcttctgttgatcaaggctttacatnggcttgctcagaaaagagttgaatacattgagactactccttctntctctaagntttctcatttncgtattgtctcttttatgggtttccttcttcttgtggatagtttatttatgtacagttctatacgccacttgattcagtcgcgncaggcttcggtttctctcttcttctcattcgngnatatgatactggcgacaacgnct

SEQ ID NO: 137360 - DNA, 282 bp, Arabidopsis thaliana columbia
  unsure (1)..(282): unsure at all n locations
gattgtncaaattaggaagagaacagaattttggacaagttgcacagacaaaaggttgcagaagttgaaaagtttacccagaccgtacgggagcttgaagaagctgttcttgctggtggtacagctgcaaatncagtnagagattaccagaggaaatttcangaaatgaatgaagagaggagaatccttgatcgggaacnggntcgtgccaaagtaagtncaagcagggttgcaactntagtggcaaatgantngaaanatggtagcggtaaagtgatgcct

SEQ ID NO: 137361 - DNA, 490 bp, Arabidopsis thaliana columbia
  unsure (1)..(490): unsure at all n locations
aatctaatcgacaaatcaccaccaatcgggtcaattgctcggctcctctcatgggatgatgactcttgcactgacaacatagctaaacccgcaatgggagtccatgaggaggaagactggcatctnttcatagaaatnatcttgacagctgcaggtttcagcagtggttgcatagtctctcatgaccccatcatgtcacgatggcacatgccaaacagtcccttagacccttcactcagagacaaatacaccaacccggataacaacaacatcaaggagttcatccacggagggcaaacgnagacaacaacggtcaanttngtaagcttcattttnggnccgnatcaactccatcgtttcagaaacaanggtttcaaggnacaggtatgggttttttgcattttggcctggtgggnatttttgggggttagtttaaaggcttggtttaaantggcctnggaagngttcnttnggggngncntggccgcaa

SEQ ID NO: 137362 - DNA, 380 bp, Arabidopsis thaliana columbia
  unsure (1)..(380): unsure at all n locations
ggctccagctaatgatgaccatcccaaaaacgacgtcgttgaaggccaaaatctagtcaaagaaatctacgaagccttaagagctagtcctcagtggaacgagattctnttcgttgttgtttatgatgaacacggtggttattatgaccacgtccctactccagtcattggtgtcccaaatcctgatggtctagttggacctgagccctataactttaagtttgaccggcttggtgttagggttcctgctttgctaatctcggcttggatcggacccttggacggtgttacaaggggnccaatggnccnaangccaaggtggaantnggacaaattantcaatttccgggnaaaacttntgggaaantttnaancnncaa

SEQ ID NO: 137363 - DNA, 407 bp, Arabidopsis thaliana columbia
  unsure (1)..(407): unsure at all n locations
aacacacaagactccattattctcctgcttcttcgtctcttcaattatttnctctgagactagctttgattcaaccatggctaatgcagcatcaggaatggcagtccatgatgactgcaagctgaaatttatggaattgaagacgaaaaggacacaccgtttcatcatttacaagattgaggagctgcagaaacaagtgattgttgagaaaatcggtgaaccgggtcaaacccatgaggaccttgctgcaagtnttccagctgatgaatgccgctatgccattttcgggttttaaattttgtcaaattttnangggttncccaangggncagggttttttttcggggggaaaggttntccgggcncaanaaaagtnttnngaccnaaatttttntttggggggnccc

SEQ ID NO: 137364 - DNA, 452 bp, Arabidopsis thaliana columbia
  unsure (1)..(452): unsure at all n locations
catcaagatacttctnagcttggttcatctttaaaccggaaccaaatcacagaacatcatggctcctccctctgccgtctcgcctcccgctcgttcagctgagcttgccacctctaacaaggctcccgtcaacctttccaagaccgccatgaacacgacggtcgaggagatgattggccaatgggacagcttcaagtttgctcccatccgcgagagtcaagtttcgcgagccatgactcgtcgctacttcgaggacctggatcgctatgccgagttccgacattgtcaatcatcggtgcccggttccttgggccttagnggtngtttaagnccttgggaanaaagggttcccanttttaanattnccaatantngggggcctttttttttcccgggggggggnccnctttttggggggaaaaatttttttngnnaanttattnntaaaaggg

SEQ ID NO: 137365 - DNA, 506 bp, Arabidopsis thaliana columbia
  unsure (1)..(506): unsure at all n locations
gaaaaagtcatggttcatttggatatgaggaagaagagaagtagtagtggccggtcagggtcgtttcatcatttagagatcatagataaacattctgactctnctgaagaagtttctgcttcttcatcattgtataatattgcaactccatctccattgtctggtttgcctgaatctcaccttggttggggacactggtttactttgagagatcttgaaacagcaactaacagattctctaaagagaatgttataggtgaaggcggttacggtgttgtctacagaggagagttaatgaatggacctcctnttgcagttaaaaaanattcttaaccagcttcttaggaagagttccgagtccgnggttgatcctatcggtcatgtnncggcccaaanaactttggttcggncttntttggttactnnacttnaaggcacacaccagnntagttggtttcggnannggttaattaatggaaccttnggccaatncattcanggggcaa

SEQ ID NO: 137366 - DNA, 607 bp, Arabidopsis thaliana columbia
  unsure (1)..(607): unsure at all n locations
tgcaaaccataaccaaaccatcatcatcatcatctcttggtgacagaagaaaagagttgaggaacagagaaaatggcagcacaagcacttgtntcttcttcacttacctcctctgttcagacagctagacagatatttggctcaaaaccagttgcgtctgcctcacagaagaagagttcctttgttgttaaagctgctgcaactccacctgtcaagcaatgagccaacagaccattgtggtttgcttcatcgcagagtctctcttacttggatggcagcttacctggtgactatggattcgaccctcttggtctttcagacccagaaggtactggaggattcattgagccaagatggctagcatacgggngngatcatcaacggacggttcgccatgttgggtgcaacttggggctattgtncntnaggttttagggaaaggctggtcttgttccacaagagactgttttccttggtccaaccggngttgttcnccacanggcataaantnctgggaggaattcaaacttttttttggngnggcttntgggttgntncnccggggtnaaggcttganacccnggttttggnnaaananttttgggtt

SEQ ID NO: 137367 - DNA, 266 bp, Arabidopsis thaliana columbia
  unsure (1)..(266): unsure at all n locations
gaatattgactcaccatcatcatcatcacttgagatgaagaagaagttggaaattgaccaaaaatttacgagtcaaaacgaagaaaacaccaaaaaggaagaggagaagaagaaagagaccaacaataacaatctttctaacatgangcataagaagacgagttcacacgtatgggactgtgggagcactctctacgnctcgttcgagctcaactcgttcaaacgtcnanntngcttaagccnttttngtttcctccgcnagacnt

SEQ ID NO: 137368 - DNA, 439 bp, Arabidopsis thaliana columbia
  unsure (1)..(439): unsure at all n locations
ctgtccgtgagttgtctgtgatagatgtttttattgttcaatattgactcttctttcttttatataatgaataatgtaaaaaatttcctaatattcgtctaccttataaattagaagcacaacactctctcctcttcacaaatctcacatcctcactcctcagctcctcaaatcagaatgaatcaatccgcgcaaaattacttttccgtgcaaaaaccttcagagncttcatcagggccgtacacaagtccgccaccaattggttatccgactagagatgcggtggtggggtgatcctccggcagcagcagttggggcaaaantccaangggggtaaacccnnaggntttttttttcctgcccaaatgnntcnttttgttncccggggnnaattttttttaggntttcgggntaaagggttttttngaaaatnttnggg

SEQ ID NO: 137369 - DNA, 313 bp, Arabidopsis thaliana columbia
  unsure (1)..(313): unsure at all n locations
ggctgaagcaacagcggccaagttaatactnatgtttttccaagaaattaaattggactctccaaagagccttgaaagcggagaaggtgggggtacgatagcacctcaagatgcatgcaaccnanttgctgaagttgtaaaggaaacactgaggaaaatggagatagtgggtgaggaaaagacgaggatgtacaagaaagcncgantngggcttgaggaatgcaaganagaggtagnagaggaagcaaagcaagtggcggaacttccagatggagnggcagaagaagganccaccagnttggangaggtggag

SEQ ID NO: 137370 - DNA, 352 bp, Arabidopsis thaliana columbia
  unsure (1)..(352): unsure at all n locations
tacaacaacaaatcttaaacgttttactttgtgctgcactactcaacctcaatggccgcctcaacaatggctctntcctcccctgccttcgccggtaaggcgtcaagctttcccccgcggcatctgaagtccttggaagcggncgtgtgacaatnaggaagactgttgccaagccaaagggcccatcaggcagcccatggtacggatctnaccgtgtcaagtacttgggtccattctntggcgaatcaccgngctaccttaccggagagtttcccgggagactacggntgggacaccgccggganttttaanntgncccccggggaantttgnaaagaaaccgtgggctntg

SEQ ID NO: 137371 - DNA, 449 bp, Arabidopsis thaliana columbia
  unsure (1)..(449): unsure at all n locations
ctgctgctatacttcattgtgcctggccgcgtcgtagaaggcacaccgctagtaggcacggatagcttacggctcaagtatccaatcaatggatggacaagtttcttgattgtncttggtacagtgtttacngctgtgtacacaggactcctacctgcaacatttggttacgatgagtttttnccgctatgtacngccgcgatcctatggagctatgcactgtctacctacctatacatcacatcacacatcaacatgccagacagcaaagtatcaacctacaacccatcaaaacacaatcccacggatttacttgcaccacacgggtaacagcggcaaatgtgctatacggctttttggatttggcagnacacttaanccccnggattgggttcnattggnttaaaggnttnnaatganttgggncccgggtttncccaatgggnnct

SEQ ID NO: 137372 - DNA, 297 bp, Arabidopsis thaliana columbia
  unsure (1)..(297): unsure at all n locations
gaagaaagatggccatgggggtaataaggtcaaatctcatggtnnggggaggagttcagcattatgatagtgggcctaaaaaaggtggtggtgggaccaaaggaggaggccatgggggccttgacattgatgagctcatgaaacacagcaaaggaggaggaggaggtaacaagggcaatcataatcatagcgccaaagggattngtggtggcccaatgggtccaggcggtccgatgggtncaggcggtccgatnggtcaaggtggtccnntgggtatnattgggnccaggntggtcc

SEQ ID NO: 137373 - DNA, 406 bp, Arabidopsis thaliana columbia
  unsure (1)..(406): unsure at all n locations
caacaacaaatcttaaacgttttactttgtgctgcactactcaacctcaatggccgcctcaacaatggctctctcctcccctgccttcgccggtaagnccgtcaagctttcccccgcggcatctgaagtccttggaagcggccgtgtgacaatnaggaagactgttgccaagccaaagggcccatcaggcagcccatggtacggntctgaccgtgtcaagtacttgggtccattctctggcgaatcaccgagctaccttaccggagagttccccggagactacggatgggacaccnccggactttcagctgaccccgggacatttggaaangnacccntggnacttngnaagttttccccaagnaggttgggccatantntgagggcctaggnttnggtgttcncc

SEQ ID NO: 137374 - DNA, 278 bp, Arabidopsis thaliana columbia
  unsure (1)..(278): unsure at all n locations
atcgttcaagcatacatgactgcatttcctttttccggtttcgtagaccaaagaagaacactgaggagagagatggtagtgagaggtacttgtatggttatgtatttaataggcagaggcatgatgaaagattgaaaaggggaggtgaacagaagtctgtggtgntattatcgcatacggcttactcgagtntgtttaggncttttttgcaaatcattnggccnttgtattttnatgttnggaataaggcttttnaacanattgctggttangnctct

SEQ ID NO: 137375 - DNA, 270 bp, Arabidopsis thaliana columbia
  unsure (1)..(270): unsure at all n locations
ctctttcttcctccatgagagacttgagtaaataatacatagttttaaatttccccttttctaatcttatctctccnaaatacataaacccatcccaaagatttcgagtttacaatttaaaaacagttttgtttagngcaatctttaccttatctttacntctatcatctattctncttcttcctccatctctagaaaatnataatacntctngtttcttaaatctnatttgtatnacaataaccaaaacccaagtttacaaaacatntc

SEQ ID NO: 137376 - DNA, 454 bp, Arabidopsis thaliana columbia
  unsure (1)..(454): unsure at all n locations
ttttgttagtgttttaagccagagacagagagagagaagggagaataatctcgggagagacagaaagcgacgattattggttggtgaaattttgggaactgggaaaacttttcgatggcgacttcgaagcttcaagctatctggaatcaccctgccggacctaaaaccattcatttctgggcaccaacgttcaagtggggtattagcattgccaacattgcagactttgccaaacctccagagaaactttcctatcctcaacaaatcgcggttacatgcactggtgttatttgggctcgttacagcaatggtaatcaatccggaaaaaacttgganccttttcaaggnttaatgttgctatggcagggccaggtntttnccnattttnncgnaaaaaaaacncggttttttnacccgnggtttggccnnccctttgggnnnntttttttttttt

SEQ ID NO: 137377 - DNA, 479 bp, Arabidopsis thaliana columbia
  unsure (1)..(479): unsure at all n locations
actaactggtggttgggctaaagaaggattgtattttgaaatcgtcaagaaaatcttcaataaagttttggaaagaaatgatgctggagagcattttcctatatacgctatttgcctcggatttgagctcttgacaatgatcataagccagaacagagacatttttgaaaaaatggatgcaagaaattctgcatcaagtcttcagttcgttgaaaatgttaatatccaaggnaccntattccaaagatttcctccagagctgttgaaaaaactcggtacagattgtntggttatgcagaatcatcggtttgggatctcaccccaaagctttttaaggggaatatttgccccnggcctaaatttnttttaaaaattgtcccaacatggnggttnttgncancggnaaagggttttttttnnacncggtntatttaaccaaaaattccnggggcccggntttccggggggccnnnggaaaa

SEQ ID NO: 137378 - DNA, 326 bp, Arabidopsis thaliana columbia
  unsure (1)..(326): unsure at all n locations
cttaaacgttttactttgtgctgcacnactcaacctcaatggccgcctcaacaatggctctntcctcccctgccttcgccggtaagncgtcaagntttcccccgcggcatctnaagtccttggaagcggccgtgtgacaatnaggaagactgttgccaagccaaagggcccatcaggcagcccatggtacggntctaaccgtgtcaagtacttggntccattctttggcgaatnaccgagctaccttaccggagagttccccggagactacggatgggacaccgncgganttttagctgaccccgngacattcgnaaggaaccgtg

SEQ ID NO: 137379 - DNA, 478 bp, Arabidopsis thaliana columbia
  unsure (1)..(478): unsure at all n locations
aaaattttggtttcaattaggttaatattttgttttcatttataaaattataaatcataaatcaaaaacttaaatgcccatctctacctaattacaataacaaggggaaatatctaatggccggttatccgacctattgataagctattttaatttaagctttcaatgcttgtaatttgtttgcacaaatgcgtttgtctccgtncgatgggtatatttcacaaaactagtttatctaacaagttacaatggtttctttttaaatgtgatttttttnattttacaatgttttcccatgtaaaccttaaacacataggttgnaaacnagtgagggccttatgcaaaatattnctcggcgtgngttttattggaatcgggcnccaaaaattaaaccacctttaggncccngggggggctggggncccccttggnccccccncntttgggcccgnaggtgngggntngttgncaaaaaagg

SEQ ID NO: 137380 - DNA, 387 bp, Arabidopsis thaliana columbia
  unsure (1)..(387): unsure at all n locations
aagttggcaatgtctgtaacattctcgatgttcatgtaagtnactttcccacctcttttttctcatgtnaaatctatcaatcagcttaacagtatctgcaatcattatgcatgcagaactttgtgccagaaaacccagaaagcatagtggagtttgaggcgccaccatcacctgatcatagctacggtcaaaccctaccagccgcagaagattacgcgaaagagccactggcggtgccacctcagcttcatctaacacttcttggcactactgaagngncagccatagccacaaaggcttaancatgtgggtgctttanccatgtntttantgggggaagggntgggctnccttaattccttggnggctttnggntttnacccncca

SEQ ID NO: 137381 - DNA, 181 bp, Arabidopsis thaliana columbia
  unsure (1)..(181): unsure at all n locations
ggtgaagaagcttgatgatggtggtgttggnaggtttggtcaagtggagcttatnccaatagatcatggtctttccttaccagaaacactcgaagatcctnacttcgaatggattcattggcctcaggcttcaatacctttntctnaagangaacttgactacatacaaagtcttgancca

SEQ ID NO: 137382 - DNA, 169 bp, Arabidopsis thaliana columbia
  unsure (1)..(169): unsure at all n locations
agacctccttgttgtactctcaaattnttgggtcgttctgagtcgtctccgcgttaaatcttttccctttttnatcctttcttcctttctncttcttcttcgcattgatttggtnctccttcctnttctatnctattcattaagaacctaatcttcatcttctccatct

SEQ ID NO: 137383 - DNA, 150 bp, Arabidopsis thaliana columbia
  unsure (1)..(150): unsure at all n locations
gtaagcncaccatcncttgaacaacgaaccggtgganagagataggtaggtgagagaatggatgcagagtctccataccttcgaatcttnaaaaagactcaaagctttgaagnatttattagaatctgcaaaagtgagncgtcgaaggaa

SEQ ID NO: 137384 - DNA, 189 bp, Arabidopsis thaliana columbia
  unsure (1)..(189): unsure at all n locations
ggttagggttactnattttccgtcgagtagtctnacnnaaaactgcaacggcttacaactttgatccgccatcgattttcgattctaaagcttggacgaagnagaagnanaaagttcgattcgatttctggagagaaattgggggaaagtttaaaaacggatccctaaggtagtctgagtctctctctc

SEQ ID NO: 137385 - DNA, 190 bp, Arabidopsis thaliana columbia
  unsure (1)..(190): unsure at all n locations
agcaaatnatgactctacagcaatcactatctcagaatagaaatacagccagccaggatgcggggcaaactggtgctgccacaggaaataacggggggctggatttattgatgaatatgttttggaagtnttgggtgctngcggccctcagtggaacgganccattccaatggtcccnccncaggaggng

SEQ ID NO: 137386 - DNA, 128 bp, Arabidopsis thaliana columbia
  unsure (1)..(128): unsure at all n locations
cagcagtcgattcaagatttgtatgaggagcttnatgaagagcggaatnctgcttcgacagctgcaagtaaggcaatgtntataanattaaggttgcagagggataaagctgaacnccaaatggaatt

SEQ ID NO: 137387 - DNA, 185 bp, Arabidopsis thaliana columbia
  unsure (1)..(185): unsure at all n locations
ttcctgaaggggngatagtgccaaaagcacaacccaaatntnaacctgcgtttntgggattcacacaaacagctgtgatatggaactcacgngcttgcatgattggactcatcggtactttcatcgtcgaacntggtgagggttactagatggttttcttttttgcaagaattgntttaatccta

SEQ ID NO: 137388 - DNA, 182 bp, Arabidopsis thaliana columbia
  unsure (1)..(182): unsure at all n locations
aaagaaagaagcaaaaagaaaaagctcgaagataggaaaatnttaagggaagnatgtactccaagttcatcatggtgggaagatgttcaacatcatcataatgatcatgcaaactcgnttagttcgacgnctttttaccntaagngtagtaataataactcacaaggccaacggctagctnt

SEQ ID NO: 137389 - DNA, 114 bp, Arabidopsis thaliana columbia
  unsure (1)..(114): unsure at all n locations
gccgcagtcgngtggcggtggtggcgtatcgtcaagnggcggntccggagttggatcaagatcgagcaacatgctgagatttacacagatgatgctccggggnttaagatctta

SEQ ID NO: 137390 - DNA, 137 bp, Arabidopsis thaliana columbia
  unsure (1)..(137): unsure at all n locations
aaagttttaattttaatctctnattcggtagatttagtgaattaggtgttgtnggtgtctatncttctccgcatagcttagatttgttaatttcngtaattngtttaatgtttttaaggaaagtaatgatatgaaat

SEQ ID NO: 137391 - DNA, 179 bp, Arabidopsis thaliana columbia
  unsure (1)..(179): unsure at all n locations
gaggtcaaaaaggttccagaatacacagaacctgaggagccggaagtnccagaagagccggagctgccctcaccggaggagcctganattccagaagagcctnanattccagaagagcctnagggttcctggngaacccgaaagtttcctgaaggagcccgaaganccagaagggccca

SEQ ID NO: 137392 - DNA, 182 bp, Arabidopsis thaliana columbia
  unsure (1)..(182): unsure at all n locations
ctctgattcggtccatcgatctcaaaggctcaaagcttaatcgtttcctttnttctnattctagccatggctcaggtaatttnttaacgactttaatattctcntncttttgtcctccatttnttggccatgaaacgatggaataatgtttttaanagacattgatctggaagcaggaatgt

SEQ ID NO: 137393 - DNA, 129 bp, Arabidopsis thaliana columbia
  unsure (1)..(129): unsure at all n locations
ctgatctttctctctctgcatgcatctttntntctatnaatctctccagtatttgtaaggatttgggtattttttnaataacgatcagtgtccaatctntctaatcgtcttcataagtttcctattatt

SEQ ID NO: 137394 - DNA, 400 bp, Arabidopsis thaliana columbia
  unsure (1)..(400): unsure at all n locations
aacgacccagaaaagagatttgattcctttcctcatctttgtccctcagctctgtttgaaccattaatcatatcaaaggaagaacctttaaaatgacaaccgattctgatgatggtttcgtttcttcaagacaactccttttgcttgcttcgatttgttgtggtgctctcatgtgcaaaatcgtttatgacttgactcgtttcataagtccattgctcttcagtgtttatggaaaacttgacagcaaagttagaatggaatggaacaataggggattttcaacttttcatgctgtgttcacttctgtggcttcaatttacttcttggtgatatctgatcaatttgatgagaatgttcatggtgattcagtcattaatagnacaacgnggttatccggaat

SEQ ID NO: 137395 - DNA, 326 bp, Arabidopsis thaliana columbia
  unsure (1)..(326): unsure at all n locations
cgatttgttctttcttttgtagatttgatcgtttcgttgtttgttgttctctgtttgattgattgcnctctagttttaattcgatttagggttttgaagctttctctttgttcgttgtttcgttttcgaatcggattggtatgattttncgttctgttttncttatcttatggttttnatgtgtgattggatataatctctgcataaacnatcgaatctcatattaaagcgaattgatttacttgattgtnatggttttnaggaggttganctaaattttggnttgnctcccctcaaaatcattttattggncagctttaggggtt

SEQ ID NO: 137396 - DNA, 202 bp, Arabidopsis thaliana columbia
  unsure (1)..(202): unsure at all n locations
gcatgctgttttcaacngatagcanttctcggcggcgngttaacgttgtacataccgccgataagatgtttaanggtntttntggagacgatggaggagatgggaatggaaggtagggtttatagccgganactttttcctcgagccagaattgcttggtcaaggcttctngattgcttctcctcctcttcacgtcctctct

SEQ ID NO: 137397 - DNA, 330 bp, Arabidopsis thaliana columbia
  unsure (1)..(330): unsure at all n locations
tgtagtgagagangaangatagaganaaaaaatgggnggcanaggtgtgatgatggtggcgatactttgcctttgggcactctctgcaacatctgangcagtaacagaggctgagccaggtttgatgatgaacttctttaaggacacgtgtcctcaggccgangacatcgtccgtgaacaagtcaaactcctctacaaacgccacaagaacaccgctttctcttggctccgtaacatcttccatgactgcnccgttgagtcatgtgatgcgtcgnttttnctggattcgacaagaagagagctaggagagaaagnncacggncaggagct

SEQ ID NO: 137398 - DNA, 467 bp, Arabidopsis thaliana columbia
  unsure (1)..(467): unsure at all n locations
agtttccgcacgaatcacgaatctntctctcttcacacacttcacactttcaatatacactctcattatgactaccgaagagaaagagatcctcgccgccaaattggaagaacagaagatcgatctcgataagcccgaagttgaggacgatgatgataacgaagacgatgactctnatgacgatgataaggatgatgacgaggctgatggactagatggagaggcaggaggtaagtcaaaacaaagcagaagtgagaagaagagtcgcaaagccatgctcaagcttggcatgaaacccatcacttggtgttagccgagtcaccgtcaaaaaaggggcaagattatctttgttttgnnatatccaaagccttnttgtnttcaaggggtccngnntttagncanattttgggattttttggggngggcgnaattccggggttttgggcttttaanncccnntngaaagc

SEQ ID NO: 137399 - DNA, 432 bp, Arabidopsis thaliana columbia
  unsure (1)..(432): unsure at all n locations
ggaaggggagaggtcatcaccattgcttccacaaacagaccagacattcncgatcctgcgcttgtaaggcctggacggttcgaccgcaaaanctttatccctaaacctggtcttattggacggatggaaattctgcaggttcatgctcgtaagaagccgatggctgaagatttagactatatggcagttgctagcatgacagatggcatggttggagcagagcttgctaatattgttgagatcgcggcaattaatatgatgcgtgatggaaggacagagttaacaccagttgatttgcttcaaagctgcacaaatnggagnaagngggatttttagntnggaaaagccaggngcttnggggccattggcggccaagttncgggtncaattnnagcttgcaattggctttttttnnncagttgacctttccng

SEQ ID NO: 137400 - DNA, 527 bp, Arabidopsis thaliana columbia
  unsure (1)..(527): unsure at all n locations
agggacctggcctggaattncccgggnctgcccactgngtccggggaaactttaatgcngagantggaggttcccggttgatgagggtcatttcctatggatgcttgtaaagatcatgaatgcgaaaaacactatcgagatcggtgttttcaccggttactcgcttctcactacagctcttgctttacctgaagatggccgtattaccgcgatagacattgataaagaagcttacgaagttggactagagtttattaagaaggctggtgttgatcacaagattaattttatccattccgatggtcttaaggccttagaccaattggtgaacggccaaatgttgagttttnatttttccatttgcgggatnctgncaaaatcaagcttcggcaacttccatgagagggttttaaaaattggtgaaagtttggggggnnncatttgngttcgncaacaccttgnggttttggttttttgggggnggatgaaaantggagtnccggggcattttggngnantttgggnaa

SEQ ID NO: 137401 - DNA, 466 bp, Arabidopsis thaliana columbia
  unsure (1)..(466): unsure at all n locations
gaagaaacgggccgggtttgcttgggcccaaccgagatccggttcatcgacccacactaaaccattccgtctgttccgtaacggagctctaccgttaaagatgacagagaaaacaaaagcggtttacgagtcactcagcagaagaaaactcgccgacggtgacagtaacggtgatggagacgacggaagcatggttctgataagcgatatcgttaccgtgagccaagacggaacaggaaatttcaccaacatcacggcagctgtagcggcggcgccgaaccaacaacgacggaagcgccggtttctttttnatctatgtnacggcggggaatctncggagagtatatctcaattcgggnaggacaaaaaggttcatnatnnntnataggtgacggggttaattaanncggttggtnanccggaaatagaaagctnngttnacggtttggcttcntttnaaattccg

SEQ ID NO: 137402 - DNA, 441 bp, Arabidopsis thaliana columbia
  unsure (1)..(441): unsure at all n locations
tttacaaagacggagctttctncttgatggatcttcgaagcgaacacggaacctatgtaaccgataacgaaggaagaagatatagagcaacaccgaatttncccgcgcggtttagatcgtccgacatcatcgagtttggttcanataagaaggcggcgtttagggtgaaagtaatcaggaaaactccgaaatcgacgaggaagaatgagagtaacaacgntaaattacttcagacagcttgaaataagtaaaccgatggtgaaattaagtaattttaatcggttttgcagataatttgagtagtaattttntcaaaggaaaaaaaatctgctttcagctattccttgcntgncnatgtntttttttgggcttgaaaccaaanttttaattttttcnaggcccttanncnttcnttttnttcaactttccgggggcccntta

SEQ ID NO: 137403 - DNA, 506 bp, Arabidopsis thaliana columbia
  unsure (1)..(506): unsure at all n locations
cttcttcgaaattnttcctcctctttttctgcagaaactatccaaaaatctcttcgttttcacaatttctcattattaaaaaaaaaactttaaatncttcttcttcaagaaaaaatggcggtggatcttttatcggaaaattctaatatgagtccaagaatctnattttcacgtgacttttgtcaatcagacgcaataccaatcgagaaacgtcccttaagntcatcaaactcggaaccatcaagnctcaattcaagcataggtttcgntttcngcattncccggcggcggtaaatttccggcggaagtttcgntcaagggttcttgggtccgccgntgnaccttttctttaaacgggnaaaatttttnccaacgggaattcaaggaaaaaacccggacccggggntaaaaaaagggccccggncccaaaccggggtaaatttttaanccgggtttaagggaanagggggggancaccccannggggggccccaaggggggggggg

SEQ ID NO: 137404 - DNA, 562 bp, Arabidopsis thaliana columbia
  unsure (1)..(562): unsure at all n locations
agaaaacccaaaaaaaatccagatccagctgaaattgaattttcaaccaacgaagaagagatttttccaagagcaacagacaagaagaagagaatgaagtcggagctaaatttaccagctgggttccgattccatccaacggacgaggagcttgtgaaattctacttgtgccggaaatgtgcttccgagcagatctnggctccggttatcgccgagattgatctctacaagttcaatccttggggagctttccagagatgtctctgtacggaggggaagagtggtacttcttcttaacctaggggntcggaaatacccaaacggtttcgggtcctaaccgggcaagcaaggaacccgntaatttggaaagctnnccggngcagnttaaaacccntttngtaaanccgaaganggtttggtntnaaagaaagcactngntnttttttcgnangggaaagcttccaaaaggggttaaggcccatttgggtaaatcattgggaatcggctcgctaatttttganggccaagtttttntttcaaaagngcaaccttcgggctttat

SEQ ID NO: 137405 - DNA, 303 bp, Arabidopsis thaliana columbia
  unsure (1)..(303): unsure at all n locations
cgactcaacatcactgagacagctgtactactctgtgcaacgcattccttgtgttcccncccatcctcgacgtgtgatccctcacactcgtctctgctgcgttgcgtgcttcctctctctctctccactctcttcctctcctcctcacctcctgctcctctcctcctgtnatcatggtggacagtgttcaggtgttcggtcgtaagaagaccagtgttgccgttgcttacttcaagcgtggtcgtggtttgatcaaggtnaatggntcaacccatngggnacntccanccngngnttttnggg

SEQ ID NO: 137406 - DNA, 370 bp, Arabidopsis thaliana columbia
  unsure (1)..(370): unsure at all n locations
tgagattttgcagcagtttgattggcaagttcctgattgggtgattgtncctggaggtaacctaggaaacatctatgcctttnacaaagggtttaagatgtgtcaagaactgggacttgtcgataggatcccgaggatggtctgtgcacaagcagctaatgctaatcctctttacttgcactacaagtctggttggaaggacttcaagcccatgactgcaagtaccactttcgcctctgcgattcanatcggtgaccctgtnttccatcggttagagctnnntacggtnntcaagaagtgcaatgggtttttttggaagagcccccaaaggggggggctttttnggttcnnatnggnttaaggggttttc

SEQ ID NO: 137407 - DNA, 403 bp, Arabidopsis thaliana columbia
  unsure (1)..(403): unsure at all n locations
caaaggagtgaagaaacagctgaataatctgtgttacatttatgctctttatctcctccacaaacatctcggcgatttcctctccactaactgcatcactcccaaacaagcctctnttgctaacgaccagctccgttccttatacactcaggtccggcctaatgcggttgcacttgtggacgccttcaattacaccgaccattacttgaactcggttcttggccgttacgncggtaatgtgtacccaaagctcttttgaggaagcgtttgaaggatccattgaacggctcggtgggttcntgatgggtaccaagaatacctttgnacctntgntttaagaaggaaanntttgnnaccgttagggttnttttaagngtttccttttgnttgaaanngggaaang

SEQ ID NO: 137408 - DNA, 365 bp, Arabidopsis thaliana columbia
  unsure (1)..(365): unsure at all n locations
gttgtactatcatngaagattaagttagtcgatgttccgtccacggtcaccgngtttaaagtccagaaacataggagaaagaggccgttaggntcatcaacaagtggcagtatgttgcggataaggtccctgaagatcttttcatcagcgcaacgttggngagatcaaacggaaactctgtgcaggctttgtttactggactctatcttggnccggtgaataatntcttggccttgatggaagaaaagtttccaganttaggtcttgatatccaagnctgcacagagatgagttgggctgaatctgcactctggtntnctgntttcnctaaaggagagnctccttgggtgttccncgcggatcgg

SEQ ID NO: 137409 - DNA, 340 bp, Arabidopsis thaliana columbia
  unsure (1)..(340): unsure at all n locations
ggcacacgctaaaacacacaaacaaaaaaacaactcttcaagaacatatacatttaatatttatataaacaaaaaagaatggttctngatttaatacaagatcngcccatctngaatttcccaccagccatcaagatccgngccaacaccaacagagatgatgacggcggcggctgcaccactcccacttcttccgaccacaagattcctcctccaccgcagaaaccccgtccaccttccacaccgtcgtctntgggcatcagatcttgcangggnaagttttggnggcattgtccangtntggntcaatggtnaacaaggtgngttgggggggtttttt

SEQ ID NO: 137410 - DNA, 360 bp, Arabidopsis thaliana columbia
  unsure (1)..(360): unsure at all n locations
ggcggtgctggagaacggcacggcattcgcggtgaggcggatcgagacggagagctgtgcggctgcgaaacccaaggaattcgagagggaagttcgtgccatcgctaagcttcgtcacccaaatctcgtcagaattcgtgggttctgctggggagacgacgagaaacttctcatttccgattatnttcccaatggcagcctcctctgtttcttcaccgccactaaggcaagctcaagctcatcttcttcgtcgtcattacaaaaccntcttactttttnaagaacggctcaaggtttgcaaggnggaattggttaangggcctttttttaaacnangtgggnggnaannaatttncncgg

SEQ ID NO: 137411 - DNA, 225 bp, Arabidopsis thaliana columbia
  unsure (1)..(225): unsure at all n locations
ctcataccattaacggaaaacctggaccgntatttccatgttccgagaaacacacgttcgtcatagaggccgaagcgggtaaaacatatcttctaaggnttatcaacgcagctttaaacgncgngctattcttngggattnngggncacaacatgaccgtggtggaaatcgatgcggtctncacttaaaccattcacaaccaaagccattttactcggaccaggt

SEQ ID NO: 137412 - DNA, 296 bp, Arabidopsis thaliana columbia
  unsure (1)..(296): unsure at all n locations
gtcttgaacttgagacactctttgttatcagtaaccttaagaaccgaagaagatggagaaactgaataacatatttttnaccctcatggccagaggacctgatgtcgatctctcagaagtcaccgggaaagaacagatggagacacagcctgccaagaaaggaagaggaaggaagcaataagtctcaagatttgttttccgtttgtnttggtatcaagattttnatccatttttgtttgatattttgagatggtagggttgtcaagattcgntctaaagcttacggnttttttttt

SEQ ID NO: 137413 - DNA, 412 bp, Arabidopsis thaliana columbia
  unsure (1)..(412): unsure at all n locations
aatttttcttcttttccccaaaaaaaaatgtctgaagttgagtaccggtgctttgtcggcggccttgcctgggccaccaatgatgaagatcttcaaaggacgttctcacagttcggcgacgttatcgattctaaggtctgtnacacgagagatcggtctcccggatcgagccgattccnatgattctaatcctcgacggatctgattccgatctgtttctctgttacttgattcgattactgttactatgttcnctctcgttctttgttaacngtnacttaatttgtcccatcggtacggtcatcnacctgctttctatgagcnccggagatcgntcgatttttgncttttaaattcaaccggttggnttanaaanaccctcccaggnttgttttttnnctgaaggtgnaat

SEQ ID NO: 137414 - DNA, 307 bp, Arabidopsis thaliana columbia
  unsure (1)..(307): unsure at all n locations
agaagcaggagttcagagagacgtagtagttatntgnatagagagagacggagaagcaggagcaggagtncagagaggcgtaataggtacggggatagagagagccggaggaggagtaaccgaagcagaagtttntcgccgaggagagancggaggngcagagaagatnttaaggagaagaagcctgattactcgcggttaatcaaaggctacgatgagatgtcagctgctgaaaaantgaaagccaagatgaagcttcancttgatgaaacgcctgagaaagataccagtaangntgcaggntggg

SEQ ID NO: 137415 - DNA, 362 bp, Arabidopsis thaliana columbia
  unsure (1)..(362): unsure at all n locations
cttgtaagaccaaatctctggtgaagcaagtagttagtgaccccaaaactaaagcagcttgtccagtaccatttgatgaagcaaagctctggaaaggccaacgtggaccagaactgaagcaacanttagaaaaacaattcagaaacataagtgcaataatggactgtgtaggctgtgagaaatgccgtctatggggaaagcttcagattctcggnctcggtactncattgtaaattctattcactgtcaatggtgaagacaatttgcgtcataatctcnganttgcaaaggnacgangtgttctncgctgattgaatngttctccacccgnttnatctgnaantccgtgaagtatgttcant

SEQ ID NO: 137416 - DNA, 413 bp, Arabidopsis thaliana columbia
  unsure (1)..(413): unsure at all n locations
tctggtcaagagggattggtttctggtatagtnctggagcagacgcttactgttgtncttcagcctganactacttcttttgaatcaaatatncagccaagttggtccctcagctccctctttggnagacaagttgttgggagatgtgttcttgcaaagtcaagtaatgtgtatctncaattggaaggtcttcttggttacgaatcaaaaaacgtggatacagaaatagaagcacaccaactatggaagantgcagagtttganttgtctcttaagccaganagggttattcgagaaagctgcagctttcttttaattttgnnanattggcaaatcaagtgcagcgngcccttttnntcttggccttacttggaagcgtccctcaaagtgggcatgncaacaaactcctttac

SEQ ID NO: 137417 - DNA, 376 bp, Arabidopsis thaliana columbia
  unsure (1)..(376): unsure at all n locations
ctaccctaacatagcccttgcaaaccataaccaaaccatcatcatcatcatctcttggtgacagaagaaaagagttgaggaacagagaaaatggcagcacaagcacttgtntcttcttcacttacctcctctgttcagacagctagacagatatttggctcaaaacccagttgcgncttgctcacagaagaagagttcctttgttgttaaagctgctgcaactccacctgtcaagcaaggagccaacagnccnttttgggttncttcatcgnagggtctctnttacttggntgggangttaccnggggnctttnggtttgncccccttgggtttttagacccnaangggcttgggggtttatttttgccaaaatgg

SEQ ID NO: 137418 - DNA, 513 bp, Arabidopsis thaliana columbia
  unsure (1)..(513): unsure at all n locations
gacctcaaatcgtactttngggttctncaattgttcaatatagcttcactgatcgtggttggggtgccactctcgctgacctctactctcgcacggctgatatcattctncgtggatatgctggttggaattctaggtttgcnttgaaggttcttcaccaagtattcccaaaggatgctgtgatacaaccttctttggtgatagtctatttcggtgggaatnattcaactcatcctcatccttcaggtcatggccctcatgtncctttatctgaattcatcgaaaacatgaggaagattggtgaacatcttttgagcctttctgataaaactggtgtcattttcctcanttcggcaccaatgaatgagaacagatcgggatagtttttggngntgcaataaaggccgggtaacgngttgtgccgtccataatcaagagngttgttaaatcnntgcngggggtcaatttnaaagggacggtatttgggccgggtnnnnancaagatattggttt

SEQ ID NO: 137419 - DNA, 265 bp, Arabidopsis thaliana columbia
  unsure (1)..(265): unsure at all n locations
ggtaatgcaggancagcaatgcgtccacttaccgctgcggtcactgctgcaggtggaaacgcaagtactngngcttnatggggngccnngtatganagaaagacctataggggatttggttgattggtcttaagcagcttggtgctgatgttgaatntactcttgganctaactgccctcctgttcgtgtcacgctaatggtggccttcccggtggaaaggtgaagctttctggatcaattagtagtcagtacttgactgctctg

SEQ ID NO: 137420 - DNA, 401 bp, Arabidopsis thaliana columbia
  unsure (1)..(401): unsure at all n locations
tgcaaaatctctaaccngcaatggctcaactnaaccaaacacaccatcatccgcaagagggaccccaagaaacaaaaacagtttcttctcacctccaactccctcaaggctaaaccaatcctcgaggaaatccaatgacgacgactccaaaagcacaatntcggtcctgtccgagaggaaccgcagacacagcattgctggttcatcagtcagagacgatgagagcctcgctggctcaccagctctcccgagctacatggttccaactaaatnagntngagccaggtttangccccaaagcccnttaggtggtaccacacaggnaacggnggggtttncaggncaaggtttagtttngaaaggggttttggtttcaaattttgggttnnatttgtnttaaa

SEQ ID NO: 137421 - DNA, 447 bp, Arabidopsis thaliana columbia
  unsure (1)..(447): unsure at all n locations
tgccaagnaaaactgtagagtccgctgagcaagctgagaaatcttctaagaggaagaggaagaatcaataccgagggattaggcagcgtccttggggaaaatgggctgcggagatccgtgatccgagaaaaggctcccgagaatggcttggaacattcgacactgctgaggaagcagcaagagcttatnatgctgcagcacgcagaatccgtggcacgaaagctaaggtgaattttcccgaggagaagaaccctagcgtcgtatcccagaaacgtcctagtgctaaggctaataatcttcagaaatcagtggctaaaccaaacaaaagcgtaacttttggttcaanaagccaacacatcttngtcagcagttctngaacaactccttttncaacnttttttgggggananagnnttnttttggggggnngccntaatttttncanaa

SEQ ID NO: 137422 - DNA, 492 bp, Arabidopsis thaliana columbia
  unsure (1)..(492): unsure at all n locations
tacatnttcaagcttgcactactgagaaagaaatatgatcatgtcatgagcatgataaagaactcccagctatgtggacaggctatgatcgcttatcttcagaagnaaggatttcctgaagttgccctacactttgttgaagacgagaggntccgattcaacttggctcttgaaagtggcaacatcagtgtagctgttgcatccgctacagagattaatgagaaagaccactggtatagactcggagtggaagctcttcgtcaaggaaattctagaattgttgagtttgcgtaccagcagacaaagaactttgagaggttatctttnctatatctcattactggcaatttaggcaagctgtcaaaaggttgntgaagnttncagaggtgaagnccaatntaatggggccagttttcacaatgcncttttcctgggggttttaaagggngggtttnanggtccttggggatcctggncattnncccntngntt

SEQ ID NO: 137423 - DNA, 283 bp, Arabidopsis thaliana columbia
  unsure (1)..(283): unsure at all n locations
ccatggctaaatttaatgcagnntttgtgtactgcaacaaaacgtttgagcagnaatgtgttggtccttcaaaacaaaattatgngcaangattaactaagatgatgggaaagtcacggtctttnttcatcaaagnatacaatanccgactgttcaactggctggtngggttctctcttgtaatggtggttgtgggccggtttatcataaaattcattttattagaaatggcggcgtggntacttttcatattctttggnggcatacacaagggatgttcttg

SEQ ID NO: 137424 - DNA, 507 bp, Arabidopsis thaliana columbia
  unsure (1)..(507): unsure at all n locations
caccattttccttctntgcctcttcttcacactcctctccgccactaaacccctaaatctnactctccctcaccaacacccttcccctgattccgtcgctctccatgtcatcaggagtgtaaatnaatcttttgcaagaagacaactaagctcaccatcatcatcctcatcatcatcatcctcctcatcatcatcctcttgccgtaccggaaacccaatcgacgattgctggagatgcagcgacgnagactggtcaacaaaccgacaaagactagcagactgttcaatcggcttcgggacacggcacaattnggagggcaaaaacggcaaggtctnaggtngtaactgncttnatcgggcaacaaccccacaaaacccaacanccgggnncattcggttagggggtattccagggggggcattttggttnggnttttttttnaaaatggttatnggnttaaaaagggntttttnttaaaggtttaaaactttggtgggngggggtta

SEQ ID NO: 137425 - DNA, 236 bp, Arabidopsis thaliana columbia
  unsure (1)..(236): unsure at all n locations
gattgcaactntctttatagcgggtttcatggttctaacgagatatttcagcaatagagagaaagtaatgntcgagctgaaagtcatggcaccgnctcctatgancacaatggaacagcttttagcgntccaaaacgccatttcacagctcgaacagttaatccaagacgcaaacanttgttcncctcaagttccgagctttatnactttcgcttttnccacaaggcgtgtgagaa

SEQ ID NO: 137426 - DNA, 445 bp, Arabidopsis thaliana columbia
  unsure (1)..(445): unsure at all n locations
gaagaatcaatactcaaatctcaatcatctctntttcttatctncttctccgatatgaagctcgcngctagcctcaaccgcctcagccccaaacgtctcttccgtaccaaatcaaaagcttccgtctccagatctgagccttcttccttcagctccaatgcttcttcctcttcctctgatggatcttacggtaacctcaaacaaggtccaaccgcgactccgatcagtgttctccntcaaaactccggcgattttnacactgagcttgttcaagcttttaaactgatcgatcgtnatgacggcgggtgttgtttccagaggagatctcgcgggggttgattagcaaggtaaggcatgacccaccgggtcaagaagaggtgagtttaatgctaanngagttacgnngggangtggttntntaacctttaaggnttttntagccnnt

SEQ ID NO: 137427 - DNA, 439 bp, Arabidopsis thaliana columbia
  unsure (1)..(439): unsure at all n locations
gattaatcaagctaaaagagatattaagtggtgaagtaccaacagcactgcacctcaaattcttgtacaaacaaaaccataccgacttgaatatattgagacaattgaaagagaagctggaagcacgtaatagtgtaacacataacgctactgttataacacatggatttatgcattgtggaacaaccgtagatgtattcttgcgtgagancttagagtggcttggcaaagcaaccaactgggccaagttcacagccactgcaagtctaggtgtcatacataaagggcagcataaagatagtatgaagctattncagccattatcttncangtnacgcttgnaggacacgnngcancctggtgtcagcggcaggatcggcnntaccaagaaggtggtgntttntnttgcnctttggctagtcattcccngtcggggttt

SEQ ID NO: 137428 - DNA, 496 bp, Arabidopsis thaliana columbia
  unsure (1)..(496): unsure at all n locations
gctgatctcctccaagtagctgaagttatgggtctagacgacgaaatagaagtnacagatgatgttggagaagcagatgtcattctagcctcaagttctgaattgaaacagaattcatcaatccgtcgtgttgccaaattacacaagctaccgatatttgtnattaaggtatccttctttttgcatggctgattatnattcancgcattcctttgttttattaatttgaatcacttctttcgtcctgttattaccttgcagtcaactactatggctcagatggtgaaggcagtccgaatgatccttggaaggggatcatttggctcagcccctaaagccataggaaaatcttctgttgatggtatcgngntcaaagatgatgctcctgagggaaacccagtttggagnacncgntgcccttagggaggccgcttggatcgntntattgnatcccggnggngancnctggggtttttcctnggggccngttaanagt

SEQ ID NO: 137429 - DNA, 500 bp, Arabidopsis thaliana columbia
  unsure (1)..(500): unsure at all n locations
gatttttttagatacgaaacctctcttacgacgctccttcctcaatctctctcgatcgtcggagattctttcttcaagagtcatcttcttcttcttctccttctccctaaaccctaatttatcgcgtttggntcgaatcagctgtcaattcttgttttggttttnacggccagggccatgtctgccgtatattgcggaaccaagagatcttacttcgacgataattcttctccgccctcttctaagaggttccgatgtttttngccttccaattctccaatctggtcctctcctccttccctcatcggtcgatcagcttcantctgcggttncccatatttgaactcaanggttcttggtnaaggcaactaggaggtaaatggaagngnttttaaaacngctntnnaggggnttnaaccttttcggaanntttttgggggaagaaaccttaaaaaattgccccagaggggncctntttcntagggaaataatcccgtttt

SEQ ID NO: 137430 - DNA, 320 bp, Arabidopsis thaliana columbia
  unsure (1)..(320): unsure at all n locations
agtccttcacaaatnancacctcaagtggcattntnctcagctagaggacccaacaccaaagatttcanctttcaagatgctgatcttcttaaaccggatattcttgcacccggttatctcatatggnctgcttggtgtccaaatggaacagatgaacccaattatnttggtgaaggatttgcgctaatatcaggaaccagcatggctgcaccacacatagccgggatagctgcgcttntaaagcaggagcatcctcaatgggggcccagcttgctatcaaatcagcttttnnttgncaancttaacagtcattggttag

SEQ ID NO: 137431 - DNA, 418 bp, Arabidopsis thaliana columbia
  unsure (1)..(418): unsure at all n locations
gcaagtntggttcatgtgggtcaaggaagcagtcaccaagtgaatgggaacggcatacaggctgcagagccaaaaantggaagtatagtgtaagantgaaagacacaatgctacctctagaaaaatggattgcagaattcagtacctatactctagaaacccagatgttggataagcaaaagatgctctctttgctagaagaaaagtatgagccagtcagggctaagtggacgactgaaaggtgtgctgtatgcagatgggtaggaggctngggagnaaataaaaatgntcatcttgtaaccaggtgtcaagtggctgtccacccaagaatgtttatggggtaagcaaatctcnnggncctcactttcctgggggattccagngnccttntgaacccccggccnttngnggggntttt

SEQ ID NO: 137432 - DNA, 283 bp, Arabidopsis thaliana columbia
  unsure (1)..(283): unsure at all n locations
attttataacatctcgaggagtagcaaggttgagagaatcttgcttcggaagtactaccatctnatggctgttttaatgtncttnccagcncttgtnttacagcctaaattnctcgatctagcatttggtgcagcattggcagtatttntngcattggagatcattcgaatatggagaattcagcctcttggagagcctttacatcaatncatgaatgctttcactgaccatcgtgactcanagcatctgattgtnagccacttctcactcttgcttgggtgt

SEQ ID NO: 137433 - DNA, 491 bp, Arabidopsis thaliana columbia
  unsure (1)..(491): unsure at all n locations
aatgttaaggaaagctattaggatcgatgagcatgtacctgacagccttaccacttcaatggtggacgatgtgttctacgtgttgcagagttgtctgaggagagcgatttcaacttcaaacataagtnctgtgattnctgtgttgagctatgctggtagcttgttgggcaatgattaccatgaagctctacaacagaagattagagagcctaaccttggtgctaggttgtncttgggtggtataggtgtggaaaacaccggaactgagattgcaactnctttgaacaatatggacgtgagctncgagtacattctcaaactaaaacatgaaatcgaggggcaatgtacctgtgggtatttccctgnaccagcagatcggggagngggttnaatcattgtctttnccgagnttaggnggggttaaggcagnacgttcaagcagttnctcaaactcnagggattggnccactttttngaacccgtnannccca

SEQ ID NO: 137434 - DNA, 476 bp, Arabidopsis thaliana columbia
  unsure (1)..(476): unsure at all n locations
atcccaaaggaactctgcaacatgccaaggctacagtatttacttcttgatcaaaattccataagaggagacatacctcatgagattggaaactgtgtgaagctacttcagctccaactgggtcgaaattacttgacgggaaccattcctcctgagattggtcgcatgaggaatttgcagatagcactcaacttaagtttcaaccatcttcatggatcattgcctcccgagttaggaaaactcgncaagctcgtgtcattggatgtctctaacaatttgcncacagggtccataccgccactactaaaaggtattgatggggtttnttcgaggttaattttctcaaacaacctttttgaatggtccagngccngtctttttttcccttttnaaagnntnccaattttgggctttttnggggnacaaaagngnttttttgggggcncctttngngctctttttttngggntattttt

SEQ ID NO: 137435 - DNA, 484 bp, Arabidopsis thaliana columbia
  unsure (1)..(484): unsure at all n locations
atggcggtgaagttgcggtttgcgggagtaggattganagagtnaaggtgaaagagtataaaaaagaggctaaggagctttctgctctttttaaaggtcaagagatacaagctcatgaaggagcgattctngctatgaagtttagtcctgatgggaggtatcttgcgagtcctggtgaagatggggttttncgggtttggagtgttgttgaagacgaaagatgtgaagaacatgatgttcctaagattganccttcttgtatatactttnaagtgagtaaacnctctgagttgagaccggtggctgtagaaaaggatggggttactggtccgttgatgngtccaaggaaggcaaccagagtcttctttgtnttaattaattcccccaaagattttcccggggtcttgntnaacccgttcaacgggtttttcgggcacannggngnanccntnaaaccctttggcccnagacaaatcgctttttt

SEQ ID NO: 137436 - DNA, 546 bp, Arabidopsis thaliana columbia
  unsure (1)..(546): unsure at all n locations
atccataattacgacaaacgaaacgacgcatattaaggttactctctctcaaactctcgtctcctaaatgggtcttaccccaactgcaaccctactcgtcgctgttttcgcgttttgcctcgtcgctgtaacggcgcagttcgcctacgttttgtggtggaaacgtcggttccgtcgtcggagtatcgccggatcagaacgcgacgctttttcctctcgcggtggtgacctaacggctacaccaccnccatcgaaagagcttctttacttcttcttgttctgtctcgaaaacaaacagttcagaatagggatcttgccaacggttccggcggttccttgcagccgaancgccggttaaatgacggtggnatcaaaagtgggtcaataaacngggggaaatttanttttnggggcctttggnggnttttttttancaangnttgaagggttttaattagggggnccngttanttgncgggggnaaatttttccncgggggngaattttttaaggggccatttaaaaggnttnttaagttgaanaggg

SEQ ID NO: 137437 - DNA, 333 bp, Arabidopsis thaliana columbia
  unsure (1)..(333): unsure at all n locations
agccagtttcgggatatagcaacgattggaatgcagaaaactatcaaccctgaaacacaacgaccttataccatcagcatggtagagcgcctaatgcatgaaattnattttcctgttgatcctcatagtaattccaagaagcaggcacttgatgtcatccgtnagcngcaaaagcacttccctataangcgttctccaatgngnctgcgtcttactgttcctgttcaaaattncccctcgcttttggtgaagctanaagantgggatggtngtgttgtctccaaagtcggttctggaccacagatgtccactgtntncgagntggttccgggc

SEQ ID NO: 137438 - DNA, 312 bp, Arabidopsis thaliana columbia
  unsure (1)..(312): unsure at all n locations
gatctcgaaggaaatttcatagtccaaattggcagcagtggagaagaaggtttccaagatggtnccttcgaagatgctgcatttaatcgtcctcagggactagcttataatnctaagaagantctnctttatntggctgacacanagaatcatgctttgagagagattgattttttcaacgagagagtacagactctggctggtaatggaactaaaggctcagacnaccaaggtggaagaaaaggaaccaaacagctttggatttnncccttggggccgtntgctttttagncnggtgattgagaaggttta

SEQ ID NO: 137439 - DNA, 511 bp, Arabidopsis thaliana columbia
  unsure (1)..(511): unsure at all n locations
aaaatcgttgggtttcacggacgttctaccgatgttttgcactcacttggagcctatatatcatcgccggccactcccaaattgcgtggaaagtggattaaggtggagcaaaaaggagagggtccagggccaagatgctcacatgacatagcacaggtgggaaacaaaattttntcatttggtggtgagctcacaccaaatcagcccatagacaaacacctttacgtttttaacctcgagaccaggacttggtccatttntccagccaccggagacgttccaaacctctcttgcttaggcgtccgtatggtgtcaattggatcaagcctctatggtctttggaaggccgagacggtttcacgnaaatacaacgggttctacttcgtttgcaangnccangacggngtggaacttgttaacttcgggttngaacaagggcccanttcctggtagntttcanttggntnnccgaagattnggacaanngtttaggtttttcnggtgggntagg

SEQ ID NO: 137440 - DNA, 341 bp, Arabidopsis thaliana columbia
  unsure (1)..(341): unsure at all n locations
gctccaagcagaactagcacagctcatcattcaagcttttaggaaagctttcatccctggatatagttatctcccaacaaaaagtaacagaagantgaaagcagcagccagagaaatccangttatactaagagggatcgtaancaaaaggttaagggccagagaagctngtnaagcaccangcgacgatttgctgggaatacttcttgaatcgantttnnggcaaacggaaggnaacggaatgagtaccgaggntctgntggaggagtgcaagttgttctatttcgccgggcaagnggcaacatcagtacttcttggttttgggcaatggtgctgttaag

SEQ ID NO: 137441 - DNA, 438 bp, Arabidopsis thaliana columbia
  unsure (1)..(438): unsure at all n locations
agcaaggaagtcctggnccggtaagagcaatggttaaactgagttgcaacgtcgaagaaacgatcaaaattgtcgttgacaagtactgtaaagaaggaagaactccaaaactcgatcgagattctncctttgaattgcatcagtcacatttcagcatccagtgtttggagaaaagagaaataattggagaattaggcagtagaagcttctacatgagaaagaaagctcctgaaaccggaggtcgttcgccgggatttctccagcgagaacgagcctaattccgtcgtcgaatttgatcggntcgtgcatcgctcagttnattgggaaaatcatgagggagaccaagnaagggttatggaccatatttggtatngtgtncaatnnggttgncccaagttttcactttttagcgnngnncataaantttttaagtttnng

SEQ ID NO: 137442 - DNA, 254 bp, Arabidopsis thaliana columbia
  unsure (1)..(254): unsure at all n locations
catgatcttccttctggtaaaaaccngcttgcttggaacantcgaatgaaaatagcggctggtgcagcaagaggactagagtatctccacgatacaatgaaacctcctgtnatataccgtgatcttaagtnttcgaatatnttgntcgatgaaggatatcacgcaaaantttcagactttggattagctaaagtaggaccaagaggaagtgaactaatgtttccacaaganttatgggnncatacggttactgt

SEQ ID NO: 137443 - DNA, 512 bp, Arabidopsis thaliana columbia
  unsure (1)..(512): unsure at all n locations
cattcatcttcttcttcaatctctctcaacacaaagaagaacaaagaagttatgagctcaatgatggagactctccagattcgtaaacccacttccctccccgtttctcaacgccctaatgcagcagccaccgccgacgatgagcctggtctcatccgccgtcgtctctcttctctatcactcaacctctcaaaccaaccagcagcgatcgcagctagattcccgagatccaaatctgtttccgccatgggagaacaagcaggaagctctgtgaaagaatggtgggaatggggttggtcatgggtcctttcaagaaaacctatattcatcagaggtcttgagcttaacaaaagncggagctaaatcgggttgggttcncaaaacagngggggtttattgccggtttttttaaacnncggttttnagtccccgaattttaaggggcnttttncanaggtttttttcccttttttttgaaannaaagggnnncggggtaanttntttntnnngg

SEQ ID NO: 137444 - DNA, 400 bp, Arabidopsis thaliana columbia
  unsure (1)..(400): unsure at all n locations
gntccatctgatgagaagtctgtcatgtcaaaggtgaattctttctgcnacctcttgcaatctgctgcaaactcacagctcaatatcgaaactgctgataccgaaagagttgttggggtcgataacaatagacacatgcccgaagaggcaaaagagttgttgaccctgcttcaagcagcaagccactacaagggatgtcaaggaaagactcattcagtgatttgctggtgcaccttcctcgaatcacatcactcccaaagttcttgttcaacatttcagaagaagactagtagatagtgaaccgaaaagttctttgttctagggaatcttgaacaagtagctgtaaatcaaattatcntctctcggttcttaagggatttttttttttttntntnntntt

SEQ ID NO: 137445 - DNA, 413 bp, Arabidopsis thaliana columbia
  unsure (1)..(413): unsure at all n locations
ccgtacattcgccgatctgaaccgttctccggctgatggcgagggcagtnattcgnatgaagctaatnagtattataccggtggacaaaagagtgggatgatggtacaagatcctaagaaagtgaaagatgttgatgaactttttgaccaagctaggcagtcagctgtagacagacctgttgaaccatcaagatcagcttctacaagcttcactggagctgcgcgtttgttgtctggtgaagctngtttcgtcttctcctcagcaacaacagcaagagcagcctcaaaggattatgcacaccatcactttctgggttgaatggtttcactgttaaataaatgncccntnaagagggtttcantncccctnaaacngggcctttttgnntagctttcaaaggnaagggnncccc

SEQ ID NO: 137446 - DNA, 413 bp, Arabidopsis thaliana columbia
  unsure (1)..(413): unsure at all n locations
agccagagagagtnagtaagagagaatgacgagcgtgagtgggtgtggttcagtgagtctgataactaaccgcagtgcgttcttgggnaacggacttcaacaccgtgccgttttccttaaaccatggtcgtcttcttcgcttcagtctcggtccatggttgtcgaagccaaaaccaaaaccagcagcgaagacagaatcgcccgccactctcgtatccgtaagaaggttaatggtacaacggagaggccaaggctatgtgttttccgatcaaacaagcatctttatgttcangtgattnatgataccaagatgcacaccttagcttcagntttccactaagcagaaaccaatcttttgaagagtttcgncctacaanctcttggggnnggtgttnttanttatntntnntant

SEQ ID NO: 137447 - DNA, 531 bp, Arabidopsis thaliana columbia
  unsure (1)..(531): unsure at all n locations
ctgctgtccgcacactcctcgatcactacaagcatccggctttgctgctagtggacggtgtttcgtccatctgcgcgcttgatttccgaatggatgagtggggagtggacgtggccttgactgggtctcagaaagccttatctcttccaacaggacttggtattgtctgcgccagtcctaaagctttggaagctaccaaaacttctaaatctctcaaagtattctttgactggaatgactaccttaagttttacaagctaggaacctattggccatacacaccttccattcaacttctctacggtcttagagctgctcttgatcttatctttgagggaggacttnaggacatcatcggccgccatgctcgtttggggaaggcnccaggtttcggttgaagcattggggctnaaaactgacacaggaggnggantggtaagtacncagtgcaananttttgggncncccatttaancggttngnggttttaaaaggnattnagngtcacttaagtttggcttngnnannaaa

SEQ ID NO: 137448 - DNA, 327 bp, Arabidopsis thaliana columbia
  unsure (1)..(327): unsure at all n locations
caaaggaagaccgaaacagancagcaaagatgcacaacaaagactgtntcctcatgggtctnacttggnttctngctaagaaccgtactgcttatttccccactgtaacttctgtcctccgagccgtcatgctgaaccacgatggcgtgccacgttnatgtgctctcggcagcnacggcatgcctttagccgtcgattcttccgaattctccaacggntcgccaacttcacttcagtatccgcaccacttggtccacttnttactttacagcgttatcacattagtcctaatnanggtcgtggtgnggtgggacacnatgggtttgg

SEQ ID NO: 137449 - DNA, 368 bp, Arabidopsis thaliana columbia
  unsure (1)..(368): unsure at all n locations
tcctctcgatcggaaaatagtcaaaagtttctataaattgttgaatcaaagcagagaagaagaagaagacgatcatgaatccagattccgattatcctcatctccctaacatcaagatccaccatccttcatctcctcgtcactctcaccaccactcttcctccactccttccgccgctactcctaccccaaccgccggtgctcgcngtaagatcggagtcgccgttgacctttccgaaaagcgctttcgctgttcgctgggctgtcgataattaaatcggtcccggagaggcgttgnnaaatttcangggttttcaaaaannggttttttttgggggnnanttgggacnntnccnttaaaaaaattt

SEQ ID NO: 137450 - DNA, 570 bp, Arabidopsis thaliana columbia
  unsure (1)..(570): unsure at all n locations
ctttatctatcttcgtacattatatataatgggatcaaccgtggccgccgctctcctcctcttcctagcggcagtccctgccgtctttgccgcaactttcaaggtcggcgatatttctggctggaccagtaatcttgattacacggtttggctcactggaaagactttcagagtcggtgacactctagagttcgtatatggtctttcacactcggtgtccgtggtggataaagctggctacgataactgcgacagtagcggancacacagaactttgccgatggagacactaagatcgatcttaccacagttggaacaatgcacttcctttgccctacttttggtcactgcaagaacggcatgaaactcgccgttcctgtccttggccgccggtccatctccttcgactccttnttnggctccctccatnctttgnntnctttttnccngccttcanttcgnttacccctttttggncncatccttccttgggttcttttnaanggtcccctaaggttttggncaatttaaatttggnggcaaatggaagnggnttaagnaattaggcnc

SEQ ID NO: 137451 - DNA, 475 bp, Arabidopsis thaliana columbia
  unsure (1)..(475): unsure at all n locations
ctgcaggagtgaatcgcaaaaccaaatttggaggattctttctgaggggtttctcagtgagtaaatggcttcgaaacggatcttgaaggagctgaaggntctccagaaagaccctccaacctcctgcagtgcaggtccagttgctgaagacatgtttcattggcaagctacaattatgggtcctgcagagagtccgtattcaggcggtgtgtttctcgttaccattcacttccctccggactatcctttcaagccaccaaaggttgcatttaggacgaaggtgtttcaccctaatatcaaacagcaacggaagcattttgccttggcattttgaaagaancaattgggagccctntcctnanccaattttcgaaagntgttncctttcgnttantgttncgntggttaacggttccaaaatcnanattgcccngttagttgccataggattncncaanttgtccaaaanccgtna

SEQ ID NO: 137452 - DNA, 510 bp, Arabidopsis thaliana columbia
  unsure (1)..(510): unsure at all n locations
cttcttccttcaccatttatttctcatcatcatacttataaaaagtaaatcagaatcccgaagcaaactttcaatcttccatcatcatcatcatgtccgatacacatacatacatacatatctttngtgtgatttatacttattaaagagagattctctcattaagaagaagcttccttctttctttnctttttcntctctctgttcatggcggttcaagctcatcaccatccttctactctcttcttcctcaacaacggacangaagggaatgatcagccgcataaatctcagtttcattcaatcaacggcgggggttgntacaaggaangcgngcgaggagaagnttcttcggtggatttgatttaggatatcacgggcggnttccgnttgaaccccttccgcgggaaaacttcnaccggaaggtttttagggccgntggcaaaatccggattnttggnttaaacccggntttnnggtttttnttggggacaagtcggnggtttaagg

SEQ ID NO: 137453 - DNA, 429 bp, Arabidopsis thaliana columbia
  unsure (1)..(429): unsure at all n locations
anctctctacttaattacgttcccgacaataaaatatactagtactcatttcttnctaatttaatttggtcaaccaacttgcagagtgaagagatgggaaccgaagcatacgacgaggctattgangctctcaagaagcttctaatcgagaaggaagagctaaagacggttgcagcggcaaaggtggagcagatcacagcggctcttcagacaggtacttcatccgacaagaaagctttcgaccccgtcgaaaccattangcagggcttcatcaaattcaagaaggngaaatacggaaccaaccctgcttttgtacggtgagctcgcaaaagggtcaaangcctaagtaccatgggtgttttgcttttttnaagnctcacggtggttttttccctnaanacgntnnttgggctttnngccanggngatg

SEQ ID NO: 137454 - DNA, 528 bp, Arabidopsis thaliana columbia
  unsure (1)..(528): unsure at all n locations
gatttacgaaaatctctgaaacctccgatcgtnaacggcgaccgcnnattttcccggtaaaaatgaacgacggagatgtatcgaggcagatccagcagatggtgagatttatccgccaagaagcggaagagaaagcaaacgagatctcggtttctnctgaagaagaattcaacattgagaaactccagcttgttgaggcggagaagaagaagatcaggcaagattatgagaagaaggagaagcaagctgatgttcgcaagaagattgattactctatgcagctaaatgcatcaaggatcaaagttcttcaagcgcaagacgatatttgtcaatnccatgnaaggcccaagcaagcttaanggttcttncttgaaccggttagtccgcggnttgagtnatggcctnccaanacaggttcctnaagggtcctaaattgttccaggtggttttcnttcggttttaaaggacccnttcttgttgtttnttnccnttgtccgtaaaanaggntttgggttttnttggaagctt

SEQ ID NO: 137455 - DNA, 221 bp, Arabidopsis thaliana columbia
  unsure (1)..(221): unsure at all n locations
ggcaaagagtcttcccgtctacaaagtaaacccaatcaatcttaataatcttnaagaggtttttcnttattataattatctatctctctatctatctatctncggatctntcatgaagaaacactgaggagattctntcgctctgatctccnggtatcgtcgtctctntccgtagagatatactagtttgtcccatatccgattgattgcnctattcaatt

SEQ ID NO: 137456 - DNA, 481 bp, Arabidopsis thaliana columbia
  unsure (1)..(481): unsure at all n locations
aggagattaaggagtctgcaccttatttgagcactgtttgtgtgtatgggggagtttcttataccattcagcagagtgctttaactcgtggtgttgatgttgttgttggaacncctggaagaatcattgatttgattgaaggaaggagtcttaaattgggagaagttgagtatttggtacttgatgaagctgatcanatgcttgctgttgggtttaaggaggccgtggaatcgattcttgagaatcttccaactaagcgacaaagtatgcttttctcagcaactatgcctacttgggttaagaagttggcgaggaagtaccttgacaaatcccttgaaatattgancctgggtttggagaccaagattgngaagctccgcagaggggtaatcaaacctttattgcaatcggnancccccatcgnccatcnaaaccggnctntttttaagngggccntnattnncagtnnattncgnagggt

SEQ ID NO: 137457 - DNA, 421 bp, Arabidopsis thaliana columbia
  unsure (1)..(421): unsure at all n locations
agaagggccggtggtggacgacattcgggaaagccgggccgatcgantgtnntcattcaagcgacgatacagaagaagaacgaaacgaagngtgnaggccggggggcaaggaaaagagtcgagtcgatcaggntcgacgaccgaaaaaagcaaaacgaaatccggggttggccgaaaaaaaaacaacgctatggataccatgaccgattaccctcgataaagaagaatctttctaaatcacttcggatcagcggggccttcaagcatccgaaatacgccggggttgtaaatnncatagcgttcctgatagnaaatgacggcttccttcaaaaaaccggagttnattcaagtttatttttccaaaataagtcccgtttcgaacgggcccgncngnnttttttncgggcccttcctttaantt

SEQ ID NO: 137458 - DNA, 237 bp, Arabidopsis thaliana columbia
  unsure (1)..(237): unsure at all n locations
ccgtttcgatattaacaatccggatctagggaaagtaggttctcgcatcacgtaaatttaatttnttttgggaaaataatacataaaccttttnagtnacagccacctcagcacaagtnactcgagtagcacagaagccatcatcaatagcttgcttgcntgggagctcaaccacgaattctntgtnttctaacctttctatcacttgaggattatntacgcaattggtaaatgntc

SEQ ID NO: 137459 - DNA, 486 bp, Arabidopsis thaliana columbia
  unsure (1)..(486): unsure at all n locations
actgaatgcacaacagagtcagcaagtttcagggagtccgagttggtggtcgcagtcaaaggcaggtagtagtaccgagcaggatgataaagggaagggatctcctgtagaaggggtggttcagccaggtgcattggtcactcttccgccgccaagagaagttgctaggccagaggttcagaggcagattatacctacaggaaaccttgatgaggaagagtgggtcactgtctatggattttntccaggtgatacaaatttagtactacgggagtttgaaaaatgtggtatggtcttgaaacatgttcctggtccaagaaatgccaacttggatgcacatcctnttnccagaaccgggnttnnntgcaccataaaggggctngaccaagcaaggggttgttgnttaaccggggtttntnattgttnggggttaagccnnttagncccctttncaggnggaaancgttttaacggggggctttanca

SEQ ID NO: 137460 - DNA, 481 bp, Arabidopsis thaliana columbia
  unsure (1)..(481): unsure at all n locations
cagcaatgacagagaccgtgttgttgaggctagagatgaattgcaccgaatgttgaatgaggacgagctgcgtgatgctgttctgctcgtatttnctaacaagcaggatctcccaaatnctatgaatgcagctgagatcacggataagcttggtctccactctctccgtcagcgtcactggtacatccagagcacatgtgccacttcaggcgaggggctttacgaaggtcttgactggttgtccaacaacattgccggcaaggcgtagagggaaagtncgtggtggagtngattttctgagcaaatctggattcaggggcaaacattatctgaaattttttttttggtttcccgntttccgnaattgtnctgctttttttttttnggggatattgtcgantggnttttnttgnnttgtaccggagganctttngaaaaaaaacctcccnttttaaaaaaaggtttgggtaaaaccngnaat

SEQ ID NO: 137461 - DNA, 440 bp, Arabidopsis thaliana columbia
  unsure (1)..(440): unsure at all n locations
gtgtaatctccaattcctcagggtgtttaagactggatatgatgaaaaaaacagagtgcgcataccggagaacatggagtttccacctcgtctaaggttactacagtgggaagcatatccgaggagaagtctttctcttaaacttaacctggaatatcttgtcgaacttgatatggaaggtagcctgctcgagaagctatgggatggaactcagccccttgcaaatctcaagaagatgtctttgtcaagttcatggtatttaaagaaacttccggatctgtcaaatgctacaaatctcgaaggatttggntcctgagagcttgccagaatttagtagngcttcctncnnccttttntaatccggcataaggctaaaggnattttnaanatgaaggggnttcagaaggcttaaaaggnngtncccccnnaantcanctttg

SEQ ID NO: 137462 - DNA, 399 bp, Arabidopsis thaliana columbia
  unsure (1)..(399): unsure at all n locations
agccaagatccgacttagatcagagtcgagattcgagattttttgttcatcagtcaaatccctaaccctaggccggttcccgatttcccaattcttggcgttcacgagaaggtatgatttcttgtcgattttgctctgtagttctnctgctgcttggtgaatctcgtagagtatgtcttctataggggttagcttctccatcttcttcaggctttncccaatgtatcttagtacttttgntccntcgatncccactctttgaagctcatttacggaattntcgtcttctatcctctgcagcctgcaattactttngaatacccttgtctcaaaatntctcttaaagntncttgaaggnttataggaatggttncgnacttaaaggnttggaaaagnacc

SEQ ID NO: 137463 - DNA, 370 bp, Arabidopsis thaliana columbia
  unsure (1)..(370): unsure at all n locations
gcggaaggttcgatgaagggtaaacaaaagctgccacacactgaacaattccgttcattagataaggcagcaataagggatcaggaagcgggagttacctcgaatgtattcaacaagtggacactctcaacactaacagatgttgaggaagtgaaacaaatcgtgcgaatgttaccaatttgggcaacatgcatcctcttctggaccgtccacgctcaattaacggcattatcagtcgcacaatccgagacattggaccgttccatcgggagcttngngatccctncagcatcggtgggagtnttttttcgggggtgggctccttctttccannggngggttttnnccncgggggnnntntgggtttttt

SEQ ID NO: 137464 - DNA, 413 bp, Arabidopsis thaliana columbia
  unsure (1)..(413): unsure at all n locations
aagatcaaaagtnatgtttgtncttaatcttgtgttccgggtggtcaagagggagaaaatcctcatattttntcacaacattgcgccgatccgcctgtttcttgagctgttcgagaatgtattcaggtggaagagaggccgagagctcctgaccttgacaggggatctcgagctgtttgaaagaggcagagtaatagacaaatttgaagagccaggaggccagtcccgtgttctgctggcttcgattacagcctgtgcagaaggcatcagtctaaccgctgctttcacgggtgatcatgctttgattcanagtgggattccttctaaggcaaaaggaaagnaattgcancgngcatttanacccgggccagcangaaantggngttnggtttacccnctnttttttngtnggg

SEQ ID NO: 137465 - DNA, 475 bp, Arabidopsis thaliana columbia
  unsure (1)..(475): unsure at all n locations
gcaagtnacagttgttgccgaaccaaaggacgtttctaaccctttgcttcgtgagtgggttaagccaaagtacaatcctgtnatggttccgccaagtaatgtccctttnaattgtttccgtgatcccacggaggcgtggaaagggcaagatgggaaatggagagtgctcataggagctaaggagaaagatactgagaaaggaatggcgattttttaccgaagcgatgattttttccagtggacaaagtatccggtgcctttacttgagtcagaagganccggaatgtgggaatgccctgattttttcccggtttctatcactggtaaagaaggtgttgacacttcggtaaacaattcttagtntgaggcatgtnttttaaggccgagtttttnggggaaatnattccnattgtcnttggtaaaancccctccttnggcctnaaggcttttnancgggtnttangtcacttancnc

SEQ ID NO: 137466 - DNA, 517 bp, Arabidopsis thaliana columbia
  unsure (1)..(517): unsure at all n locations
tggnatgttgctcttgatgctgccaaaataatctcaggccaagaggttgctggcgaaatatggatcactcgtctccgtgatctccatggtggtttgtttcatatacttggtggcaacacctaagtccaacgtatcaaaggcaagcagcaagaagaagcgttaagttagtgaaatgaaaggtgagaaaggttggtacggtgctgttttctgtttaacagttaaacacagtttcaaaacttgtaagaattagagaacacactttaattttggtgttgcagaggacatacttcaagttcaaagggttatttttggttttacttaatctcttttgtgaggaccatagtcatgggngtccncttttaattttggggtaatgcccttttnnctttattgggnttttggtaggccattatccttttaccacatggtngnnaanccttttgtgggggtaacntggggttngttcctgcctaggttcaattgcccngncccngtttnccntttnaggcccngttaa

SEQ ID NO: 137467 - DNA, 414 bp, Arabidopsis thaliana columbia
  unsure (1)..(414): unsure at all n locations
atgtnaaactcttnancgatctcttggtcgaaaacntcaaagaaaccggatggnatacaccaatccacgtggatgcggcaagtggaggattcattgcaccgtttttntatccggaattggaatgggactttagacttcccttggtgaagagtatcaatgtnagtggtcacaagtatggacttgtgtacgcagggattggttgggtgatctggagaaacaaagaggatttncctgaggaactcatcttccatatcaattatcttggtgctgaccaacccacctttactctcaatttttccaaaggttcaaaggcaagtcaattgtncaatactnnccaactttatccccaatttggggccacggaggggntnccaggaaattttnattngggggattttcaagggggggantttt

SEQ ID NO: 137468 - DNA, 484 bp, Arabidopsis thaliana columbia
  unsure (1)..(484): unsure at all n locations
ctggtagccatggcttcggctactttctctgtggccaaaccatctcttcagggtttttatgagttctcaggacttcgaaacncctctgctcttccctttgccaagagatcttcttccgatgagtttgtttccttcgtcagtttccaaacttctgcaatgagaagcaatggtggatacaggaaaggggtgaccgaggccaagataaaggtagccatcaatgggttcggtaggattggtaggaacttcttgaggtgttggcatggtcgtaaggactctcctcttgatgtcgttgtcattaacgtcactggtggtgttaaacaagcatcacatctcctcaaattacggcttnaactccttggaattcttttgaccggttgatgtcaaacctttcanggnggcntcangctctnttntttttntatnggaaaggccancaaagnattgnnttttgttncgaaacccnattaaannttcccctgggggg

SEQ ID NO: 137469 - DNA, 409 bp, Arabidopsis thaliana columbia
  unsure (1)..(409): unsure at all n locations
ccgagctcagctagatgaggtgatctacacatctagtgatcgtntcaccctggatatgtgggaacacatattcggagaggttaaagccaaatcccgtttcgctgacgactctgaaagcgccatgagggtatcttcagcaagaggtgactggacactgcgcgacatacaaggtgacccagaaacagaaaaaaaacgtgagaaacttctacgctatgtgatggaaatggattacgatcagagccttcttgtatggcatatagccacttgagctcttaataccagncaaaaaagggcacttaaagcggaatcatagcgcccgtnaagtncagtaaaaattcctntcaaggctnccattgntgttttncccnaatttggtgnnaacccctnttttgattnncantcttntttg

SEQ ID NO: 137470 - DNA, 231 bp, Arabidopsis thaliana columbia
  unsure (1)..(231): unsure at all n locations
ctgcctggaatnagtnctgaaatnatgccgaaaggacatgagaaagaaagccaggcgaagataaagcggtacatgacaatnatggattctatgacaaatnatganctggacagctcaaacccaaaggtgtttaacgagtcacggatgatgcggatagcaagagggtcagggaggcaagtaagngaagtgatggagatnttggaagagtacaagaggctagcgaagntatgg

SEQ ID NO: 137471 - DNA, 414 bp, Arabidopsis thaliana columbia
  unsure (1)..(414): unsure at all n locations
gtttatggttccgataaccaagtgggaagatctaacggaggatgaggaagctattgaagtgttggatgacgtgtacgatggtgatgtggaggagcttgatcttctcgtgggacttatggcagagaagaaaatcaaaggttttgctatcagtgagactgcttttnacatttncctcatcatggccacaaggtatatatttncgatatatatatatatatagaaccaagttttcttgaagntatcacagtaaatnaggaaagtttataatctaatactaattttaaaccaatttttcaaggcggttagaagccggntagggttttcacggggngttttcaattaaaccggttttcnncgggggaagggggcctttaatggggggaaanncnncccggggggctcnncaaggggtnt

SEQ ID NO: 137472 - DNA, 389 bp, Arabidopsis thaliana columbia
  unsure (1)..(389): unsure at all n locations
taaatgggaagctctccggttcggtgtgattctcgctatagtgactagtcttagcattacattttcataccataggaacttgactcacaagagctttaagcttcctaaatggcttgaatatccattcgcttatnctgcccttttcgcgcttcagggtcatccaatagattgggtgagtacacataggttccatcaccagttcacagattcagaccgtgacccacatagtcctatcgaaggattctggttcagtcacgtcttttggatattcgncaccagttacatcagggaaaagtgtggnggncgtgacaacgtnntggncttaagcaacatggntctnaaggttttttngnaacaaaantgggcnncccattttaaaantttggccc

SEQ ID NO: 137473 - DNA, 454 bp, Arabidopsis thaliana columbia
  unsure (1)..(454): unsure at all n locations
ctcatcttctctnccttatcnccttaaaaatcttcccctgtttcttttttttaatatttagagcncctctgtttcctcnccaataacaatattcataaccagaaaaaaaaacnntcttcctctgtttgttttctagtnctgacatcataaattcagaccgagaaaacataaaaatttgagtcttttgatgatcggaaacngatgactcccgttctctgcgaaatcctgctctctgggctcacgggtcaaatctgctctctgccgtaggaccnatctcggttcaatctttctccgtcgtcttcctctactgggttttacaacggtttcaatgnatttgctacaaactntaataaatttttttcaggccaggtccataaaaaaaaaaccccaancctttaaacccataaaaccnttngcccctttttttggggcntctnggnaaacttttcctgng

SEQ ID NO: 137474 - DNA, 395 bp, Arabidopsis thaliana columbia
  unsure (1)..(395): unsure at all n locations
gggaaatgtccaaagaacacaattcccatcagaagaacgagaagacaagatctttacagagcgagttccgttgagaattacggtatgaagaatcagaagagtatccctaaacctaaatcttctgagccacctaatgtccttacacaaaatggtcatcagcacgcgataatgtatgtngaagatggggttttctacggggctaaagcgaagataaatgtatggaagccggatgttgaaatncctaatgagtttagcttagctcagatttgggttttagggtggaaatttnaacctctnatcttaaatagtattgaagcttggctggcaggtnancccncatttntttggggggtaataaggcccnnncttttccnnttttggggcctnggggnttg

SEQ ID NO: 137475 - DNA, 353 bp, Arabidopsis thaliana columbia
  unsure (1)..(353): unsure at all n locations
aaagangagaantgacagagaagaaagagatggaagtggtgaaaggnctcaacgtggagagatacatggnccgttggtacgagattncttctttcccatcaaggtttcagccaaagaacggcgtcgacactngcgccacctacacccttaaccccgacggtaccatacacgttttgaacgaaacgtggagcaacgggaagaggggttttntcgaaggcagcgcctataaggccgatcctaaangcgacgaagccaagctcaaagtcaagttctatnntccctcctttcctcccaatcatttccccgtcaccgntgactaactgggtanctcnaacaacaggttcccnaactac

SEQ ID NO: 137476 - DNA, 375 bp, Arabidopsis thaliana columbia
  unsure (1)..(375): unsure at all n locations
aactgagaggaacggtgttagtaccacccaatccaaaggnttgttttcttcaacaaaggaagacccctgcattttnctgagaaaagacgaatcatctcggaatgaacttgaagcaataaaagagagcctgaaaaaagacgcgctgtcacatctacgttcatncggatggtatgacaaggttctnatctccatgcatnccaagaagagattgcntacagagcaatcaggtggagaagatggtagcggcttgaaaaggaggttgattgaaagatgtgaaatcaaagtttgaaaatccacagnttcccagngggngtttgaaagcagntcnggggtaaatccgnatttnggggggttttgccaggaggnagtcctttg

SEQ ID NO: 137477 - DNA, 318 bp, Arabidopsis thaliana columbia
  unsure (1)..(318): unsure at all n locations
aacaaggccctctccatcgaccggccggccgtctccactcctccttcactgactgaccatgcgatggggtgggcgagtctggctgatattnaggtgaagccgagtggggtggtagggggagtgcagatgccgttgcatttntcgagtttgtatcagtcgaccaggagtcaggtcgagcagttgaccagtcgacagtcgagtcaacagagagaaatgcaactaatcgatcaagccatcaatcgactnaacgggtcgaacgncgncaaagcttacgggngtttnaaatcggtttttantttattnttgtggctnnnaaaa

SEQ ID NO: 137478 - DNA, 278 bp, Arabidopsis thaliana columbia
  unsure (1)..(278): unsure at all n locations
gtgagagaagaaagatagagaaaaaaantgggaggcaaaggtntgatgatggtggcgatactttncctttgggcactctctgcaacatctgaagcagtaacagagactgagccaggtttnatgatgancttntacaaggacacgtgtcctcaggccgaagacatcatccgtgaacaagtcaaacncctctacaaacgccacaagaacaccgctttnttttggctccgtaacatcttccatgactgcnccgttgngtcatgtnatgcgtcgctttttcc

SEQ ID NO: 137479 - DNA, 445 bp, Arabidopsis thaliana columbia
  unsure (1)..(445): unsure at all n locations
aggttacatctatcgccgtcaaaggttccatctatcgccgccgctgagaccgccactttaggccgtctcgtccgcaatctccgtaaccaacaccacccgcatcgcctgcnaattgatcggtgaggtggaagatggagttttgtcccacatgtgggaatctnttgcgctacgagggaggtgggagttcgagattcttctgttccacatgtccatacgttgccaatatcgaaagacgggttgagataaagaagaagcaacttctggttaagaaatctatagaacctgttgttactaaagatgatatacccacagctgctgaaacagaagctccatgtncaaggtntggccacgncaaggngtacttncaaatcaatgcaggttcggttcagcagnttnnggccagnntnaagntttttttaggtgcttnaaagtncgggttcanttg

SEQ ID NO: 137480 - DNA, 388 bp, Arabidopsis thaliana columbia
  unsure (1)..(388): unsure at all n locations
gtcatatgggtgatagtgtccctgcttacttgcagaaacgtctctnctccaatatccttaaggagggagagttttgggttgatcctcgaaggtctattgcaaaagcttatgagaagacggaccaagcgattctatcgaatagttctgacttgggtcgtggtggttctactgctgtnactgctatattgattaatgggagaaagttgtggatagctaatgttggtgattcacgagctgttctttctcatggtggcgctataacgcagatgagtacagatcatgagcctcgtacctgaaaggtccgngtanttnaagnnagaaggttgggtttttttccnantttccccgggggttttccccccggggaatgggcnanaaacnanntntc

SEQ ID NO: 137481 - DNA, 338 bp, Arabidopsis thaliana columbia
  unsure (1)..(338): unsure at all n locations
acctattatatatattggtgagagtattgagcaagattctgattcaatttctggttaagtttttctctcttcaacnctctttttattcgtagtttaatgatcaatttatnatgttttgtgttgtacgtatatnattttaatnatcataatttnctttttccncatgattttnacaggtaactgtatttttcctatgtaaaattcaaatacattattgttttgaaaataaaataaatattatnatcgagaatgatgtatgtatatnaaaatnaatatagaaatattcgtacaaaactatgtttcattatcaagggtaatatattncnttaaaaccattc

SEQ ID NO: 137482 - DNA, 372 bp, Arabidopsis thaliana columbia
  unsure (1)..(372): unsure at all n locations
gccaacaaaacaaccttcttcctcgcgaaaacagagagaaagaggaagaagaagaagaagtctctgagaaattttcgaacatgagggagatcattagcattcatatcggacaagctggtattcaggtcggaaattcttgttgggagctttattgtctcgaacatggtatccaacccgatggcaccatgcccagtgatagtactgttggtgcatgtcatgatgcattcaacacattctttagcgagacaagctcaggccaacatgtgcctcgagcttgtgtttcttgatctngnacccaaccgtcattttcggggttnagnnanccccgncttttttgnnanantttttttncccggggggannttttttttg

SEQ ID NO: 137483 - DNA, 443 bp, Arabidopsis thaliana columbia
  unsure (1)..(443): unsure at all n locations
aaaaagagagagagagcagcaaccccagcagcatcgaagatcgtcgatcgtcgatcggttgctctctttcattaatcagatctaattgatacccaagcttcttcatcggaggccgtatctnacgaggaaacatgggcggtagatttggagtcctcctagtcctcttcctcttgagntggtcttgtcatgctacaaacccgattcttctcgaaccattcgaatcagctcatgatgacaaccaagtctgtgaactatgtgacaagtatgtcacgntagtcaattgattaccttcaagnctacggcaaccagaatgaacctcgttgaggnccttcatatcaggtggttttnaggtttcntccttttcaaaaaanagnngttttaantgggnggtnatttaacccanttttttttaaaaaggtttttttttaaantnngcccatttt

SEQ ID NO: 137484 - DNA, 388 bp, Arabidopsis thaliana columbia
  unsure (1)..(388): unsure at all n locations
attgtattagcagagaaaggccaatttgatattgccaaggatgtttttactcaggttcaagaagctgcgagcggaagtgtatttctncagatgcctgatgtatgggtgaatctggctcatgtttactttgctcaagggaattttgccttaaccgtgaaaatgtatcaaaactgcttgcgaaagtncttttacaacacagactcccaaatccttctttacttagcncgtacccattatgaggctgagcagtggcaagagtgcaaaaagacactattaagggncattcacttgactccttcaaaattncacattccngattttgattttggggcccgttaatncnaaaaaaaaaanggntttncccccccncctnaggggnaaaaanacc

SEQ ID NO: 137485 - DNA, 434 bp, Arabidopsis thaliana columbia
  unsure (1)..(434): unsure at all n locations
tcagtttngtgtgtttggagaagaagangaacagatcaaatacgaggagagatctctaaagagatttatcgtttcaaatttgttcacgttgagaagtttaatttagattaaacaacaaaaagatgggttactggaattccaaggttgttccaaaattcaagaagttattcgagaaaaatagtgctaagaaggctgctgctgctgaagctaccaagncctttgatgaatctaaggaaacantcaacaaggnaattgaggagaaaaagacaggactccaaccaaaggtcgtggaaaccttttgaagccacggctncagaagtcanggctttggtgagagaccctaaggtggctnggttttaaaggaaaacctnagcggctnttcaggagtaccncgnggngcttnncaaattnaattncccggatcaaaagcggtt

SEQ ID NO: 137486 - DNA, 480 bp, Arabidopsis thaliana columbia
  unsure (1)..(480): unsure at all n locations
ggaaatgttgctcaacacaacgagtccttatagtagtccgcgagtgggactcatcaacggggccaccaccccgtccgtgcaacctttctatggaagtcctcgtgccgtgactgtnagaaacggttcatacaacactccactcgcccccgctgcagtttcaactaaaggtgcgagaaaccaacaacgagtgtttggaacgagcccactctcaggaaccaaaggcgtcaagaactcttcatatggacagaacagtcacacaaagttgtacagaggaggaggcactaaaggtcacagtaaaggaaacaatactcaacggcaacaaccaatggcatgnggccaaaanatgggttcggaatttttcgnggtcagntttnaggcacagtttttttaaacnggcttnanatttaggtctttannttttanaatggcttggntttttttggttngtgttttnncaaggtttttccnctgnttttnatt

SEQ ID NO: 137487 - DNA, 213 bp, Arabidopsis thaliana columbia
  unsure (1)..(213): unsure at all n locations
accatatccacggcctaanaggccaaaanattcantacctcggtnactctttggggacgttaataggatttccttcgttctcagaaaaagggttggtggatcaagtnagatcggcggggatgttgagtcccgttgcttatctnagccacatgaccaccgtnatcggcgatatcgcgccaaaaccttccttgncgaggccaccgccatttttgg

SEQ ID NO: 137488 - DNA, 476 bp, Arabidopsis thaliana columbia
  unsure (1)..(476): unsure at all n locations
tgcgaggctgtaatcagaggagagatcgtgaacaaggtcttgaaaacgagcgtggctgctttagtcgagctcaacatgctcaagaacctagctggctctgctgttgcaggctctctaggtggattcaacgctcatgccagtaacatagtctctgctgtattcatagctactggccaagatccagctcaaaacgtggagagttctcaatgcatcaccatgatggaagctattaatgacggcaaagatatccatatctcagtcactatgccatctatcgaggtggggacagtgggaggaggaacacagcttgcatctcaatcagcgtgttttaaaccttnctcggngtttnaaggggcaaagcacagagtcgncgggnatttnancgcaaaggtgggtttnncgacgttctttacccnggggcnnttttttagcnggggggggtttnntttanttgncnaaattttcanctggtcaaa

SEQ ID NO: 137489 - DNA, 389 bp, Arabidopsis thaliana columbia
  unsure (1)..(389): unsure at all n locations
acaggtgattgtaatggacatctggagtgtaatggattaatcggaaaacctccggcaacacttattcaaattgcggtacaagccgacaaatccaaacctaatttntacgatgtaagcctcgtggacggttataatcttcccgtcgtagtgaactcgaaacccgtatcatccaaatgcaccatcttagggtgccataaagatctcaaaaccacatgtcctgaagaactacaggttttgaacggagagggacgngttntggcgtgcaagagtgcatgttttagcgtttntaaccggccagatttttttngccggnatgcatntggaacgccgggtaaaangtgnaaaagaaaccagggnccntntttttgttttaagnnnggttttccccc

SEQ ID NO: 137490 - DNA, 475 bp, Arabidopsis thaliana columbia
  unsure (1)..(475): unsure at all n locations
ggcagattctcacatttgcaaacatgacgactcagatcagcaagaagagaaagtttgtagcggacggtgtgttctacgctgaattgaatgaggttcttacaagagagctagcagaggatggttactctggtgttgaggttagggttactcctatgaggactgagattatcatcagagntacacgtactcagaatgtnctcggtgagaaggggaggagaattagggaattgacttcccttgttcagaagagattcaagtttccagttgacagtnttgagctttatgccgagaaggttaacaaccagaggtctctgtgccatcgntccaggcttaggctttacggtaanaaagnttcttggggggcntccncttntccgnagggtttccaatggggttttttaggttttttnattgggggtttgggnctaaggggttnccggggttttnngtgnngggnaaactttttgttttccca

SEQ ID NO: 137491 - DNA, 418 bp, Arabidopsis thaliana columbia
  unsure (1)..(418): unsure at all n locations
tacgtagctcgagagaagagagaatctatgtcgaacccaaacgaaccagccagggctcttctgccttacctgcaacgtgccgatgagctgcagaagcatgaaccacttgtngcttatnactgtcggctatatgcaatggaacgaggattgaagattccgcagagcgagagaactaagaccaccaattcgattctaatgtctctnattaatcaactcgnaaaggntaaaaaatcattgactctgtccccagatgacantatgcatgtggaggggtttgcactnagtgtctttgctaaggcaggcaagcaggttcttccaggaaggggcagcttttgggacttgncaaaaacttttttttgntttggggnaattttttttttnaaatttttttggccntttttggncccggnncccncct

SEQ ID NO: 137492 - DNA, 408 bp, Arabidopsis thaliana columbia
  unsure (1)..(408): unsure at all n locations
atctctctcctctctctctctgtatatagaagaatctccattgtctttaatttctctccatttctctttctctcttccttcaaagttttctctttncttgatgggtttaagagagtaaagatcatcaagtactatgcattaaattgagaagttattaaaaatttcgaaagtaattaaagattgtngatgatgaagagattaagtagttcagattcagtgggtggtctcatctctttatgtcctacaacttccacagatgagcagagtccgaggaggtacggtgggagagagtttcagtcggttccttgaagggtnncgggggaggaggaggagcttttnnttgnngnaaggggncccggggggttttccggnaaaaaaggaangtttagnctttncccccgnttnaaa

SEQ ID NO: 137493 - DNA, 412 bp, Arabidopsis thaliana columbia
  unsure (1)..(412): unsure at all n locations
tgaccggtaccggtaattacccgggntcgnacccacgncgtccgcaacatccacctatagatcttcttcacacggttcgcgatcgggacatgtagcatcttcttctggagacaggtctcatttggtcactgagacttatccgtctaggcatttaaggccaccaccacacatttcatggcgtanggttgatcggccagggagacgcagaagttcctatgagaggtttcagcctcctttcgatgaagttgctctccacgaacggttttcatctgaggaattcatggttgaagatcgncaaccacaatactacggatccagaaacatgcttgatcancacagngncatgaggtttnacaatcgntaacatgngcttntgngggacncccttgatctttgggngaaaggntttggg

SEQ ID NO: 137494 - DNA, 356 bp, Arabidopsis thaliana columbia
  unsure (1)..(356): unsure at all n locations
gatgcgaagtctcacggtttaaaccggaccaacgggttaagcntctgtttgcggcggatggacggtcaagattcatcccangtctcccgnaaggatattncgggnncggggttgtgttaaccggtttggtgacatcatcgggagaattagttgggaaccctctttctnactcggtgggtttggtcaagagactggtggagctggttacggacggcttcanncggtcggctatggactacttcgaggtgaaccggncacggccgagtatgaacgcgacacttttnantacatcctggtcaaaattgacattgcataaaactgggatttcgnttgggggganaacccgcttttcctct

SEQ ID NO: 137495 - DNA, 540 bp, Arabidopsis thaliana columbia
  unsure (1)..(540): unsure at all n locations
gtctcttcttttctagaaaaatataatattcggggtatgggggaaattcggcatagaaaatatttggattggagaattcttaacttttggtttacaaaaaaagtaactattgagccttgggttgatactaagagtaaaaaaaaatatattaatactaaagttcagaattatcaaaaaattgataaaataacgcagacggatcttgctaataaaaaaagaaacttttttgattggatgggaatgaatgaaggaatactaaatcagcgtataacaaattttgaattttttttctttccggaattttnctnatttnctaggtccatttaaatgnanccntgggtcatcccatncaaatacctccttttaaattttaaatggnaaccntaaatgnttaattaaaaggncnttccggaaggnaaaaagggtttntcccccncaaatngaaaaggntccccctccggtttttttaaacccgggttaagggggggaaagnttcggcccgggcaaggngggccttggtnccggnttggggcccaaagg

SEQ ID NO: 137496 - DNA, 441 bp, Arabidopsis thaliana columbia
  unsure (1)..(441): unsure at all n locations
tctcgagttatcggagaaaatcaaagagaagatgaaggaagcagatatccacgatcttgaaggcaaaatggatcttaagattagagctcttgagttagtcgaagagatgaggaccaagagagctgaccaacaggcggtgttgctgttggaagccttcaacaaagatagagcatccttnccacagcccgttccagctcaaccaccatcttccgaattaccttcaccggatcctcgnactcaaggaatgataaatgaggaacttgaagaaggcagaagatcttggtgaacaagggattgttnatgaaggcccagaaagcccttggaagaggctttaagctctttaaggagnnttncagtttggcgggnaacctcccagcagtttnaaacgggggtccaaccnccttttttnnttttcngnatttacagncccaaaanttttng

SEQ ID NO: 137497 - DNA, 550 bp, Arabidopsis thaliana columbia
  unsure (1)..(550): unsure at all n locations
gagctgaaagagattgatctcagtcacaaccagcttagtggcgtcataccgagtaatctgttcatatctgcaaagttgacggaactcaacttgtcaaacaataatttctctggttctcttcctcttcaagatgcaagtactgtgggaaaccttagcttgaccaatattggtctgtctcataactcgttaggtggagttctctcagaggaactaactcgcttccacaatctgatttctcttgacctttcttataacaactttgaagggaatatccctgatggccttccagacagcctaaagatgttcactgtctctgccaataaatctcnctggaaatgtgccggagaatctttagncgggtttccagattcaagcggtttaatccggggaacggtttantggnatgnccccattttttncccaaaggtnaaaccaggttaancctnngggaggatggggtttaatggngnnttttaaagggagcctttcaaagggtttggccnggggcctncctanttgccnttntttngaaangtnncattttttttgg

SEQ ID NO: 137498 - DNA, 487 bp, Arabidopsis thaliana columbia
  unsure (1)..(487): unsure at all n locations
tctgtttccaactcaacttagcctctctgtctctcatactcttctcttcattccctggacttttagcacaatctcaacaacatttcttgggacaaaacaacacaagcttgttgagtggagggagatgcaattcggctagaggcaaatgggtctatgattctncatatcctctctatagtgcttttagttgtcccttcatcgattccgaattcaactgccagnaagtgggtcgtccggacactaactatcaacacttccgttggcagcctttctcctgtcctctccctagattcgatggggcgaattttatgagggngaataagaggggaggaaggntaatgatggtaaggtgantccactgaggntttaaaangttcggatncgtttgggcctgntttgcnttcaatgtttttntnccnaaatgnnaaggaaccttttttnggtggaggcaaccttttaatttcccnnattttncagggttttgggg

SEQ ID NO: 137499 - DNA, 454 bp, Arabidopsis thaliana columbia
  unsure (1)..(454): unsure at all n locations
agtttaacaggcaatgctcgtgtctctctctctttatatgtttagattctttatctggaacttggaagctcttttgttagctatatctaatcggtgatctcgaagcttattcaatccctctttcttttttcgaatggcttcaaagtcggatgtgaatataatagagacatcctcaaaggttcatttctcaggatttcatcaaatggatggtttagcttcaaatagaccagagcaaatggctgaggaagaagaacatggtcaaccttttgtgatcggagttgctngaggtncagcatcccgggaaaacaactgtctgtagatatgnttattccagcaactgcaatgttccagnggggctntttttttgtaaaancagggnttctttnnttncccccaaatgntaaataaaggngggngcctttaaaaggntccanggnttanaantttttgcccc

SEQ ID NO: 137500 - DNA, 363 bp, Arabidopsis thaliana columbia
  unsure (1)..(363): unsure at all n locations
ggcgattcacccggttgatgctcttccggtggctcctactgccggagcgatcganagaccaccagtnaggatgaaggatgtgcaaggnatgcccggaaccaccggcggtctcatcctccgtntctctnagttcgttcccgctcttatctccgtctccgtnatggtcactacctccgacttccgctccgccaccgcattctgttgcttggttcttgcggttagcctgcaaagcctgtggagcttgtntcttttnatnatcgatgcttatgctcttctggtgagaagaagccttcgaaatcactncgttgttcagtgtttcactatttggagatggagtcaaatcgacggtnaangttttnnaag

SEQ ID NO: 137501 - DNA, 540 bp, Arabidopsis thaliana columbia
  unsure (1)..(540): unsure at all n locations
aattggtggttcgntgcaagatcaagttatttacgacgtaggaaatctcaaaactccttgccgtccattccaaaaaatgaacagcggtttgtttggattctctaaaggatgcttgcacatgaaacgatgggacgagctcaacagtttcctaaccgcaaccggagcggtagtgacattcggtttaaacgctttggtggtgagacacaaactccgcggaaaggcgtggggtggtgcatgggatcacataaacactcaagatttcttaaactacacagtctcgaagggttacgttattgattcttgggaatttgggaaacgagctgagtggaagcggagtttggtgcgagcgtgacncnaggagcttttacgggggaaaganctttgatttgtacctttaaaagatgtnaatccaccaaaggtttntaaaaaattcttttggtnncacaaagcctatacttnnncggtccntggnggggtnntnttgancaacaaatgggtcaccaanntcttttgaatttcccggnccnggtttttgccgtt

SEQ ID NO: 137502 - DNA, 480 bp, Arabidopsis thaliana columbia
  unsure (1)..(480): unsure at all n locations
caacggttttagctcagagaatttggtaggtagaggtggatttncagaggtgtataaagggatattgggtaaaaacggtgaagagatagcagtgaagaggataacaagaggaggaagagatgatgagaggagagagaaagagtttttaatggagattggaacaataggacatgtctcacatcctaatgtcttgtctctncttggttgttgtattgacaatggtctctatcttgttttcatcttctcttctagaggctcccttgcttctctccttcatgatttgaatcaagcaccattggagtgggagacaaggtataaggttgcaattgggccagcaanaggggcttcatttattttncacaaaagggttgttcaagaggaagggtccatnncaccagggggcntttaaaatccnnccanntgtcctnnttnaanccanggatttttaacccnccagganatcttgnttttgggttttgc

SEQ ID NO: 137503 - DNA, 543 bp, Arabidopsis thaliana columbia
  unsure (1)..(543): unsure at all n locations
gtttctggcagtgaagacggagagagaggtggagctccaattctntgtattgaagatgtcaccaaaacttgtttggaatttnnagaaggagaaactgagtggccgccaattctnctcttggtccctctggttctcgggcttgacagagtgaaccccaggtacattccatctctnatagccactttnacgttccctcaaagcctcggcattttgggcggcaaaccaggtgcatcaacttacatagttggagttcaagaagacaaaggtttctaccttgatccgcatgatgttcaacaggtagtgacagtcaagaaaggaaatcaagatgttgacacatcgtcttaccattgcaataccctccgtnatgttccacttgagtcactcgncccgtcaatagctctcggggttctatttgccagcacaaaggtggttttaaatggttttngtntcccgggaacaaagttngccggngnctttaatngngtccncttttactgtggctcaatctccagnngaantncttgggggtttcagaanccccag

SEQ ID NO: 137504 - DNA, 431 bp, Arabidopsis thaliana columbia
  unsure (1)..(431): unsure at all n locations
ccaaaagaaaaacacacacaagacttggcttacaaaacaaacaagtcttcaagaaacttggaaagctaagagctatggctatggagttagagcttgatgatgatgtcttctttgcagacataagcaaacagatctctcttctcatcatggatgaagatgaacacttaaaccctgtttctctctcttcctcctcctcctctctctcattccagggtttgttcagaggaggttaccaaacggctccatatatgtatcancaagaacagagcaaagggactggtgtgttcatccctaaatcgnctcagnctngnaggaggcctcattcatcatncaggaggcaagggttgggattagttnccttcaacggccaggaagcaacantttttttnattaananaangcaaagggttttcncnaanatntttnggggc

SEQ ID NO: 137505 - DNA, 381 bp, Arabidopsis thaliana columbia
  unsure (1)..(381): unsure at all n locations
aatcaaccaccaggtggcgcattctctggtctgattggctctctcatggctcaaggtttgatctcattgaacaatcagcctgctggtcagggaccattggggttggagtttgatgcagacatgctcaagatacgtaatgagtctgcaatcagtgctttatatggggatctcccgaggcaatgcacaacctgtggtctacgcttcaagtgccaagaagagcacagtaagcacatggattggcaatgtaaccaagnacaggatgtncaannacccataagcaggaccccttttcgggaatgggttttnaagtgctaggcatttnggtncagttngttnaagaaggcncttttggngcttnaagnagttaccnngggttttttt

SEQ ID NO: 137506 - DNA, 463 bp, Arabidopsis thaliana columbia
  unsure (1)..(463): unsure at all n locations
ctcggaaatagagagattttagttgagactgatctcatggggagacaagcaagtnctgcagtcacggtgacagatggagaaactattgtctacacatccgtgtttgtctagctgatgttccaagttagccatcagatttnnttcccctttatgttcactatcaggagcgattctnagctgtaagtcgaacttggcaagtgtttttcgaccctttgctattttggagtaatgatgtaagaagaccatatcattgcctaaatnatgatctgaatggaccttcttatggtacagtggtggattttttaagcggcaagggtggacccaaagatcacgnaggagggcanggnatcggtggattaaccaancccgtcccctgtaaagnggtttcccctnggnctctgggtggaaggtctcgntggggnttttntttnaactttttncggggttntgcaaaggggccttg

SEQ ID NO: 137507 - DNA, 555 bp, Arabidopsis thaliana columbia
  unsure (1)..(555): unsure at all n locations
caaaaacatggntcgttgcacgtngtcgtttttgcttctnacattggtgtccattctccaaatctcctttgctcaacttgttccagcaatgatgncattcggtgactctgtagttgatgtcggcaacaacaactatcttccgacccttttcagagctgattatcctccttatggccgtgatttcgctaaccacaaagccaccggtcgtttctgcaacggcaaattagccactgatataactgctgagactttaggcttcactaagtacccaccagcttatctaagtcctgaagcttctggtaagaatcttctcattggtgctaatttcgcttctgcagcttcaggttatggtgacaaaggttgctcttctcaatcaaggngtccccgttgtatcagcaaagtaggggtntttcaagggnttcaaggggcaaggttnttaaaaanttccaggggggaaaaaagctggttcggtccaaaaagggggnaattnntcntttaagncanggaggngtgtttttttnaaactcttgggncccccttgtttnaaaggttnnc

SEQ ID NO: 137508 - DNA, 500 bp, Arabidopsis thaliana columbia
  unsure (1)..(500): unsure at all n locations
attttaagattgcagatgtaaacccattgtttgctatccaagtcttgacgtcagataaaaggacagaagagctttcgccagagcaagtgatccaagctattgatcccaaaaaggttgaaatcatacagaggtacttccaatggttgattgaggaaagagactacactgacccgcagctgcatacatcgtatgctctctcacttgccagatcagcacttgagtgtgttgaagttcaaaatggtatccaagaagctgatgttccaaatggtagtgaggcacatgttagcaatgttggaagtatttctttgtttnaggttgacgtacgggaaagatttcaggcctttttgcagtcttcagntctttatgnncccgaaggaaatctttggatttggtnganggtccananctttggttggaaaaggcaatcctttnccnnggntttggganggggacanttgncccccaaatttntncnttangtttgggtttttccncccttc

SEQ ID NO: 137509 - DNA, 293 bp, Arabidopsis thaliana columbia
  unsure (1)..(293): unsure at all n locations
taaacaattccagtgtggtgggagaaagaccagtcaacgataaatcagccctggcaagctcggcttcactgaacagatcaacaagccaactccgatgttgagtcctgtnagtntcaaagctggaaaactgttttcctataaggaggttgcacnggctccccctggaacgattgtaaaaatagttgcagagcagttgccagaagaaacaaaggccccacagaatttggatncggcaaaanttgcagtagatggtcctgnaaaagttaatnctcaggatnntgagngcgngaata

SEQ ID NO: 137510 - DNA, 279 bp, Arabidopsis thaliana columbia
  unsure (1)..(279): unsure at all n locations
aaagatgnctgtgccttcnaggaaggagcctgaggtagagaagaaacgaaaacctgagcctnagcctgagcctgagccggagtttggagaagagaagcagaagaagcttaaagctcagaaggagaaaganttggggaatnctgcgtataanaagaaggacttcgaaactncaatccagcattactctacagctatggagattnatgatgaagatatctntnatatnactaatcgtcctgctgttcatctcgagatgggaaagtatgatgagtgtatcca

SEQ ID NO: 137511 - DNA, 534 bp, Arabidopsis thaliana columbia
  unsure (1)..(534): unsure at all n locations
caagccacaggttgcaggtgtgttagatgcgatgccttcaagtaatttnaaacctgagaacgaagaagaagagcttgatgaaaagaagatttatagaactacatatatgtttagtgctacaatncctcctggggtagagcggctagctcggaagtacttgaggaacccggttgttgtcaccattggtactgctggaaagactacggatttaatttcgcaacatgttattatgatgaaagaatcagaggaattcttcagattgcaggaacngctcgatgagctcggcgagaagactgccattgtgtttgttaacacaaaaggaaaaattgtggcctcgnttncctaagaaatcttgggttaaggcagggtaccntgtcacgggcccttncacgggtgggggaaatcccaaggggccggggggaatncagcctttgaggggttccagngnnaanggggttcaaccgttctttttngcaccaaatttttttggccgggggatttanttcccggntngggcccnttnnaaaanctcgg

SEQ ID NO: 137512 - DNA, 416 bp, Arabidopsis thaliana columbia
  unsure (1)..(416): unsure at all n locations
tntcttgtaacttcctcctagatttttaaattcctgcccttatccaagaagccaggaaagggtaaaaaattttttnggcctcgtggagccctcaccattatctttncttcctccacacgcaacactacaactttaaaagagatggatccgacagagctaaaacgcgtgtnccaaatgtncgacaagaacggggacgggacgatcacggggaaagagctgagcgagacactacgaagcctagggatttacatcccggacaaggagttgactcaaatnatcgngaagatcgacgtgaatggtgatgggtgcgtggacatagacgggtttggtgagctttacaagccggtaaatggccggcgggagacggnggaagaagggggncatgnaagnangnttttaanngnggttttatccag

SEQ ID NO: 137513 - DNA, 416 bp, Arabidopsis thaliana columbia
  unsure (1)..(416): unsure at all n locations
ggtggagaatcttaggacgccggattctnaaccaaaggatgaaaagacagaaacaaggcatnctgcgcttcctccacttggctcanagtttnactacagtggcttgcagatcattaagaatgaagatcttnaggagttgagggagcttggttctggtacttttggaacggtgtatcatgggaagtggagaggatcanatgtcgctatcaagaggataaagaagagttgctttnctgggcggtcatcagagcaaganagattgactggtgaattttggggggaagctgaaatnctttcaaagcttcatcatccgaacgtggtagcattttatggtgttgtaaaanacgggcctggnagggacccttggcggctntanccagggtccatggttgatgggtctntnaggcatntccttg

SEQ ID NO: 137514 - DNA, 411 bp, Arabidopsis thaliana columbia
  unsure (1)..(411): unsure at all n locations
tccgtcactatcataaccatggcggtgctttcatctgcagatcgagctagtaatgagaagaaggtgaagagttcatactttgatttgccacctatggaaatgtctgtagcatttcctcaagcaactccagcctctacatttccaccttgtacttcagactattatcatttcaatgatctactgactccggaagaacaagctatccggaagaaagtgagggaatgcatggngaaagaagttgctccaataatgncagagtactgggagaaagcagnatttccattccatatcactncaaagctttgggggctatggggtgttgcttggtgggctcgnttcaagggnttatggggtgnccctggggctttncnattaancggcnaattgnaaattgcncnccngncgggaaat

SEQ ID NO: 137515 - DNA, 316 bp, Arabidopsis thaliana columbia
  unsure (1)..(316): unsure at all n locations
cctggtggatgcaatttgggaacggctatgttttaggctattggccatctttcnttttctcctacttgacagaaagtncatcgatgattgantggggaggagaagtcgtgaactcacaatcagatggccagcacacttcaacacaaatgggcagtggtaaatttccagaagaaggctttagcaaagcaagttacttcaggaacattcaggtggttgatgggtcaaacaacctcaaggcacctaaaggacttggaacattcactgnncagtctaactgttatgatgttcaaacnggnngcaannnttgnttgggggg

SEQ ID NO: 137516 - DNA, 453 bp, Arabidopsis thaliana columbia
  unsure (1)..(453): unsure at all n locations
aaaagattattaattacttatcttctcccctgaaataacctcatagtgtcgatatggcttgccaaaacaatctcgttgtgaagcaaatcatcgacttgtacgaccaaatctcaaagctcaagagcttaaaaccttccaaaaatgtcgacactttgttcggacaactngtgtccacgtgcttacccacggatacaaacatcgatgtcacaaatatgtgtgaagaagtcaaagacatgagagctaatctnatcangctttgtggtgaagccgaaggttatttagagcaacanttctccacaattttggggatctttacaaganggccaaaaccnacttggccattttncaacatctttcctttctncttccaacttncctnaaggttagggaaanctcgnngttcggtntccttgnggccaacatttaagggcatgnccccnccaaggttgcttt

SEQ ID NO: 137517 - DNA, 253 bp, Arabidopsis thaliana columbia
  unsure (1)..(253): unsure at all n locations
tgggagttccaggtcggtccagctgttggnatctnggctgctgatgaaatttggntcgctcgtnacattttgnaggtaagtttaacgttataacttcaatgtttgtttatgtagtttttaattagtaacacttagcttgtccttaaaacanaggatcacagagattncnggtgtagtggtatctttnaacccgaaaccgattccgggtgactggaacggtgctggtgctcactgcaactncaggtacatgtca

SEQ ID NO: 137518 - DNA, 529 bp, Arabidopsis thaliana columbia
  unsure (1)..(529): unsure at all n locations
aaatggcctttgaccgatcctttgccgtcttatggaagaggacgggagcatcctggacgaagatatatcagctttattcacggagacggactcaacgacgttgttattacaggcagaaatgggacgattgatggccaaggagaaccttggtggaacatgtggagacatggaactctaaagtttaccagacctggtctcatcgaattcaacaactcaacaaacatcctcgtctctcatgttgttcttcagaactcccctttctggacacttnatccggtttatttaatgttgttgttcatcatgttactatcctcgntccaactgattcgtacaacanccgntgggattgatcccagattcaagnctctaacgtctgtataggaggctccctacatatctacttggtgancggcctttntttncgggtaaaagngncggtttgggacggggtntggnaatttgnattaaaaaccggtcccaaggcggtngcaantnaccaacccggcgggantnnnctggntcttttccc

SEQ ID NO: 137519 - DNA, 565 bp, Arabidopsis thaliana columbia
  unsure (1)..(565): unsure at all n locations
cagttttaaaaaaagacataactcaaccaatctcactttgaaaaagacatgaacaaaaccngccttcgtgctctctccccaccttccggtatgcaacaccgtaagagatgtcgattgagaggtcgaaactacgtaaggccagangttaaacaacgcaacttctcaaaagatgaagacgatctcatcctcaagcttcatgcacttcttggcaatagatggtcattgatagcgggaagattgccaggacgaaccgacaacgaagttaggntccattgggaaacttacctaaaaaggaagctcgtaaaaatggggatcgncccaaccaatcatcgtcttcaccatcacaccaactncattttctagnccgncancttccattctttcacattangggacatggaancccaaggttntttaggtggtcaatcttttttgggttttccgnattcattgtggtgtaacaattttgncccnttccaaggncccattngtncggggggtnggtccttggtcccggcgggggnttttncctttcccntnaaaattgggtttttcccggccgggg

SEQ ID NO: 137520 - DNA, 484 bp, Arabidopsis thaliana columbia
  unsure (1)..(484): unsure at all n locations
gacttattgaactgggtggcagaaagtctgaaattctctgttaagcaacctgttgaggcagttgtaacaaaggatgagctgcaacatttgactttcttgtgcaaatctgaaattgacgcaatgggaaggatagtcgcaggggttttacgtgtactgaagcttgaagaatctattggccaggcgactcttaatcaattaagcaaccttggaagtgaaggttttgacaagatgttctctccaaaagcaagcagagcaggaagtccaaaaagctcaccttttgctgcatcattagattcaatgngagaaatttctttacgtgcaaaccctcgaatctaccattttcgtcccatcgaaggaagcctcaaatgggngtttagaggnccaaggtttttcagnctcctangtngccttgatncncaaccggntttnaanaatncttttnggnaaaaaanaacggccaaccggngctcaanggcangaaacc

SEQ ID NO: 137521 - DNA, 493 bp, Arabidopsis thaliana columbia
  unsure (1)..(493): unsure at all n locations
attacatttacgctttcttgcaatcaaattttccgatcttaagttcagaagacgatntcagaggtggaaatagngaacgctgctacgatcgaaggaaacaccgctgcggatgcgccggtgacggatgcggccgttgagaagaagcctgcagcgaaaggacgaaagacgaagaatnttaaggaagtgaaggagaagaagactnttgctgccgctccgaagaagagaactgtttcatctcatcctacttacgaagagatgattaaggatgcgattgttacgttgaaagagagaactggatctagccaatacgcgattcagaaagttcatccgaggaggaagcgtaaggaagcttcccttccaancattcnaggaaaagctttttngctttctcaaatccttnaaaggaggcctccntttncctttcnnggggaaactttttttaaaagggtcaaaancccctcntttnaaaccncccaatngggggnncgggctt

SEQ ID NO: 137522 - DNA, 328 bp, Arabidopsis thaliana columbia
  unsure (1)..(328): unsure at all n locations
gcatcactgttaacgaggctcagtcacgaggaagcggtggcggcggaggccaccntggaggtggtggcggtggataccgcagcggcggtggtggaggttactccggtggaggtggnagctacggaggtggcggcggtagacgcnaggttggaggaggatacagcggcggcggcggcggttactcctcaanaggtggtggtggcggaagctacggtggtngaagacgtnaggnaggaggaggatacggtggtngtnaagnaggagtttacggaggaagcggtggtggtngaggatggtaattcctttaattaggtttngnattaccaat

SEQ ID NO: 137523 - DNA, 402 bp, Arabidopsis thaliana columbia
  unsure (1)..(402): unsure at all n locations
ggatatcaaggaatggctatgctggatgatggaagaagttgggtatnatggatggaggcttgactttntaagagggttctggggaggttatgtgaaagactatatggatgctagcaaaccgtactttgcggttggtgaatattgggattctttaagttacacgtacggagaaatggactacaatcaagacgcacatcgtcaaagaatagttgactggattaatgcaactagtggagctnctggtgcatttaatgtcactaccaaaggaattcttcatacgggngcttcaaaaatntggaatattggggcctctcagacccccaaaggggagccnccncgggttagtttngtttngtggcccntttcangctgccacccttcacccgggatnatgnnnctggg

SEQ ID NO: 137524 - DNA, 314 bp, Arabidopsis thaliana columbia
  unsure (1)..(314): unsure at all n locations
agaaacaggcgaaacagaaacggaacaaaaataaagggaaggacaaaaggaaggaagaaaaggtgagttttgcaacacatgcaaaggntctcgaggaaaaccaaaaccaaaaccaaaacgatgaggaagaaaaggattctttcacggagaaagcacaatcttcagctgaaaagcctgatactnttggngatgtntccgacatatctnattctttggatggttcggctgacattnttcagcctgntttagaaggtagggatagtagttcttttcctttgggnttnctgatgccttgggaantcatccncccntat

SEQ ID NO: 137525 - DNA, 435 bp, Arabidopsis thaliana columbia
  unsure (1)..(435): unsure at all n locations
caatgatcataagtcagaacagagacattcttgagaggtttaactcagtaaactatgcatcaagtctccagttttttaaaaacgttaatatcgaagcaaccgtgttccaaagatttcctccagagctgttgaaaaagctcagtgcagactgtttggttatgcagaaccactattttggtatctcaccagacaactttcaaggcaatccttatctgtctagtttcttcaatatcgtcacaaccagcgccgataaagacagcaagacttttgtttcaactattcgntcaaaacggtnccctgtgaccgccttccaatggcatccagnggaaaatgcattcggatggggggtcatctgtaatncctcacttctgngggcggaattcagggggctcnaccatgntgnaaantnatttngntnngtnanggcnggaaggt

SEQ ID NO: 137526 - DNA, 217 bp, Arabidopsis thaliana columbia
  unsure (1)..(217): unsure at all n locations
tgaccccttgcgcactcttnctttttcntggaaacntctctaaacgaccaactatagatcgtggaaaatnnanattccattgcaacgaaaagaaggcggcggattcaaagaacacccaaatacaaatngaagacggagccttttaagcaattngtttttattcaacctctggaacaccaatcatctcaaactgattgattgagaagccctcccccgt

SEQ ID NO: 137527 - DNA, 504 bp, Arabidopsis thaliana columbia
  unsure (1)..(504): unsure at all n locations
taaaatggatgacagtgctgacttctatgattttaatgatgacaataaggatgaaaacaagctcgattttaaaaagattgtaagcgacaattggaatgatccccccaagcgggagagaaagcgcaactactctgaatctgagtactttaagcaaacattgcggcaaggtgctccagctaaacctaaagagcctagaattccgcgcatgccccagttgcacgntttccagttctttaacattcagagattgaccgagttgtatgaaaaggaagtacgttatctcatgcaaacacatcagnaaaatcagttgaaagncacaattnatgttgaaggaccagaaggtngggatcccttaactactgaaggangtaggagnaaaggagggnttnttggaggnagggtttctcaaccatggggccanagngattttaatnctttnccncaggggctttttnagaaggtntgncccnacggccataaaaaagcattgccccttggnttgga

SEQ ID NO: 137528 - DNA, 426 bp, Arabidopsis thaliana columbia
  unsure (1)..(426): unsure at all n locations
tgtacgtattctctctttgcttcctaaaaatcaatcaatcaatcaatcacagagtacgcaccaccagccaaatnataagtnagagagaagataacgacgacaagaagaagaaggagaagctccaaaattnttcatttgcatttttccaacttgtaaaatcgagcacctgcatttgggggctttcctcttatctggaaacaaagagagccgccactgatggaatnagtttccgtgaatcatccacccaggtgaaaggaatcataattttgggttggtcaacttattattaaaaattgggtgaggcaagttaatttcaaatttcggccttaatgnggccttttnaaccccaaattnggcccncnccccnttttttgggaatnttnggggtttttttttgtttttccnaaagggggggnnntttttncc

SEQ ID NO: 137529 - DNA, 504 bp, Arabidopsis thaliana columbia
  unsure (1)..(504): unsure at all n locations
gacccacctaccaaaacaacacacattgtgctggagggtttggcttttcccaatggaattcaactctctaaagaccaatctttcctcctcttcaccgaaacaaccaattgcagattggtgaagtactggctggagggtccaaagatgggtgaagtcgaggtggtggcagatctcccgggattcccagacaatgtaagaataaatgaagagggtcagttttgggttgcaattgattgttgcagaacaccggcacaagaggttcttacaaacaacccttggataagaagcatctactttcggttgccaataccgatgaagcttgctttcagaaacggtggggntgaggatgtcactgtgatttcgggnttcnccgggggaaggtaagtcctggnggtcctcgnggtngcaaggggaggntattaagcttttnnggtaagtnngggaagtncaagggangntttggtttgnaccangggtnaaccnatttnccttttccnttccctt

SEQ ID NO: 137530 - DNA, 382 bp, Arabidopsis thaliana columbia
  unsure (1)..(382): unsure at all n locations
agcgcattcagatgaaatgcgcaataccattctaagtgacctgaagcgtgatttttgcaatgaacctgaatactggaattggcttgcaagacatgaaatgagtggttgtattagcaatgaggcaggcctagagtttgcaaatcctcaaatgcanaaggctattcaggtttttnaagaaggcttgcaaactgttacgtcaagttctatgtttganatttatataaatttcctgatggaggctattgtacagtcaaacggcgacgagaatgaaatctcctctttgtctaatccgntcatttcacatatcataaacggngtaccaaagggctgntgaaactgggctgtttnncttaagnggcttcntgannnannaggttccccc

SEQ ID NO: 137531 - DNA, 409 bp, Arabidopsis thaliana columbia
  unsure (1)..(409): unsure at all n locations
tggctttatctgcagcaagtntgatccatctntntttgtctaannctcacaacaacaacctcattctnttgttgctttatgttgatgacatggtgattactggtaacagctctcagaccttaacaagacttctntcaacattgaacaaagaatttnaaatgactgatatggggcagcttcattatttnntgggtatacaagtccaacaacatcaacacggcttgtncatgtctcagcagaagtatgcagaggatctnctggttgcagcttcgatggcagactgcactcccttgcccacacctctcccggttcaacttgacagnatatcggatcaaggaagagttgttctctgatccnacttactttcaggaccatcggagggnaggttcaatanctcacttctgcgggg

SEQ ID NO: 137532 - DNA, 550 bp, Arabidopsis thaliana columbia
  unsure (1)..(550): unsure at all n locations
agaaggcgaaggagttatcttgggataaaggtgggaatgatcggagtaaggcggctagagatttgagtgatctaactggagaaggaaatattgaaagtatgctttcagttgagatgggtttgagagagctagcatcattaaaggtggaggatgctgttgtncttatattcgcccagcagagaaagttgagtttggttcgccacactgtttccgactccaaaggtcatggagaatccagatttatcgatgcatatggtaacggaaaagtctcactaactcttttctctttgttttccacccttatgtagaggttcttgggggtcgaaccctcaacaccttgaatgttgtggaagggtttcactagtatagncacatcttttaacccaaaaaagggtctagccacatccctntcggnttttgacataggtgcaatgcgttgttgatttagtagggggaaaattgaatctatgncccnaccntnaaggntttctnnggttcaaatttnnccttncnaacgggnnaaacanctctttagnggnnccancccttt

SEQ ID NO: 137533 - DNA, 359 bp, Arabidopsis thaliana columbia
  unsure (1)..(359): unsure at all n locations
aaacttgaacganttctccatggtcttgcttaataacacactttcantaccacttcgncttctcntttttaattnttncaacgagatggattatctctatcaaacgccacttctacgattaccaagtttntggatggtcatgacacttagtggacttctagggcttgcaattagctttacttcaatgtggtttctncatcaaactggagcaacaacatacaggtagcaaatnagagagagatagagcaatttcaaaactttgcttaagagagtgttgctgtcccctagccttctccatatatccctttncctatgnttgcttcttngngggtcagcccaactaggtacacttnggggtt

SEQ ID NO: 137534 - DNA, 511 bp, Arabidopsis thaliana columbia
  unsure (1)..(511): unsure at all n locations
ctgatcttcatctatcacccaaggaagtcatgatgtaccaagaagcagcactcctcttagttctcctcttcgtctcttcgaatgtcgtcttatcggccccagtccgcgatggtagtaactctagttaaagctcatttcaactcaaatccgagattataaattaacatttcttaatattttttgtttcaggtttattaccaaacggcaacttcgagttgggtcctaaaccctcccaaatgaaaggntccgtggttaaggaacgaaccgcngtaccaaactggaacataatcggctttgtggagttcattaaatccgggtcagaaacaagatgacatggtcttggtcgtaccgcagggttcctccgccgttagactaggnaacggaggcctcaaatntcccaggaaaatatccgnncctaacctnggccggtttntactnaattaangttaagnggccgtttggaacctttngggnaanncggggngggntaaaanntttccggggcnggatg

SEQ ID NO: 137535 - DNA, 555 bp, Arabidopsis thaliana columbia
  unsure (1)..(555): unsure at all n locations
ggagcaaacccattgaagaagaagaaactggatccggatctccatctggtggtgaatcaccggaggcgaaatctcgtcggttgcagagagagcttatggctgctgctgctgagaagcgtatggttttgtttcctaagagtccttctcctgttaacaaagctagggttttgccaatnagtgttgttggtggtgataaggatgaggaagttgtgggatcttgtttggggaaggagttgtctgtggaagagtctgatcagttgttttcgattgtntttgggaataaggtttcgaaaagtgttcttgctcaatggactaatcaaggcataaggatttagnccctgantcctgaaacctacctattagggattaggtncaacaatgnaagggtngggcccctccgggtggttttnagncagcnncttcaaagcaattttttnctttaaatacccttcctttaactttcccggggtgccaaagtaggtttcccccccnnaatggggggncttggccaattacttnaagncccgccaagntngggcnttnccccctccntcc

SEQ ID NO: 137536 - DNA, 463 bp, Arabidopsis thaliana columbia
  unsure (1)..(463): unsure at all n locations
attggtttagcgcgacaagagcatcaacgcaatggtgggaacatcaagctcctccgccggcgaccacacccacaccgtcgtgataaatnccctaactagtcggggctggtgcttcanagacgtcgaatacttgaaatccctggtcactgaaatctcttccttgatcggcggcggcaataaaacaggcgccatcgtggagtcagtggaggcggantgcttaacatggatattaagttaatcggaggtaaatccctcccggacccgaccgagttacgcaggtgttctcatcttcaaggccccaaagttctccagataagttatgttagggatnttacaagaaagtagcgcagaggaatttttngggnagttccacctggtaaaccgagtgctnaaaattcgntctgnctttncggggaaggccgnaaatatcngcgcttgagtactttnatntnccnnccgntta

SEQ ID NO: 137537 - DNA, 387 bp, Arabidopsis thaliana columbia
  unsure (1)..(387): unsure at all n locations
gttcagcaagcnctttncaaagaaagagatgcgtatcctcatggtgggtctcgatgcagctggtaagactacgatcttntacaagctcaagcttggagagatcgtnactacgattccaaccattggtttcaatgtggagactgtggaatacaagancattagctttaccgtgtgggatgtcgggggtcaagacaagattcgtccattgtggaggcactacttccagaacactcagggacttatctttntgggtggacagcaatnatcgnaacccgtntttgtggaagccananataanctcacagaatttttgaacgaagataagtttaaganatgcttgtnttcctggttttttcctaacaaagnaaggattttccaaatccagtt

SEQ ID NO: 137538 - DNA, 466 bp, Arabidopsis thaliana columbia
  unsure (1)..(466): unsure at all n locations
cacccacgccgtccgccaagaaacacagaaaaaaaaaattnttggtggcctctccaatggctttctcagctaccctgtctcagctttcttctctttcgtccatctcctcttcattaccaatttnttctagaagacttcctcatcgatctcttcctcaattcacagtcaaagcagaagcagagaaagagaaacagagcgcacaggctaagtctgatggggaagcatcaccagctgcaaccaaaacccctaaaactcttcccaagaaaccggtttactcgatgaaaaagggccaaatagttcgtgtaggaaaagngaagtacctcaaccagcatcaattnctttatcagttggacatcctccttttttacaaagggctttgtttacattntnangnggnttccnggngnnggtttttggnccttcggggcnttttnagnaaaggggggttttcncttttttggatggg

SEQ ID NO: 137539 - DNA, 563 bp, Arabidopsis thaliana columbia
  unsure (1)..(563): unsure at all n locations
ggctgataaaccaaccaggcaacgaccaatggaccctcctagtcctcctcctcctcccattcctgaatcccgaccacgacctcttactcctcccgtgctcctaacccgaccacgacctcctcttccttatgctcgccctcttcagccaccgcaaagtcttccaccccgaccacgaccccaggtgtttgttagtttccgaggaaaggagctgcgccacggcttcgtgagtcatgtagtgaaagccttgagaattgcaggggtcaactttttcattgatagcaacgagatgaaagggagagaccttcaaaacctctttcaagagaatcggaaactcaaagatggcacttggtgatctttctctgacccggttctngggagtcaaganttngtgcttaaaacggnggttcgtgaaaggatttnatgattncggtaaaggnaggggaantttcaagnggtcccngtnttttttanaagggcaaataaaggnggcggngaaaaatttaaaagggaaaatttggaantttttttntagnaaanggncaannacaagtttctnagggggg

SEQ ID NO: 137540 - DNA, 593 bp, Arabidopsis thaliana columbia
  unsure (1)..(593): unsure at all n locations
tcgggacctacttggtcacttgctattcacaagcggccttaggttgcgttttcaaacttgtggagataaacaatcagcctcggattaaactttctgaagatgttacaaaggtatcaataccgtgtaaaaagcgaagttacagattatacggcaaagaaggttaccctctggtagatataatgactggagagaacgaaccacctccaaaggttggtgagcgtttactttgtcgtcacccattcaacgaatccaaaagagcatatgtagtgccacaacgtgtcgaagagctcctcaaatgttattggcgtggaagtgcagatgaagcaagagaagtattaccgcctttgaaagagataagggaccgtttgcatcaaaccagctcggaaaacatgncgncctgatccatattgagggggttaaaccccaacttccttataaggttngtgtaagncgnaagnttgtacgggtttnatccncttcttattggnntaaacggngnaccnttttgggganttcagtttccgnccacccaaaagnggntcttggttttggtttngggaatgantantttttttnccccngntccaaatttg

SEQ ID NO: 137541 - DNA, 636 bp, Arabidopsis thaliana columbia
  unsure (1)..(636): unsure at all n locations
tctcgcaatcttcgctcttctctttgctctctctctctcaacgcggttcagatccgagtttgggagattcaagctccctgaaaaaagccctttactctcgcttaccaactttgctccagcatggcaggatctgcaccagaaggcacacagtttgatgcacgtcagtttgaccagaaactcaatgaagtacttgagggacaagatgagttcttcacatcctatgatgatgttcatgagagctttgatgccatgggtcttcaagagaaccttctcaggggtatttatgcttatggttttgagaagccttctgctattcagcaaagaggaatcgtccccttctgtaagggtcttgatgtgattcaacaggctcaagtctggtacctggggaaaccagcaaacttttcttgcttcttggtgtcttgcaagcagctngacttttcccttantcccagtgtcaaggctttgggtcnagntccaactagngggnttncccagcaaatttgggagggcantagggncccttgggnntacccctggngcaaaggttaccgccttttttggnggaccaatttccngnnggtnnaanggacccccaaggtggnnccnatnttttttggacccaagggggnntttaaa

SEQ ID NO: 137542 - DNA, 465 bp, Arabidopsis thaliana columbia
  unsure (1)..(465): unsure at all n locations
gcaaatgcttatactgnctcaggtcatagtgtggagagaccacactacaatccgggggtgtcggggccgtcccatgatccttccgtgaattcaacagttccaactttctctgntccacatgagaattatgtgacatttgcctcttcttcaagctacancagccagacatggtcaaatgctagttatgttgatcatcaatctatggaaagtgtgagaggagcacaaaagagaaaacgnccatgtccttcttccatctatgaaatgggnagttcangccaatatcacggtgacagaactcctgcagacactcatttcccctcggaattgcacttggggaaatcaataacgcatgatcatgaccctcattacatgccatgggttatgnacccaactttacaggagnaaatantctcttngatccangggggggtgagctctttaaaggnanntnccgggntngncctt

SEQ ID NO: 137543 - DNA, 527 bp, Arabidopsis thaliana columbia
  unsure (1)..(527): unsure at all n locations
attttataagcaatatggagtcccacaacaacaaccagagcaacaacaacaccactggttcggcccatctggtcccatccatgggaccaatctccggttcagtctcattaaccaccactgctccaaactccactaccaccaccgtcaccgccgctaaaacacccgcaaaacgaccgtccaaggaccgtcacatcaaagtagacggacgtggccggaggatacgtatgccggctatctgcgcagacgtggtcttccaactaacacgtgagttacaacacaaatcggacggcgagactatagagtggctgcttccaacaagcggggccaggttatttatcggagccaaccnggacnttggacccataccgggggattatnttctaattttgnanaatctttttttcgaagagtnggtnttantnttttaaggttcanttgncttaaatntttccccatggggangggggggttaaaaaggttccngtttttngggttccagnaaagntttttaacccaanannttncgg

SEQ ID NO: 137544 - DNA, 542 bp, Arabidopsis thaliana columbia
  unsure (1)..(542): unsure at all n locations
caccggacatctcacattcggntccgccggaatctccagatccgttaaattcacaccaatttcaaccatcactgatggaacttccttctacggccttaatatcgtcgcaatcaccgtcggcggtcagaaattgccgattccttcaactgtattctctactccgggagctttaatcgattccggcaccgttatcactcgtctcccgccgaaagcctacgcggcgttaagaagctcgttcaaggcgaagatgtcaaagtatccgaccacgtcgggcgtctcgatcttggacacgtgtttcgatctcagcggggtttaaagacggtgactatccccgaaagtgggcgttctcttttcagccggttggcggccgtcggtggnagctttggtttcgaaaaggggtatttttaacggggtttnaangtatcntaaggttttttcttggggtttcaagggaaangngggttncaanaaaccgtgccantttttggaaacntnannnngaaaccctnaanntttgttttaattggnccggttgggnggtt

SEQ ID NO: 137545 - DNA, 564 bp, Arabidopsis thaliana columbia
  unsure (1)..(564): unsure at all n locations
gactctcaaggatgtgtatgcacactgggttcctgaaggccaaatcataacaaccaatctctggtctgctgagctgtccaagcttgcggcaaacgctttcttggctcaaaggatttcatcagtgaatgctatgtcggctctgtgtgaagccacaggcgcagatgtcacgcaagttccttacgcggttggtacagactcaaggattggtcccaagttcttgaactcgagtgttggattcggtggttcgtgtttccagaaggacattctaaatcttgtctacatctgtnagtgcaacggactcccggaagtggcagagtactggaagcaagtcatcaaggtcaatgactaccagaagagncggttcgtgaaccgtgtttgttttcctccatgttcaaactctgtattcaaaccaaggaggtttcgggtnctcggggtttcgngatttnaaaggaaagcacccggtggcaanaaggggggnctcnagccatcggttntttcaaaggntntttntngggggcaaaagcaagnnntgnattttnggcccccaagtngcttngggcnant

SEQ ID NO: 137546 - DNA, 539 bp, Arabidopsis thaliana columbia
  unsure (1)..(539): unsure at all n locations
gtccttacagaagagaaaggggaagtcctgactatggccgaggtgctagtccagtagctcacaaaagggaaaggactagtcctgattatggtcgtggaagacgcagccccagcccttacaagagagccaggcttagcccagattacaagagggatgaccgtaggagggagagagtggctagcccagagaatggagctgtaaggaaccgaagcccaagaaaaggacgtggtgaaagcaggagtcctcctccatatgagaagaggagggaaagcaggagtcctccgccatatgagaagagaagggaaagcaggagtcctcctccatatgagaagaggagggagaggtcaaggtcaaggtcgaagtcaagccctnagaattngtcaagtttagagcccttgggcaataattggaagtagaagctngaagagggttccgtttgngcagncaancccntttcgggganccctttttttngncgccancagnggnnttntttgnggtcatgncanattnttttttttgggttncaaacaaaaant

SEQ ID NO: 137547 - DNA, 439 bp, Arabidopsis thaliana columbia
  unsure (1)..(439): unsure at all n locations
cagtaggaaacgcggcggaggaggttttacgactatttncccttcacttcttcanctncttcctgcgccgcttttcaaacctattcgaccagacaaactcggaaatttcatattccatgggtaagacgaagttaaaacctgtggaggatgtgaactcggaagtggtggacgaagttnagaaagcagaggaagttgaggaacagagaaacgncagagaacaagaagangagcaaaaagangaagaggcacctaaaagtttcgaagagctagggcttnaattctcgtctaatncgtgccctaanctaaaaagggtatagagnaaccaacccttatttcagcaatcaagcccattcctttaccattctggaaaggnaaagatgtggttgctnaggggcaaagactggnttcaggnaagnccttttgggcttanccttttgcc

SEQ ID NO: 137548 - DNA, 457 bp, Arabidopsis thaliana columbia
  unsure (1)..(457): unsure at all n locations
aagagcgaattggactcagctaggtgatgctctatcgtacgcttgcncacaggggaataatacctgtaacccgattcaacgcggaggcccatgtnagaaacctgatttnaccgttttncacgccagcnacgcctttagcacttattgggcccaatttcgtaagatcgggggaacttgctccttcaacggcttagctacacaaaccatcaaagatccaagttacggacgatgtgagtttccgagcgtgacattgtgaagacttacgagttacgaaaatgcatggtcgagaagagnngcacgagggnaaacccgcacgattgttacggctttcattaatngnaacagcacgtganctctcttgtacggntgttacgtagcttgattttttttngnaaacggcacgtgtttaggactttaacttgctggtntaatntatttaatttncccttttccgngg

SEQ ID NO: 137549 - DNA, 512 bp, Arabidopsis thaliana columbia
  unsure (1)..(512): unsure at all n locations
caagaaccgccatcatctccccttcgcgggcttcacctgaaataccattcaatagtatctnagtgttcaccgaggaatcatttcctgaccttctgcagcaagcnaggggattaaacttcttctggatcttcacgctgtaggtcaagtcagtgaatgaaagaacaaacggggaagaagatatagaagaagcaggagcagaggcccatganttgaaagaggatgcagcagaattgataggtgaggcaattcccagagcccggctacttgcactttcatcattccttgcatcctccacgttcataagatgctcggcgaatgtnncagagactctagtcgtgtcgctttggacgncctttnaggctccacggncatcggggtttacattaatncattaggnagttcattgttgccatntaaccngttttggccggnggttnatttttcccgtgnaaagccattcatttttctatgtaatttttgggctttaatntncttngggttatttngggtaa

SEQ ID NO: 137550 - DNA, 458 bp, Arabidopsis thaliana columbia
  unsure (1)..(458): unsure at all n locations
ttccgaaattnttttttcttccaagaatgaagggaccatagaatcgtccaaaactgttgaaacttgaaagctttccaattttgctcatctgggtttctcgattgatcgttaaccagcaatggaggcagagaaatccaagcaaaatccgggtaagaagcccgtagaagcaacaatggagcacgtgttggtggcattacgagagaccaaggagaagagagagatcaggattcaaaaactgttcgaattcttcgacaattcgaagttagggttcttagacggtacccagatcgagnaaggtttgtcttcgnttagtattccctccaaagtnttaggtangctagtnattttnttaaaggnttcggctccgaattcgggatnggncttttggcttccagggttncgccgttanatggntnccaaaagctttngttttnccaagtttttcaggccnttntttt

SEQ ID NO: 137551 - DNA, 492 bp, Arabidopsis thaliana columbia
  unsure (1)..(492): unsure at all n locations
gcaaaggacttccgtgacccaacaacagcctggaagacatcttctggaaaatggcgaatcaccatcggctcaaagatcaatagaaccggaatatctctcatttatgacactaccgatttcaaaacctacgagaaacacgaaaccttgttgcaccaagtccccaacaccggaatgtgggagtgcgttgatttttacccggtgtcgaagntcaagtcaatgggctcgatacatcggtcaacggaccagacgtcaagcatgtcatcaaggcttagcatggacgntactagaattgaccattatgccattggaacgtacggttgattcaaacggtacatgggtccccgntaatccttctatcgntgtcggatcagtnccgtttagntncggttcggggaantttttcngtaaagngtttnngtccaaaatngggcggggatttntgggttgnncgngatttccataagnnttttttcaaaggttggcttttttagg

SEQ ID NO: 137552 - DNA, 466 bp, Arabidopsis thaliana columbia
  unsure (1)..(466): unsure at all n locations
ctgaaaaagaagttgtggaggaaatgctttcaccttttacatcattatacccgctggttgtggcgtgctctaagaaaggttttgagacattggatgaggtatacttccagttggagagtttgagtcaaggtgatactccatataagtctgttgctgctctaaactgtataattcttggctgcgcaaacacatgggatctggatcgtncttatcagacgtttgaggcaataagtgcctcttttgggctgactcctaatatcgattcatacaacgctttactatatgcatttggaaaagtcaaggaaggctttcgaggccacgaatgtattcgngcaacctggttagcanaggggttaaacctgattcccggcgggnttcaatnactggtganggccaatntnattanccgggnccccaaaaaggctttncccnnggtaatnnnatnncaaggggggttttccccctt

SEQ ID NO: 137553 - DNA, 465 bp, Arabidopsis thaliana columbia
  unsure (1)..(465): unsure at all n locations
ccaatattgaagtctcctcccacggaaagtagcttaacagatatcttagtgagaaaagctctatccagttcctcttccaatacggttgatcctcaaatacttgtagagctcttctccatttaccgagaatggcaagagaacaaagctcaagaaattaccaagagacaggtctctctttctgcctttttttgtatgtatatgagtgcagtctttaagaaatttttgctattagccgagaacttaaactagacttcaggctactcctaagggttctcttaaattgaaacagncactaaggtagtgtaagttttttaagctttttgggtttgcaagtntggtgcccaaagggaatgtttnctttttngggaaaaaaaagggaaaaaaaccaaggtnttggtggtncncctttncttttgnccccntangggttnngggggatttnaancccgaaatnnncaagggttt

SEQ ID NO: 137554 - DNA, 457 bp, Arabidopsis thaliana columbia
  unsure (1)..(457): unsure at all n locations
tatcaataagcggaggaaaagaaactaacaaggattcccttagtaacggcgagcgaaccgggaagagcccagcttgaaaatcggacgtcttcggcgttcganttgtagtctggagaagcgtcctcagcgacggaccgggcctaagttccctggaaaggggcgccagagagggtgagagccccgtcgtgcccggaccctgtcgcaccacgaggcgctgtctacgagtcgggttgtttgggaatgcagccccaatngggcggtaaattccgtccaaggctaaatacggggcgagtntctccttcgntcctcctaccaacagttccctgtcatcggctccgttttcagagcctggaacccgtgaagnttcttttcttntnaagttttttanatcagcgaaaagntttangncattagccaanaggttnttantttttntttaaaggcttnttttgnnccc

SEQ ID NO: 137555 - DNA, 333 bp, Arabidopsis thaliana columbia
  unsure (1)..(333): unsure at all n locations
actttcgagaagacagccggataccaagcactggttcaatttactgatgcagaaacngcaaccnctgcaaaacttgccctcgatggaagaagcatccctaggtatctactcgctgagaccgtgggacaatgctcacttaaaatcacatattcagctcatacagatctgactgtnaaatttnagagtcatcggagcagggactatactaatccttaccttcccgttgctncatcagccattgatagtactggtcaggtgagcaatttgagntcagtctcttactgggaaaatggcatttntngttgnaaaactngctttcttncttagntncaa

SEQ ID NO: 137556 - DNA, 462 bp, Arabidopsis thaliana columbia
  unsure (1)..(462): unsure at all n locations
ttcaagtgaacagattcgcatcaaaccctaagaaactgaagatgaggccgatcctgatgaagggacatgaacgtccattgacgtttctnaggtacaacagagaaggagatctgcttttntcctgcgccaaggaccacacacccaccctctggtttgccgataacggcgagcgccttggaacttaccgtggtcacaacggtgctgtttggtgctgtgatgtctcccgagactcgtcaagattgatcactggtagtgctgatcagactgcaaagctgtgggatgtaaaatctggaaaagaattgttcacttttcaagtttaatgcccctacgaggtctttgggatttcgcttgtttggagatncgtttttcaagtggtttacccactggttnaantttngnggnccgaacccgntggctanttaantntaaaagggttttnnggaannttnttngggaacaagg

SEQ ID NO: 137557 - DNA, 388 bp, Arabidopsis thaliana columbia
  unsure (1)..(388): unsure at all n locations
caagtaatataacttaactatctctcctctcttttcttaagataacttctctctctctattcgttggtataaaaaaagaagactaggaaaatgacggagtggcttccggtggtggtcgcgacggtgttgtttgtggtgctgagcccgggantgttgtttcaggttccgggaaacaacaactttgtagacttcgggaagatggaaacgagcggatactcaatccttctccacgccttcctttactttggccttgtcactgtcttcaccgtcgtcatccactttccgggcacttaattctatgtaatctttacttacaaaaactttttcttcctatctatgctttttaccttttctatattaatcagttataccatgtttcccggtgttc

SEQ ID NO: 137558 - DNA, 325 bp, Arabidopsis thaliana columbia
  unsure (1)..(325): unsure at all n locations
tcgtcgccaaacgatttgcctcttcctaaagggtacaacaagaatggaagaagagtatganagtcgtcgattgaggagatgggaagagttggacactgacatcttagtaagaatttnccagaagtttagcgtctttaagttgacttcgggattagctcatgtttgtagaggatggagagctgcttgtngcgatccgattctttggaagacggtggatttgtcaaacatgagatctagtttnatcaagatcccattagagccttatgtctatntgggaacgccgnncttnttgnnggcctaaccccgnatcctnaaaantttccat

SEQ ID NO: 137559 - DNA, 340 bp, Arabidopsis thaliana columbia
  unsure (1)..(340): unsure at all n locations
acaagaggcaaccgcaccgtccaatttttnctcgagctcttcttcccgagagactgtnttgacatccaaactcatagtctgaccctcgcctcccaactnaagctacgcttccagagctcaccacatctaatggtagacgacaaccaaattgcagaggaagtgagagacgcagccacaccacccctgacacaagaggntcccaagggcaaacaagtgtcgttttccttttnttctgctttcttttctcggngaccggaaacggcaggcaaaaggntgnaaagggttttcncttttggccattttcnggaaaacattttttttgggnanctttaaaggngcg

SEQ ID NO: 137560 - DNA, 235 bp, Arabidopsis thaliana columbia
  unsure (1)..(235): unsure at all n locations
tttcagacattgtggcgtgtccngaggagcagattttaactgatgaacaacctgacatggatggatgtcctngnggtgagaatcctgatgatgaaggnggagaggcaatggttgangaagctttatcaggtgatgaagaggaaacgtctagtgagccaaactggggaatggattntcctacagttgtnagggttaaagaacttcatatnagtnctcctattttagctgccaaaag

SEQ ID NO: 137561 - DNA, 420 bp, Arabidopsis thaliana columbia
  unsure (1)..(420): unsure at all n locations
actatggggaggcaatccagcaagattcattagaaccctaaccaacgaagaaaccctagagatcccaaaactcgctgtagccatcaaccacttaagcggagattacttctctgagttcctaccttactcaactgtctacttagaggtagagaagttcaagaagtcccttgggatcgccgtttagaagcttcatctttttcgtgattcactttcatgtgtttatctatcatatgaggtctttctctctgcatattgcaataagtagctgatgaacatcaaaacaagtccggctctctttttttggttctaaaacgttngnnaattccggttttttnggggccctttnnaaaancccccttttaaaaaccggttttgggncgnaaatttttcctnaaantaaaangggggggggnttttggg

SEQ ID NO: 137562 - DNA, 466 bp, Arabidopsis thaliana columbia
  unsure (1)..(466): unsure at all n locations
gtcggaaatctctgatctctctcaggatcgcttgttcgctacgcagatctcacctgccatgactcgaggaagtcaaagagagcgtgaccgtgaaagggctctagctcgaaccggaggcaaaggaaagaacaaagatgatggattaactcctgagcaacgtcgtgaaagagatgcaaaagcattgcaagagaagactgcaaagaaagctgctcaagccgctgctgcagctagttccggaggagggaggaggcaaaggnaacaataagtgaggaaaaatgatctatgcttcgatgtttgtaactgtgctttttgaatatgnaaagttttggngtttttgtttttgaatnttttggctccgntttggttttangtttntttcaaaaacttaggccttgggggtggaccttttttntnanccncaggtttcntcttccnaaaatctttgtttnaaaagaanntttttncc

SEQ ID NO: 137563 - DNA, 500 bp, Arabidopsis thaliana columbia
  unsure (1)..(500): unsure at all n locations
aaacaatatttctaatctattacaagtaacatgatcggccaacttatgaacctcaaggccacggagctctgtctcggcctccccggcggcgctgaagcagttgagagtcctgccaaatcggcggtgggaagcaagagaggcttctccgaaaccgttgatctcatgctcaatcttcaatctaacaaagaaggctccgttgatctcaaaaacgtttctgctgttcccaaggagaagactacccttaaagatccttctaaggctcctgctaaagcacaagtggtgggatggccacctgtgaggaactnnaggaaggaccatgatgactttagcaggagnccagtagttggtgcggaaggnggccagcnagtntggaaggccngggantttttgtggaggggcaanccggagccngnttttggttaaagggntcccattggngggggttcccnatttttngggaantttncccccaannttttcaaaantccccgggttttttt

SEQ ID NO: 137564 - DNA, 525 bp, Arabidopsis thaliana columbia
  unsure (1)..(525): unsure at all n locations
agccggtttagtagcggctgcagccttctttttcctccgtagcacgaccaagaaatctctccggttacctccgggaccaaaaggtcttcctattataggaaaccttcaccagatggagaaattcaacccccaacacttccttttccgtctctccaagctatanggcccgattttnacgatgaaaatcggtggccgtcgcctcgcggtgatctcctcggccgagctagccaaggagctactcaaaactcaagacctcaacttcaccgctcgtcctctcttgaaagggcaacaaaccatgtcgtatcaaggccgtgagcttggttttcggacagtacancgcggtactaccgtgaggttgagggaggatgtntattggtgaaccttttttaagccccgacccttttggaaagtttttaagaccgtttaggngaggaggggtttnaacggtttnttggcaaggnttttaaaanncgttnttnaantagggancctttnnntnaggggggtttttttgtttnaannaaa

SEQ ID NO: 137565 - DNA, 500 bp, Arabidopsis thaliana columbia
  unsure (1)..(500): unsure at all n locations
tgtncttgtncttgtncttgtncttcttcgtcttctcttcggagcttttttcttcagatatcacccagatcgtaacttttgatcttcgaatttcacaaagctcaaacttttggattctttactaatcctattgtcacataacatcggaacaagatcatcaatgtataaacaactgatcagaagttcatatttctctttgtaagtatacaattcgggatcttgatcacttcttgcaatggagaaagagatggaagataaagaagaattcgatgagggtgagattgagtacacgagttatgctggtgagcatcatctgccatttgattatgtctctngttgaccaaggacttagtgaaccctactccaactttactttacccggtactttngtcttcctnttggccngagntattgtttcctgggccttttaacaaanggaaaatgcgtggggccnatagnccttaaagattgggggcnnancggnannttttnagnggggg

SEQ ID NO: 137566 - DNA, 375 bp, Arabidopsis thaliana columbia
  unsure (1)..(375): unsure at all n locations
gaaaagaaagcaaccggtttcgtcttctggaccagctaatagttcaggaacagctaacantgcgggaccatcaccaagctcagcaccttctacaccttcaactcatactcctggagatgtgatctctatgcctaatctgccgcacagtggtggttcctccaaatcaatgatgatgtttggcactgaaggaactgggactcttacatctccatcaaatcagttggctgatatggatcgatttgtggaagatggatnacttgacgncaatgttgagtcttttttatccccagggggnntggtgatcaacggggangctttttncacggnggnattggattttnagttaaaagggtttancgggtttanntgnaggng

SEQ ID NO: 137567 - DNA, 377 bp, Arabidopsis thaliana columbia
  unsure (1)..(377): unsure at all n locations
cgaagagcatctatagaagaaaagcgaggaggtaacaatcaaaatggcaacagagtctctacaagaaacaacagtggttataaaaatnaggatggtttcagacgtgatggatacaaacctaggggcagtggcgtcaatggaggacgaggctatgggagacggaacagtgagtctaatggggatggtaaagcataccagaacaatggccatggcaatactgnggccaaaaactagattagtttttccttcttctaagcttttgctcatggttgagaatctgaggtttttaggcggatgtttaaaacaaattttttntttccgtgggntatccttnggtgttganccntttcgattttttgtnattttttttgggggtt

SEQ ID NO: 137568 - DNA, 373 bp, Arabidopsis thaliana columbia
  unsure (1)..(373): unsure at all n locations
cagagcaaaaagtggttactattttaagtgcaccaaactattgtnaccgttgtgggaacatggcctcgattcttgaggtcgacgactgcaggaaccacaccttcatccagtttgaaccagcaccgaggagaggagaaccagacgtcacccgaaggactccagactatttcctgtgatcactggacacagactcatctcaatcagcagctgcaggcacccacaagtgaaaagtcacagttggctaactctagattctggtcctatgcattgtngttcaggttgcncttgttaaaatttaactttaggngccancaccggnattttaggggngttttttntggggggnnaaagggttttttntntttccccnttt

SEQ ID NO: 137569 - DNA, 427 bp, Arabidopsis thaliana columbia
  unsure (1)..(427): unsure at all n locations
caatgnctgctcgtcgcacnagttacattcatttctatggtttcttctgctgcttcgtccccagaagccgactttgttaagaagactatctcttcccataagatcgtcattttctccaaatcctacngcccctactgcaacaaagctaaatcagtgttcagagagctggatcaagttccttatgttgtcgagcttgatgaaagagaagatggttggagcatccagacngcacttggagagattgttggaaggcgaacagtaccgcaagtnttcattaacggaaaacatctcggaggatcagatgataccgtaggntncgtatgnanagcggtgaacttgccaaagcttcttgggtgttttcccgggnacaaagaangctngaacntnntagggtnntaatataaggttgggaagaatttgttaccac

SEQ ID NO: 137570 - DNA, 475 bp, Arabidopsis thaliana columbia
  unsure (1)..(475): unsure at all n locations
gaagaacaaaaaaaaatggctccttcgtcttcatcttctccttccaaatctcctgttccatctnttcaccaatcccttcacttcactcctattctagaatgtnaagaagacgacctccaagaagaaagatacaaaaacagagcaacaccaagcagcgacggtggttcttccgccacaccaaaccaccagcaccaccgncgtaccaacagcaacaacaaccaccagcacactctaacacctctccaccacaacggcaaaccccaaaccagaaaacggcatgncggcaacggcggngacgntggtggtgccgtattctgnaaacaagtntnggccttaacaatttttaaccgtgncaaatttttcgntggtcccttttggaaggngnaanaaaccctttttttntnttttgggccgattttttttntaaantccttttttaattttttttaaggggggnggccccaaattttttttt

SEQ ID NO: 137571 - DNA, 440 bp, Arabidopsis thaliana columbia
  unsure (1)..(440): unsure at all n locations
atctagtcaggggtcagatcggagagccggcaatataatggcagcggcgagacgattacggacgctccaatctcagccggagaacaaggtctgtntcgattgctcccagaagaatccacaatgggcatcgatttcatatggaatcttcatgtgcttggaatgctccggtaagcaccgtggtttaggtgttcacatctcattcgtcagatccgtcaccatggattcatggtccgagatccagatcaagaaaatggacgctggaggcaacgagcggtctcaacaatttttttcggtcagtacgggatctncggaaagancctgatatcatcttccaagntcaanttccaacngccgngttttnttntntncgggnttcgggttccaagcttttactttnggggaaggccaattgggggnntnccncccgtttttaaggaatt

SEQ ID NO: 137572 - DNA, 472 bp, Arabidopsis thaliana columbia
  unsure (1)..(472): unsure at all n locations
cattggcatacatagctcttgtgttgctcttcacggttcctcttgcctacgacaagtatgaagacaaagtcgacccnttaggtgagaaagcaatgatcgagctcaagaagcagtatgcagtgttggatgagaaggtgttgagcaagatcccacttgggccgttgaagaacaagaagaaagattaggggtttacacaaggttgtccgtggctagcaaaacgggtgttgtgaaatggtatcgaagtaatgtgttttgggcgtttttttaggtggctctttcggttatgtgaatgaacttggaattttccctgactggtttgttccngttgttaaggcaattgttgatcaacgtcgnggggtnaaaaagnaggggaaattccttccncncccctaaagccncttntnaacccaangngtttcccaagaatttttgaattttnccaaacccggggnaaaanagtggtcctttnccc

SEQ ID NO: 137573 - DNA, 500 bp, Arabidopsis thaliana columbia
  unsure (1)..(500): unsure at all n locations
gagctacaatcttccactcaagcttcacatgactctcaaggtgaccagaaaaccaacctatcaatagatgctcctatacaagattctggttctgtatctgcttcaagcaatgacagtaggaaagtttcacgacaagatattgaacttgttcaaaatttgatagaaagatgtcttcagttgtacatgaacagagatgaggtcgtgaagactctcttgactcgtgcaaggatagaccctggatttacaaccttggtttggcagaaattggaagaagaaaacgcagactttttcagggcatattatataaggctgaaactgaagaagcaaaataatttttgttcaatcatttgcttgagcaccagtaccatctcatggaggtatnctcctgggccncccaaaggttcctttngganccngttcaaaaacgggtttnatncccntggncncccntccgggttanaaannccntngggggtnccccggttttaaananccnaaaa

SEQ ID NO: 137574 - DNA, 450 bp, Arabidopsis thaliana columbia
  unsure (1)..(450): unsure at all n locations
caagancccggagagcttccacattgccatcgtcgaggtgaatatnagcgctgagagtnagagtttcaagtttnttnaggctgccaaagacgttcttcctactataatnatttcaaccgatcattgcatcanttctacaatgaaatgcatagcgcttggtgcagttnagttcctacaaaaaccgctctcaccggagaaattaaagancatttggcagcatgttgttcataaggcattcaatgatggtggaagtaatgtttcggtatcacttaaaccagtgaaagantccgttgtctcgatgcttcatcttgaaaccggcatggcaatcgntgaggaagntccagnggcatcttcancggaaattgnaacaaggttcacgggtacttgncggtgtttnccaggggcctaaattttttgggtgggaatttaaattcccncgttcgggaagtt

SEQ ID NO: 137575 - DNA, 470 bp, Arabidopsis thaliana columbia
  unsure (1)..(470): unsure at all n locations
ctttgagagcagccggacccaacacactactgcnttgccgcaaccacttcatatgaacttcaggcctccacctccagtgactcagcctcaccacaacggaaaaatgggaaagataggtaatggattgcagcagggacacgagatacatgggatgaagcaccagggcgggcacagaatacagcatcagggcatgcatgggatgcagcacccgggtggagtagtggtaaacgctactgagaattggcgggtcagcaaaatcaccggccagaaactcgggtngggaggtaagggactctagacttcacctaaatactatgccggttcaaataaggaagtaatgtttatttacccaataattcattttttaggtgtttnttttttatggccantttttnttttttggtcccaaactnnaaaggggggntttttncccaaaaaagggntttcgnttttgnnccctttnttttttt

SEQ ID NO: 137576 - DNA, 338 bp, Arabidopsis thaliana columbia
  unsure (1)..(338): unsure at all n locations
tgtatcgaagagatgaccgantagcggtcaacacatcgggcaatggtttntccgatttnttgccattccnttcacaactntntgcggcaatagccatcatacgaacatcagaggagacgcaagaaaggttcanagatgcgaatggnaagtttgtgggagccacaataatttnatctacactgtttgctccctcatacggtttgaccaacaatggcattatattcactggttatcctgtcgttggaagccaaaaccgtatgatgtcgtcaggttcgtntntagacagccttcaagatgggttgntcacggcgtgtgcatggggcctcacggntaaaagg

SEQ ID NO: 137577 - DNA, 285 bp, Arabidopsis thaliana columbia
  unsure (1)..(285): unsure at all n locations
gtggaagcagcggaggtggcggtggcagtaacaagtgcttcatctgcggcaaggaaggtcactttgcgagggaatgtacttcggttgcttaacaaaaagatgcaaagaagaagagtaatgttcataaacctcttttgttttctattaaaatctacctaatgctcctttttggtgactataatgtgattnctaaagtcgtttaggatgtttaagaatggttgttttgggagtttttnatctctctatattacncttttgactggtttatgcaacctgttcacggct

SEQ ID NO: 137578 - DNA, 423 bp, Arabidopsis thaliana columbia
  unsure (1)..(423): unsure at all n locations
ggctcntgctttacaattgtttaattctcagccctcaagnattggacaaatccaggcaagagaagctgatgtccaagcnctttctgaactaacgcgtgcgcttgacaagaaggagctagttttnagggagctaaaatgcatgancgacgaggttgtggaaagtcagaaagatggacataataatgccctaaaggattctgaatcttttaagaaacaatatncagcagttctctttcagctaagcgaaatcaatgagcaggtttcattggcacttcttggnttttggcaacgaaatacttaccaggggaatgtaccatattcatccaattaagacgcatgngtaaaatcngggggncctgatggncngttgacatacggtggccaattantngctttaggcactaattnggtttccatgtgnct

SEQ ID NO: 137579 - DNA, 457 bp, Arabidopsis thaliana columbia
  unsure (1)..(457): unsure at all n locations
taacttgtgataattgcaggtgaagtggaggctttactacctgtagtggggatgttgctgcagttcagtccagaggagatccagaagtgtcagcaagcctaccatagctcaacaacagcggcaacaacntcngaggcgactccaagtccggcaagtgagggttcaggtctatcagtcttctcaagattctcgttttcatagtcgggtgggcactggacacattcttttgggccaagatacatacacatacatacgncattgtgtttaagtccttcgtttttgtgtaatgaacactaaaagtcaagnaaacacttttttngtccagatgtaatgaaaggntaagccactgaattnaggttgttgggccatttttaatggnggcctattgnatcatgcagaaacccgctgattntcggggattantggaacctataaaagtcaccgganatttttcctt

SEQ ID NO: 137580 - DNA, 500 bp, Arabidopsis thaliana columbia
  unsure (1)..(500): unsure at all n locations
acgttctggntctttcgagattggaagatgggagcttactcttggaaaatnaaccattcagtctacaagcgatctttgaagaggtcatctctttgataaagccaatcgcatcagtgaagaaactatcaacgaatctnattctgtctgcagacttaccaacttatgctattggtgatgagaaacgtctgatgcaaacaattcttaacatcatgggcaacgctgtgaaatttactaaggaaggctacatctccataatagcctctatcatgaaacccgagtccttacaaganttaccatctccagaattttttccagttctcagtgacagtcacttctacctatgtgtgcaggtgaaggncacagggtgtgggatttaccacacaagggcattcctttggnttttacccaatttttacagncttgggcccggnacnnanggggnccnttccggtggnggcnttgggtanccnttttaaacgggttttgggnntatngggggg

SEQ ID NO: 137581 - DNA, 204 bp, Arabidopsis thaliana columbia
  unsure (1)..(204): unsure at all n locations
agcaaaccgtggctgccgctaccgctcggnctaaaaccgccgtccgcggagagcnttttggctgagctaacgcgtcaaggcatctaagccgtccnttcttcttcttgtctaatcaacggctctcatcgtctccnctgacgtgtccatnatgaaacanaacccgtagatatnatgacgtcatgcgtggcgtacttgtccgtgtnt

SEQ ID NO: 137582 - DNA, 410 bp, Arabidopsis thaliana columbia
  unsure (1)..(410): unsure at all n locations
gtttatgtctttncttgctggtgctctctttggagttgtcaaaggaatggctcttgttgtctccacngcaacagctggtgcttcctcttgtnatttccnctctaagctcatnggtagacctttactcttatcgctttggcctgacaagctcgtattcttccaagatcaggttgcgagaagaaaagatcggttgctgaatnatatnctgttcttgaggctaacaccaacattgcctaacactttcattaatgttgcttctccaattgttgatgtnccttaccatatctnctnccnagctacattcatcggtctgattcctnctgcatttgtcactgtccgggctgggctttgctcttnggagagctaaaatncattgggaggtctctatggcnttcagctccatggcgnct

SEQ ID NO: 137583 - DNA, 450 bp, Arabidopsis thaliana columbia
  unsure (1)..(450): unsure at all n locations
gaaggagacgttccttctccagctgatntcattgagaagnccattactgacgagaagcatgtagtcgaagaaccattaaaggatgaacaagagaacgtaagtanagccaaanatntcgttactaaactagcagcagaagatgagaacatcaagaaagatactgacacacctgttgcggaaggaaagagcgaagagactttgaaagaaactgatacagaatcagtagagaaagaagctgcagcaaacaaacaagaggaaccaattacagaaaaagtagcagaagttgtagaaacagcacctgttgctaaagagatcgatgaggcggaacancaaccagaagtcacaaccaaagaaggntcttgcttnagcaaaaacattcaaaccngcnttntttcaaaggtggaccaatcttttttttnagggcaangnangcattcntttgggnggtnt

SEQ ID NO: 137584 - DNA, 550 bp, Arabidopsis thaliana columbia
  unsure (1)..(550): unsure at all n locations
tccttctttggaattgcctgatgggactgtgttgaagggagctacgcttgtggcgattaggccgagtgagtcgaaganggaggtgtgtnatgtgtcttgggtttctnctgcgtttnatgagccttatggggtagctgctaagatgttggttaagagaaggacttattgtcttgaaatnaattcgttctaaagcttgacgatttcgctaagtcggatctgaggtgaatgaatcacaaaggctaaccaggttttgaaagagagagactacaatgcataagatcagttttgtatgcagtgtgactaatcttagattcaccaatggagctcaattctatgtggttattgggnctattggaaaggtccgaaatcccgcctngctttggncatcggaaacccgcattcccntggctgtttttttngttttagcctggcaaagnaatcatttaagggncaagntttanccttaaaaaacttcccttngnaagtttnttcaaaatttangggaaattttttttaggaaaannacaantgctttgttccccngcccttt

SEQ ID NO: 137585 - DNA, 404 bp, Arabidopsis thaliana columbia
  unsure (1)..(404): unsure at all n locations
aatgatggaagacgttaccgcctactatgcaaagcgtgaggctttcgggcaacctaagagatacacacatcgacttggtggaggtcaggttgattaccttaattggatagcagagcaaattggtgcaccgcccggtgaacaatggagatatcaggaaataaatggcggatactacagacttgctacacaatcagacactttccgtgataagtgggacgatgatcatctcatagttgaggcttatnaggatttnttgagacagaagctgattagtagtcttccttctcagttattggaatcttnaaggtcatggaataattccttgaacaantgatttacccngncttngnngttntggaatngcccnntgntggtggngtnaaaaaagccgccaaggttttttt

SEQ ID NO: 137586 - DNA, 443 bp, Arabidopsis thaliana columbia
  unsure (1)..(443): unsure at all n locations
attgcagcaagaagttatttctaatgacattcatgtnactctnttgtttcctcctgacactgatacacccgggtttnaacaagaactgaagaagaggccagaactaacttcaatcatagccgcatcatcgggttcaatgaaaaccaaggaagtggccaagatatgttttnatggtatcaaagcaggaaaatttacagtgacatgccattttattggcttctnactatcaattgctagcaccggcatgtcccctcagggatcgttttggcttgcnctcattgaagttatatncggtggtctaataagattcgtcagcttgggttttccaattggcaatggtacaaanccataggaaaggtggngcaangnaaaccaagtaaattaggtaagttagcttagggtnattttggtncaatgggncctnattcttntatgnccaggct

SEQ ID NO: 137587 - DNA, 391 bp, Arabidopsis thaliana columbia
  unsure (1)..(391): unsure at all n locations
ctgattctnctcaagcaaacaatgatccggaatgttgtatatgtttggcaaagtacaaagagaaagaagaagtgagaaagcttccatgttcgcataggtttcacctcaaatgcgtagatcaatggcttcgtatcatctcgtgttgtcctctttgcaaacaagatctccctaactgaaaaatcaaaacaatacatgagtcacaagattgaatctctgaccaagtaccatatatgtntttttttttttttcngtngccgcctaaacacgtttacttgtgtgaatgtngttatcatncctttttttttcttgtgtacaaagtagctcaccagtaactgtaattttccntaaaaaaaanttanaaanncatgatcaaatcngttgttttccccgt

SEQ ID NO: 137588 - DNA, 495 bp, Arabidopsis thaliana columbia
  unsure (1)..(495): unsure at all n locations
actggattgtaagaaactnatggggtaaaagctggggagagagtggatacctaaggatggcgcgtaacattgcgtcttcatcaggaaaatgtggaatcgcgattnanccttcatacccgataaagaatggcgaaaacccgccaaacccgggaccttcacctccatctcccatcaagcctccaacccaatgtnacagttactacacttgtcctgagagcaacacttgttgttgtctgtttgagtatggcaagtattgctttgcttggggatgttgcccactagaagcagccacttgctgtnatgacaactatagttgctgccctcacgngtacccggtttgtaaccttgatcaaggaacctgtttattgngcaagacagtccatttagtgttagggcttaaagngtaaacccgaacggcatttttgggtcaaaggaggaagncntttgcctaaanatttgttntnaagggggctttggttnttnngngnngggttt

SEQ ID NO: 137589 - DNA, 466 bp, Arabidopsis thaliana columbia
  unsure (1)..(466): unsure at all n locations
aaaaaaatttcatcgaggaaactgaaaaaaaaaaatgagtgacgggaggnggaagaagagcgtgaacggaggtgcaccggcgcaaacaatcttggatgatcggagatctagtcttccggaagttgaagcttctccaccggctgggaaacgagctgttatcaagagtgccgatatgaaagatgatatgcaaaaggaagctatcgaaatcgccatctccgcgtttnagaagtacagtntggagaaggatatagctgagaatataaagaaggagtttgacaagaaacatggtgctacttggcattgcattgttggtcgcaaactttggttcttatgtaaccgcatgaggcaaaccntttcgtttctttttacctcgnccngaaaccttttctgctcttnaagtcgggttaanattttnaaaccccnggaacctcttntgggtntcagcccccttttnaannnccngntg

SEQ ID NO: 137590 - DNA, 475 bp, Arabidopsis thaliana columbia
  unsure (1)..(475): unsure at all n locations
gaaacctcctcggntctctagacacaccggaacgaaccacgaacgggaaatctctgtatccggtacactctcgtgtaccgttnattcgtagagatctatagacgcttgantgaacaacggatcgggtcgggtcaacacttaacggatccgattcgacttcatcggtgtagatccaggttcctccgacttgtttttgtttctcgaaaacnaccaccgagtgaccttctcgtcgaagctctcgtgccgctactagacctgcaggtccagcaccgataaccgccacgtggtgtgatctgaagcaggtattgaagcaattggagccatggtgtgaacttaaagntaaagtgggtcttgtgacaggtgcttcatctggtataggggggagantcttgttttgatnctttgnaaacttggtttnaaagtttttagnaacaanctcngnnggtnttaaccggntaaaanntttntttttttt

SEQ ID NO: 137591 - DNA, 383 bp, Arabidopsis thaliana columbia
  unsure (1)..(383): unsure at all n locations
tctcgtttctgcatatctnctcatggccagttccggtgattataatgaaattataaagtctatatctaatgccccaccaacacattacatggtcaagatagagtctttctnactccttacaaagcatgctattgagagatatgaaactnagagctttgaagctggtggctacaaatggaaactggttctgtacccaaatggaaacaagagcaagantacggaagaccatgtttctgnttacttgtctcttgcgggactctagttcattaagtccagggtgggaggttatgcagttttccgnctgnatttactnggtccaaaccaanggttacnnttttganttctccaaggnaacggggnnccgggtttaattcggttaaagc

SEQ ID NO: 137592 - DNA, 425 bp, Arabidopsis thaliana columbia
  unsure (1)..(425): unsure at all n locations
aatctttctcactctcacaaatggcaacgcttttaggtttctttcagactaagtttcaccattncggcgtctggatttctacgccgccntgctcatctncttccacggtagtctcaatggtgggcttgaatcggactgattcgaaaaagctccgttcagatttcctcggccagattggttacgaagatcggagacaagtaagacacagttactgtagaagctcattagctgtgaaaatntcgtgggacggtccttttncttccgtcaagttgatcatccaaggaaaaaacctcgagttatcagagccaattaagcagcatgttnaggggaaagttnggcaaattttttcagaaacacagtcatcttnttnagagaagttatttaaagttctntntccggggnggggnnttttgaaangcccnngg

SEQ ID NO: 137593 - DNA, 469 bp, Arabidopsis thaliana columbia
  unsure (1)..(469): unsure at all n locations
agagagtcaagaanacagaattttatcacccaaactgcgacgagcacatcatgagtacaatgcaagatttatcttctactgtntcgtttagccctagcttcagtttctacgcctccggtgacctagtcgaaaccgccgttagagttatacgtgagtccgagagttattattccgttaaagttgacggcgaaaacgacaaagaattcgagttcgaaacattaccgttagtgaccgagagcctctttcatttctcaacgatgacgacggcttttaagcgctcttccgacgacgatgangtggcagacgatcgantcancctcgaaggaatctttttctacgggtggatggagttttgatccnccatctttaaattnggcgtngggataantttttatcgtcgggttttttacggttngggaaaaaattttnccggggaanttntnttttttttggggccccnnaaannccc

SEQ ID NO: 137594 - DNA, 434 bp, Arabidopsis thaliana columbia
  unsure (1)..(434): unsure at all n locations
acaaacgaaaaaaaaatcttcaatgagataacaataatatcagcagcggaacaaggattgagaaaaggaacctttcccttttaataagccgatatagatccttggaggagaatttntagcagaccgatctctgtctgttgtctctgtttctacgaatctntgtgtttgtnggaaatcgtaaatnatgggtttntgggatgctcttctcaattggcttcgcagcctcttcttcaagcaagaaatggagctttcattgataggacttcaaaatgcaggaaagacatcacttgttaacgttgttgcaactggtgggtacagtgaaggcatgatncctncggttggttcaacatgngggaaagtgccaaaaggnagtntcacggtcaanctttggnatctcggnggcaacctnggntccgaancattttgggancggt

SEQ ID NO: 137595 - DNA, 415 bp, Arabidopsis thaliana columbia
  unsure (1)..(415): unsure at all n locations
tncagcagcagccatcgtntccggttctccatttnnttcttcaccattaatccataaccatcatgcttctggtaatgctcctggttccatctccgtggtatctttcccccgtaaagtttcccgccgtggcctctccgtnaaatcggggttnatcgagccanacggaggaaaactcatgaacctcgtagtcgaagaatcacggcggcgcgtnatgaaacacgaggcggagacggttccggcaaggttcaagctgaaccgtgtggntctagagtgggtacatgtgcttagcgaaggctnggcaagtcctctcaaaggtttcatgngacagtcagagttnctccaaaacacttcatttttaacctcggttccgggtttnaaaganngggttccgttggtnaaaaatttcgggttcccg

SEQ ID NO: 137596 - DNA, 283 bp, Arabidopsis thaliana columbia
  unsure (1)..(283): unsure at all n locations
gtttagccttacgacaacaacaacaccattcatcatcctctaatcattccgacaacaaccttaacaacaacaacatcaacaacaatntngagaagctctccaccgantattccggcgacggcagcacaacaacaacgaccncaaacagtaactntgacgttaccattgctctngccaatcaaaacatatntggtccaatgcnttatggcacangcaacaacacattgatagtttctncgggtaatcatcaagntggttggtggaactgccattttttggcggt

SEQ ID NO: 137597 - DNA, 286 bp, Arabidopsis thaliana columbia
  unsure (1)..(286): unsure at all n locations
ccattttnttngtttttttttgttttgtttttggagttgtgtttcacctgtggtnggttcttnagttcgtcttctgggttaaacaaagaagatcggttctnttttaattttaattttgaaacaagaagaagaaagcaagcnacgatgatgtttctggctgacgccaatagataaagacacgnctttnacaaagcttaggacctgcattctcaccgttatcaaaaatgtcgaatctttctgcaaggaccaggncgggnccatcaacggttntggcaacaacttccgg

SEQ ID NO: 137598 - DNA, 425 bp, Arabidopsis thaliana columbia
  unsure (1)..(425): unsure at all n locations
caaaaccttcttcctgaaatggcttctnctctcatcttcctcctcctcgttaccctaaccttttnagcatcaaccctaatctcagccaaatccaacacaacaacaataatcgaatcaacttgcaaaaccacaaactactacaaattctgcgtctcagctctcaaatccgacccaagaagtcccacagccgacacaaaaggtctcgcctccattatggtcggcgttggtatgacaaacggcacntccaccgcaaattacatcgctggaaacctatccgccaccgtaaaagncaccgttttcaaaaaggtcttacaaggnttnctccgngaggtntgctttggcngctgnttttttcgggttgcgggttnaggttttnatgttgaggttttgcnttngccccttgnntttttggggggnggttttcc

SEQ ID NO: 137599 - DNA, 410 bp, Arabidopsis thaliana columbia
  unsure (1)..(410): unsure at all n locations
atgtatgtgaagngctccgctcccctatataggtatgtngaggatgcaaaggtggcaagtnctactttnatctattttnctcgaaattttcatcnacagtcctcttttcattggagatgtctctatttctggttctatgctctgcatttncctatggtttaaatgctaatcacttcggctcgagatctactctttctacatgaattcattatcttcatataggaatttggatgatgctaggacgattctgttttcgacctgttcgcctagatttattggcaacgagggatggatgtaatcaggcttttcttccctttatcttttttnccgtttcttgggtnatngtaaatcngcaatcntctctantgtggaaggtcctntnttcggcctgtnttgcctaaaattgcccc

SEQ ID NO: 137600 - DNA, 400 bp, Arabidopsis thaliana columbia
  unsure (1)..(400): unsure at all n locations
gacgaatgangagtcaggtggtactgcttgcnctcaagaggggaagttaaagaaacctgataagattctaccgtgtccgcnatgtaacagcatggaaaccaagtnctgtnactacaacaactataatgttaaccaacctcgccatttntncaagaaatgtcagagatattggacagctggtggaacgatgaggaatgtnccggttggtgctgggagacgtaagantaagagtccagcttctnattataaccgtcatgtaagtataacatctgcggaanttatgcaagaaggtggcgagaactgatcttcaacatcctaatggtgcaatnttctcacttttggctctgatctntgctttgtganctatggcttctggttgantcttgttggnagccttttt

SEQ ID NO: 137601 - DNA, 446 bp, Arabidopsis thaliana columbia
  unsure (1)..(446): unsure at all n locations
agaagtactccggtgagaaagccacacacatcgaccgcagatctacttacttggtcggaagtnccaccgccggattctccttcctccgcttctngctccgccgttngttcccaccagccatcggatggnattagcaaagtggtgtttggtggtcaagtcaccgatgaagaagttgagagcttgaaccgcagaagccttgctcagaacataaaatgaaggagataactggcagtgggatcttttntngtaacgaaaaanatgatgcgtcanagccattaccagtttatcagcaagcagttaatggtataaggccagatatcatttggtgaagggggaaatctttntccctaaaaaggccggntanttttaccttaagttggggnaacaccgggggtcaatnggggcttttggggatttaattccccctnnaaggcttcanngggagg

SEQ ID NO: 137602 - DNA, 427 bp, Arabidopsis thaliana columbia
  unsure (1)..(427): unsure at all n locations
aaccgggtcgccccacgcgtccgcaaatcttaaacgttttactttgtgctgcactactcaacctcaatggccgcctcaanaatggttctctcctcccctgccttcgccggtaaggccgtcaagctttcccccgcggaatctgaagtcctnggaagcggccgtgtganaatgaggaagactgttgccaagccaaagggcccatcaggcagcccatggtacggntctgaccgtgtcaagtacttggntccattctctggcgaatcaccnanttaccttaccngagagttccccngggactacggatggnganaccnccggactttcagttgaccccganaacattcgcaaggaaccgtgatcttngnagtttatcccacaggaaggtgggggaaatgtctcgggggncccttagngtttgtgttcttcc

SEQ ID NO: 137603 - DNA, 444 bp, Arabidopsis thaliana columbia
  unsure (1)..(444): unsure at all n locations
gagcggtgaaggaggaggagctggtggtggagggtctcatggtggtgccggantatnggaggtggtggcggtggaggaagtggaggaggaggagcttacggcggaggaggagcacatggaggtggctatggaagtggtggtggtgaaggaggtggctatggaggaggtgcagcaggaggaggaggcggaggtcacggtggtggtggtggtcacggcggtggaggctatnccccatgaggaaaccaacttaagatcagccaaaagaaaaggctgaaaaataaaagataatctntggnggggtatacaaattaaaattgcctacctattttcaaaacaatttttgtatccnttaattatttgaaccgtngtattgtattttncccnaataanttnnatantttnattgccntaatcatttattttcaaaaaanaaaaantaaaaaa

SEQ ID NO: 137604 - DNA, 286 bp, Arabidopsis thaliana columbia
  unsure (1)..(286): unsure at all n locations
attcgtcctagtaacgtttttagtattggttgcagctgtaaccgcacaagggaaccgtggctcaaacagcggtggtggtcgaagcnactngttggggtttnatgggaatagatgccgaaacgtagagtctattgtaaganctgtagttcagtctcatgtccggtctatcccggctaatgcacctggaatttnccgaatnntttccacgattnctttntccatcattgaacgtttatnagggttacnccggccatccttgaggttcggaaccgagttcgggaagtcg

SEQ ID NO: 137605 - DNA, 525 bp, Arabidopsis thaliana columbia
  unsure (1)..(525): unsure at all n locations
ataatccggcattacgtgactactgatcctaatcccaccgcttcgatttcaatcttaggaacagtcgtcggtgttaaaccatctccggttgtcgcagcgtttagctcacgtggaccgaattcnattacaccgaatattcttaaaccggatctnatcgctcctggagtaaacatcctcgccgcgtggaccggtgctgctggaccaaccggactcgcttccnattctngccgcgtggagttcaatatcatctctgggacgtcgatgtcttgccctcacgttaggggtttagcggcgcttctnaagtcggtgcatcctgaatggagcccggcggcgattagatcggcggttataaccaccgcttncaaaaccttcaaagnggtaaaccgttactcgncatcggncaggaagccttngacgccgttcnntacggtgaagggcaagggttancacaacttcactaatnaggntttttncgtttacgcggggtnttntggttcntttggattaattaaaatgcgnaattnc

SEQ ID NO: 137606 - DNA, 305 bp, Arabidopsis thaliana columbia
  unsure (1)..(305): unsure at all n locations
tccgagtacccacctttggnacgtttcgctgttagggacatgaggcagaccgttgctgttggtgttattaagagcgtggacaagaaggacccaactggagccaaggtcaccaaggctgcagtgaagaagggtgccaaatnatgagactttcgtnatgatcgantctcttatggttttntttggttcttaaaactttnatggcgtttnanccttttcntttttcctctttatttctgtnactttntctctccctcctttttggatatctctaagacttttnattatggttttcaattatgcagttt

SEQ ID NO: 137607 - DNA, 477 bp, Arabidopsis thaliana columbia
  unsure (1)..(477): unsure at all n locations
attagatcggtatcgatngctgctgccgctaatacctccgcngttttcgcctctccgtcgcagcctttatcctcgaaacgtagttttttgtacagttcaaggattggtccaatactaaggagatttccgaggaagaaacttgatctccaagttaaagctgttgccacgactcttgcacctctcgaagagatcaaagaatacaagcttccttcatgggccatgttcgagatgggtactgctcctgtgtactggaaaaccatgaatggtcttccaccaacctcaggtgaaaagttgaaacttttctataatccagctgcaaganaactcactcttaacgnagactatggggttgntttcaacggagggtttaaccanccaatcatgtgtggtgggggccaagagcaatnnttnagaaaatngnggaanncggtttncgntatncactttgcagnttgcaatccnaggatnctgtgaatt

SEQ ID NO: 137608 - DNA, 287 bp, Arabidopsis thaliana columbia
  unsure (1)..(287): unsure at all n locations
atatcgtatggnccggttgatacaagangcctattcgagctcttcatattttncggaagaaacttatcatgtcagtnatcttggagaagtttacgatctaaatggattggtacagtgcacacccgatctgaatcagtatgattnctataggtgcttgaaatcagcgtataatgagactaaggattgtngttatggtaaacgttttgcnctggtttactctacgnactgtatgttgacatataaagncacttttttggcgccaccanccccttctcctncacctaaca

SEQ ID NO: 137609 - DNA, 535 bp, Arabidopsis thaliana columbia
  unsure (1)..(535): unsure at all n locations
aacatacaactcaagcaataaacgatatcttggagtccatgaaccttgacaaccatagagcaatgagatgaaacgacgccttggggaacagagagcacatatagtgatctgttgggaacagagagcacatgtagtggtctgttgttcatgattgatactgcaactagggcagaaaatacaatcctaattccggctaacaatgcctttctctttnctattttaatctttgagagagaggaagtcttctccgatgttccactttggctccggcaacggccagctttttnagtggtgttggtcagctttactctagcgtcgttggctttcttagcaacgtcggctaactttgtctctaancgattcgcttttgattcggatggcttttgtacccggctattttctgaatttggtttttggtttncttnccttngcccncttnaactcaagttttttaagttcaatacttaattannnccntacanntnggggntaagttttnccccccnttntnaaggggttttttgcccnaaactct

SEQ ID NO: 137610 - DNA, 425 bp, Arabidopsis thaliana columbia
  unsure (1)..(425): unsure at all n locations
ctcctctgtntganattttggatganattgcaagccttcaacacttagcatgtcttagtttgagcaacacacatccgttgatccagtttcctcgttccatggaagatctccacaaccttcagattctagacgcaagctactgtnagaatctgaaacaacttcaaccttgcatcgtcttgttcaagaaactccttgtacttganatgacgaactgtggatcccttgaatgcttccccaagggtatcggaagtntcgtgaagctcgaagttctgttgggatttaagccagccaggtccaacaatgggtgcaagctcagtgnagtgnaaaatctcacaaaccttcgggaactttgggctttctcttnactcgtggnggtcaanttgaaggggggggntttattnntttggnaaccctnggaagtngtg

SEQ ID NO: 137611 - DNA, 335 bp, Arabidopsis thaliana columbia
  unsure (1)..(335): unsure at all n locations
ttgtttgatagtcccagtnatgatgctaagcttaaagctacagactttggtttgtntgtnttctacaagccagggcagtatctgtatgatgtagttggaagtccgtattatgttgcacctnaggttctgaagaaatgttatggnccagagatagacgtgtggagcgccggtgttatcttgtacatcttactaagtggggttcctcctttttgggcagaaaccgagtcaggaatctttaggcagatattgcaagggaagatagnttttaaatctnatccgtggcctantatctcanaaggtgctaaagattttgntttncaaaatnctcngatagg

SEQ ID NO: 137612 - DNA, 475 bp, Arabidopsis thaliana columbia
  unsure (1)..(475): unsure at all n locations
aataaaccctcttttttgtattctctgattacttcgtctctncccctgtaatggcgcttccacacgtagtctcttcaccttcttcaacttcattatctccttccttcaaatccaaaccaccgtttcactcccttagatctttatcaccgacggttgataatcgccggcgttgtaaactcaacagttccttccgatgttcatcttcttnattctccgagaagcatcacaacgcgaaatctccaaaatccgatgatatcgtcgagcttcctctgtttcactnccactcgttctctttccccggagcaatccttcctctttcagatcttcgaatttccgttaccgtatcatgatgcacacggtcctccaatctgnatctangntttcggnngtagtttnctccgatttccggnttntngggttcgcggcaagaaggaaggnttttgtaggngnagnnggtnaaaaaggngcgttttgt

SEQ ID NO: 137613 - DNA, 405 bp, Arabidopsis thaliana columbia
  unsure (1)..(405): unsure at all n locations
cctagcgatggaattcagtatgggccgttcgctcttcctcagaatggattgcctattgccttggaacgaaaaccatagatgaattacgagaataccatttacctttcttaaattagaaagtgaggaatttttttccttatttaagaggaaaatctaattcttttttataatagaaatgaaaagaaagtagangaaaaaaatcccaagtgggaccccccaagtgtatataagttttagtttataaaatgtagagaattaaatttncggagaaaaaagagaattagttatataaatgtcccangtgtatgtaancttggttcatgcctctatatccttaattttgnaantttnctccaaantgttaaanncccctttattacggnngtaaatganctnnntggaatg

SEQ ID NO: 137614 - DNA, 325 bp, Arabidopsis thaliana columbia
  unsure (1)..(325): unsure at all n locations
agcattgagaagctcagggcagtggctgctgaaaagtccgttctggaatcacattttgaagaacttgaaaaaactttntcagaggtcaaagctcagttgaaagaaaatntggaaaatncagctactgcgtctgtaaaantggcggaattgacctcaaaactgcaggaacacgnacatattgctggtgaacgagatgtgctcaacgagcaagtncttcancttcagaaagagcttcaagcggctcagagttccattnntgancagaaacangcacactcccagaagcaatcagagctggagtntgcattaaagaaatcacangatg

SEQ ID NO: 137615 - DNA, 469 bp, Arabidopsis thaliana columbia
  unsure (1)..(469): unsure at all n locations
agattnccggggncccactgagncggcagagtaaagnttgaaactttggactaaaagaatggcgtctttgggtgtntcggaaatgcttggtactccccttaacttcagggcagtttcaagatcgtntgctccgttggcatcaagcccatccacgttcaagactgttgctctcttctctaagaaaaagccagctccttgctaagtccaaggcctgtctctnagactagcggatgagctcgccaagtggtattggtcctgacaggaggaatttttctttgccctgaatgggtcctttttgggataagattcagnagntccccaagaggttactttaaaaacgggtgnaagttttcctgggagatttattgggttatgnaccccattttgggtccttgggaaagaaagcccttnagnaanctttttgctaaaatnacccaaaggnttttttgaantttgattcccattgntg

SEQ ID NO: 137616 - DNA, 439 bp, Arabidopsis thaliana columbia
  unsure (1)..(439): unsure at all n locations
gcccaccgcgtccggtgactacatgtngtgacaacnnntgagttttcaagactagcaagaacaaaacagctggaccgtttgggattgtatctggcacaaagtttgaattcaagaaggaaggttacaagatcactgggttccacggacgagctggtgagtatgttaatnctattggagcttatttagctccatcaggcaccacccctttgactccctgcaacacaatcccaaaaggctagaaaggagctgggtagtgaaggcagggaacttttnatggggatgaattgggtgcttttccgancggnttgtaaagggaaaagntgtccttgtagggncaaaggccccaaaggatgggttatttgggangccgggtcctccgttttngntntaacgggcaaaagccaagngtccaagggtttgttaggaanggnaaaatgga

SEQ ID NO: 137617 - DNA, 502 bp, Arabidopsis thaliana columbia
  unsure (1)..(502): unsure at all n locations
ggccngnattnccngggcggcccactgngtccggtcnttaccngtntttagttangtcttggttgtggtccnttgctcttgttttcatttgcctacgtcgtcgcaaaggaagaccagagaaagatgcttatgtcttcactcaggaggaaggcccatctttnttgttgaacaaagttcttgcagcaactgacaatctaaatgaaaagtacaccattggaagaggagctcatggaattgtgtacagagcttctttaggctccggaaaggtctacgctgtgaagagactttgtattcgcgtcctcacatcccgcgncttaaccagaagtattgnattgagggggagaatttgnttaacaatccgggtaaaggtcaaggcacagggaatcttgatttaagttaagaaaggggttttttggcctgagggaaaagnncgangggttttaaattcctggtatanggtaacaatnccccaaaagggaaggccttttacggccggttntcc

SEQ ID NO: 137618 - DNA, 413 bp, Arabidopsis thaliana columbia
  unsure (1)..(413): unsure at all n locations
ccgggccngaattnccagggnngcccactgcgtccggcccctagccgtcgctgacagcctccaatatcggccgattccattcgccggagtatgttgacttcctcgcttccgtttcgccggaatctatgggcgatccttccgctgcacgaaacctaaggcgattnaatntcggtaaggattgtcctgtcttcnacggactttttaattttnnccgtgcttccgccggaggttctattggtgctgccgtcaaattaaacagacaggacgctgatatcgctatcaattggggcggtgggcttcaccatgctaagaaaagcgaggcttctgggttttgctatntaaacnacatcgtgctaggnattctgggagtttnctcaanaatgtttaagaggngttctctanaatagataatt

SEQ ID NO: 137619 - DNA, 282 bp, Arabidopsis thaliana columbia
  unsure (1)..(282): unsure at all n locations
gtcgtcgttnagaaaccttcaaaaatggctggaaaactcatgcacgctcttnagtacaactttnacggtggtggcgccgccggattagagcatgtncaagttccggttccaacaccaaagagtaatnaggtttgcntgaaatnagaagctactagtctaaaccctgtcgattggaaaattcagaaaggaatgntacgcccttttntaccccgcaagttcccctgcattccaggtattctaatagctttnaagattttagtttctgtatagangaaaaaggtt

SEQ ID NO: 137620 - DNA, 288 bp, Arabidopsis thaliana columbia
  unsure (1)..(288): unsure at all n locations
ccaatcatcggagcaatcataatcctctccgtntgccccggaatctncatctntttccgtaaacgaaccaaacaaatcgaggaacatacagattcanaatccggaggagaaacattatcantctncagcttcgacggcaaagtccgataccaagagatcatcaaagcaacaggaganttcgattcaaaatacctaatcggaaccggaggacacggcaaagtntacaangcaaagctaccaancgcaatcatggcggtgaaaaagctaaacggaacaccagnctcatca

SEQ ID NO: 137621 - DNA, 219 bp, Arabidopsis thaliana columbia
  unsure (1)..(219): unsure at all n locations
gttgaagcttttacaacttccttgctttcaaatcctccagtgntaataaaaagtttaattcttggcagattcttttntttgccactacaaaagcacaattatttntccgaataatttattatgaaaancaggtttgcagagatgtggaaagagctgcagattaaggtggcttaactatctaangcctggggttaganggggcaantncactcctcaaga

SEQ ID NO: 137622 - DNA, 278 bp, Arabidopsis thaliana columbia
  unsure (1)..(278): unsure at all n locations
aaagaaaactggtgtacgcggcctagtcgatctnctgcttggaaacgcaggtccttttnctgcatgtggagattggntcttgccggacctctcaatccagggatcaatgaagctaaacgctagtntgcagacttttccaaacacgttctacttcagctatgcgactaagcgtaccactaaacctnttggaatnatgactgtnccttcaggtgtnatggggattnancctctgcttttaanccgcgtgttgcagatgagtcagtggcaatttcctcgtg

SEQ ID NO: 137623 - DNA, 325 bp, Arabidopsis thaliana columbia
  unsure (1)..(325): unsure at all n locations
tcattgctctaattgtattgatggttctaactttnagttttgcttaancgtgtaaacnctgtagttgaagttttagtggaacttggtttagtagaatagctggttgttgggatctgatggcagattagagaaatnctnattgtaactttttagaaactgcaaacttctttnattagaacttagtttgtaggtatcatagaaactagttggagctggaatgctacaagaggttattctatggttgnaaccttacttccttgtaaccaaaggcaggtttagtctttaangnggtgttcaggtaatnaaggtttgnncancctccaca

SEQ ID NO: 137624 - DNA, 521 bp, Arabidopsis thaliana columbia
  unsure (1)..(521): unsure at all n locations
aatacagaaggagaaacctttggaactccctccacagcctcccaaaaccagggattttagaggcagcaccatggctccttttggtgggaacaacattcttgtcctatacagttgtcccgcagaatcctctcccaaatacttcgttcaggttctgcacaatgagcatcctattgcagtgccaggttgtgatggaaaagatttctgtcctcttgaagatttcaaggccaaagtggtaactcctcatctaaagcatgcttttgacaacctttgcaatgctgatctaaatgacctgaaacagaagnctgcatcaagtaagttatctatactgtcaagttggctgtttgggtcaagccacggtacccgagctctagttacttcacagctcttcttacatactggctgnttcaggtttgacctgaatnncacagggnattgttggcctgttttttttttnncccctgncanatttnnttcttggtaggtcaanccggtaanttgaanattttggnttnagnnttggg

SEQ ID NO: 137625 - DNA, 445 bp, Arabidopsis thaliana columbia
  unsure (1)..(445): unsure at all n locations
aggtcaacaataagaaagagagaacagataaagagataacaaatganatggaggctgttgctgctgcttatnacgtcttcaacaatgtcgctaagccaaaccacaattacatagaagaagatgacttattgaggttcatgataaaggaagaagtagaccttgtactcccattaatagaagatgccgacaccggaaaaatcacacgcaagacttttacagaatgggtggttaatgtatacacaagtcggaaaactntagggcattcactgaacggcacaaaaacagcggttaagcagttgggcaaacttataactggaatcttgncccgttatcacattcatttgttttggntggtctttctggggtatngnatcggcccagctttttnttgggcttntcccncacaatttttggggccttnnntttnttgnncggnaggcctttt

SEQ ID NO: 137626 - DNA, 601 bp, Arabidopsis thaliana columbia
  unsure (1)..(601): unsure at all n locations
caatcctttcctttcattgtagttaaacaaagattacgattatggccacatcagctatccaacaatcctccttcgccggccaaacggctctcaagccctccagcgacctcatccaaaaggtgggcgtcttgggcggtggccgtgtgaccatgcgtcgtaccgtcaagtctactccccaaagcatctggtatggaccagaccgtcccaagtacttgggaccattctcggagaacacaccgtcttacttaactggagaataccccggagactacggctgggacancgctggactctcggctgacccggagacattcgctaagaaccgtgagcttgaagtaatccacagcagatgggctatgttgggtgctcttgggttgcacattccctgaaatttttttccaagaacggtgttaaattnggggaagccgtntggtcaaggaaggntttaagattttttagaagngggtttnttnccttggaaccntactttttcccgggaangnttttagcatttgggntttnaagtnncnatgggtnttaaggtaaaatttggggngcccttgggggggttcccgttntccgggnggtnncntaanttntt

SEQ ID NO: 137627 - DNA, 437 bp, Arabidopsis thaliana columbia
  unsure (1)..(437): unsure at all n locations
ttggtcaaaatgtttccagtggaacccaggaaaagctgtatcagaacgttagaactgggatcagttcagctagtgatctgttgaaccccaaggattctnattacacatttncttcagctggtcagaattcgatatcaagaactagccccaatggaagctcagaaaacatcgaaatcttggatgacttatctccaccacatttggagaaaaatggtctaaatctgacaagcgttgattccttggaaggaagacatgaaaatnaggtctcccgcgaattagatttaggtcactacatgctcacatctattaaggtcaacacaacaccgggnatctggncctagcattcctcagattntnccatatgttcaccgggtgtnntggaagcccttttttttggaaggaantcttggctncngnaatttntttnangcnctttg

SEQ ID NO: 137628 - DNA, 333 bp, Arabidopsis thaliana columbia
  unsure (1)..(333): unsure at all n locations
ctgaaaaataatttagacaaaacaaagatggtagagagagaggtgaaacttttgggaacatggtacagtccggtcgtnataagagtaaagntcgcncttcgtctcaaatcggttgattatnattacnttgaagagaacttntncggttctaagagtgagcttctcctcaaatcgaacccggtttacaagaaagtcccggtnctnatccacagtaataaatcggtttgtaagtctctaaacatcgttggatacatagacgagacgtggaactcatctggttcgtncattcttccttctcatcntcatgntccgtccccttgcncggtttctggg

SEQ ID NO: 137629 - DNA, 404 bp, Arabidopsis thaliana columbia
  unsure (1)..(404): unsure at all n locations
acgagtatgtacctatggtggacaaagccgttgacgccacctggaaggtgaaacccgccatccagagagttgcctcaagaggagctttaatgtctcccaccgttccaaaagatcatnaaggcatcaaggctcgantcctagtaatgttcatggcattnttnatggcggttttaacattcttccgcactgtaacaaagaaacttccagcgactactacttcttccccagcagaaacccaaggaaacgcaatagaacttggttctancggtgaaggagttaaagagggagtgtcgtcctccttctccctgttaccagacctnacgggaaactgntcttccttaaaacttttgttccggtgggancntnccaagnncttggangggtaaaaatccgggnncgntccc

SEQ ID NO: 137630 - DNA, 326 bp, Arabidopsis thaliana columbia
  unsure (1)..(326): unsure at all n locations
acgagaaaccttactacagctacgcatacaataattgcacaggtggaaaacaatgcttgcattacacgcaagggttgtggagagattcagtgaagatagggtgtgctagggttcaatgcaccaatacttggtggttcgtgagttgtaactataactcacccggtaattgggtcggagagtacccttactgatcctgatcactaatactgtattacctaagacaataaatatgatttatgaataaaactaatttgaattactgcatatggaattataaatctttngttttaatctcaaggatgtaataatttatgncccttcacatt

SEQ ID NO: 137631 - DNA, 604 bp, Arabidopsis thaliana columbia
  unsure (1)..(604): unsure at all n locations
ggaatcttgcaatttcatcaagccaaatagtcaatggcgcaaagttcaggaccgcttagaagtggatgaaagatgttcgcgtctcgagaaaattgatcagctagaaatctttcaggagtatctgcgtgatctggaaagagaagaagaggagaaaaagaagatacagaaggaggaactcaaaaaagtagagcgaaannccgtgatgagttccatgggctgttagatgaacatattncaacaggagagcttactgccaaaactatatggcgtgattatttaatgaaggtcaagggtttaccagtatattcagcaattgcgtcaaactcctctggngctactccaaaaggccttatttgaaggttnctgttnaggnttttgaaaaaaaggggccncgggctnaagtctnaaggtaaaggnttntntttgaaattggggaaagnaaatttttcccnttgggcaccatttattgggtccaagggtntttttcccggggtttttggttccccctttttccctgnggtaggctaagtnggcttttgntgnttctttnaggccangggggggggaaaggccntaacncccggggcttaattttgttttttgc

SEQ ID NO: 137632 - DNA, 437 bp, Arabidopsis thaliana columbia
  unsure (1)..(437): unsure at all n locations
atggagctcttgaacacgaaaaagtttcagtctttcaggtatataagagaggaagagaatgacttgttgatcaagaaactaaccgaatccgctctgaaaaaatcaccggtgaatctgaagaagacccttttcacgctagtcgcgagtatcgtgtgtaggctcgcgttcggggtgaatatccacaagtgcgagttcgtagacgaggacaacgttgctgatctagttaacaagtttgagatgctagtcgctggtgttgccttcactgatttcttccctggagtgggttggcttttagncccgaattctnaaggtcagnancantgncacttatncaantgtttttntttaggaacctttnannaattttttttcccaaaaacggggccccggtngnccaaattttancctngggggccaaagtttttngggaaccccga

SEQ ID NO: 137633 - DNA, 416 bp, Arabidopsis thaliana columbia
  unsure (1)..(416): unsure at all n locations
tcctcactcctcagctcctcaaatcagaatgantcaatccgcgcaaaattactttnccgtgcaaaaaccttcagagacttcatcagggccgtacacaagtccgccaccaattggttatccgactagagatgcggtggtgggtgatcctccggcagcagcagtggagacaaactccaagggcgtcaacctcgaaggcataatgagttgtatcttctgctgcggcctatgctccagcttctgtgagtaaatcagcatgatgagacagaagtcgttgcccaaacctgaaaaacaacacgtggttagaaaaatctttatatatatatatatatntatntatttttttnttagggnggcggtttnntntggggttttccccngnttttaaaaggttntnttnnttccccngtttaaaaagg

SEQ ID NO: 137634 - DNA, 384 bp, Arabidopsis thaliana columbia
  unsure (1)..(384): unsure at all n locations
ggtaaacggatntttttggtncntcgnaccgtaagcttagacgacataaagctaatcaagaataccatgaagatgactgtcaacgatgtagtacttggagtcagtcaggctggcctctcgcaatatttggacagaagatatggagaaaagaagaagaaggtaggagaagatcaagattctaaaaggaaagccactgatatncctaancgnataaggctacgatcagctctacttgttaacttaagacccaacactggaatccaggntctagctgatatnatggctaaaggttctacgtgtngatnggggaaatttggttcggctnacaattgtcttttcccnttttcctattcgggattaacggngacggtcccnttacaacat

SEQ ID NO: 137635 - DNA, 410 bp, Arabidopsis thaliana columbia
  unsure (1)..(410): unsure at all n locations
tccacagtgtggggaggtcttccctaagcttgaatcattggagcatcatcaagcagttcgtcacgctgtgtcggagttggggccagaggattcagggagaaacatagtggacatcatcttcaaatctagctggttacgtaaagacagtcccatctacaagatcgaacggatattaaaagtccacaacactcaacgaacgatccaacggtttgaagattgtcgcgacgcagtaaggtcccatgcacatgcctctaccagaaaagaggctcggtccgncgtcgacgnaaacggagcttctccgcttccactgcaccacagttttcttnctcccctcggctcaaggnggnttcnnncttncaatttnnttccgcaatccctgnnctgtccgngttttnaaccnatttatccgg

SEQ ID NO: 137636 - DNA, 307 bp, Arabidopsis thaliana columbia
  unsure (1)..(307): unsure at all n locations
gtntttagacacacacaaaaatggctaaccccaacgagtggtntcagttctacaacaatanccaaaccttcttcacaacttctaccaccgcttcaaccgctgttacaaccaccactgccggtgataccacctccatagactctngtntgagtccagaaactggccgtgtaaccaagccaacacgtagaaggtccagagtctcacgtagagcaccancaacgcttntcaacaccgncacttccaacttncgtgccatggttcagcaatacactggtgggtncatncgctatggntttttgggtcccgg

SEQ ID NO: 137637 - DNA, 476 bp, Arabidopsis thaliana columbia
  unsure (1)..(476): unsure at all n locations
ggaaaccatgtntgtttcagcaatctttggtaccggaatcgtcaccgttnctgcttctccggttctccgccaatttaaagttccaaaattgggtaatggaggaggattagggatggtgatagagtgttcgtcgaggccacagaagaaatcgacggctcatcacaggaagacgaggccgaagaagactcagccttggnacattaagagaaagcctactgtttacgctcctnttcctcctcttccggcggaatggagtccgttcactctcgcttctaacgacggtggtgctgccactgctgcgggngatttggtttcaaggcgctgcctagttggtatnanntatctcctgatttggttgtaatctagttttnagaactttttgttngttggttanctgtggtttttaaagtttttcntanntggttttgntngttngggnttngtttggcgtttaaattgggtgaaataaatgggcc

SEQ ID NO: 137638 - DNA, 393 bp, Arabidopsis thaliana columbia
  unsure (1)..(393): unsure at all n locations
cagagagttaagccttgaagacgaagagataacgaattggttgttgatcactcgctttataaatctntnagtttcttgctcacaccaacatctctctaagcttctccttctaccaatctaattcctctcttcagcttcttgtgttgtnacgcatactcgtcgcagtcttgagatatggccgccgcagtttccaccgtcggtgccatcaacagagctccgttgagcttgaacggggtcaggatcaggagctgtatcagccccagcttcaaccttnnttnggaaagaaagttgtaactgtttncgggattcgcacagaggcaccaagaaggtgcaacgggntcattcnaagggtgttgggctttnttaaagnngggcaaanaaancccnttgggg

SEQ ID NO: 137639 - DNA, 440 bp, Arabidopsis thaliana columbia
  unsure (1)..(440): unsure at all n locations
atccatttctntttcttcttgactctaccatcgtttctctaatctccgcaactatggcttcatttacgaaaacggttttnatccctattgcgcacggtacggagcctctagaagcggtggcgatgattaccgtgttgcgtcgaggtggtgctgacgtgacggtggcgtctgttgagactcaggttggcgttgatgcttgtaatggcatcaagatggtcgctgatactctnctctctgatattaccgactctnttttcgaccttattntgctccccggaggctttcccggtggcgagactcttaaaaactgtaaatncttnaggggnacatggtcaagaaacaanactctttgatgggnccgactttaacgcannctaataatngttggtggttcntgccctttggctctttgggtaantttggggngttactttgnatgg

SEQ ID NO: 137640 - DNA, 363 bp, Arabidopsis thaliana columbia
  unsure (1)..(363): unsure at all n locations
ggacctggccngaactncctgggnctgcccactgtgtccngggagtttcacggattatcangtttcatgaataaaaggacagcttatcaaaacaaaccagcaaaatatactaatcagatctctcttgttaaagaagcaaaaaggcgaatctagttctaaagactcaaaaggaactgctgaagatggtcctaaaaagagggctgcaaatagagctctngacgacagaagctcagctaaaagagctgctaatgcatctagacaagaaggntcaagcagtcgcacaggcgaaagngactttcagtctttgaccgttgagangctccgcgccatgctcaaggngangggccttncaacaaaaggnng

SEQ ID NO: 137641 - DNA, 275 bp, Arabidopsis thaliana columbia
  unsure (1)..(275): unsure at all n locations
gttttccttttccccaccggaaaatctccgactaatcggcgtgatgaacccgaaactgcaaaccgttaaccgaattcggntcttagaaaaaccggttcaccactctntactctatctccnagctgtgtttctttttattccgacttaaaaaaagcttcaaatttatccgatttcgaatccattagagaaaacacatttttttntccntaaaagggntttttttttgaggttgtgtgtttatntcngggtctgtngcaaaangtcggacgngaccc

SEQ ID NO: 137642 - DNA, 414 bp, Arabidopsis thaliana columbia
  unsure (1)..(414): unsure at all n locations
tacaacatggagttgtggcaaacatccggacatgctgacaattacaaggataatatgtttacntttaatattgagaagcaagagttcgggctcaaacctatganttgtcctggtcactgcttgatattccagcatagggttcgctcatatagagagttacctatganactggccgactttggagtgttacaccgcaatgaggcaagtggagcacttagtggattgactcgtgtccgacggttccagcaggntgatgcacacatattctgtacaacgggtcaggttaagggagaagtgcagggtgtgttggagttcatttgnctacgggtacaaagtttncgggggtttacctnttgngnctaaaacttttnaacgggggcccacngangtanccnntnggggtttttggaaaca

SEQ ID NO: 137643 - DNA, 425 bp, Arabidopsis thaliana columbia
  unsure (1)..(425): unsure at all n locations
ctcatcttcaagccatctccgatcatcatcagacaatggcagcagctatggcaacagcaaccaagtgcatgtttctaaacccatctcctcctaaactccaaaaccaaaccaaatccaaaccattcatctccctaccaaccccaccaaaaccaaacgtntctntcgccgtcacaagcaccgccctagccggagccgtcttctcttccctcagctactctgagccagctttagccatccaacagatcgctcagctcgctgcagcaaacggcagtaggcgncaaccgtggnttagntcttctncttncccatcgtnccaggcattgcatgggggcttttacaacattcttcaggcagtntttnncagggtaaaaanttngtggggtnaagggatngttntttgggttgggtttntggggggtttttaa

SEQ ID NO: 137644 - DNA, 505 bp, Arabidopsis thaliana columbia
  unsure (1)..(505): unsure at all n locations
agttaaaatgtcttgctgtggaggaaactgcggatgtggatctggctgcaagtgcggcaacggttgtggagggtaagtctccaacgtctcgtttgtatttatattttccggtgaaatcgttgcatgcaagtatgcaacaactgtgaatcgatgatgatatcttgttttgatgaatggtttcttggagattttncttgtaaaaaagatacaactcttttgaatttacacgatctctgttttcataggatactgatgggtttttnctttcgattgttgcagttgcaaaatgtacccngacttgggattctccggcgngacaaccacaactgagacttttntctttggcgttgcaccngcgntgaagnatcagtacgnggcttcaggggggggtaacaacgctgagancgatgnttcaagnntggnncttacttcnagtgtntnccttcacctcaagtnaagaggccttttaataanagggtaatcggccccttaataataaagtttg

SEQ ID NO: 137645 - DNA, 181 bp, Arabidopsis thaliana columbia
  unsure (1)..(181): unsure at all n locations
tttcatcctctgtcgacagtactaaaccttctccttctaantctcctgtnaatctntcccttagtctcacatttcctnctactgctccacaaagagaagcaagacaagattggccaccgntaaagtntagattaagagatacactaaagggtcgtngtcttcttcgtcgtggtgatgacac

SEQ ID NO: 137646 - DNA, 129 bp, Arabidopsis thaliana columbia
  unsure (1)..(129): unsure at all n locations
atcgccattgttgctcgcntagctctcgaaacgccactaattagcaaaacaacatttaaagatatctngtttggaggactttggacaatcgtnccgctactgtncatttnctctctctttgaagttttt

SEQ ID NO: 137647 - DNA, 181 bp, Arabidopsis thaliana columbia
  unsure (1)..(181): unsure at all n locations
ttggaaatacagtttaaggtctcggtgttgggtcaaatgcgaaggaatgcatcgncctcgcngcttgattgcatcgggaagcctcggtgggattgcnatagttncgggaggaactgatatnaatnggaatatactagcatcagctgagctttatnattctccgtcagggagatgggagatt

SEQ ID NO: 137648 - DNA, 143 bp, Arabidopsis thaliana columbia
  unsure (1)..(143): unsure at all n locations
tgttttcgaagagcttctngttntgacaaagcaagaaacaaccgncaacaacatcaacaatctgagctttaatggcggatttantcatcatcatcatcaattcttcccaaatgggtataatatggnttacctctgtttcaaca

SEQ ID NO: 137649 - DNA, 165 bp, Arabidopsis thaliana columbia
  unsure (1)..(165): unsure at all n locations
atccttattgatattcttccaactgcnatttcccgatcccaaatttgggttgattgaattctaaagtttctatttnaaggaaattttnatccttttnaatggcngcttacgcgaataanctccggttggcacgacttggaggaacaagttcaggtgtaaacctgt

SEQ ID NO: 137650 - DNA, 194 bp, Arabidopsis thaliana columbia
  unsure (1)..(194): unsure at all n locations
ctcaccggaaacttcagatcgagctactgcaatttgcggatcgtntttttttttttccntcaattcacggtgtatttatctngggagaagaagaatggatactttcacggcggaggntctntcgacgatcggcggaatagcgacagtatcgctccttcacttcggtttatnccgcnggatttggctaccttttt

SEQ ID NO: 137651 - DNA, 141 bp, Arabidopsis thaliana columbia
  unsure (1)..(141): unsure at all n locations
aaggttcatggagaatggtttctatacacaggaaggagtagagggagacatttcgntaacgaggatcaggagtttaaagacttgantgaagctttaanagttagttncgaaatggggtatccagttcgatttgtnaggtct

SEQ ID NO: 137652 - DNA, 138 bp, Arabidopsis thaliana columbia
  unsure (1)..(138): unsure at all n locations
ctctttcttttccanatttcaattccngaggctcgaaagaaaaccgtaaattttttctccnttcactcaatcaaccaaagatgcgtgaaattttncanatccagggtggtcaatgcggtaaccagatcggagccaagt

SEQ ID NO: 137653 - DNA, 183 bp, Arabidopsis thaliana columbia
  unsure (1)..(183): unsure at all n locations
ctgtgatccgtttcantgctaataatccaggtgcntggnttttcnattgtnatatcgatgttcacttaccattcggactagggatgatattnttggttaagaacggaccgaccaagtngaccaccttgccaccgacaccaccagatcttcccaaatgttaagcaagataaaaaaaacatattt

SEQ ID NO: 137654 - DNA, 189 bp, Arabidopsis thaliana columbia
  unsure (1)..(189): unsure at all n locations
ttttcagancgggctttcgggctttnaaaaactaatctttccatggnctatnatgttggccttgccaagagtagcagcagtagtcaggttagatactagaagttgtggttttaatttagggaaagtaatttattataacangtaaacgcaaatncagataaataacaatgttttaatttntaaggttag

SEQ ID NO: 137655 - DNA, 830 bp, Arabidopsis thaliana columbia
  unsure (1)..(830): unsure at all n locations
ttttttttttttctttttttttttttttgatggggcagacaaacgtgggtncctaatcccctacttaaacttccttttttgttctaatccaagggaaaatattaactcgtgacattattatccaacaggaatcttaacctattccccgcggtcaaaacaccatcgatcagggcgggagtatgaaaacactgcgcactctgacaaaaacgcagttaccaaccccgtcgattgtttccaanaaaaccccttcttgtaaaaagaacttaacctatcgttttttaagangggcccggcatgaatagggtccgagtnaggtaacgcgggacatcaagatagcgggattctncccgaaaanctcancccctcctaacncccgttttcgtntttntgnaaatccggcggtaatgattcccccttgtgggagtatttctccctgggctgcncgtgtttgaaatccgctgcncggccacccgccgggcntccgcgaagagggtttgattaccctgcgaacctggacctcggtggtgtttgagtgtttcgccccccggggggggggggggtcnacctctccatctcngtttancccaaagnaacgcgtccnanctctncnatcncaaccccgccncnngntcgntncnnnccncacccgancnggatnattnccccccggggtgatggaaatagncccccaccncnngnantnncccccccccnnctnattggaaaattttatacctnctcggaaanacccnccccangngccccgggcnggntggggngggccccccccccncaanaaccttncngttgtgttcttnaaaaaaaaactc

SEQ ID NO: 137656 - DNA, 740 bp, Arabidopsis thaliana columbia
  unsure (1)..(740): unsure at all n locations
tttttttttgggnaaaacaattttccttttttttatttggcccaaaataaacatttttttacaattttaaagggggaaatgcccttttttttaagtaaaaagtaacctaccaattgtgggctttggctccaattttaagaatttttaagaaggggtaaagccccgttaagctccaagaagccctgggtgttttaaaaccttggaatgaatgcaagccaccttccccccaggggccctttgcccttgaaaaatttttggcttgaatttatgcaacctgtgcagggnaaaaccccctttaaccccccctgaaaaaaaaaaacgtccaacccggggttcagtgaccccggcgcccccaagtgggggnaccccttnaaaaatacntccaggggntcngggaaggccncctttaaaaatnttttnnttnctccaannanttccncccaaaccccntttaattccgggncccncctaaaaaaaaccgtnantcncttccaantttttnntnnccgnccccnncaaaancttttttttttaaaatacccccntttttttttttntncaaaaaaancccccccttttgnataaanaaaaaanccccccntnttccaaaaaatttttttaaaaaaattttnttttttnggttttttnttaaaaaccnccccctnccngaattgggtnaantttaaaataaccccttggtttttgttttaaaaaaacnccaatttcttttttntaaaaac

SEQ ID NO: 137657 - DNA, 458 bp, Arabidopsis thaliana columbia
  unsure (1)..(458): unsure at all n locations
tttaaaaaaaaaaatttaccaactggtttagcaaaaatacatttantaaanttaggaataaactccaaattgtaattgtttgattaatgatttnaaanccaaaaaactaaaacactatttaaccnccactaactggtttnctaattntttaacttnaaaaantaatnccttnggntggatcaacaatttctctgttttangggcttcaccataccccncaatnaacantgcttcanctcaaccanaatcctttncccncttantttgcaaactaagcnatggaaacaactccgctgcaactcgtctgctatcgtcctttgtgcaactnccactaacantttaaaaatnccncncccataaaaatgcggaaaccggaataacacaaaancctgaagcaacanttnttcctatccataatccatatccaaatcctccactataccaaccctnttttccat

SEQ ID NO: 137658 - DNA, 774 bp, Arabidopsis thaliana columbia
  unsure (1)..(774): unsure at all n locations
tttttttttttttgcagatttgttatacgtttttatttcctttgataaagactgaaatangtattgtcacagtagagataagagacgttgaaacatgaaaccattagtaaagattcactgaacatcatttactttcaanaactgctttctcctgattgtgaatcggtaagcttggtgctgaaatcccaaaccttctnggccaattctgtatctttgacaagtggtaatggtttagcaatgttgctatctnggaantatncccctgaaactcctgcaacttgaggattcaatgccacatagcatnttgttgccgcnccctacaaantcgtatactcagacnttataaaccacataacggaacaaaaccannttttatcctttaagcaagatctganaaaccttgtgaccagtttgtaagtgatnggttaccagtgtgaggcttcgaaattanaagcatacctgtggaacanacttgagttatatatttagccactgcaccaaccgctacagccaaatnggggttgangtaacgcccgaggttagtcataatggctcctggatnaacgaatttgctgttatattgacccatcttccttcagttgctttgtaacccgttggcgtgcaacacattgcanaatttanattgtccataagctcccatactactgtacttgactgtcattgatcttatcaaaacaactcctctggatacaaaaccgatanctctgatgangggttacaatcctcctncncgttgcttcacgtgatgtgccc

SEQ ID NO: 137659 - DNA, 891 bp, Arabidopsis thaliana columbia
  unsure (1)..(891): unsure at all n locations
tttttttttttttacaaanaggtgtgccttagatggcatcgtgaaaagagttggttagatgcaaatattacgggtggtcattgtaaaaacaaataggatgtgttttctcacacccaacgttcataaaaaacacgagccggaaactagggcggatgtccctctgtgtcactattgtgtaaggagcagcgactccaaaatgagtgcagggttaggtggggaggggtcttatgctccccccactttgtagggttgccggcgggcgccggcagaatagccactttcataattcatccnctggatggacaacnacgngggtntcagaaggttgtttcgggtttggtctccgcccgggtggctagcatggttnantaanggnttctcagattttttggttcccctggggtcagggctcttnatgtggcaaanacntctccntgtggaaggttgcgagccgggcaggggccgcaaaggggcgcctcgggggccgcgttctcncccccanatccccggatattntccccngccctgtgtatgtgctcgcgccctctctgaagggacgggtgcttanccatttttttangtcacctcttcaaactctcagnttgacgnngcatctagtttccttccccgnggcggcctgctttctcttctccgggttttccccgctggtanaagtgatataacccccnccnggttttatnntccgcagaanaaccncngnccnccccgngngtgntgtcctctgcggacctcccccnngaaaatnttnttnncacanttttttnancccccttncggnntnaaanaaaangaacccnacanccngggaaatctntgnngtngggtnggtantccggntnggcnaaantttaccccnnnanngggtcccnc

SEQ ID NO: 137660 - DNA, 215 bp, Arabidopsis thaliana columbia
  unsure (1)..(215): unsure at all n locations
tcataantgcactatatatcttgtctggaaagatgaacaaaatggtgatgcttacaccatttcatttttgtttaaatgttttcgttcgtgattatagttaatcctttatttcttctcgtcttgttgtggcatctgggactaatgattttggtaactcttacttgtgaatatagtcaattgtggatgagttcatgttaaaaaaaaaaaaaaaaaaa

SEQ ID NO: 137661 - DNA, 835 bp, Arabidopsis thaliana columbia
  unsure (1)..(835): unsure at all n locations
ttttttttttttttcaaaagtgatggcatgaggcatatatacatacatgaacataaaacataccgtgtcactttgatgctactacatacatgaccacgttacaaaaagagttagcttcctgtttccgcaaaagcttagaaatatttagccgagtttcttaagttgtaatatgccagcccaaaaaacaacaacatcaaccttctgccttttgaaaatgctcttgggttaatcnatatttataaccgcctcgtgtgacaaaccgccnacacagggttcttgtttaagctcgatgaattctgcaatgatcctgggaatttcttttagtaaccnctcctgctctganggtttctccaaaantnctctctgctctaaatacgcctctantgtaagcaaatggatanagttagggtgtttcaaatgtaaccatgtcaaatcaccatgtgnaaaatgtgtgtgcttctgtgtcgaanctcaaangatattctcttctccatccttnctcattagcacngttnatgccncnccngcaaaatnttaagctgccttgcnanccnatgttttgttatatnacaanggagagccttntccttctgccccatctccnaaacanttgttgtgtctcanaanaccatcnccctttttgcntcaaatctttaggctcggcctctcctgngtcagaancaccccagctgggaggtgcccacaccncgggccttcctggatcnatgaaagaagcacncccccccttggntcntcactcntttntaatgccgttncncgctatattgntctnccattnttcctggggcttccgtctctttccatngnccncccc

SEQ ID NO: 137662 - DNA, 830 bp, Arabidopsis thaliana columbia
  unsure (1)..(830): unsure at all n locations
ttttttttttttttattggagctggaattaccgcggctgctggcaccagacttgccctccaatggatcctcgttgggggatttagattgtactcattccaattaccagactcgaaagagcccggtattgttatttattgtcactaccttcccgtgtcaggattgggtnatttgcgcgcctgctgccttccttggatgtggtagccgtttctcaggctccctctccggaatcnaaccctanttctccgtcacccgttaccaccatggtnggccactntcctaccatcnaannttgatngggcaaaantttgaatgatgcntcnccngcacanaggccatgcgatccgtcaanttatcatgaatcatcaaancaacgggcaaancccgcgtcaaccttttatctaataaatgcntcccttccataantcggggtttgttgcacttnttacctctaaaattactacggttatccnantnttatttaccatcaaacaaactataactgatttaatgagccattcgcagtttcacagtctgaattcnttcatacttacacatgcntggcttaatctttganacaagcatatgactactggcagggatcaaccaggtancattcatcgatcacggggaattccccgccacntcctctcaaacgcnntngaaaaaaaaaaggaagangtcttgaccgtcctcttttgccgaaggaaagataactttggggggatgatcacttcaatccccntcaaaattttncccccccaaaantttccccccccccnntccncnttncaacnngcccnttgcnataannanagttaaccccccncc

SEQ ID NO: 137663 - DNA, 346 bp, Arabidopsis thaliana columbia
  unsure (1)..(346): unsure at all n locations
ttttacttttttttttgtgcaatacaatatttccaaatatatgtccttgacaaaactgaactaaaccggttacatattgaaattctaatttctgatcatanaacacaattgaagacgccgtccaatgtgagcanattctcgtcggaacaggacatccaatgaacctgggcgacgtgagctgaatgatgatgattttccaagatccgctgtcatcccaccactatatagccgttttganaaggaaaaaaatatatgatattgtcattgtcgaggaaatacttgttcgatcgtgagagagagaaatactanggantgaaaaatagaccttcgatggtggctcaccttc

SEQ ID NO: 137664 - DNA, 779 bp, Arabidopsis thaliana columbia
  unsure (1)..(779): unsure at all n locations
ttttttttttttttattgagagagancctttcacaatattgtgttgcatgtgtgggagaaatataagccattgtgatggtngtctgntagagaaagggttcttcgagccttggnganaagacaaaggtncctctctcnntgaaaaaggggctgatagggcgggtacagctcgtggagtgggactgtgtaattgaatactcacatgatntgtctggccccntactttttttttccnaactcnccgtgaatntgtatgtgggttttgtaaaacacccaanaccgntngcattgtantgtcccntcactggagtntccgcngngcaatcntnacngcttcgannacnctctggcatctcattaaccgantctccccccgctcaccgngnactcnnttcaanagcttcctctcngcttctctccttcnggtgccggccaanggnttttncntncncatcnctcccttgnntcccggttnntatctcataggatatctccccgtctttcgggttctcgaattctacttgttttcttaatatcggctcaggttctcgcagtgtttttcataccgatatnccaaatacgcggctctaaggtttcggttncgaagatgttngtaccaactacntttccatnantantgcaacgtggtgtatatcgggggttcacntgcatccctttgccatacggnnatttataccatttntggctccggtcatgatctcaaaagttactcnncgnttttnggcctccatctactgaattngttctcccccgggacc

SEQ ID NO: 137665 - DNA, 387 bp, Arabidopsis thaliana columbia
  unsure (1)..(387): unsure at all n locations
ttttttttttttttttttttttttttttttttttttttttttttttttttttttgggtttttttttttttttttttttggcttttaacgcgaatgccctaaaaatgataaaacaactttcgcgtacgccgcagtgcgcgcaaacaatgtaaatgcaacaacttgttttttttccccgacgcagaaacccgcttgttttgtgcaaaaagtaaaagcgttttgtgcccattaaaaaaaatttgtgttttacaantcttgatntaaaaaaaaaaaanttttnttnanaanttcttcaacccccanngggannatnntcaaatacaantttctnaaantctnccctanttcncccatccnnattctnctnccncncaanaaatttccncna

SEQ ID NO: 137666 - DNA, 481 bp, Arabidopsis thaliana columbia
  unsure (1)..(481): unsure at all n locations
ttttttttttttttgaacttgaattaatactttgttagtgaataatattatctcttagaggataaaactgatacaaaaacgtgaaaaatagttaaccgcgtgtaatatcacaggaacaaaattcacacggggctggtagctgantcatcaaatctacaaaattttgatgaaccgttctaaacctggatgaacggtgggacaaacnttgttggctcgtaccaaaacggcgacgcgggatnttgccatttcttgaaaactggtgtcttcttcacctcttcttccactggtatctcagtcttgttctgcggnggangaacatntgattggtcnaaggatgatnttngaaaaggagcnancggtgaaagganagggatccccacnttccanttactaaaaaacgtnggtttgatcattaaanacgggagctcgtctctgtagctggctaanttgcctctcgttactggccgcgganctgcttntt

SEQ ID NO: 137667 - DNA, 441 bp, Arabidopsis thaliana columbia
  unsure (1)..(441): unsure at all n locations
cgtttcccaatcccggtggggggaaaggccggggttcccccgttggaccccgttaggggggaaagntggtcccccaagttccgngtngccctccccnngcagntcccttttcccgntcntaaggccgtgcaggtccnncctggatcggagnctcccaagcttgcctntggaggncccggggatcctcctggggccttagctgcccctgntggatcctcttagccttagccctgggatccaggagggagccnttaaggagtgaaatgaagatgggtttggggattgtatcgaatttcgatttgaaatttgtggtctttttaatggtgttttgatgtgagaatataaacttgcgttgatgatgctctatgtcttcgtatttttatgttatgatcatataaaaaagtaactgatattttcttattaaatggtttgtttctaact

SEQ ID NO: 137668 - DNA, 353 bp, Arabidopsis thaliana columbia
  unsure (1)..(353): unsure at all n locations
aatatccntttcganactattngtgtaagtttnacgttgaagaaacnaaaagaatcaaaggtcngatatattcggcgatgatttcttatccaccggaatctgtngctcaatatggcggaggttnntgtcggaaagcttaagatttatcctccaacacgtgtatttgcaaatccagctancgncacgtgtctctgggtggantcacgaatatcccatcttcttctttaggcggtgcccttgttggactcgttttgggcctcaagtaatacatatgtaancctttgtttgtaagaacttctgttattttggcttngtatagtttggtttatttaataaagcaaatcacttatgag

SEQ ID NO: 137669 - DNA, 363 bp, Arabidopsis thaliana columbia
  unsure (1)..(363): unsure at all n locations
agctngagaaaacntttnctnccagagattcaactncncaagangatnaaaganactccntatccggataanatggagatggtatttcatatactctgtctttatcaaaaggagatcacacntactcgacatcgagtcttgtgntggagtgaatggtactgagctttaccctgatgtcaaatacatgaccgtgagcgagtttcttgatactcttctctagaattataaaccaaacagcaaagggatcactctcatttttcagagtttaccttttacacttccaaaatttctctgtttttgagggctgaatcaatctatctcatgtagcactatctttaccctattgatctgagtttcgncctt

SEQ ID NO: 137670 - DNA, 424 bp, Arabidopsis thaliana columbia
  unsure (1)..(424): unsure at all n locations
gcatngggccacnttcataatggnttgacattttttcntnatccntctntacgcaagncnaatgaacgaaattcaaatgcaanctcaaaggcctccaagctcgcgagtgtttacaaaggagaancagagaagattctccangtgaagagagccgaagcagaagcggaagccaagtacttaggtggtgtcggtgtggctagacaaagacaagcaatcacagacggattgagggagaacatattgaacttttctgacaaagtagaaggcacatccgccaaagaagtgatggacttgatcatgatcacacagtactttgacactattagagaccttggaaactcgtcaaagaacacaacggtgtttctcccacacggtccgggacatgtgagggacatcagcgaccagatacgcaacggtatgatgg

SEQ ID NO: 137671 - DNA, 487 bp, Arabidopsis thaliana columbia
  unsure (1)..(487): unsure at all n locations
cgcatctttncgtcnctccncttngggctgtttgaggancttggcctcttttccatcncagngcctgntcnccaactgcggaactcgggttgatggaaaangttctttcgacaagtcaggagccgattatcttacgagcaatttggtgcatttcttggaaatgtgaaggatcttaacgcccacaagcaaacaagagaagaaacacttaggaaagctgaagagatatttggaggcgataacagagatctctacgtcatattcgagggcttgatcacacgcaacgctcactaagagtttggcttcttcagttacacaaagaacttatatactcggaaactcaggattcatcagtctgcaacattcaatttcttttgtttccttggctgtcaagtaagaccaagtaaaactgacaatttgattgtatcatttgtgctctctcgtgtatctatctatctctctcttcttgaataaattacatttcatcatc

SEQ ID NO: 137672 - DNA, 488 bp, Arabidopsis thaliana columbia
  unsure (1)..(488): unsure at all n locations
tcccccattcggatcctggaacctngttaaaattgccttttccgattncccttgccaaggggggttggggaacttaaggcttcntggacctctggcctgcancctnttgnggggaccgnnaccaattccgctcatncangttcacacacgtntctatgnccaggtgtntacataggcaacgtgaaagtgttagtgagggccacagtttgggaatggacagctcaaaggacattgcaatgaagctgacagttagagctgaagacgtttctgtcgccgaggccattcacgagattgttgccagcggctaaaacctcttgcgtttcttcagtatcagagaatgtcatctattcctgctgctaaacctcaaaaatacatcaactattataaatagcatagtattactttctttcttttttccttgcattattactgtcaaatacactatggaggttttctttttattttatgacggtgctttttgatttctc

SEQ ID NO: 137673 - DNA, 377 bp, Arabidopsis thaliana columbia
  unsure (1)..(377): unsure at all n locations
ccctatgcagctggcttncatggtgcggcggcgatgncgttcattttcgccccccntcggaggcngtntgcaccaaagctgaggagagcagcagccatccctttgtgggtacatgnggaaccctcccntccgccaatacgttagctcccctaacgcaaggaaagtctccaacagttgcaagattccttccccaagctgttaaggaaatgttaatcatgattaattagtgacaagtttcgctgattatagtggttaatgctggtcttatcttcgtcagtactacttaaaataataaatgagtgatgatgattgatgattatcatcatcatgcttgaatgttatgttntctatcttataaaatatgaaatatactttng

SEQ ID NO: 137674 - DNA, 368 bp, Arabidopsis thaliana columbia
  unsure (1)..(368): unsure at all n locations
ggatccccnccatttcccgggancttgttttccnttccggtccgaaggcccggtttttggntcccccttaggnttccgagagggcctccgcgcaaatgttaagangcccagncacggactttgagttttacaagtgaagagaaagcagaagtggaaccagattatggctgttgttaaaattccagtgtgttttgagaattattaaggacatggaatcaaatttgcagttaaattaagaactaagttgcatctcctaatttctgtaactcgagttcacatttgtttttagtctatcagctttttacagtttaatgtataagaaaaactggggatggtgtccttagaattgccagagcatggtnataatt

SEQ ID NO: 137675 - DNA, 425 bp, Arabidopsis thaliana columbia
  unsure (1)..(425): unsure at all n locations
tttttccctaggcttgngacccccaggttngattttggggnggccctttaggccttccccccaggaacttggggggaggcccaagggaggttgggnattttgccagncngnttccnngggtncatngccggggttgttcntggggtggttttttnangggnggggggccgtggcctaaggaagctgaatgttggtngccattagtatagatggctgcaaaaaatctctctgtttttanctttacttgaaatgttaacggggctgattaaaatgggtctttctttttatctttttatatttccacaatctctcacgaaagccctctgaatggagaaagtgaattgtagaatgtttagatggtgaaagagagacttgcagctctgtactctttgctttataaaacgatttagttttcttttctcagt

SEQ ID NO: 137676 - DNA, 503 bp, Arabidopsis thaliana columbia
  unsure (1)..(503): unsure at all n locations
cttttaccccattatgaggtgtgatgncgcatncagnaggccttntccggtaccatgtncccagtggtggaccacatgtcccctggatcgcccgacagaatgagcaagagatcactgctttggctccaagcagcatgaaagatccaaagtcgttgcccctccagagaggaaatactctgtctggattggagggtccatcttggcctccctcagtaccttccagcagatgtggatcgcaaaggcagagtatgacgagtcaggtccatcgattgttcacaggaagtgcttctgagttcaaagttgatcatttttcagagaagaagcaccgccagggtttttccgaccatttctcaagccgggtttttaatcttccgttattctgctctttgtttttgttctcttatgttttgaaattcatgccaaatacattttcatggatttatggtaatctgtttgtagtatggtttaaaatctaatgcaactgtgtttttgagtgaataagt

SEQ ID NO: 137677 - DNA, 321 bp, Arabidopsis thaliana columbia
  unsure (1)..(321): unsure at all n locations
tctggntctaaaatnatttncaccagaggggncccggcnttagaaagtntgatntgccaaggtcacgtgtcaanggagaggatcatgttcaattttggttctcatctgttgattcatgatcggtcagataaatgtttgttgtggtatttatgtctcttgtcggaagcaattctgatggggtnccaaggcaacagagaagagaagaaagctttaattgaaatgttcatatgccttactaatccccagaattaaatgtggtggagaaaccanattcattaagtatgacaaacagagaccacattaaacagttacttgacgtct

SEQ ID NO: 137678 - DNA, 496 bp, Arabidopsis thaliana columbia
  unsure (1)..(496): unsure at all n locations
ttgtgaatntgaaggtggtngctggantttcnccnccngtttnaaggnncggttggattgtgctttgganacgntgaaaagcggaagggattatggctttggtataagggttttatcccgacggtttcgagaccaagcaccgttcacggtggttttggtttgttacgcttgaacaagttaagaagttgttcaaggactatgacttttgaaaaaaacaagagttgaattatgttgaagaagatgaatgatggtggcgacaataagcttctctttttttctggttataattttcttttgattatttgagtagttttaaattgtctcccatttgttggaatagatctatgatatgataattcttctcatggagaagaaagaaagaaagaaacagttcatttccctcattattcaaggcagtgaaatacttagatccgttcctgttaattttgaactatgtaatattcgtttctttttcttgaaagctttatttttagtc

SEQ ID NO: 137679 - DNA, 480 bp, Arabidopsis thaliana columbia
  unsure (1)..(480): unsure at all n locations
tggattcccaggattcnagggtttttttggtcgcccctgtgcttnccacaggtgntcccataatggcggcgatggatctttttgaaggacgtggtttggnntgttcangcaaatccaantgatttgtgcggatttgctgcacctcctgcactatcgaagcttaacgngaaattccccgggcttcatgtatatgctggaattattgatcctgaagtcaatgaaaaggggtacataatccctgggcttggagacgctggagaccgcagtttcgggacagaaacacattgggtgaagtgatacttgtatgagttgttaaactttaacagtcacaatcgttagattatatattgcgtctcttgtactttgtttttgatgtgtgatttcaggttcttgagagggtttcgataaagagtcaaaagttcacaaacaagaaaaactgaattcctcattattacaaaacagagaacaaacttgtcatcc

SEQ ID NO: 137680 - DNA, 502 bp, Arabidopsis thaliana columbia
  unsure (1)..(502): unsure at all n locations
aaaggccagatctttttcattcaacccttttttcagntccgcttcngcccctnttgtcttgggnagccgagttcgnggnttgggctctcagatccatccgcagcnggcgngccattcaaggcaccagatctcagcaatgtgatctcaaagggtgagtcatcgagcgctgccagtggttcaggatgatgaggaggttgacgaggaaggtgttgagcccaaaggacattgagttggtgatgactcaagcaggagtgtctaggccaaatgctgtgaaggctctcaaggctgcagatggagatattgtctctgccatcatggagcttaccacctaaaccaaagtcttttctacttatatgtggtttaacctgagttatgtgccagagattgtccaaagaattcggaaatttttggtttcaatgtttttcatgaagtgattttcgatgttgtatcagtataaacctcataagtttttgattttcagtttgattttatattgaatatc

SEQ ID NO: 137681 - DNA, 420 bp, Arabidopsis thaliana columbia
  unsure (1)..(420): unsure at all n locations
gngagtttctgaatnggttnnganctttacatctntggccncttatgttncgaantctccaagagngcttatgtcnacttccatggatcttgattggggaatgtatcttggaaaggaagagacaaagtacgaggaagggaagagttggggagtgaagtatttcaagaacaatttcgagagattggtgagagtgaaaacaagcgttgatccaacagatttcttctgtgatgaacagagcattccgctactgaaatccgttgacgacatctaagaatatcctttgaagtttcatgtacgagtccttttcactgtgaaatcatctgtttttgtttgaatagttatgcttcaactgtgtaacttttttctgttgttgtgacatatttgcgtacgttgaataaagatttcatggtttttatgttt

SEQ ID NO: 137682 - DNA, 369 bp, Arabidopsis thaliana columbia
  unsure (1)..(369): unsure at all n locations
ccccttttgggaanctttttcccccttnngttcccgttccgnatttcccggttngccccccgggttcngacntaagcttnccttnggnacctttccctggaggtttggaaggcgaatcgctngcactngcatgcggaccaccgccctatgattcagtttcgttgcagccaaatctagagaagatgggttacaacgtgaaggaggatctcttaatcttctagatttgctcaagttctgtgctattggaaattcgaaagttgataacaagtatcgcttatgtgtgtatatacatggttatttgggcacttttgttatagttgttgtttatcagagctccaaattgtatattgtataaaattgtgtttaatt

SEQ ID NO: 137683 - DNA, 286 bp, Arabidopsis thaliana columbia
  unsure (1)..(286): unsure at all n locations
gcccaatgnatcttctgaacccgcngncttccgtggcaattgttttcaagcacgttcatgagggcgtattctcgagtatatgggccaatcaangatctcctgtctgcagaaaaccctgctaagtatagagactgcaccctcaccgaattttcaaccatcttcagctcaaaaacgctcgatgctcctaagttacaccatttcaaaatctaagacatttgggtttagnccttttttgtctnctaatctatcaaactctctcggtacacnatgaaaactggtncttcat

SEQ ID NO: 137684 - DNA, 427 bp, Arabidopsis thaliana columbia
  unsure (1)..(427): unsure at all n locations
cctggatntnctgagncggctaaaaggttgggtttgagntagttgaaggagaagnatctggcgantcccaccgntgacccgtgtgnactaggcttaagatggntaggcttgcttatnggaggaatccacattgtggttccagattttgtccagcggttggagttgctcctaaaggaactgttgatgttcatgagatgttgtttaagactgctgattatttgaccagaggaggtgaaaccggaatattctctccgatgcatatgattctctgcagaaaaccggagtcaccggaggagagttcttgagaaaggtagaaaggaaacatcaccggaaaaagtatggagaattttctcaatttgtttttatttttaagttaaatcaacttggttattgtactatttttgtgttttaatttggtttgtgtttc

SEQ ID NO: 137685 - DNA, 385 bp, Arabidopsis thaliana columbia
  unsure (1)..(385): unsure at all n locations
ctggggccatctcccnttccgcttttgttgncccatggatgtttgcaaactgtccaaagctgagaaagcttccattaaatgctacaagtgtcccattngttgacgaatttcaaatatgtatgtatcctccaggacaggganatgagcttgaatgggaggacgangataccaaaaatcgattcttgcctttaatcaaaccgtactngtacgtcgtcgactaaagatccattactcaggaatgggattcctcaatgtcaaaaatcagnattcacgcttcttcttcttctattgctttatctatcttcttgtngtgacggtgtgttgttcatttggattgtataaactgatttgcattctgatatctttgangtgtgttgtgctgttc

SEQ ID NO: 137686 - DNA, 463 bp, Arabidopsis thaliana columbia
  unsure (1)..(463): unsure at all n locations
tttgncccttccgngtttgccccgcaggtggagatnagttccgagnttttnacgtgttgaaaccggaccgnttggngaaagcttcgnncngtactcgggggacggtttaacagtatcagtctcaaactgatgcaagatgccgtcgttgcaggtcaatggtgatacaagatgagagaggcttaatctgtgtcactcaccagtctggaagattgaatcaaagggatgcaaatctttcttaatttcttaatttttatcttcttgggttgctttttttttatgacaccacgattaaagctttttaggcatataaagttgtaagagttgtgtgtttgatatcctggctaatgagcgagctgagtatggggatcaagagagaaaaaccgtgttggcctttggctgtgtgtagatattttgtataatcttgtgttgataaaagataatatcatcaatttttcttgtgatc

SEQ ID NO: 137687 - DNA, 478 bp, Arabidopsis thaliana columbia
  unsure (1)..(478): unsure at all n locations
gccgaaaantggccnaagctgatgctggcctgtggctcctngagagccaanccaaatgcctccatgacgatcagctcagtccgtgatagttgaggatgtacaattcatggtggagaggtgttttgtggactgtgttgatagcttcacacgcaatctctgcagaaacaagaggagacttgtgtgatgcgttgcgctgagaagttccttaagcatacgatgcgtgttggtatgcggtttgctgagctcaatcagaacgcaccaacccaagactgatatagtctgcttttttctgtttggtatttcgtacggtttacgagtccgaaaccagaataaaccggttgtttagttgttcaggttactactccgatactgttttttgaacttcttgtactgtgaaattattttgactatatccagttctgatattgatattgatttgtatttcaatggagtctagagaaaatcatatcatatcaat

SEQ ID NO: 137688 - DNA, 485 bp, Arabidopsis thaliana columbia
  unsure (1)..(485): unsure at all n locations
caaagtttttccnctccgttttggaaacnatcttatncctggggaganntacccngacatctgggccnatggnnccagattttcacagntgnccctntgggctgatacagagacgctggaatggaggaantgggagatgggtttggatcgntggagcatcccggtcctagaggatggtgcgcgtttgcagctggatcacgagatggtaagcaaggtctgttggtttatggcgggaactcgccgagcaatgataggcttgatgatatcttcttcttcactcccaacactctactcaagtgattggtaactaagtatggtttggttttcttgccggtgagaggggctgtgtgaatgttcctttttttttagtttccttttggattggatgaactatgaagatgtgtgatgtgtttcattttcctctgttatttgtaattaaataatcgaaatttttcattaaagaagataacgaataacatcagctt

SEQ ID NO: 137689 - DNA, 335 bp, Arabidopsis thaliana columbia
  unsure (1)..(335): unsure at all n locations
tgcccaccaagnggaaggttatttaccngcacaagcnttaactgganncgctgatggaagccaccctctnnagtgttccnccgatggagtcattagagtttggggtattngntcgttactagtaatctcatcacttgtgctgtcgttgctctctgctatctgcttgttggttttanctatcacttatgtttttatcgacaactcatgaagtnccttgaggtttttggaaggatgtttgttttcttgtcaatctaggtttttgcttctttatcttatcgttcgagatcttggtttttagagttacttctcccattttgtggcaaatgattcccatt

SEQ ID NO: 137690 - DNA, 308 bp, Arabidopsis thaliana columbia
  unsure (1)..(308): unsure at all n locations
ggtctgagatntggcnggatctgctttttcccgaaaggaaagntctgggntcggtatgttctnagacaacagtttgcgaccngatttactagctacggtcaaaatcctgatgttgtgatcttgtccgcaaaggaatcttgttagcatcgaatatggaaagtgagattcgtgttttccggtgtactgccttcatcagattntactgcgcttgttttttccgttttaggccncttcgtttttgtatatgtgtaatctcttacggcccatcagccaaagcctaattcgggangtaatnatatatatatatt

SEQ ID NO: 137691 - DNA, 340 bp, Arabidopsis thaliana columbia
  unsure (1)..(340): unsure at all n locations
tccccnantgannttgaagattnnctttcccanggttttcagaggggggctnaaaccagngatttctcccctttcactcgcnntcaacgcgcatagatctgagctcnccntgcaaattccgtgactggatcttagaaaagcctttcatatacagaagcttcaagactcaatgcacttgagcctacactgatgattctcgccagcttaatgacctatacaattttccaacccctatggcctttttcgctgattgaattcagtgggtttattcatatagtagtaatgtaaatggtatagagatgagcaaaagctatattatatattatattcattagagggg

SEQ ID NO: 137692 - DNA, 458 bp, Arabidopsis thaliana columbia
  unsure (1)..(458): unsure at all n locations
ttattttggggcnaatcngggaatttggncccnggtccgagnctcttttggggacccnnngtatggnccccnggcttggttcntcttcccagatctgagagagnccntnancnccgagaggagtgcctcaagtaaagccntctcgtcaaaaggaaggtttatggtttngtaagatttcccggtttaattacttaattagtcggttaagtggttaagtaagtcgatgtctaatacttaaaatcgaaaacgacgtatctattattgcaaattcggattagatgtgaatgtgatcgattaaatcgatttcgtgttagatcagtttttttttttttgggaggggtttagaggttttttaaaagttggtatatgggatctggaggactttgtaaatgtataaatttcgttttaattaaatctgtaatcttttgttgttatttcaaatgtttaatgttataatt

SEQ ID NO: 137693 - DNA, 514 bp, Arabidopsis thaliana columbia
  unsure (1)..(514): unsure at all n locations
aggttcattccccggaccgttnccttgttcnccagtttatcgcccctttgggnaactgtcccctncngtcccggtccgnattcccggtggccccnnggtccgatggcttctctcaatgctgngattgcatgccggtttttgggaaaactgactctggtatcgattggnttatggaatngccgacgtgagtactccaccaccaggaatgggcgaaatagcaccaacagctgttgactcaaccccgagatgatcgaataccaagcacacttctcaacttctgatcccaaatgtgttacctcacaacactccctaaaatcatatacaaggagggagcaactacagaacgtgtatgaaccaatggcaggtgcgttccatacaatgtaccattagattatgattcatttatcgcctagagtgatgttgtagaggagcaccgagaaactaatgtaagtttaacagagaatgtacttcatcggctgcattggtacactatttgattataatatttttgacc

SEQ ID NO: 137694 - DNA, 483 bp, Arabidopsis thaliana columbia
  unsure (1)..(483): unsure at all n locations
tgcgaccccacgcggagggtccgaagtnaccttgggttaattgggcgtttggttgtgcccaccctatncaagtggaccgntgnccgtntcaacctgtccaatccgggtccgtggattgtcncngttgggttgtgntaaggttttggtaatggtggctgagaaagatgcgttggtgaggccaggnttggggttacgcggctaagcttgagaagtctggttggaaaggagaggttgaagtggtggagagtgaaggagaagatcatgtttttcatttgttgaancctgaatgtgataatgctattgaagtcatgcataaattctcagggtttattaagggagggaactagctttgtgctctctagagatattggaataatttggtactncatattttagttgcgtctctcagtttctgtaatgtttcagtgattggcttttcgcccaaagcaacacaataaaaattgaagatgaaaatattttagt

SEQ ID NO: 137695 - DNA, 510 bp, Arabidopsis thaliana columbia
  unsure (1)..(510): unsure at all n locations
acatgagggcanccgcancctccggttcagcttcgnttgacctgggaccttntggggctctgtgcttttgggntcggctaacgtggttcgcactctcccccgcgcattgccgaggggtacgaaggacgcggttagtgntccggttagggaagctaccagngcttgtncctaccatggccaagcaaaccaacactgcagacatgttagaagaagcagtagaatacgtgaaagttcttcaaaggcagatccaggagttaacagaagaacagaagaggtgcacatgcatacctaaggaagaacaataaggtttgctcctgatttgttttatatttgcttaacggcaatgatctgatcgaaaaattcgaaagatgatcttagcttgaatttagatggatgtcatgttgaaaagtatattatncgataaatggatgtaggtctaatataaaatttttgtacaataatgaagaaagttaaaaagaattaatgaaaacatatattctttatgatatt

SEQ ID NO: 137696 - DNA, 370 bp, Arabidopsis thaliana columbia
  unsure (1)..(370): unsure at all n locations
gatcangaatttncngantncttagntntccttttactaaggangaagaagaggancgatcggtggattgggattatcgatctttgttctctacgtaatctgagcagtttggagatcaataagaccggaaaattgaattctggtagagaaaacaaaatgtttttccgtaaaggagaagttggtgattggaagaactatttgactcctgaaatggagaacaaaatcgacatgatcattcaagagaaacttcaaaactctggtttgaaattctgagtttgtgcattgtaataataagactacctcttatgctgttgttctatcccttttgatgtacaatgattacccataatggtctttgttttcgttcccc

SEQ ID NO: 137697 - DNA, 390 bp, Arabidopsis thaliana columbia
  unsure (1)..(390): unsure at all n locations
cccccccctnggcaccgggttnacccccgtgtgcnttttcgccgnaatgcttntgtgccccaagggctctgatcgtcatcggtcgttgatttcgaaggtgggatggaggaagagatctcngctgttagatctagatcttnattgcctcctccatcggaacaggcctgagcttttaacggtgtcgtttcaattcgaagcgcatgcgtttcttcttctttttgagctgtgaaaattcgttttctcatagtttttcctctctctctctctcagtctaaatttattaccagtttttagaaagaaaaaacagattaaatctgagagagaaaaatataattttagctgacatggatcgttatgtacatattattacataaccggagatctgaactg

SEQ ID NO: 137698 - DNA, 470 bp, Arabidopsis thaliana columbia
  unsure (1)..(470): unsure at all n locations
cttactttnttaacccaagcggtcaggtccgatccccttttgggntaaagcncttcccnngngggggntaattccctttcgcccctggtccaaggtttttaggggttnccaatttggtggccccccagtatggncccttccaattaaccaattatctttccccaagttgctgggaattatagcaactagttaaaatggttaattgatgtttgtccttttttacccgtgagcaaaaacaaaatttcattgttaggataagttttccggcgatgatcaattgaccggagttgagctctttgtgcgatggaggttggtgggataacacgtgtcctcatacgtatcgttagacacgtcctttgaagcatatcttcttctttggttttttgcttgggcttctttgtaagcttttgttgtaattggactggcttgttgggcttgtaaaagtttatcaataataaaacagttgagac

SEQ ID NO: 137699 - DNA, 428 bp, Arabidopsis thaliana columbia
  unsure (1)..(428): unsure at all n locations
caaagtccttccaggtntttggaaggctggantcnttntgagccngggaaggagatgggattnccnagngngggggaggttgagtttagcattaaggaattgttggaaggagagggancaagggntggaggaagacgtgaagaaatggagagacttggctgtcaagtccactcaatgaaggaggttctacggatactaacattgatacatttgtatcaagggttcagagcaaataggtnactcacatacagtagcaaaggtccttctataatatcttgttttgtacgtctttcattcagcataatcttttgttgacttttcttatgttgtatgttcaaatccccatattgcttcttgttgtatgttcaaatccccatattgcttcttgttgacaataataataataaaaacaatgcaactttaccacc

SEQ ID NO: 137700 - DNA, 541 bp, Arabidopsis thaliana columbia
  unsure (1)..(541): unsure at all n locations
gcccccaaggtttggacccccagtgtaacccctttttttctagggcgggtncnctgggggtctccggttcnggcgtatgaaaagatccgtgttatgccccctnttagagntgaaaggcattncacttcttgagagtggtttgaaagtgagggattncgactnttgaggaggaacttcagtgacactggctgctttggatccgntatcccaggagcacattgatcttggaatcaagtacganccttctaccggtatctncggtatggatttctacgttgttcttgaacgtccaggataccgtntggcccgtcgccgtagatgcaagactcgcgtaggtatccaacataganttaccaaggatgatgccatgaagtggttccaagttaagtatgaaggagttatcctcaacaagtctcagaacatcactggttgaagagttttttttcattttgttttgtttcaagttcttatatttaagattctggatagtaaggatttcgtgttgtggtaacctttttgacttaagttggttaagaatctt

SEQ ID NO: 137701 - DNA, 420 bp, Arabidopsis thaliana columbia
  unsure (1)..(420): unsure at all n locations
ccaaatattgggtttgngcctggaggccntaatatgcttnggntccaaacctattaggaaaccgtcnccccccttgggaattgaagctggcacagcctcgaactcaaagaagaaggttgcaagatcgtcgggtttcatggaaaagtaagtgcggtgcttcatcagtttggagtccatgtccttcctgtcaccaactgatcctcncatatatatatatatatatatatatatatatatatatgtctcttctataccnccaagtttgtcncgtgtgatatcttcattaagttttaagttttctaatttttcttgttctgtttatctatgttttaagtgtctttaagtatggtgttttgtgaagttgttatgcctgtaatattatatgtgattggctttaataaaagtgggtgattattatac

SEQ ID NO: 137702 - DNA, 581 bp, Arabidopsis thaliana columbia
  unsure (1)..(581): unsure at all n locations
cgttcttgtgcacntccaaccggccttcagatcctaggtntgggnccgtcccnttcaccaccnatgngctttnctcacccttnggacncggttgttggcccncgggggcggtttagggagcccaatggnccaatgccctttcggtgcatcttncaagggntcccncatagatggttnccangcttctgtggaanccaagtactgtgcccacacaagnccgcatgtggtggnatcagaaagagttccgtgcccttgacgctgaacaatggcgtcgtctcaaatgggttcgtatgaagtggnccatctacaactactgtaccgaccggactaggttcccggttatgccagctgaatgtaaaagggacagagacgcataagttactactcttgngggttttaatgaatttatgctatcattattatttgaattatgcttgttcaagagattgatatatgtattgtttgttggcccatgatgtttatgctatatttgggcctaaaattacatgttataattcatatatgtattgattagctatgtattttcatatgttatgatctacttacaagttttattcttt

SEQ ID NO: 137703 - DNA, 335 bp, Arabidopsis thaliana columbia
  unsure (1)..(335): unsure at all n locations
gttcttagnccaagnggtattggnggtgtctgaaccnaccccnttnttctcaaagttagcanccggtttgtatcacnccattgtggnccctcaacgtggtcgcatttttgggtttggcgataacgaaagagctcagcttggtcacgactcactccgtggctgcttagaacctaccgaaatctttctccattctggccgttctcgtagccggctttgttgatccaaggtatagataaacaaccatgtttgtatgaaccggattgagattcgatttaccggttagtgtatcttgtattgatttgtatctgtttgatttcttcaagttgtgagngtna

SEQ ID NO: 137704 - DNA, 364 bp, Arabidopsis thaliana columbia
  unsure (1)..(364): unsure at all n locations
cctggggggccatcccggggccccccntgcgcncgttttttggtcccgtgaagctgggnaggccctggaccaggcccgggtctcagaaagtgctgggcatctcatattcaactataagccctacttactgtggatacgccgggaggggttacgacgaggtttacatttttacncnaccaagatccccgtttctaagaactttactcgtcgtcttgtgtgtttgtttgtaactcttatttacatttagggagccggattgtcttgcatgatttcccttgttgattttatctctttggaattacatttcnaaagatacaaactgtgtttgattcgtctttcttgcaaataacatttnacttttgag

SEQ ID NO: 137705 - DNA, 426 bp, Arabidopsis thaliana columbia
  unsure (1)..(426): unsure at all n locations
ccgggaaattgaacccccnaacccctgggttgnttcggccttgccgaatgcatctatgtggtttcttcccaagaagcttnccctgtgatgcaatcgtggaaggaccaaactttgagtttgcaaccgagacacatgaggaaacttctgtatgacaaagagaagcttcttgagaatggagataggtgggagacagagattgcagagaatctgaggtcggagagcctctaccgctgaatattgatccgaaaatgccttttgcctaattcttaaggaaacgttttcgtttgcttctgttacaaataaagatgcttcagcctttgcactgttacccctatctgtatttcttgagttcataccgatggcaaaaccaaatttggctttgtttccggtttgagctggaccgtgcggtaaatggattatgatatg

SEQ ID NO: 137706 - DNA, 377 bp, Arabidopsis thaliana columbia
  unsure (1)..(377): unsure at all n locations
tttncgcccanttggncccttaacgtcgaaagccagagancgnagncgcncgttagtatgattcaccacggacgttatcttgaaaggcccaagcatcagcttcttggaaaagaagcttccagcaaaatggctcgtcgtgatcctgacccaatctatgaccgtgaatgggaagacgacaagaggagagcagaaaggaagcggagagatcggaagtagagagtgatgatttgcagatcctttggtttgttcaacgaagagagagacaaatactggtattgaacactgcttatgttgtacacgtactattcaatgaccgtgcgggtctactttgtcatttgctccgccgagtttgataaatgacttgccagacttcagat

SEQ ID NO: 137707 - DNA, 415 bp, Arabidopsis thaliana columbia
  unsure (1)..(415): unsure at all n locations
ttccccttccccncatcccatccccaatctggggaaggagccccncccccaggactgnaccnatgtgggcccccatcaagtcagctatagngctgtgatcgagtcccctctcggtatnactctcaccgtgaccccaccacactcgtgtttaagtctgcagctaagagagtactcactttctcggttaaggctaaaacaagtcacaaagtcaacactggctacttctttggaagcttnacatggagtgatggtgttcatgatgtnataatccctgtctctgttaagacaacgatttcgatgtaataaaaagagccatatgatgctcattgtgtttgttcttatgtaatttgttgcaaatctaagtctaaaatgtcaaatcaagattcaagatcatcataataaaagatcaaatcac

SEQ ID NO: 137708 - DNA, 236 bp, Arabidopsis thaliana columbia
  unsure (1)..(236): unsure at all n locations
ttaggggcccttggtaatttgggtcctccaccatccaataccnccatnagtgggaggtcttncattnncattgggatttgtctgggagtacagagatttactattggcttcttctttcttctcttttgggatgaaatctcttgtatgcattgctcacattatatggtttgggtctgtggctttagtacttttggtccttggacaacttctctgcttctgatccagtatgttgcgct

SEQ ID NO: 137709 - DNA, 429 bp, Arabidopsis thaliana columbia
  unsure (1)..(429): unsure at all n locations
gtggccttcccccnttnnatttaaaanttgntaccaggaaccttttccnccntggaattaattgcttgaanagggaattttgggaaattcnnccattgccccctagaagatcccgacctgatnatccgagtccgacgactgcgacgttgaattttcgaaaatcggagttcgagcgtaggattgtgctggtttgactagcgacgggaggagctgaatgacggaaacgccgagttgtttcgcggcggattctgcttctttggattggattacgaagcttggcttatccattgcgggttgatccggtttgggtcgcgtaaatgggtcgggttatttttagatgggagagatccgggaaatgaggaattatgaaatggaagctcgagaaacaaactatttatagatacaacaacgtaggaaactacattacgc

SEQ ID NO: 137710 - DNA, 455 bp, Arabidopsis thaliana columbia
  unsure (1)..(455): unsure at all n locations
tggtttcctgcgggccaggccattggataatgcctatgattgcccgggntgaaaaggtgacaagatcattgcagtgtgtgttgatgatcctggaatataagcactacactgacatcaaagaacttcctcctcaccgtctctctgaaatccgtcgtttcttcgaagactacaagaaaaacgagaacaaggaagttgcngtgaatgattttctgccatctgagtctgcggttgaagctatccagtactcaatggacctctatgctgaatacattctccacaccctgaggcgttgaagcttctcctcagaagatttctgcagcatctatgtttctgttacttttcattgataataagaagcatatgatcctaattgatattacttttatctctgcatttttcttccttatcatttggtccttctgtaatttcgttttaaagaccctttcttggnnttg

SEQ ID NO: 137711 - DNA, 377 bp, Arabidopsis thaliana columbia
  unsure (1)..(377): unsure at all n locations
tattcnttccnttaaagccnagnttattggganggaaaaagggtgncctcccaaaccaattgtcggccattgcccaaaggtccgcacccaggcttatccaccctcntacactccctcaggaggttgaagccgtccatccagtcgtctatgaagaaataaaccgccattctcttcctgttatcttaccttgtctgttcggtaatttatcaggcttctgtctgcttccggttctctaaaccgnaaattagtttcgtttaatcagataatggattttatcgagttgagttttattgagctttctatctacatttttttgtcgttttcaacaagaagttaanactcataaatatctgtccaaaagacaaaatcagaacttg

SEQ ID NO: 137712 - DNA, 333 bp, Arabidopsis thaliana columbia
  unsure (1)..(333): unsure at all n locations
aattttgggccgggttnaacctgggggggnaaaccgggnctcgatccggntttgangccgggagaacgtttgccgngcttttgaggaactggcggtcgcggactacaaagccaagtcgctccagaatctgattgatccaaatgcaagacctccgaagaaagagtcttctgctaagaaatggcccagcctcggtttcaagttctgaggncnnnattatcatatnaaataaatcatccacanatatattcaatattttattttattgttattgttatattttttatctgatctattttctgtatcataatctgaggttgatgaattaatttcatg

SEQ ID NO: 137713 - DNA, 320 bp, Arabidopsis thaliana columbia
  unsure (1)..(320): unsure at all n locations
agcctcnganaataatgcattaaggcaacngtttcctctagcagtttncgtggtggacagtgtgttgttgccggaggagttattcggnacaaagaccactcccaccggagctcctgccccgaaatcctcaacttcatcgtctgatgccgattctccagctgctgatgatgagcacaaatctgccggatcaagcgtgaagaggacaagtctagggattgttgttagctttgcattgttttgttgctcggttatatatattgcttgaacctttaactaaaagcgagggaaacgttcccgaaaaacaaacatttatttgcatg

SEQ ID NO: 137714 - DNA, 295 bp, Arabidopsis thaliana columbia
  unsure (1)..(295): unsure at all n locations
acaaggncggacttgaagaggttgtgaggaagctatacgagacattggaganaaagnagaaagtctcttacagagtctgaagctangtatnagntcnggataacganacaagaagatcacaaggaaggaggtnacaagaaggaaggtaatgctcaaggtgttcttgttggagctgccagttcaagccagtaaaactctatatttggcagtttgttttactgttgtatctcttttttggntcttatggttaaaagccgtaaactttgctgganaaaatcaacatgttttgaatgtc

SEQ ID NO: 137715 - DNA, 515 bp, Arabidopsis thaliana columbia
  unsure (1)..(515): unsure at all n locations
gcccattggtaaccngccatttttggtgcttcnacttngcacctgnttcccngccctctctaatcttcatcccccaggacctcgggnaatgccccgcatggtaccanccgtcttagtgattcgatctcgcacaccgcgtttttgacattaatactatgtgaatctgaaagagctaaaggncttatccagcggatcaagagttgttttccagccctaatgccactgacacaatcccccttggtgagagaatacgctgatggcactcaaaaattcttcaatgcttttgtggaagcaatgaatagaatgggaaacattacacctctcactggaactcaaggacaaatcagacagaattgtagggtggttaactccaactcgctgctacatgatgtggtcgaaatcgttgactttgtcagctctatgtaacataacgttgtctcgatatatgtggcaaccaaaaatatgttttatgaaataaagtgttctcaaaatgtttatgaagaacatttcgtctt

SEQ ID NO: 137716 - DNA, 492 bp, Arabidopsis thaliana columbia
  unsure (1)..(492): unsure at all n locations
accctacctcagccaaagtttagggncancccccccgtgtttttctcggggtatggggatgagatgttaccggatggtcagnnncgattgttggtccactaatgaccgcacgtggngtgttngcagttgtaccacggtgactcaaggagtcagccaccgttagggatggtccgatggagtgtgacatgccgggtgatgnaaatatngtgacctgatcttccgccaccttactttgtnncnnttatattgtttttgtgtactttatcngagtggataaagtgacggggaatgtttttcttttgtacaaaaaactgtcttcccacctaagcaatgngtgttagtttctgttttgggctgtgttttgcaagtttttgtatttcagagttgtgtagtgtagttgcaagtggcggttggatctttcactatcttgttggattttgatgatggttgatgcttttgctttaatgttaaataaataagcatacttttgct

SEQ ID NO: 137717 - DNA, 514 bp, Arabidopsis thaliana columbia
  unsure (1)..(514): unsure at all n locations
ttaccccgttttntcaccggttctagaaatcttttgaacacnctganntccttcncggatactgcccgtgatncgnacgaggatgattnngacttaaaatcgccgcggacntacgacgaaggagaaggattnancggatnctcgaaacggatgttggaacggagagtgggatggtaaatctggagtttgtccgagggtattttggagattttggagttttggtgttcgggaaagtaagagagctatgacggcgatacctgtgccgccgtcaatcgctctgcaccagctgtactcggttcctccgacgggtcgggtcatggatttgggtacccgatttggctcactcattatccttgagaaagaagagagattgttttcacttttttgggattttaagattttacttgtatcatatattgtcaggtgggtaaatatggggaagatacagtgacgtaccttttactcggttaagtgtaatttttccggtttatcaaccaaatagaaatgattttgc

SEQ ID NO: 137718 - DNA, 429 bp, Arabidopsis thaliana columbia
  unsure (1)..(429): unsure at all n locations
ttccagtttaggccccctggcatgtacntcactggaaaccgggngaggctgaatttggtncccgataattcttccttnaagacggtgaccaggntcgatttacacgctcgacatctcgaaatgggttccaagacgctncctctgtnggagcccaatgtgaagggntctttcgcatggtcgttgctagacnatctcgaatgggcaatgggatacncggtccggtttggattggtttatgtggatctcaaagacggatgtnagagatatcccaagnaatcngctgaatggttcagaacagttattgantgaaaagaaaaacgattgatgatgatgagatatgtatatttcattatattagtttctctgttactcttgagagatttatatatttttccccccctttggaaataaagagaaatggttttagct

SEQ ID NO: 137719 - DNA, 551 bp, Arabidopsis thaliana columbia
  unsure (1)..(551): unsure at all n locations
aanttgacccccnccctgggcgccaaatgggaagttccctggacgggccaagaccgnttagtttgnggncnacatttccccctgatttggaaccccccttgctggcccaatctcgtgatgagtngcnntcagncctgagttttgaaggatgggtgtcagctacttgagaaatgtatgcgtgtgcttctttacccgtgacagatctgctattaacaagcttcagatagcgaagatcacggaagagggcgtgacggtctcacagccatactcattgaagacatactgggaattctcgtcattccacaacccaactgctggtgctgcaggctcctggtaagaagccaagcaaccacatcggctggcgatcttttaaggaagcttttattttattttatgtgatgttgttaaacactttgtactgtagttgttttactattaaacttggtggtttctttctgacagtccagagtttagatcaatgaggatttataaaaagttctggatatctttgggtagtaatccatacctttgttcattgttaatcgttctcc

SEQ ID NO: 137720 - DNA, 490 bp, Arabidopsis thaliana columbia
  unsure (1)..(490): unsure at all n locations
gggggaaagttccnccttgctttnagttgcgttaaaaggggatcgtaaacagcgggngtccagnattttggacattttcccggcgantcaaggtcccncctcgatctcagngtgttacagctntgggaagntgatgtggagctgcttttgccttnggtacgatccgaattcacaagccggggaagagagagaagtcaagattcagatttgcagaaaacgtcatccatttgattcctctcattcttcttctctgtgttgcaatcctctggctctcctcttattcagcagcgttaaggagttgagttcaagaagcaacatgttgtcttgtctccatggaaactcatcatattcagttttgggaaaggaaacaattattttaccgccggtgattatgtgccgcaaaccatacgtaactcttgtaatttttggttctgtagacacataaaaggatctctcgttttcatgaaatgtatgtttaatagttcactat

SEQ ID NO: 137721 - DNA, 520 bp, Arabidopsis thaliana columbia
  unsure (1)..(520): unsure at all n locations
cccttgtttcgtcccgtntcgatttncacnccgtctcgtggatccgcngganaatnttacnccgattctcgtacgaattctcgntttcggtntgggacncacaatgcatatggttncggaagggaacgtgcactcgaagctatgtgagtaccaagntcttacttcttcttcgatggacgtcacacaccagagaaggctcaggaggaaatggctcatcttctatatggagccgaccctgacgtggtccagccaatgacggtccgtgagctaatcgtctacccaactggagaaactatgcgtgagtattgggaacccaacaacttggctatccgtcgtcggccgtctcgtgacttttacttgggcctcgccgcctattattagttggatggctttgagctgaatatttcgatatatatgagagctattgtcttataatgtataatcgatatcgtaacgtggaattatgcctatatgacgtcaaattatgcctttgacgttgtcgaataaactgcttttgaat

SEQ ID NO: 137722 - DNA, 446 bp, Arabidopsis thaliana columbia
  unsure (1)..(446): unsure at all n locations
ctagnttcttccccccggggtttcagaaccggtncnccgcntgacatcgagaggattngtggagaaggactttgagagataggagagttccntgcaccgtgccgtgacaatccacgttggacatccaggagcagtacggtaaggtgatgaaggacttcaacangggtttngtgaacaacaaggagatcgatgagataaaggctgacgttgaggagttcacgtacgattttgatatgcctggatttttcatctctgagtcaaggaacgattagagatctctcactctctacccaatagtaatcttctgttatttgtgtttttgtatgttaagcaagcaaacaatnaaaaactnataagcttcagttattttttcttcttgactattttatttcgttggatttcttaatagtaacagcaaatttactatatttaacgaataaatacag

SEQ ID NO: 137723 - DNA, 461 bp, Arabidopsis thaliana columbia
  unsure (1)..(461): unsure at all n locations
tccgngaagtaagcggggagatcggttcgacgngatcncnccgngncggatttgagagcccccctggtctcgccgttgtcggacttgacgttcgctgacccggaggacccccgcagtggacgagacgttctcgttggagaagtatccgtcgtacgagatcgattgggattcgattctagcttaggggcaaaataggaaattcagccgcttgcaatggagtttttgtgaaattgcatgactggcccaagagtaattaattaaatatggattagtgttaaatttcgtatgttaatatttgtattatggtttgtattagtctctctgtgtcggtccagcttgcggttttttgtcaggctcgaccatgccacagttttcattttatgtaatctttttttcttttgtcttatgtaatttgtagcttcagtttcttcatctataatgcaattttattatgattatgt

SEQ ID NO: 137724 - DNA, 347 bp, Arabidopsis thaliana columbia
  unsure (1)..(347): unsure at all n locations
accccaataatngtgttnaaaacccgttgactaagnggantacatttgtacnccaggtattcatcatagcgtgtgtcaaaagaggatgtgctgataaactggcagatattctcaactgatctcatagataaagaatttgttgangcttccgttgggctccaccctttccgggacctgaaggtaggccttgagggaatggnccgtgtgganacagactttgtgtatctattttgaaggaacagaatcagaacatggttgatgtgttgttagggttgcttgtgtataagagcacatgtgagtgtgtatttgtatgtgtgtgtgatttacgagtgtatattccaattcat

SEQ ID NO: 137725 - DNA, 445 bp, Arabidopsis thaliana columbia
  unsure (1)..(445): unsure at all n locations
ctttcggtncttnaacntggcnatnncgngtttcacttcccgaaagatccnccccnttgattggtttncaactaagggcttgggagttcccngtgttcagtncgctgctggaggantggcgacnccggcggatgccggcgttgatgatgcagttgggatgtgatggagtgtttgttgggtcgggtgttttcaagagtggagatccggtgaagagggctaaggctattgttcaggcggttacgaattatagagacgcggcngtgttggcggaggtgagctgtggtttaggtgaagccatggttggtcttaatttggatgataaggttgagaggttcgctagtcgttctgagtaaccaatcaaatttcagatgtttttatccataacgtttgtcactttaatatgtatccacaaaccaatattctcgatttattcaagattttatag

SEQ ID NO: 137726 - DNA, 375 bp, Arabidopsis thaliana columbia
  unsure (1)..(375): unsure at all n locations
aancccggnaaccaaatgatacggttgtttgacccggngaagtgtcttactccgccgcnggtgggtccacttgtaagattcnaagagccatagttgtttatctggcatctcaggtcaataattttatcatttcaagaaaattctcaaattcaganaaaaaaaaaaaaaaattttttaggaaatttgcatttttatttcgtgttgtgtttgattttatgtacaacgaatcatgtagatatcgttattttgtgatcttttgatgtatacgtaaagtttgtagttggggtttgttgttaaaatgtatatttgtaaggtcataaacgagaaaatgaaaacttgtatggaccaaactagaaataatgttaataactctcc

SEQ ID NO: 137727 - DNA, 436 bp, Arabidopsis thaliana columbia
  unsure (1)..(436): unsure at all n locations
tccaatcntggcccccnagggaacntcttttntgaaccctcnatggnaaaccccccgttcccccaaagggactttgggacttaatctcccggatttcaacntcagnttctttgggaaatggnatctctccacatttctccagcggcaatgtcagtcttcccaatactggcacatcccacaatcagatcaaccttgattctgtaaggtatgatcatcccggggttgatatcgttgtaagtgctcttgatgtcatcatagatcaacgtcaatggtatcttcacagtttcttctccatgagccttgagtgttccagcatccgggatcaaaccagaaaccagtttcctcccatcgctctcgaccaggtagttgacatcgatgagagggataggaactggattcgggttcttgacaagcacatccacaacaatatgcggcc

SEQ ID NO: 137728 - DNA, 343 bp, Arabidopsis thaliana columbia
  unsure (1)..(343): unsure at all n locations
ttaaaggnccantcagggttgtatagaaatccagggggtggtagggagcatttcagcattcaggaaaggatgtttgggcaaaatgttatggggggagatattttttcgggaggagagttnttaaagaaacaggcggcaggtaagaagagaatgaaagccataggtagagttgatgtccctcaagaagctttcatggccgttttcaaacttgaacgagaagtattgtgacatnttgngggtttttccactgagtcactcaagattcactacatcatattttattttatcattttgtaatattntgcaaactaatttcacataatgcaattatttttcgcatttc

SEQ ID NO: 137729 - DNA, 382 bp, Arabidopsis thaliana columbia
  unsure (1)..(382): unsure at all n locations
agggnaaaattgagaagatnccgaggagaggagtgaagttgagganttttaggaacccnaaaatttttttntttgctaaacttcaaangaatcaaaaccagcaacagtccaaggtgttcatcaaagtccccttgttcaatcgagcgaagtctttcaacaaggttttgcgagtcttttatcgactggagataaaccatgaaacactggaacatcgtcgcacatatatatagattatacaaagcaaaagaattctcaaggtgttgtctcattttttcctacctaaatacctcacttctttaaatgacagttgagttcttctttgttgtaagctatagaataatttgttccttcaatcattcataatttgatcttattccatttt

SEQ ID NO: 137730 - DNA, 410 bp, Arabidopsis thaliana columbia
  unsure (1)..(410): unsure at all n locations
gccagtcatggggggaaggccggnttgaatttgggnttgaccatgtattgncaccatatccttttttaacggggagctggggattgttgntcagataaattcacagtttgcngatgccaaatggatcagataggatcacttcacatacattcaggganttcttaaaaagaccatcgaagaccctgagatcaaagggtggttagctttgggcatcaagaagaagaaaggtggtggaaagaagaagaaagcccaaaaggcgggagagaaaggagaggcttcaacagaggctgagccaatggacgcaagtagtaatgctcaagaatgagtaggaagatttgtctttgtttcttttaaagaatttttgaaacttgaggtacctctttcgttgtatgtttgggtttcaagagagt

SEQ ID NO: 137731 - DNA, 331 bp, Arabidopsis thaliana columbia
  unsure (1)..(331): unsure at all n locations
tgncaagaacantcttaccaccaaactgcggcaataatntcctgcaatttatgangagcncaaagncgaagacgggtttctntncatgagttacagtggtgagaacacgttcgggatcttcttctaatgcgcttggaatatgtggatgcatcagattatcaatgtacagtctgtctatttctctgcttgtctctagttttcatgacattggacgaagcttttgaaacttgcatgctatgttattaacatgataaggtcttccgttcatggtgttaatttggctttatgctacacttaatttcaaacttagtcgctatanatagttgagttc

SEQ ID NO: 137732 - DNA, 451 bp, Arabidopsis thaliana columbia
  unsure (1)..(451): unsure at all n locations
ggttccattcngtgggttcnggttttggacccgatcagagnttcgagggggctntctagnaggatccattgagatcncaatgtgatgttgaagttgaccccttatgctaagcccgcgaagggggatgtcactgttagctgaagcncagggagttaaggctaagaaggagaagctcgccaagaagaggaaaaccgttaccaaggaggaggcgttggcaatcaaagcagcaggcaagtcgtggtacaagactatgatctccgacagtgattacnccgagtttgataacttcnccaaatggctcggtgctagccagtaataatctcgtctgctttggaacactttccatattttagtcaaaagattttggtttttttaatctgttttgtctttgggtgtctggatatcaagttgaattatgaacaagtttcacttttttacatctccatttctt

SEQ ID NO: 137733 - DNA, 434 bp, Arabidopsis thaliana columbia
  unsure (1)..(434): unsure at all n locations
gccacttttttcatcactcnccatacaagcaacaagnctttgattctgatttggcttacctcngttggtttgtgttattagaatacctggaattaccggtggctttggttcttctcgccgtggtggcaccaaatttgattgctggcacattcagagacagttggattggtttagctatatgtttaggtattggatgttacttgcttcaagaacacattagagcttcaggtggattcagaaatgcatttactaaagccaatggtatctccaacaccgtcgggatcatctgtctcgtcgtcttccccgtctgggctcttatcttttaagttaactcttcagtttctttttccatttgtctttttttttcatgtaagagtgattgctttgtacgatctgtctctcctcgtaactctatcaatgaatgtgatttgaat

SEQ ID NO: 137734 - DNA, 500 bp, Arabidopsis thaliana columbia
  unsure (1)..(500): unsure at all n locations
gcttcttccaagttaggnggggncccagaggaaantnaaaaaacgnnaggttcccaaggccaaaccggntatgccccaggcttatgncccaantcccataccggngtccctgcgccttcgttccagccggcgggcagaacaatgccnccaacancatctcttcattcagantctccccacacgagacaacaagcatgatgctacagcttctcttcgaacagtcccctggattcaaagagataagaatgatcgacgcaaaaccaggaatcgcgtttgtagagtacgaagatgatgttcaagcttccatagctatgcaacctcttcaaggtttcaaaatcactccccagaatccaatggtcatctctttcgccaagaaatgataagagtcttgtttttgtttgtttgttgtcctttaagacgatagtactggaccaaccaaacctggtgtgtataaccaaccaacggttctattggttaacggattaatccggttttggttt

SEQ ID NO: 137735 - DNA, 623 bp, Arabidopsis thaliana columbia
  unsure (1)..(623): unsure at all n locations
caggcttcattcctgnttgatgggggatatgttcgttgattgngnccgagntatttgatatgccgtttcncttgccggatgnctgatttgaccncgaagaagatcnagatcatccncttcgagnaataccttatgattatgncctccgagncntctgccncgtatcgtagtgtctgaagaaggagctgaagatttccttatttgaagcngtgaaattagctgatgtgaagagattagagattctttaatgaagctgaggaagagctnttagaatattatgccacagagagagcntgaagctatgatatctactcgcanctaaaacgcgcaaagatctgagtttatcagattccacgtacgatatgttctttaaaagctcaaagattcacacncatgcatgtcctgattctttcggcttacaatttttgagacattacggcttcttttgctgatagaaccaagactgatcaagagtgacaaagatgggtttttataagatagaaatgtaaattgtagacttggatttattagagaggagaagagatacattttttttttctttacatgagagatatgtaaaatggtggtgtgttattttggaagttaacatatgaatttctttt

SEQ ID NO: 137736 - DNA, 629 bp, Arabidopsis thaliana columbia
  unsure (1)..(629): unsure at all n locations
cagnccaaatcctccatcgncacgnagtcctcnccacgtcaatctctctacgtcnccgnttccgtacccgtnttctcccgtttctctctattgagatcgttggggagtagagatggcgacgttggagctntacaggagntcgacgacgggatgtgtctgacggagacttggncgagtggttcagagcggtacgctgancctgagctagctatccagtcctgttcaatttgacangtcctgactgaagctctggagagccaantgaagaccaaggtgtccatcaagggacacctgcacacttacaggttctgtgacaatgtctggaccttcatattacaggacgcaatgttcaagagtgacgatcgtcaagagaatgtgagccgggtgaagatagtggcatgtgattccaagctgctcacacagtgagatgcaaattgtctgcagggaatttactttcctttgtactagattttgagttttttcactttgtaaactcagcacttgctatatatgttgagcacttgctatatgttgagctccatctgcagccatcaatttagcctatatgtaaattctcggcccaaggacataaggatacattctgttgctatgagaaagttcttgagctt

SEQ ID NO: 137737 - DNA, 482 bp, Arabidopsis thaliana columbia
  unsure (1)..(482): unsure at all n locations
tgacacttgcacacatggaggctttttanccggattctgcancgngttngtcancatgtccgacctcantacgnttgggaagcttcccgcaccancactcgcgaaccaaacgaaagtatagcatataccagtacgtgctattcgtagttgncagtggttctacttgtggttgggttaactgttgcattagtgatgcttttcaaaggagagaatgggaacaaacattgcaaatggtgtcattaccttagctgtttcccaacttctaaatggacctgctaatcatcatcatcatcatcataatcatatagtaaaagcttttatatgtgttcatgttaacatttaatctctttgatctctctagcctttgattacttatatatgtgtacattacaaaattcgtcttgtgtaaaaggggatagaaataaaagagtgtataatttggtttatagtacacactttatataatccatcttaggtcttgt

SEQ ID NO: 137738 - DNA, 487 bp, Arabidopsis thaliana columbia
  unsure (1)..(487): unsure at all n locations
ctccgggatggccattaagttcccctttgcccatttgccggtgcaaccgtttgccgcttgctgattcnccgtcgatgatgctccagngcatggagagggcttttaattttgcagtaatccaagtgctgaagctgtatgggtttagccacaggggactgttgagtccccaagattaaaaggatcagaaatgagacagtctctcctctggagtcagtagacaagtttgatattcgaagaatgcacatggaaaccaaaccatagagctaggaaaatcaatgagtgaacggaatcacagtttggcaagattacangaaacatatagatgatatacaaatactctcacaaacacaatgcaatttgtttaccctgcacttgttccttgtgcttcattgtttggtctcatgaagataagttttaactgtcaaattcttattccatagatgtttcttgtcattgttggtcaatatatggagaaatttgatactgc

SEQ ID NO: 137739 - DNA, 482 bp, Arabidopsis thaliana columbia
  unsure (1)..(482): unsure at all n locations
ttcctggggnaattttgggnttncctccggttcggccaggtcctccgcgggaatttggggaaggccaagtttttttggaaaccaaggcaaccccggtggcatngcttctctnatcgcgtggtgctttagacccnttcagtttccttcatttgctgacccggctcgaaacagcagtgaagaaagtcatcgctgaaggaaagtgccggacgaaagatcttggtggaacaagcncgactcaagaggtcgttgatgcggtcattgcaaaactngactgactttgacaaattacgtgttcccgctctgcataaatcatcaaattcctgatacagattttgtgttgccaaaatatggggtntgatccaagcncaacggttatctggttttgtncctcgagttttattatattctttanccgtggaatatttcgntaagaaaaaaaaacatgttccaaataattcatgttgctacgtttgttggcgcct

SEQ ID NO: 137740 - DNA, 493 bp, Arabidopsis thaliana columbia
  unsure (1)..(493): unsure at all n locations
ccgaatttgggcttggaaatccaggggtcccttctttccgcggttcnaaccgtgggtccccggggaagaancgacctggggngggaggtttaaaatgttagtgaaaaaatggtgggaccattacgacgacgaatcntggataccaagaaacctgttaccgttgtggacacagagtcgatctcgtgaatctgaagccgttcatcaccgctcttactgaagctggccggctcaactacgtgaccgcaccgtccgctgcttgaatgttgccaggagttaaaattgtcggtggatcaggtagttatttttctttccggtcagtaagaggttggggattatgtgtcgggtcgacaaccacacatactgtctctggttccaatgctttggacgttgacatgtgatttgctttacttttttgtctataatgtgtgttatcctcaattttagcgtctatcttcgaatatcaaacttgagtgacaaaataaatattccaaat

SEQ ID NO: 137741 - DNA, 414 bp, Arabidopsis thaliana columbia
  unsure (1)..(414): unsure at all n locations
tagggaaaagctggtaccccttccaggtncccggtcccggatttcccggttcgaccccacgcgtccngagaggttctacccaaaacactcggaaactttgttaaggcgacattcgattgcttacagaagacatatgggttccttacaccagagttctggaaagagactagattcttccagatcgccctaccaagagcacactgatttcctgtcgactaaggctcttcaggccgccaaagttgtcaccgagggtgaagaacaagcttaagaccttcatgagatgagcttggttttataggttctggttgtggcaaatatctttatcttttctggtcatgtttcttggttgtcttatcagtttttgatattggagatttaattacaaggataatcatatttagttatgtttgggtt

SEQ ID NO: 137742 - DNA, 377 bp, Arabidopsis thaliana columbia
  unsure (1)..(377): unsure at all n locations
ttncccacattcctctgatgcgngcttgaaccnttgggccattcgcagatcatctttggcaagtaatatccgggataccccgcaggagagtatgttgaacaaggactctcggtcatcaatctcaaaggaaataagggatcttcatagtttcagtgttcagccgtgaaccagttgcattcatgggtcgacaaatatttcctacttcctgctgattctgaagttttgaaatctttgcttttgttaaagcaacagatgttgatgaactcagaatttggttgaatttaggacttgtatttgtttcatttgaaccggtgtaaacttttttattggtcaactacaaagaagaataaaaagcaatagttatgccgttcccttgt

SEQ ID NO: 137743 - DNA, 438 bp, Arabidopsis thaliana columbia
  unsure (1)..(438): unsure at all n locations
cggttctcggccttgttcccccntagacctggattgctctactntgnaccaaccacgggnagntccacagaatttggcatggccccgtcacagcgccaagcagatctccccacatcccttcaccactggaggaagagctcgaaacaaatcccattatgcgtgttgataagcccagagatacaggagaaactcggttgcaagtcgccaattgatacaatgagggaagttcggaacaagaaggatcagtggaggggatgatgataaatggagagcttcttgcctatgttttgtgtacttgtgttgaatgatcctgtaaaaggtgtatgaaccagtaatgttgatattctgtgtgaaactgtgaaccggtttggtaaaccgaaatcagaccgacctgtaagccgtactccctttttgaattttcagtttactatggataat

SEQ ID NO: 137744 - DNA, 300 bp, Arabidopsis thaliana columbia
  unsure (1)..(300): unsure at all n locations
tgtgttcnagaagantcttccagagagccttcaatggntgacattcttgtgatgatgancagttcactgttactttaccgattccaaagcgatctgggtttcttcttcganccatgaaagactctagagatccncgctcaggaggttctgcttctgatcactctgcaacaagcaagtctttgcctttgtctgttgacgattcttccatcactatagtttatcctcgttgacttcaacaattagttccagtaatgttatgttgtaacttgtaactatgtgaaacaaagcaaaaacttattt

SEQ ID NO: 137745 - DNA, 435 bp, Arabidopsis thaliana columbia
  unsure (1)..(435): unsure at all n locations
ccgggtncngctggacgccctctggccctgtgntgngctgtcctcgcctctatgatagnttgggncctttcacgacccccctttggacaactgctcataccancgngtntgntgctccatacacttggccacactnttgttgatgtgttgaacatgtataaattgatcaccggaaaggaactggatctaagtgtggatcttaacgcagctagtgctgcagaggaggaatgatggaaaatattgcaagctctgtctctctctgttagtcaccaaatgatgtaaccggttctctttctccctcttcttaaaagttgtctcaccaaatgttctgttaaaatactaaatcaaaccgatctcatcatgcgtacctattcccggttatcgcagtctgtttttttcttctcaaaaaactaaaatgttggatttcgtggtttt

SEQ ID NO: 137746 - DNA, 461 bp, Arabidopsis thaliana columbia
  unsure (1)..(461): unsure at all n locations
gtgtcccccaancctcggcgttccccntatccaatccggccgcncacacagtnccttatggattggtaacatcccatnatgccccctggngcactgccgccaccgccgctggaacgttgccgccgcattgatgaataatacacccaaccaaatgcagctcagcaacaagcgcaacaaggtcagagttttcatcccaccgggtatgatgtattttggacctccacaccattcttaaggttagtaaaaacaaaccaaaaaatccaattagttctagtattagatagtttctgacccactttattttatttcatgtaacgcatattgtagaaagtagaaacgagatcttttgtcttacaaatcttgtaccttgagctgtttagtcaatttttcttctttgtaacatagttagacttctattgtgtatctgcgttacatttatatctagtatgcgtttgtttcat

SEQ ID NO: 137747 - DNA, 484 bp, Arabidopsis thaliana columbia
  unsure (1)..(484): unsure at all n locations
caccgtagaccanctggntcggccctcacacctgaggccntccngatcccacgagtcttacgctcaggcatgngcaacccttggccctatgagtatggtgaaatcatccatgattgnggagctctgaagagatccagttcatgtaaataagctgcatgtttgtgagttcccgcatcgttcgtttatcaacctccaaaactttctaatgtctgttacttgcatcttcttctgctgtctctgtctgtctctctcaggagttcctgtttgcattgcgagaagccatgagcctctatcttgagggtagttgtgatgaagttaagtagaggcttatttttaggggttgtggtagtttttgttttagtgaatcttttgaattcgtttgtgttttgtttttgttactttatgccccaaaactcctttaacatttgtcataatgtgtttgaacctctcatctgtttaatcaaataaatcttctttgtatgct

SEQ ID NO: 137748 - DNA, 451 bp, Arabidopsis thaliana columbia
  unsure (1)..(451): unsure at all n locations
ccttggcanatacnctcccgtttnaccncccnagggcntctctgattccaggcnctcactttcctggnaggttnaattgngcccaagaaaggacgttgtgactgtatttaggcccccaaactattgctacccgttgtggcaacatggctgcgattctagagatcggtgagaacatggaccagaattcccttcagtttgatcccagctccacgtcaagtcgaacccgaaaccactcgcaagactccagattattttttgtaagtaccaaaagaactaaagctgcaattccacacactagctcttcgtctcttttgcttctattcttaaccactttttgtaatttcatatnccttacgtctatttctgtttgttaaactctccattgtcttttaaaatccgtaaacttttgtgtgcaaagattctggtacaagtaactgaaaccgctatcacc

SEQ ID NO: 137749 - DNA, 499 bp, Arabidopsis thaliana columbia
  unsure (1)..(499): unsure at all n locations
cttgtgccccacttgactttgtnncccctggtaaaggcttcgtatccccaagcttcaagggcccgttgcctttccatntgacgctgtggcacaaccggagctggagattctttgtcggtgctctctaaaccagattgtcgatgatcgatccgttctcgaggacgaagagagattgangaaagtgctgagattcgcaaatgcttgtggagcaatcacaacgaccaaaaaaggagccattccagctcttccctcagatgctgaagttcggagctttctcgaaaagaaatagaaacaaaacaactcaagcttctattacgtaatctgtttccgcgattatcttctctttttgtattcttgttttcggatggttgaatcgagaagagaaacaaattcggcattccgctctgtttttgtttctcttcttcaaatgtaatgatttagaaaagacgtatgttgcaatttaaggcttcacttgctaataaaatgataaggtttttcc

SEQ ID NO: 137750 - DNA, 463 bp, Arabidopsis thaliana columbia
  unsure (1)..(463): unsure at all n locations
gttaaanctnctgggaccanttttcagccatttgnttgaccccngccaaccntttttccnaagagaagctaattngccaaggcccttgatntntccgggctaggctgaaggngttcagtattggctggtgaactttccactttgaccgatcttcaccacattcccgtgattcaatacctgctcggaactcccaccaagaagctcttcacggagcgtccacgtgtcaacgagtgggtggctgagatcaccaagaggccagcttcagagaaggttctgtgagaaatttctaaaaggacaaaagtggttttgcttcagtcacagtaataatgctacaagtaaataagcgtctgcctcattgcccagtttctcagtactttctttctgttgtatcctctgtttttgtttcagcttatgtgagtgtgtgtacgttcttgagagtatcttaggcaaaaactatttatct

SEQ ID NO: 137751 - DNA, 496 bp, Arabidopsis thaliana columbia
  unsure (1)..(496): unsure at all n locations
ccctgagaatttccccgcntcngggaagggcttagacttctgaccttcccggaaggatnctangtttcccccgtcgcaacctatcnaggccggttactntggctggtccacctantgctcaggggctagaagatcagcaaaaggaagtgaaccantacaagtcagagagagaaaatggctaatgagtcttggttacagagtctggggnatgatgggtgaccaatggagtagctttgcaggctgtcctcttcccaggagaaccttcaagctccctaactccatctactatgtcgcctgatcaaaaccaaacacaaaactttgatttagcttcaaacaaaaagaagaatccacgaataagagagagctgttttgaatctgtttcttgtttattttcccctttttcgtgtcatattatattgagagacttatgcatccaaaagaacaaacaaatggttatatgtaacagagagaaatcaaatcaaaatcacacattatc

SEQ ID NO: 137752 - DNA, 496 bp, Arabidopsis thaliana columbia
  unsure (1)..(496): unsure at all n locations
cgtcggtcgngtggttancgggttagttgattccggttgaattgggngtttatgaatttaagggaagcncgcgacgattcgaagtgtgaccnngcaagatgccaggngctatgagaaatactgtatcggtgacgtgaccagtcaacggttccggtgacgcaacagtatattccgccgtgggagaaggaatctacggcggcggaaacaactaaagaagaatctggaaagaagctgcttatctacttaattcctctcttgatactcggcgttgntttcgctctcagattctacaacaacaagtagaccaaattatgatgaacagattgataagagtttcttactgttcttggttttcgtttgttggtaataacgggcttcttatgtgaagatttgggccatttggcccatcgctcagaattggactataatgtcttatttattttatgttaatgggccgtatcagtaggccctttgttgatatatgccaatcccaatt

SEQ ID NO: 137753 - DNA, 472 bp, Arabidopsis thaliana columbia
  unsure (1)..(472): unsure at all n locations
gttcccctgttgccttccaccntggccattttcaacttccagcttcgagtttgtcnccgcataccagtggtggacaccatgacctccnaggcaagctgagggntccctnccatctcttcttccncgggcacaangcttcaggccgattactgtagatacagaccgcactgtggttgcattttacaagttcttaaggaaacacgcaacgatcccattcaaactggagaaacctgcatcaaccgaatcacctaaaactgcagagtccacnccaaaagtagaaactaccgagaccaaagaatcacccgatagcacgacaaagagtagccaaagtgactcgaaggacgaattgtgatcagaaaagggtataatatatattacatgtctccttaagttgttatatgtatgatcagaattgtcacatcatgagtttggactagataaagatgggaattaaagtaattttagttttgag

SEQ ID NO: 137754 - DNA, 498 bp, Arabidopsis thaliana columbia
  unsure (1)..(498): unsure at all n locations
tccggtgcccccgtcgtcattgattccggaaattctgcttgnggaactcgattgactgctcagtncgcacggtgtgnggtgcaaaatgtccctgcctgggttcccgcgngacaccacactgagcttttgtcttggncttgcacccgcgatgaagaatcagtacgaggcttcaggggagagtaacaacgctgagaacgatgcttgcaagtgtggatctgactgcaagtgtganccttgcacctgcaagtgaagaagcctttttaaataagcagagataatcgagtctctttaattaattaagttattcaataagtaaaccatatataggatggtgtttttaggtttggtttatgtgtaataatggcttcagcttatcttttagccgatcattgtcttttgtgtttgttttgatcatatcttttagatgtctagcaactctgccatgtgatgagtttgtacttccagtggaatgataataatattatagttttaaatctc

SEQ ID NO: 137755 - DNA, 438 bp, Arabidopsis thaliana columbia
  unsure (1)..(438): unsure at all n locations
accgnatggccctggacnccgnggnacgtcgttccctggggttaccccgtgctntacgcgtccatcaggcttatcnacccctcccctntacttgtcgcatggagactggagtattgtcccaaggcctcccgattgatgaagtatccaaggaagaagatggatttgactgcagaggagctcaaggaagagaaggacttggcgtactcatgcctctcttaaacccttctggagcaaaattttcatctataaggtgtgagatcagttaaagcctttcagggctttgtccgaataagaagtgtgtttgaaagatctccaaacactgttttataacctctttggtctctttgatgagtattgtccctggtctgtttctaaaccaggatatcgtttttttcaatgtgtctgatttggtttacccatgaaaagaagaaaattggc

SEQ ID NO: 137756 - DNA, 445 bp, Arabidopsis thaliana columbia
  unsure (1)..(445): unsure at all n locations
tcaccccatggtganctgagngccctancctatngccctgccttanggcctattccacaggcctcttcttgttcgagaaatggctctttgatgngcaaagccncgatatgatccatcaataacatgtcactagngggtcaggaagtgttgttctagaaagcattaaagtttgncgatttgcttgagganccacgaggcttagttataaacaatttgtataattaagtactctttagttttgttttcaanccttattatgatcatattgcagtaattagggattttagtctttagtagtaactcttaagttttaacacatttttctctatctttttagtagtaactctttattttttccttaaatctttgtcgacgtggagatgatatcttctatgtagtagaaactcaaaagtgtacatcatctttattaatgtaacgtcttttt

SEQ ID NO: 137757 - DNA, 297 bp, Arabidopsis thaliana columbia
  unsure (1)..(297): unsure at all n locations
tttgcccccctggggaccgcccctgcttgactaagngtttgggnaaggncagctgnntaacggncaagcntgggngatactggatggcattgcccaaggggactgcggaagttgtaactccgctggaacataccaggcagaacaaatgcccagtctggttgtggcgagccgacacaaagatggtatcatgttccgcgttcgtggttgaagccaaaagggaacttgttagtactttttgaagaacttggtggagatatatccaaagtctctgttgtgaagagatcagtaaactaactt

SEQ ID NO: 137758 - DNA, 302 bp, Arabidopsis thaliana columbia
  unsure (1)..(302): unsure at all n locations
ggtcattggtaccaaattngtgctggagactnanggtaatgttnncagtgggttccatggaagagatggtggttcttctgatgctattggagtatatttctctccaatgatatcttcctaagctacagaagtttgttcatgcatggcttcacgtatcttttactactttaaaatacttatcgattccgatgttgtcaactatgaacatctatgtaacgaaataaaagtttatccaaaactaatttcaatatgtcatttaaaatattttcgatctatattttataataaaacttcaattttac

SEQ ID NO: 137759 - DNA, 286 bp, Arabidopsis thaliana columbia
  unsure (1)..(286): unsure at all n locations
aaattttttaanaaggcaagtttgttncncccatggnatggggaattggctacttgcccccaaaggcccccttaaggagnagagatgtgcaagtagttatgggacaaagntggctgtgaaggttgctggtggtgagatcgtggaatctgaacgntgcgtgaccgacgacaagctggtcacagccgcatcaacttccgatctncccccctttttgtatgcattgtcgactgcacttggtctctctgttgtattctaatgtcaagtggtgctttaacgtctaatgcct

SEQ ID NO: 137760 - DNA, 456 bp, Arabidopsis thaliana columbia
  unsure (1)..(456): unsure at all n locations
gggctaagtgtcaccggttncatggcccagtggtcgttgtccggttngcagtccccaaagtacctccagngntnttggatcangggccccaagctggttcttctggagncttccccaactcagtctcaacccctgacaatatccaaaggattggctctactggaaactttggggtcgcttcagtggtgaacaagttcatcgtacntacgaacccatcagcagtcaaagttaactctaatggtgaagttcttcaaaccattcctctcaaagataaatttggagacactttgctcagcgaagtcaacgaattcgagggcaatttatatataggaactctcaccggaccatttgctggaattcttaagctcgaaaagggttcttgtcctnccacttagatctcttatttgaatgcagccgatgtgttacaatcatatatatatatttgagctttttatt

SEQ ID NO: 137761 - DNA, 685 bp, Arabidopsis thaliana columbia
  unsure (1)..(685): unsure at all n locations
tttgcnacaggccntccgttgtggtcggcccttggtcgncgaggttggnccctcctngcagttttacatgccnttccgnccctgactatgaatgtttcnccagggccccggtcntntttttcgcactctgctcagaggttntggctttgggggaacccgngccacttgtggaccagacctggcctccagctgtggactaagncctctgaggagtcctactgaacagagctaggcncgtgactttacattacgacctcacgttgccagcctacacttgaagaggatccgtgatgcaaactacatgtgactcgcgaccacactttctaagagatcatgcatcaagcaatcagcacagagctcgtcagcttaaccccacgagtgaatacgcgcctggacttgaggacacacttatcttaaccatgaagggtattgctgcaggattgcaaaacaccggttaagtgagtcagtgaaagaaaacaaaacttcgaatctctcttttttatctaccctttttaataatctctttttttctagaatccaaaataattacggttggattacagtttactttatgtatccaccgttgaaatcttaatcttccattgtatcaaacgtcactgactctgtttctggaagtgtaaacaagaacagagacagtgaatcttaatgttatcttctttgtctt

SEQ ID NO: 137762 - DNA, 633 bp, Arabidopsis thaliana columbia
  unsure (1)..(633): unsure at all n locations
tgacnccctggataaccgtgaagtggaccccgacngtagcnagaccccctgtggnccntggtccctcacatttgttcnccctntggtcccttccccntgtggaagtggtgtatctgttgtgggatttgctgaaggaagaactttactcgctgagcggttcgattattcactccttgcttcagtcctacagatactggttgtgtgctgctactgagatagcattaggatttgggatcttgagagcaagtctgttgttgaggacttgaaggttgatctcaagtctgaggcagagaagaatgaaggtggtgttggaactggtaaccagaagaaggttatctactgcacaagcttgaactggagtgcagatggaagcacattgttcagtggttacactgatggagttgtcagggtctggggtattggtcgttactagagacacaacaagatgaagaagaagtcacgaaatctccggaaaaaagtttagctgcttttaatttttnccagatgcgtcagtattgtattagtctctcgcaaacctctattttggcaatttttgtttaatttccagaagagaaaaaaacaatccattgattatcatatcactatatatcaaaaggtcacgattttgattac

SEQ ID NO: 137763 - DNA, 588 bp, Arabidopsis thaliana columbia
  unsure (1)..(588): unsure at all n locations
tgccgcaatcccaaagcgtnccatgcttgcgccttcctgattncncngtagctccacgctcgcantgaatgaagagcgtgatgccgagnggtccatctntncccggcacancacgtccgagtnctgatcccggctcacaggtcccaccgagggcatgagaacatcatcgttatgaagatcggtatgagctgtacggctcagttcccgatagtcgtcctcgatggctgaagtcaccagactcattgaggaggtttctcattcatctggctccccaaacctgtatccgacgattttttgggggtctaaatgattgatttgaatattgtttggggtcaagttgcaattcttgaatagtgtcgaccccacttcccgccttttttctacttcttcttctttgttcttgttctagtttgttcgttaattcttgagcctcaaattgagatgagacctatcagtttctttttttctttctttctacttttctttatttccaaagttttaaaaatgtctataaaactattgcttttgctaatttttgtataaatatatagttgattgcgtgtgaataaattggtttttgttttcttc

SEQ ID NO: 137764 - DNA, 638 bp, Arabidopsis thaliana columbia
  unsure (1)..(638): unsure at all n locations
cattccaggnttgagtcacatcgtcccncgncttgtcctncaactacncttgaggggtgatnccgtctcggngaccgngtttttnccctttatcgaggnantcccntancctgggattttcccnctcaggacgtttcaactgctcctacctgatgtgaacgagtggtcangcctctcatgaaacaatgncatgatgctcgttatctatctatcatccctcatccggagtgtaatncgctccacactgatcaacaacaagttactgaacaggaactgaaaaagcagaggactcaaagccgtggcctacctgccaccagctagatcaggttttctcgtgacttactgtagtcatcattgcccgcgatgaaggcagctattgtgtgttctcttccccaaaacaaaggtcaagtcagggtgggggaacgaacgagtttagtttgatatcgacattgttgatttctctcagttgttctgattcagaatgtatcaaagagtcttttttcattttatctttcaagttcgttaggcttaggcctctttttgagggggttttaagatacaaaagttcacgtcaatgtgtcgaaatctcttcagagatggtcttaacctattgaaattaagatattttttttcacatt

SEQ ID NO: 137765 - DNA, 491 bp, Arabidopsis thaliana columbia
  unsure (1)..(491): unsure at all n locations
taaggtggaganagtccgaggnccaatgttgtttntcaagtntgaacgnngancagatgaggcganaagtcagnaccatctggaacacggcgagatggaaanccgtcaggtgacacgcctcttttgtcatcgcacctgaaacgagaaggatcctttagctgcttcaaacatcttcaagtcncgnttangctatngcaacgtgctaaaactcatcagtaattatttcagcttaagttggttggtttcggatttctgcttgtcgcttcaataattgacccatcttttgggatttcacgtaacgtactacactttgctttttagttttctgcgaaactaatgtattttgtagcctctcaatcctggctctctgtcccatacttcagttttttacacaacgcactgcttataaaagncncagttaaaggtgtctaaaggagaatggtgtgtctttgactgaggcaacaaataaaacagtgaaaagttaaggtttt

SEQ ID NO: 137766 - DNA, 540 bp, Arabidopsis thaliana columbia
  unsure (1)..(540): unsure at all n locations
ccctcaagccgcgngaagctcctgcaagaaagnccgtgttgatgtccgatgtncagtgntgctgcaaaggctcatgntgnctaagtcgtccctgattctcttgctctatctgcantcacacacctacaatgtgcatccacacgataggtatcactctcctaaggaagtttctcgactcctttcccntcgtcagcgcccgttcatgagctatttgtggatacacactcttctctgtacatacagatctcgttctttcctttatccagaagctatangatgactacatgtatacgtaaaacaagtcttggtggtggaaacacaatacctcgcgatgaaagtgccatcgattctgtatttgtaacttactgtttgagaatgttgtctatggataaaaagacttccatagatgagggtttgatacagagaaccatcatttctttgtatcctccaaccgtcaaacacagttggtgttttaactcttaagcccaaaagatcttttatttgtgccataagatagagatgttgaaacactatttacat

SEQ ID NO: 137767 - DNA, 304 bp, Arabidopsis thaliana columbia
  unsure (1)..(304): unsure at all n locations
ctgacccaggaaccgatcaaattcatgccntgggnagagagattgnttcccacntttccctgtcccatcgaatcatcgcacgatccctngcttgtggcatagacacnnctgagagaagttgtgtcagaactctacagtcncctgggagaattctatcaggcttnatgatcaatgtataaaagaaaactggggacttgtttgatcgatcaaaacttgtttatgatgtaactataactggtttccnatgtacattgtgagctttccaagaacaattgttntaattaattaaacacaagttatcgac

SEQ ID NO: 137768 - DNA, 255 bp, Arabidopsis thaliana columbia
  unsure (1)..(255): unsure at all n locations
tcaagggaggaccacaatcccaaancaagngcaggctttttacaancgcattcattcaaaactcgctggnggacagattttagccatgtgcgtatgcgtttncccttttgttaaatanaaaanctatttgtttngtttgttngacttgatagctttttgtgggattgaggattgagagagatagagagattttacaaactttctctctttctctctttctctctttctcatggataattcgtgtctctttgattt

SEQ ID NO: 137769 - DNA, 446 bp, Arabidopsis thaliana columbia
  unsure (1)..(446): unsure at all n locations
gggatggcacctgctcaacctgtccnntaggacccaaaggaaagngcaattgctaccacttggnttcgntaccatttggnaggggaaatncntccacttaatgtattgagccagggaaccaagtcaggtttgattgaggaaaaaccgngcatacctccgatcaatgagcagtgtggctcaaatactgcaccancctaagcaaaaccgaaagaagaagagaagtgtgatgcccattccactttggtgttttaatgagcatttcggtgtttgtcatgaaaccaagttttgaaatggcacttgtctacctaagtgtaacagattcttaatttcaacaattttgttagataatttgtattcattctcacttagtgcttccgttgttctatcgttataaacgttttaagatatacgcatgtaactgaaagaagaaaagccattattgatcc

SEQ ID NO: 137770 - DNA, 530 bp, Arabidopsis thaliana columbia
  unsure (1)..(530): unsure at all n locations
acgggccttaagncgggtaccctcacgtgnggtggcccctttcccgtcctcgccccactccaggtcccttccccgccggtgatggctctcatgagncatcaggtttgggactatnctgcgtgggaaccggaagtnttcaaggaaaggaaaggggttggncgatgagaatatggtgatacgttcagaggactagaaggtcacgtcatggagcagcttaaagtgtatgatctcatatatcagttcagccaaaagtctcccgatgatatcgtatgcaagatcacaatgatttgggagaagcgaaccgatgattcgcctgagcctagcaactacatgaagttcctcaaaagcgttgttgctgacatggacgagcatgttctcaaagcctaaatccctttcgaaccatcgtcatcacctatcatcatcatcatcatcatcatcatacatctccctttgtgtgtgtacttgtatgggtgtttgaatctttcatttgcgtagtacaaaatcatttttaaataaattatggtttgagt

SEQ ID NO: 137771 - DNA, 377 bp, Arabidopsis thaliana columbia
  unsure (1)..(377): unsure at all n locations
gacatgccttaatcaaagttgnnntgccgggggccnttttgaccggtncttgcacaaatgcacccacaccgcatcgcagccacacccgcatattcccaccatcacatgtatggtgggaggacgagttatggttggggcagcaagtccaatggtgcctttctacactgtctatccttatcatcaatctcaagccatcgggtttccacaaccttcattttcgaaacctctttctttttccactcctcctatatcaggcacagttggaggagagagcatacagaagaaggccatacattgataggctagaagctgttaatcaaacgattgactcagcccaaaattattcattttatccatctcactaagctttatttttt

SEQ ID NO: 137772 - DNA, 365 bp, Arabidopsis thaliana columbia
  unsure (1)..(365): unsure at all n locations
cttggacccntaacattgtgctcaggcagaccncattttnaaccaccccggagttgcaaattgtgatagagatgaagggcccagtgtctctcacatttnccctgngggtacatgaatcccttcacaagggcaactccattgtcagncacagtgacaatcagcttatcgtcggagttgccagtggttgtggagtataaggttgctgagatgggttacattcgttactacttggctcctaagattgaagaagaagaagacactaatccctaagaccccttttatatccacaatttctcttcattctaaaatgttgaagatttattgacaatgttggtgtttttttttggtgagattcctttgtatcc

SEQ ID NO: 137773 - DNA, 387 bp, Arabidopsis thaliana columbia
  unsure (1)..(387): unsure at all n locations
cgtgtttntgtgagctggcgagatggcaatgtgnacncngggttgttaagcaaagcacgtgtttngagctggcgagctggcaatgcaaatggacgttaacggcgatcgttattaacgtggttaacgtttactttctttncctttttgtataagagcaacatgttatgctcatgctttcattatcgaataatctggttgtcatctctctctagagacttctagatttccctcatcgttttaccggagctctcgtcgagtctcttgtaggtgagaagttgatatcgcgtctcttaacgaacgttgtatcaagtgtgttaatcggagtactttgttttcatctctctgttctattgatttcaaactctgtttattcatttctggtttacg

SEQ ID NO: 137774 - DNA, 315 bp, Arabidopsis thaliana columbia
  unsure (1)..(315): unsure at all n locations
acgnttttccacggtntcgnttgttggtggaacgttcgcaggnngagaaccgttttaagctttcttttatgtcagaaggtaaaggagcgttcaanacagggcattttaggtntgttgctgattcgnatcgaacgaggctaacgttttatagtgcntnttatcatacaaagcttcatgacttcggccatctttntgggcctggtcttgatagcgttgttgttaccctggcccnttaacaatttgtggcttttaattcttattagactgaatattcgaaacactatactctattcgtaacgaatttgtggttgcact

SEQ ID NO: 137775 - DNA, 513 bp, Arabidopsis thaliana columbia
  unsure (1)..(513): unsure at all n locations
actgggatgggatatggatgctgtccaatggtctgggaaaaccngccagcagaattccgatgctntattccgccaagtgaaaccatggggcaccccttctgaacccgcttgtntagccaccgggaacntgggagatggaacttgatgtataaaagttacagatgcaatgcctatgnaggatgcaaagctgatgaaagtgtttcctgaggtagtgagatctctgtatgaactggatgtgcttgcggaagacaccattctgcactggtatcgcaaagggaccaaccctaagggcaggcaaacgtttgtgaagggattggaaccgtttgtgaattggctcgaagaggccgaagaagaggagtgagtgagacgctctgcttcttgttttctctttttactctcttctaataaaagaaagacaatattttacttctcttaacgcaaaattcagatgctctacattgttggtgacttggtgtgatctcttttttgaatgaataagtacttctttagttg

SEQ ID NO: 137776 - DNA, 220 bp, Arabidopsis thaliana columbia
  unsure (1)..(220): unsure at all n locations
cctatgggncaatgtcgaangaaagcatagatcttngaangggtttncgttagattttatgttgttgtgatatcaaaagattatnggatttgaaggttttaggttncctgaaaggtttctaggtttgctatatatnccttttgtacagagtatcttgaactggtcaattcggttactttgcccccatgtgagatgcttatacatagaaaaggaaatagat

SEQ ID NO: 137777 - DNA, 544 bp, Arabidopsis thaliana columbia
  unsure (1)..(544): unsure at all n locations
tcccctcctgncaaagttattgattgtccggttggaaacttgaagaagnttgactttgccagctcgagttgnctaaatttgtggggttaactggatttccaggatattgtcgaggactgctttgctttgctcgcgtatgaaagcctgaggaatcatcggtctggtatttcctagaagactcacagagggaattagtggctgatgcggtgaatgcagcaatactatcaacaaatccaaataagaaagatgtgcagagaagctgtcacttgcaatcccatctagagaaactgctaagacagttaaccgtgtgctgtttagaaaggcggtcactgaatggagaccaaggtgaaacattccggcttcgacatgttcttaacaacaacagataaagaagatgaaaatggcttagccgcgcatatattttgaaaactctgtttttctatggtcgttatcatcataagtggcttttgttcattacttgtgtgatattatgttgaactttccattatgtaaaggagaaagttagaaaaatgggttcgacgtt

SEQ ID NO: 137778 - DNA, 412 bp, Arabidopsis thaliana columbia
  unsure (1)..(412): unsure at all n locations
gccgcctaataacncctgaagtgcttttaccgggagttccacctcggattttgtagtgatgaactaatgctgatgctctcaaaggccaaaggtctcgtccatggagagccacattcttgatgattcggtatcggtagagcatgcgagagattatggacatatccatatatctgagatagtaaatcatgctgaaaagtttgaaaacaaagcaatcctgctaatccacttttcggctcggtatacagtgaaggaaatcgaagatgcggtttctgcattgcctccacctttagagggacgtgtgtttgcactaacacaaggattctaaacattataacactcttataggttttacatacttttgtttttgtattccacatgtaaacattgtattctgttgttaattttaagattt

SEQ ID NO: 137779 - DNA, 340 bp, Arabidopsis thaliana columbia
  unsure (1)..(340): unsure at all n locations
tgntaactancagagattaatcttctgcctgctcgagaaggcaatgctcgacatttgggcntgaggaggactatgttatagagctggcaaacgaggtgaggaaggttctggccgagtcctcgactaagaaggtgacaccggtgaaggaatcaagagcaagccgtgtagctaacaagtcgaagaacaatgtccccacggctcatcagatactacctcatcatccagaagctgttgccactacaatataactcttgtagttttcttcttaattggctttagagatgagtgaaatcaggtcttttttttaataataataacaaagtaagtttgttttctgagt

SEQ ID NO: 137780 - DNA, 488 bp, Arabidopsis thaliana columbia
  unsure (1)..(488): unsure at all n locations
cactttcccgttggcgccgatggattttcatggggttcatgatgacctctaagtgcnccagttgatggccnactcaatggcctttgcgccctctagaagaactcctggaagggctcattgcgattgcgagggttacaaaagggaagcagcggcttcaaatcgncccttacaccctaccgtgattaaaatcaaaggctcagtgatcgcgaggttggtgacccaaacgggcatatatgatacgactttctcatcatttaaataatccccacaaaaaaactgtttataatcttctcactttcagtagagactagttgcaaaaagtgtgaacgttttaaagaagcaccatgttaatgcatcatctgtcatcactgttcttgtttacaagaagttaagagatcagagattgcttctgaagaactgaaaatgttgggcttctcttatattggcccggcaatattcttattcatttgtctgaaacttttaggtct

SEQ ID NO: 137781 - DNA, 281 bp, Arabidopsis thaliana columbia
  unsure (1)..(281): unsure at all n locations
tgaaagatgaagagtncaaaggagagatttgggtggntctctacnttcaagctttcggaaaacagaaccaggggtatggncgaggagtcatatgggggctggaaaaactctgaagnancatantaagagaagaaacaattgtgcgtgtaactgtttgatttgagtcttgggaacaaaatgttgagttttnatttgaaagngtattttttgttaagattgtttttaatgatttcataaaatcgtgagatttttgattnttcttttntagaacttgttttggt

SEQ ID NO: 137782 - DNA, 513 bp, Arabidopsis thaliana columbia
  unsure (1)..(513): unsure at all n locations
ggttttnnnccccgaaattgnccctnnnaanccattcntgnattccggntnaagnttatccccggtttgnttaccaancaggatcggntccaaanccacagttacactgggncccctgccactnttgagtacatcactcgctaccatgctgcccttcaaccagagtatacccnaaatgtggtgtccagacccctcgtctttctactcttatcgttggctttgaccccttactctcgcctcccttcccctatatcagactgatccttctgggactttctctgcttggaaagctaatgctaccggcagaaactccaactctattagggaattcctcgagaagaactacaaagaatcctctggccaagaaactattaaactcgctatccgtgctctgcttgaggtagttgagagtggcggaaagaacattgaggttgtcgtaatgacacgggaggaaactggtgcgccagctagaagaagctgaaattgattcaatcgtggccaagatcgaagctg

SEQ ID NO: 137783 - DNA, 420 bp, Arabidopsis thaliana columbia
  unsure (1)..(420): unsure at all n locations
ccccggaacccgctntgcccatgattncnccaagctctaatccgactcactatnggnaaagctgtaccgcctgcagtcccgtcccggaatccccggtcgaccccacgcgtcccgagcgaggaaaacacgtggaaagagctttggatgattccaacgatgttgattgtgacgtacgaaggagagcaccgtcatcaccagtccacgatgcaggagcatgtaactcctagcgtgagtggtttggtgtttggttcggcttgaagaattaattagtttggtagttttgtaatattttgagaaattgaggggttggttttgtaattttttttctataacaaaattagttttagatttttctttagtagtcttttgaatggattttaatcttaccaccgagaaagaaaaaattcttactacattttc

SEQ ID NO: 137784 - DNA, 530 bp, Arabidopsis thaliana columbia
  unsure (1)..(530): unsure at all n locations
tgccagacattntcgcgcancaactcatgnccattcgtaacctgccattcctggttntggatnacccnttgggctacatnttgcnttatncccatcggccatgntcatgncgtcttgaggacgttaactctcttgttggnaaatcagctagnccagagtatctgcagaaactaacttacctgtgttggaaccaccataaagccattaggcacattgacacagtgagggcatacacatttggctctcattattttgtggaggttgatattgttctcccagctgacatgcctctgcaagtggctcacgacattggagaatcgctgcaagagaagctcgagctactagaggagatcgaacgggcttttgtgcatcttgattatgagtacactcacaaacctgagcacgctagatcccactgttagctgtttatcctttttaaagatctctacgtttctatatctttacaaattaatcttcactgtattgttgtttagtagacaattgtgagataaaggaatacctttgtaact

SEQ ID NO: 137785 - DNA, 471 bp, Arabidopsis thaliana columbia
  unsure (1)..(471): unsure at all n locations
cgaatcnccccttccaaacggatgggggggnggtataacgaacgcntatncatttnaagacncttttggtnanngattagatgtatgnaggacccgcgaaaggcttcatcagtgatnagaatttgggganagttctcttacaagattgtaangaagttgatagnaaagttganatggatgntgatngttccgttaattttgatgagtttaagaagatgatgagtaatggtggtggtgcttgaggatttgaaagatttcgccggagattagattagtcgacggtgatgattcgtattagcagattaattttagtgacggcgattaaaanccctagaagtatgtggtgattgatgaatattgattttaactatataaggttgtttctatatcttctgctctttttataattaatatgctttgttgagtgttattagtctttaatattctgaattaattactgatttaacagct

SEQ ID NO: 137786 - DNA, 426 bp, Arabidopsis thaliana columbia
actgtagtttagtcagtaggtgctagtgtgctccattgaaggtagtagcctcaagtgttggtgcccaagaggtcaaaactttgtgtgttagcttccaaggaatgttgtgaagctaagaactacgaagggtgtgtgagatgtttgcagcaagtggatattgagtacaaggcgttaaagacaaagcttcaagatatgttcaatcttgagaaacagatcattcaagctggtggtatagttcctcaagtggatattaactaaagagactagtccataagaagaaaaaagatgatgactttctttctttagtttctcttctaaattattttggatttggtgtttgctcaaaaactcaataaaatatgtgcaaaaagaaacaaaaacaagtgatggttgtttataaatcagtagtatgtattgtttgatctc

SEQ ID NO: 137787 - DNA, 367 bp, Arabidopsis thaliana columbia
  unsure (1)..(367): unsure at all n locations
tgggaancttgttccnctgcaggtaccgtccggaatccccggntcgccccacgcgtccggagaacgctccgtttatgatcggaggatgttgcgncggagccgtcctttgaccgtcggaacctccggnttgggaagctacgtcggacggaactgggaaaccgatcagtgttggtagtgagttaactcggtgaccgagttagtagaacgagttaattagtgtaaatacgaagccataaaatccttgtaatttaatcatagtaagctaacatggacgggaactagtgtgctaacatacgccatgtgcttaccgtacgctccctcccccacgagcgatcggtgccgtttgtatccgtgtttacgtaggatc

SEQ ID NO: 137788 - DNA, 458 bp, Arabidopsis thaliana columbia
  unsure (1)..(458): unsure at all n locations
gtttccctctatgnccaacattccggttatttcccacttctcgccatgtatgtcctgtctgtaattccatggatgattgatgtgcattgntggctaaggaagaggttagacagcnaagacaaggaatagaagagactgggagtttgttggtctgtatgtgtttgtcagattgaaagaaagaaaagaagaaaagggtngtgaaagagtaataatggggaaaaaaacaaatggtgatgtgaagaagctttgttatttgcagagcaatcaatcaaacaatcaaaggaggaggaaaatagatgtgtttgggttcatcagggaaatgtgtttgcaggatgttgaagttaacaacaagcaaaagcttttcctgatcttttttttttaatattcttattactattattattgttatttgtaattggatgatctcttgaggatatcaaatttggattcggctgttt

SEQ ID NO: 137789 - DNA, 404 bp, Arabidopsis thaliana columbia
  unsure (1)..(404): unsure at all n locations
gtctttaccttggtcccagctncttggctttaatgcccaacaggntgnataantgatancccgagattggagtccnctnagggaaaggacttgaaanccattggccgatggggttcaactgtatcggatgcccacacaattctggaactgtgctcgtgcctgtccaaagggattgaccccagggaaacagatcacacacatcaagcagcttcagaaatctggttgaacaacaaatgaatcaggcagtacctaatggatttttgattctaataatctgcaagaaactccaattttggattcattcttgtattgctgtcacaactatcagaattagattattttgtggtatatcttgatgaattttttttgcctacaacaagcaataaaactctgctttttttatc

SEQ ID NO: 137790 - DNA, 432 bp, Arabidopsis thaliana columbia
  unsure (1)..(432): unsure at all n locations
ttgatnctaaagttaccctttgntngnggagccnggaagatccaaggggntttggatttgnccaactccaatggatgaggcccttgcaacntgctgccatatcagagatggccggaaaggaactgaatggtcgtcacatccgagtgaatcctgctaatgatagaccaagtgctccacgggcttatggaggcggtggtggatacagcggaggaggtggtggtggctatggaggaggaggtggcagctacggtggtggtgatggtggtggttactaaacagaggatgtggttgtgaagaagagttaatggttctgtttagttggtttcttctattgaatcttatgttagtacaaaacctgaatgggatttgctgaaaactcattactcttttttttttggttaccaatcaatttggttgaaatattttattgcc

SEQ ID NO: 137791 - DNA, 365 bp, Arabidopsis thaliana columbia
  unsure (1)..(365): unsure at all n locations
ggctgctnggccctggtnccagtttttcncgggattccagccccagccggggtnnccaggaaccaccgcgggggccncaaccantgggtttccccctgatcataacanctgggcggggatattatctttnccatttagnggatcatcatcagattttagcttcaaggnccggttttgtggtttatacataagttatagtgacttgatttttttgttttgttacaaagttaccatctttggattagaattgggaaattgaatctgtttgtatattgtattatttggaacattgtggatgcccatggatatgtttctgttcaattattttggttttgggtaatgaaatttgaaaccaacgaaaaacc

SEQ ID NO: 137792 - DNA, 262 bp, Arabidopsis thaliana columbia
  unsure (1)..(262): unsure at all n locations
tgatatgtgagttataaatttataactgttttgtttggttntaactggttctccaagtttgttagcatgtgcatgctnctntatattncattttaattngtgaggcttttnatgggacaagatagtagtgttncaaaaggtggcacattacttaaaaatgttgtnaatttttttgtttgtntgtagctttgtaagtgtggtgcatggtgatcgatgtaagaattgtgtttcttttggctttaaantattttccatttactcc

SEQ ID NO: 137793 - DNA, 725 bp, Arabidopsis thaliana columbia
tttttttttttttttttttattgtaagtaaaactttgttatattaaatgttatcaaaaatgtaacttgacacatcttttatacaaagcatcaaaactccagacacagataaagaaaagtaaactttaaacaagaaaactcaattcaacatccttcttacttaagctgtgtagagttttggatcggacaaccttggaacaggaatagccacaagtggagacttcaacttaagaacaagaccaaacttctcttcaacctcaaacttctgtccttgaggagctttccaatcaaaagagtgaagaagtgaagcaatgttgaacagaacaagtctctcagccatgtttatcgccgcacaaatcctccttcctgacccaaaaggcaaatacttaaaatcacctccattgaaatcaagcgaattctccaaaaacctctcaggtttgaactcgtttggttcatcccaattcttaggatctctatgaatcgcccaaacgttgatgaaaatcttggagtctttaggcacagtgtatcccgcaaccaccgaggtttcgctgtttctgtgaggaacaagaagaggaagcgttgggtgaagcctaagagtctctttcataaccgcttgtaggtaaggaagcttaggtaaatgtgattcctcaacgatgttgtctttgccaacaacttggtcaagttctagtcggatcttgtttaaacttccggtctgctcccaatctc

SEQ ID NO: 137794 - DNA, 653 bp, Arabidopsis thaliana columbia
  unsure (1)..(653): unsure at all n locations
caaaggancccatcttatcatatgtactgataaaagcttcacaataatgtcgcggctaanaatgaaatattcaaatatttcaaagagacagcanaaataaaactaaatccattgccctaaaaccccaaacttcaaaccctgcaaattttgattgcacctcctatttacacaacaaaccactcatcactgctgtatccagcatcttnggctttagactcatcatcaccgactgcatcttttgagagttccatcatttgaatanctcctggtttctctgttttaacatngggcataatagcttcagctttgtctacaactacatattcgtcatctgaatgacctttatcaccttcaccactctcatcatcanaatcgttgtanaaatcaaacgtatcaacggggggaatttncctacnaggtcggatcagatatggtaaagggaactccgttgcancctcccctcttccgagaatgcanaacanaaacagcatgaactgggtgccaatgttgccatgtcctgattcaaaaatggtaccttatcgaaaattcananaaaatcgtttatcatatcttganaaatttgatcgtcnacaaattatcaaaactcagtaagaaaaaaacaagacatcngcggtggcnaaaactaaaaattc

SEQ ID NO: 137795 - DNA, 402 bp, Arabidopsis thaliana columbia
  unsure (1)..(402): unsure at all n locations
caacaaggtgttgattcatcgaggacgtattaccgtggccaaatagatccaaaatcaggaatggagaagcaaggcagtgatccaagagctcaaccacaacaccaagaaaatccaaaaaccggttatgataataaccgtggggtgcanacatttgaaggtcttgaacagaagttcatggatgatataacaagactagcanaagatcaaatcgaagcanaggatgcagagatcgccngacatcgagagaaaataaacactataaacgctagatacgaagaacagttagctacacttagnagcacggcacacaggttaganagaananatcntgaggaaagaatcnctanctaggcagcaacaattccagcagcaaaccatggggatgatggacccatnccntcc

SEQ ID NO: 137796 - DNA, 342 bp, Arabidopsis thaliana columbia
gttcayttttkaccamhacwagtgttcatcattagtcgaacggttaaatggcaggcattctgagttcaagcaaaactagaatccgctcttaaaccccagaaacatcataaattcatctgcbaatyyagaaaaaaaaaaccttcgttgtacagacatggagattccaatagagacttcttggaaaaaatttgcctggaaaccgatgcgattggcttcttatctctttctcttggcaccagagcctctycctgtagctttcttctcagcaggcgtaccacctttccctccatggtacccggatccycgaattcttttgctttttaccctgggaagaaataytca

SEQ ID NO: 137797 - DNA, 143 bp, Arabidopsis thaliana columbia
  unsure (1)..(143): unsure at all n locations
gtggctttvanattcgaacattttagaggctgcggtggtgggggtggttgaggcggtgggattyttgtggyttgtctaatggaagcacgatgtttgtttttaaagcggtgacgatttcgcgacgagctttaagccatgtttag

SEQ ID NO: 137798 - DNA, 497 bp, Arabidopsis thaliana columbia
  unsure (1)..(497): unsure at all n locations
ggatcatgtgcggatgaggaatgtggaaacgtgatattccaactaggagtgttgatgttggagctgatcacaggacaatcatcagacagacaaggcaatgacttgatcgaatgggtacaagactcgtgtattgcaaactcaattgataagatgattgatccagatttaggtaacaactatagctctagagaactccagaaagtcttagccgtggctcgactctgcataaaaacgaggtatgagcctccttcattctcaattacacatgtataccggtatctacagaagaagatcgatgttgcaacttgaatactagttttttttttgtgaattgaatttaggtgacatntggtttancncccttatttagtctttngcctatttttacnccntnctaaatntaatancnncttatagtgtatancattgtacttgtcttgaaataacttttganatttgtactgatggcaattgatttctttcttaccttatttgaa

SEQ ID NO: 137799 - DNA, 233 bp, Arabidopsis thaliana columbia
  unsure (1)..(233): unsure at all n locations
tatgcttgatatggagtgcttctcatacttgaaccgtgctcttgagagctcattatctccgatngtgatatttgcaacaaataaaggtgtttgcaacgtaagagggactgatatgcccancccccatggagtccctattgatctattanatcgattggttatcatccggactcaaatctatgatccctctgaaatgatccntattatnnccnttcgtgcgcaantngaanaat

SEQ ID NO: 137800 - DNA, 170 bp, Arabidopsis thaliana columbia
  unsure (1)..(170): unsure at all n locations
ggaggcaaccacttcttgagcttgatgcagctcctagcttgtctcagaaacatcagcaaattgcaaagagggaagaanctgtcaaggagaatatcatcttgtcacaagagagacatatccagaggctaaacgaccttgtncgaagtcttcaaatgcagttacngcgatgc

SEQ ID NO: 137801 - DNA, 204 bp, Arabidopsis thaliana columbia
  unsure (1)..(204): unsure at all n locations
taaaacgancgtcanangangctggtngtcctcctggcgncgtaactaatgttgtatgagatgattgcctcctctcaagaaaatcntccaagaagccatcaacaactttccaataatcttcntcgtcaaaantgcatgcaccnangatntntgttngcttcctantcggcagggangnccntgnctagactanttnntcggngc

SEQ ID NO: 137802 - DNA, 618 bp, Arabidopsis thaliana columbia
gaattatataaagatcataaaatctgtgggtagagaaaatatcaaaagggaaaagtaggaagtttcttattgcctagaaaatgatgaatgagctgaagagcttctctaggtttaaatgtcggaacctggtgtcccgctcctcttaccgtcacaaacattaaaccgtcatactccaccgtccaccctccgacctgtagtttggtgtaccaaggtgtccagtcttggactatcttaagacctagcttctttagtgagtatctggttgcggtcacggggattcgcccgtctgtatccccactgaaaacccatacgcgtaatcccgctgaaacaagtgttcttaaggttggaagcatagaagcgggagccaagaccagaatgagacagtgtcactgcaatgagtccaagggtaagagatgttggtgacattagcgtgaagtgcctcctgaacatcttttctgttcawatatttttctgcggacssgtgggtcgacccgggaattccgaccggtacctgcaggcgtaccaactttccctccatggtacccggatcctcgaattcttttgctttttaccctggaaaaataytcataagccacctctgttatttacccccaatct

SEQ ID NO: 137803 - DNA, 368 bp, Arabidopsis thaliana columbia
  unsure (1)..(368): unsure at all n locations
acattatccgargataacaaaattaaatgctacttactacaaacgataaatatatcattctgtttagcgattgttcttctgcttggatttagatggttgttttctttttgtaaccaacccaaccttttaacccgacccgattcgatatttgacccgcaattcataaactctcaccannbgcggcaagtttgacccggccacgtcagcgtttctctcaaccgttttttccgccgtttcagtttaacaacccgacgcaaaacgctcatccataacggcaaactcttcaacggttccgccaaacacgccactatctccgccgtgatctccccgaaacacggtcgtgatttccmcsgtcagatgaaacgcwt

SEQ ID NO: 137804 - DNA, 390 bp, Arabidopsis thaliana columbia
accaagaatgaagtacacgtatacagataaaaataaagaagaaaaaaacagagacaacttttccggagattttactttagaaagcaaagaaaactaaatcaaaccaagccttcaaaaattaggtagctcttataaaccggatcataaaaccaaacatcaaaacatatgtatgctctttcaaaacatggtaccaactcacgagtcttttcatcagggccgattctcaccatcactcaatggtctagacaccatcagtttggggttcaacttctgatcttttgggtggtggtggaggtggtgatctgtcgtaatgctcagcaacaagtgaaccatgagaagaaggaagaaaaacctgasgagactccaycgatggaaaawaagaggatggta

SEQ ID NO: 137805 - DNA, 427 bp, Arabidopsis thaliana columbia
tgttcaaaactagatacatcaaatatctttaatgtctatcatctatacatgcaatacacttgtctagaatcaagcaatgtgctcttccttctctctgtacacgcagatcacttttgaagtttgtgcttcaccctagcttttcgaatagagttgccacgagatcttcccgagctttctctaaggcacttgggagattttcaggctttctgcgcctgcctgagcaaaattgggctttccaccacctcctccgccacacagcttagctatggggccaatgaatttccctgcttgaacacctagggagactactccaggactaaatgcagcaactaaactaaccttgtctttttctggagatgakcctagtaccacagsgactggatcttccaatgtgcttatcaaatgstcagctgcactctttaatgag

SEQ ID NO: 137806 - DNA, 246 bp, Arabidopsis thaliana columbia
  unsure (1)..(246): unsure at all n locations
cgaagaaactagaaaacgagatcgacgttatgtcatcgttaccttatcacccacacgtgttaagctttctcggccatgccgagaaaaaactcatggtcgttgagtacatgccaaacgaatcgttataccaattattacacgtgtcnactgatcctcttcccacgtggcttaaacgcatcgaaatcgctcttcanatcgcgagtgcggttntnttcctccatgaacacggtatcacccaccgcgata

SEQ ID NO: 137807 - DNA, 194 bp, Arabidopsis thaliana columbia
  unsure (1)..(194): unsure at all n locations
gttgatctcttcagtttagggtgtgtnctgtttaactgtatgactggaggtaaacatccttacggagacaattatgagagggacgttnacgttttgaatgatcnnnaggatcttttcttgatcganantctnccanaanctgtncatctnctcnntggtctcctaaacccggatccnnnttngagaccgananc

SEQ ID NO: 137808 - DNA, 312 bp, Arabidopsis thaliana columbia
  unsure (1)..(312): unsure at all n locations
cgttctcacaagatcaagaatatcangaaacaagatcacttctcaatcctcgaagatgacattgagcagagttcatcaacaagttattgcatttcctgctgtcaatactgctccggtgggttacttgcctgatccagcttccatcaacaagcttcaaatcccaacttcttcaaaggtttcgatgcttcaaaagaagaaaaccgatttnttctctnncggagcaagagatcgggacaagttaggacccaagctaaccgaaacagtaaagnagaaagctatcctttgggagctnagatccttccaatggggagg

SEQ ID NO: 137809 - DNA, 242 bp, Arabidopsis thaliana columbia
  unsure (1)..(242): unsure at all n locations
aacaagtcaaagccaagctgggatgacatttgtgcgtttaaagtatttcctttcaaatgccaaacatttctacagttatttgaacttgacgatgagtacattcaacaagagataagaaagcctcccaagcagactacttgtaattataaaacaggatggttctctgaagcgctgcttgacaatttgaaactccgtgtanctgtnatgtttgtatctgtgtnnccngagccaggtntcgaana

SEQ ID NO: 137810 - DNA, 352 bp, Arabidopsis thaliana columbia
  unsure (1)..(352): unsure at all n locations
tatccacaagtacgtccatgagtggccttcaaaccctccttctttcaaggaaatagtaagtaaatacagtagagaagtaagagaagtgggatttaaaatagaggaattaatatcagagagcttaggtttagaaaaagattacatgaagaaagtgcttggtgaacaaggtcaacacatggcagtaaactattatcctccatgtcctgaacctgagctcacttacggtttacctgctcataccgacccaaacgccctaaccattcttcttcaanacactactgtttgcggtctccaaatcttgatcgacggtccagttggttccgccgttaatccgcatcctgatgcttttgtc

SEQ ID NO: 137811 - DNA, 381 bp, Arabidopsis thaliana columbia
  unsure (1)..(381): unsure at all n locations
gtggagccaaacatggtctttactccacttgttccctcacagcctcattacaatgtgaatctgctgagcatctcagtaaatggccaagctttacctatcaatccatcggtcttctctacatcaaacggccagggaacaatcattgacactggtacaacattggcatacctttctgaagcagcctatgttcctttcgttgaagctattacaaatgctgtttcgcagtctgtcagacccgttgtttcgaaagggaaccaatgttacgtaataaccacaagtgtcgganacatatttcctccagttagcttgaactttgctggtgggaacatctatgtttcttgaatccnccagggattacctccatacagcanaaacaatgtc

SEQ ID NO: 137812 - DNA, 271 bp, Arabidopsis thaliana columbia
  unsure (1)..(271): unsure at all n locations
ctcccggtgcagcacttactccaccgcanaagttagagattgccaggcagctanctaaactccgagtagacatcatggaagttggttttctggtgtcgtctgaggaaaaattcnaanctattaaaaccatcgccaagaccgtggggaacgaggtggatgaggaaaccggttncgttcctgtgatatgcggcattgcacgatgctttttttananacatcnaggcnncttgggaggcactnaantatgcnaanaggccnaagggttattgct

SEQ ID NO: 137813 - DNA, 347 bp, Arabidopsis thaliana columbia
  unsure (1)..(347): unsure at all n locations
ctgatgaatcacttggagattgggcaaacttggaaacgatgcggtattgccatccgatgtattttgccaggaggatggccgaggttgcttcaactgaccctgtaaattggatggatcagccgtccgctggccttgctatccaagggctcttgagtcgtgtcgtantggaanatcactcggatatccaaaaacatatctctggttgtatatctacaggcactgacaaaaacaaggatggagaaaactcanaaaganaaatttgaaggcnttantganaatgaatctganatattgcaggttgaaaattccaanaaatgctatatccgtactacnagctgganataata

SEQ ID NO: 137814 - DNA, 457 bp, Arabidopsis thaliana columbia
  unsure (1)..(457): unsure at all n locations
gattgcgttacggggaactgtcccaagtgatgtgagtgattggatacataacagccgtattgtactcgagaaactccatggcgggggtaagcatatgcatgtcattagaaaaatctattctttggtggccaaacacggaaacacagctgtctggatcgctggacactctttaggagctggcctggcactactcgcgggaaaggacatggccatgtctggactccctgttgaggcttacatcttcaacccacctatctccttgattcctctagagcagtgcggttacaatcacgaacttaattttgtgtntcgactcaccanggatctcttcaaagctggcatagccaaaagtcgtanaccttgatgaaggtcaagaaggtccacgatataagaacttagcttcttgganactcatttgtttgtgaaccaatctgatgttatatgctcaaaatatatt

SEQ ID NO: 137815 - DNA, 294 bp, Arabidopsis thaliana columbia
agccattgggggcaaaaggagcagcagcagatgttgagcaagggacagttcaggtgagcgataaggtgaagaaaatggctgaggagtgtagagatggagttgggaagatctctcagaggttcaagacctaaagtaacagtcttttaacttttttgtatcttgtttctacatgataaaaataaaagagaataatgggatggccattacatttacagtattggtcagtgatgttcagaattcataattgtatcattttgtaatctttgttatgtggtttactaatacttacacttt

SEQ ID NO: 137816 - DNA, 410 bp, Arabidopsis thaliana columbia
  unsure (1)..(410): unsure at all n locations
cggatggggtcacctccacgaaaccacgatgaaaactatgacttggtaagccacagatcaaatagagacccaagccccactgaaagtcagaaaggaggaagattccagtcactcgtcataaatagggagaggagaggaagattttcaaacttcgagggtcctgtttcaaatttttcaagtggaaatatgcctgctccaaacatccgcccttcaaatatgttcaagcagagagggaaccatatgccagttgaacaagggatcgattctccttctgaagaaaatattgttgaagacataatgggaaagcacaatcaatttgtcagctctatgcagtctcgtttggctaagttacaggtagttcgtanatattgggaaaggaatgatgttaaaaattcgataggctcgataga

SEQ ID NO: 137817 - DNA, 423 bp, Arabidopsis thaliana columbia
  unsure (1)..(423): unsure at all n locations
cagacgaaatggctcagaaagtggtgctgaaggttttaaccatgactgatgataagaccaagcagaaagccatagaagctgcagctgatatcttcggtgattatttcttcctactacttcttcttttctttaactactttttgattgaatttcaattcttgtttctgtttattattgtactttttagatttttaggatttgaaaaaacaaaaagaaaggattaatcaagtttgctgctggtgttttcactcactaaattaccatttttagctnaagttatacgaaacaatcggtatgaaatctagctcgattgtagtataattgcgtcagaatcttgagagcttggattatttgacctttttgacacatagtccacgaaatgatattctgaacattttgaaagcccgtattttatgggccgga

SEQ ID NO: 137818 - DNA, 370 bp, Arabidopsis thaliana columbia
atcccattgtgcaagatcaatggagtgaaccagagtcagaacacaaagaagccatctcaaaagtaccttgaaatagtcacaatcgataacttcgacttctggttcatgggattcgtgagctaccagaaagctttcaactgtctcgagaaagcgctaaacaatgatgagcaataaaccgcagtggttttctctgacggagctaattagtgcaggtggaacaagaaatatttcatttctactttcccctgtttcagtcagagaatgtttgtacaaactcacaaattctttttttttgctttacccactttggtttccattgtagacacgagaaagagatgaatatatttagttgatctcatctgttaacctt

SEQ ID NO: 137819 - DNA, 457 bp, Arabidopsis thaliana columbia
  unsure (1)..(457): unsure at all n locations
atttctgtctctgtggagacagctgaagaagcagcagcactatcaatggcgtctctgagattgttctcaacgaatcatcaatctcttctccttccatcatctctctcacaaaagcctctaatatcttcaccaagattcgtcaataaccctagcagacggagtccaatacgatccgttcttcaatttaatcncnaaccggaactcgccggagaaacgccgcgtatcgtcgttatcacctccggaaaaggcggtgttggaaagacgacaaccaccgcaaatgtcggtctctctctcgctcgttacggtttctcagttgtcgccattgacgccgaccttggtctccgtaacctcgatctcctcctagggttagagaatcgagtcaattacacttgcgtcgaggttataaacggagattgtcgtctcgatcaagctctggtacgtgataagcgttggtcga

SEQ ID NO: 137820 - DNA, 391 bp, Arabidopsis thaliana columbia
  unsure (1)..(391): unsure at all n locations
ctgtcttgagcttaanatctacggtcagtggatgtccggtggtcaacgacggctctcccgggtcgccaacccgaccaaccatctctcggtcgttgggaactttgttggggccttgcttggtgcgtccatggggcttagagaaggccctatattcttctatgctgttgggatggctcattacttggttctnttcgtgactctctaccaaaggctaccgaccaacnanactttgcctaaagatcttcatcctgtcttcttcctcttcgttgcggctccaagtgttgcttccatggcttgggctaaggtcactggctccttccattatggctccaaagtttgttactttatcgccattttcctctatttctcattggctgttcggatcaatttc

SEQ ID NO: 137821 - DNA, 360 bp, Arabidopsis thaliana columbia
cttccattactttctttgcttaaagttaataacattggtattttgtttaatctcatcagcaagactttttagatcttaggacagcaaaagaatttaacttattgttatgcactggaaacgaaagttgaaaaaaaaaaatcttatttccaaatgagatcacccatgaacttaagtgcgggaacccctcttatctctgcgtctagcaatggcgattggatcaattttaaccccgaaagttctgtatcattctgaataagtccaagcacacgcgtttgttcctttcgtcttattgagcaaaatttgcaatcggattcagattgaggtagaagctgattaacaataagccggtggactggcaca

SEQ ID NO: 137822 - DNA, 328 bp, Arabidopsis thaliana columbia
gagaatgcttgcctagaaagctatcaagcgcaacgagccttggaagcatggaggagagctattttctgcaagcttctcttgattcttcagataaattttctgagagcacgtgcctgaggcaactatgagtccgtactacatgaagagcatcacaccgagtgcttatgaagccacacttcgacagaaagagggtgaacttgcggcatacatgacccgcttggcatcaatggagtctatccgagattccctggctgaagaactagtcaaatgacagcagagtgtgagagctacggggaggcagataggtccggcataagcagagctggaa

SEQ ID NO: 137823 - DNA, 260 bp, Arabidopsis thaliana columbia
taatcacgaaagaggggctcgtccaaatcctgtgaaggaaaaagaaagagcttcagaaagggaatggtctggttcatctgatagaaggaatcgtgaggataaagatgctggttatgaaagggacataccgagggagaaagatgttggtcacggttatgatatgccagagagaaggcatcgtgatgatagagacaccggtcgtgagcgtgagagggaacatcatcataaggatcgtgaacgttcagagaacatgttcgtga

SEQ ID NO: 137824 - DNA, 301 bp, Arabidopsis thaliana columbia
  unsure (1)..(301): unsure at all n locations
caatcttcaaaatctcttccttccatgattccgttatcgtaaagatttgtcctttatccaaattttaggattttgaattcttcttctttccgattaccggattccaatggcgccttttgttgaagtctgtaggtataagccattaccgctttcattgagctctctctgtacatgcccttgccgttcctctccaaggaaatatctaatncttcctcaattctctgaaaagtacccgaaaccattgttgtctcattctcgctttactccgatttctgttaaccggagagttatcacggccgtt

SEQ ID NO: 137825 - DNA, 260 bp, Arabidopsis thaliana columbia
gcacgaggacccttctcttcaattccctctaaaaccctaaccccacaccaaaagtcttcctttgaatcaactctccaccattccctaatcacccacgacactgatgaagcatggaaggtcttccgatccttcgctgaagattcttctctcccggacaagcgtctcctcaattctctcatcacccacttgtgcctccttccacaacacagatcaaaacacctccctcaggcacagactcaagcgtgctttgttcacgacgg

SEQ ID NO: 137826 - DNA, 355 bp, Arabidopsis thaliana columbia
tgttcgcgaactcgtcaaattacttggttgaatctgaaggtggtggggtacctctcccatcaggaggcattcttactcctaagggtcttcaaactcttggtctttctggtttaggatcaagtactggttttgagcgyctgcattatatgttggagagagtatgggatcctattttagttactggmgctccaaagtgtattagycagtccttcttaaacgcttttgagagttggcattcttttgatacaamtccactatatgctcttctccacgaggccatatactgtggagggtgcttcatcaggatggtctgctcatmgattacgggataaatatgagtacaaattcgacgcaa

SEQ ID NO: 137827 - DNA, 217 bp, Arabidopsis thaliana columbia
  unsure (1)..(217): unsure at all n locations
cgcttagctactggcttcacttatctcggccccaaatttatgaaagaaaatggcataaagcatgtggtgttttcaactgcagacggagcactggaggnagctccagcgatggggatagctgangccatcttggatctcgtgagtagtggtataacactcaaagagaacaactcgaaagaaattgaaggaggtgttgngctggcaaagccaggcggca

SEQ ID NO: 137828 - DNA, 252 bp, Arabidopsis thaliana columbia
tcaaccgtcttgtcaggcttcacaacagctgggcttatcctactcgctaagcagctttcatcagaaaaagagtgaattcataatccttcaggggtggtctctattactctcatgtacagtgccaaatattcaaatttacaatagcaaatttttctacttcctctgtctatgcgttaaactatggaatgtgttgagtgtatattcttatagagaaaacgaaatatctttgttatgaataattgaagtttgcca

SEQ ID NO: 137829 - DNA, 300 bp, Arabidopsis thaliana columbia
tagagatagttgattaggtaagctacagttatttttataccagattcagtcccatacaaagagtatagtaggtcacattggtgattagtcataagtaacagaaagaattattatataatgacatcttcgacattctcgtccatgatatttctcctcgtcctcctgttttcccttcatatgggtgaagctcttggtgctcaaactgagatccgcaaaatcaaagagacaattaggatgaggaggaatttggaaggcaatgactacagaaactctaaaatttggactggacggagctattca

SEQ ID NO: 137830 - DNA, 174 bp, Arabidopsis thaliana columbia
cagatctaccggaagatgaacggagaagagatgataaaactcttcgagactggagcagatgttgtggtaattggaagtgggataggaggattatgttgtggtgctatgttctctatgtttggattcttcgttcaagccatcgtcactggtaagggaccgatagagaaccttgct

SEQ ID NO: 137831 - DNA, 239 bp, Arabidopsis thaliana columbia
ctcgttgaaaaacaacaatgacgaagctcttcttcttcttcttcttctccttcctctacacaatcacaaccctaacatttccgccattaacaacctcagcagcaacatcatgccgaacattatgcggcaacatcccaataaactacccgttcggcatcgacggcggttgcggatctcctcaatacagaggaatgttcaattgctccaccgatctatatttcaccactccttccggcagc

SEQ ID NO: 137832 - DNA, 295 bp, Arabidopsis thaliana columbia
caatttttcctaaagagtaaagaaacttctctcctgtcttttctccttctctatctctctccctcaaagctaataaatacaacatttgcatctaacgtttctctagcacaaaaatatgcactcgagttgtttattgtacctcaccgtcctcgtcgtcttcattgtctctttcgccggcggcgagagattcaaagaagctccaaagttcttcaactccccggagtgtctaaccatcgagaacgatgaagatttcgcttgttcagacaaagccatccacgtggcaatgaccttagac

SEQ ID NO: 137833 - DNA, 146 bp, Arabidopsis thaliana columbia
cgataatgcttgtgcttgttaaagttctgagattatccaagaccccagcatttcgtgtacaaattgcttcactaattggtttgttaattcggcattctacttcaatcgaagatgacttggcaaattctggtattttagactctctt

SEQ ID NO: 137834 - DNA, 210 bp, Arabidopsis thaliana columbia
ttgttagagagggccatgtctccaagaattgttaatgaagctcgttcagatctcattctctgtttcttcttcctctctcttccttccttctcttcccttccatccttccaaaccctattccccaattctcattcccttccttgtgcttctcccgtctccttccaacccggctccgactccgagtcactgctagaatccgaatttgaatct

SEQ ID NO: 137835 - DNA, 227 bp, Arabidopsis thaliana columbia
ctcgttgaagaccaactttcccaaaatcatttagtaacatcaaaatttacaaaaaacaaaaaaacatgctatctctcaaactcttcctcgtaacactcttcttacctcttcaaacactcttcattgcttctcaaactcttcttccttcttcttcaaacacttcatcaaccatctgcaaaacaacacccgatccaaaattctgcaaatcagtgttcccacaaacatct

SEQ ID NO: 137836 - DNA, 159 bp, Arabidopsis thaliana columbia
tgattcaaaaataatttggttagagagtcttaaacgaaactaagagagcacacaagtttctcaacatggccagtcctaattggccatctttacttatggtggtcttagccttgtatcccatggctgcgtatacaagtgctcaatactctccaacaccaa

SEQ ID NO: 137837 - DNA, 127 bp, Arabidopsis thaliana columbia
tggaggaggaagtacaatgagaatattaagctacggaatcgttattctctctttactcgttttctctttcattgaatttagcgttcacgctcgtcccgttgctctcgtcctctcaaatgacgatctc

SEQ ID NO: 137838 - DNA, 217 bp, Arabidopsis thaliana columbia
cacacaacacagacctaaaaaaatgtcttctctgcgtttgcgtttatgccttcttctactcttacctatcacaattagctgcgtcacagtcactctcactgacctccccgcgtttcgtgaagctccggcgtttcgaaacggcagagaatgctccaaaacgacatggataccttcggatcacgaacacaacccatcaatcatccacatcgctatgact

SEQ ID NO: 137839 - DNA, 256 bp, Arabidopsis thaliana columbia
tcacaggaggaacgggtagcttaggtacagtcactggtggaacgggtagctagataacaaaataacggagttgaaaatgatgtttaataaaatatccctaatcactgctctgttgttttttctattaggaacgaatgtgttcgcccattcccatttagaagattcatctcctaaagatggcgcagtgctaactgaatcattgaaagaaatcaaactaacatttgaaacgagccttgaaccaactagtacatttacg

SEQ ID NO: 137840 - DNA, 152 bp, Arabidopsis thaliana columbia
agagagatagtaagagtaggcgccctcaagaaaacagagtaaaaatggatcaaactttgtatcgcaagtgtctggttactttatcgatgatggcaatgatcggcacatcaatggctacatatgccgggaccccatggcgtacagcctcagcc

SEQ ID NO: 137841 - DNA, 217 bp, Arabidopsis thaliana columbia
  unsure (1)..(217): unsure at all n locations
ggactaactgacgatgtttgttgcggggcatatctaccgctataatgttgatcagttnggctggtcagctaagtccagtgaatttctggaaaaaaggcagctgaagtggggcagtattttattccattacggaatngnatttgttttctttggtcatgtagcaggtattttggttccaaaggcattntatgaaatgattggtgtaacagaccatatg

SEQ ID NO: 137842 - DNA, 688 bp, Arabidopsis thaliana columbia
  unsure (1)..(688): unsure at all n locations
gcaaggacaaaaaangggggaagaaattaagggaaaattaaggacaaagaacgcnccaacagatttgttnttcnggagnggagggggtatttggagaaaagaaatttttcnttctttattnaaggnaaataatttttaangngcacggtaaacggccttccttccagtaaatggaatnggaataaaaaaaagttggtgtntggntttcaagtataaatagaccgcaannatnaatctnggtttcctcgtcatggttctcgttccctttcttcctggtttctttttnggcacaanatttcaagntataccaagcatacaatcaactccaagtgaattcggaaaaattaagatanggagggantctngaagttgtcaactttggtgattgtgtgcatgttagtgaccgctccaanggcgtccgaggcagcaatntcgtgcggcgcagtcaccggcagcttaggtcaatgctataannactngacccgaggcggtttcattcctagagggtgttgntcnggcgttcagaggntcaacagcttggntngnaccacccgtgaccgccaacaagcttgtngttgtatccagggtgcagcgagagccttgggttctcgactnaacgctggtcgtgctgctngtctcccctggtgcttgccgtgttaggatntctnaccccatcagtgccagaacc

SEQ ID NO: 137843 - DNA, 369 bp, Arabidopsis thaliana columbia
tgtaactgacagagtgggataagagacaaataaggagaatcaaacaagcaatccgatcgatctaccagatcgccatgattcttacaagatgcttacccttgatatggctatctctacttactgtgtgtgctgctgggaggacattgcaccctctcccctgttaaaggacccaaaactgtcaagcttcaacttccgacttcacgtccttataacatcgcacacagaggttccaatggagagatcccagaagaaactacagctgcatacttgaaagcaattgaagaaggcacagacttcatagaaacagatatcttatcatccaaagatggtgtgctcatatgtttctatgattgtattctcgacgaaaca

SEQ ID NO: 137844 - DNA, 365 bp, Arabidopsis thaliana columbia
ggctaccaaacttcgctaaactttagtgctttactccaaaacccagagtccatcacacaagtccaagcccgaaaacaagggttcttgctccgacacgacaacaaatccagattttgagcttagggaaacttgagaaggagaaaaaaatgtcgaacatagacatagaagggatcttgaaggagctacctaatgatgggaggatcccaaagacgaagatagtttgcacattaggaccagcttctcgcactgtttccatgatcgaaaagcttttgaaagccggtatgaatgtggctcgcttcaacttctcacatggaagccatgaataccatcaagagacactcgacaacctccgctctgctatgcaa

SEQ ID NO: 137845 - DNA, 509 bp, Arabidopsis thaliana columbia
ggtcttcttcttctacataaaattgattcgcctcgaaatttacacagacttgtcgctctctctttctctcttatttcacagagcccctaaacatttccaaaaatcttgcaaaggaagaaaaacaatggacaaattttggactttcctcactgctcttcattcaggcgctgggcctatcgtgatgttactttatccattgtacgcatcggtgatagcaatggagagcacaacaaaagtggacgatgaacagtggcttgcgtattggataatatattccgttcctctcactcacggaactgattctgcaatccgcttattgagtggattccgattttggtatacggtgaaacttgttgttcgtggcttggctagttcttcctccagtttcaagggcgcagcttttatctacaaccgtgttgtttagagaacaagttcaagaaaacacgggggtcctccggctccacccactccaaagcccaccaagccccaacatcctccactccattttt

SEQ ID NO: 137846 - DNA, 421 bp, Arabidopsis thaliana columbia
gacctcatcattcttccttctggttaactgaaaatggagtgtagttcagtgagtgtactaggaatattactggtatttcctctccttcataaccttgtcaccatctccgggcagaatcttccggcggtgggtttgttcactttcggagattccaacttcgacgctggaaataaaaagttcctcacaagtgctccacttcctcaaaacttttggccttacggtaaatctcgagatgaccctaagggcaagttttctgatggcaaaattgtcccggactttattgctactcgtttttataggtactctatactaaatggaaattttgattggtaattaaagatatatgaaattgatgaggggtgaataaatcacagcaaaattcatggggataccacacgatttaccgccggcgctaaaaccc

SEQ ID NO: 137847 - DNA, 486 bp, Arabidopsis thaliana columbia
tgatcacatcctcacacacaaaaataaatcatcacaagaccagagttaaaagagagacatgtcgacttcattcacaatgatcggcggtgaaggtcccaacagttaccgggaacattcgaaataccagggagcactggttatagctgcaaaggaaaagatgaatgaagccatctccacgaaactcgatatcgactttacttcaaatcttgttaacatagctgattttggttgttcctctggaccgaacactttcaccgcggtacaaaccttaattgatgctgtggaaaacaagtataagaaagaaacagggagcactggttatagctgcaaaggaaaagatgaatgaagccatctccacgaaactcgatatcgactttacttcaaatcttgttaacatagctgattttggttgttcctctggaccgaacactttcaccgcggtacaaaccttaattgatgctgtggaaaacaagtataagaaagaaa

SEQ ID NO: 137848 - DNA, 361 bp, Arabidopsis thaliana columbia
gacctccactttcccttttgcccctcttttttacagatttcactctctgctctactactctctcctcctcctcctcctaaagaaagttcttaactctcctgggttcttcaggtttttccttttctggaataaaaagaagaagaaatgggtgttcttgatcatgtctctgaaatgtttgactgctctcatggtcacaagattaaaaagcgcaaacagttgcaggtactttccctcttccttttcttatcttagcagattcagctgataacttagatcttggtttgcaaaaaaacaaacataataattcgttgaaaagttatgatgaatgagtctagttagaaactagcttcgatggttacta

SEQ ID NO: 137849 - DNA, 180 bp, Arabidopsis thaliana columbia
gctctctcctctctcgctcgctggcttcgaggagaaaaaagaaaaattggagaaataatttaactggttctcggaaaatctagggttctttttagccacgccttgctgatctccttcgtgaattcgattccgattctcacctgaaaaaaacttctttaaattgggttaaagctgctgcta

SEQ ID NO: 137850 - DNA, 207 bp, Arabidopsis thaliana columbia
tggagcaagaacaataagaagaagagaagatgggatttgaagaacggagggattctattaaaggagctaatcgcttccttcgacggcaaaaccaatccgattcgttgcttctcctccgatcagatccttaaagctaccgacaatttctccgaaagccgaattatctccagctggggatacttcatatggtacaaaggcgtaatcgaa

SEQ ID NO: 137851 - DNA, 476 bp, Arabidopsis thaliana columbia
tgactaaaatatttatttttattttccttcaaaaaatctccattcggtatcagccatagccaaacctctcttctctcttattgttgggatcgacaaattttgccttgattagctcggaaacttgtaaatcagagaccctcgtagaaactacccagaaacagcatctccaaggaacaaattaatcattatactaatgcctctgatgctcttcttttgattttgtgatcgacttctctttattaagtctacacctaccagatgcagattataggttcatttttttgtattgaactttaagccgatatagagttgttgtcatagatatatacagcgagttattgaagcaatggatgttaatgaggttgaagaaaatttctttgcccctggtgatgccaagctacacggaaaaatgtgcaatgccctttcagtgatctactgcaagatcatgtctattttcccgtcgcttgaagctgcta

SEQ ID NO: 137852 - DNA, 194 bp, Arabidopsis thaliana columbia
gatcctcaagcgataacaccacaaacaaaacaataatccaaaaaaaaaaagaaaaaagaaaaaaagagcaaatctccatcatcatcatggactcgtctccaaacgacggtgtacaccaaccgcttctccatcctcaaccatctccatctccgccggatttaaccaacggggaactaaaaactgtcctctccgac

SEQ ID NO: 137853 - DNA, 155 bp, Arabidopsis thaliana columbia
gagccttaaaaccaggcagccactaaaaaaaggaaaaatattgagggaaaaaaatcactttgataaattcgccgccaatctaaacccgttaattttcttattcggaaaaaaaaaatgattggaagcaaaaggaaggcaaccccggcaattaggac

SEQ ID NO: 137854 - DNA, 223 bp, Arabidopsis thaliana columbia
  unsure (1)..(223): unsure at all n locations
gagctccaaaaagtcggtggtggtggaaanatccggcgtcgtcggatccgaaaaaaaaaatgaaggtttcaagcggtgtggtcgcttctgtcattgccgtctccaccgctgctctctcttcttcctccattcttcctccagtctccccaaaggtttgggaatcgaggaaaacgaatgggtcggacaatttcgagccgaggtttgatgggttaaggttcataaa

SEQ ID NO: 137855 - DNA, 793 bp, Arabidopsis thaliana columbia
ccacgcgtccgataatggtgtcagagttctctcccttctctctctaggattttgatttatgttcttctttgtcgttgtctttcaccgccgttaacatggctattccgttgccgtgttcttgccgtcaacatggctattccgttgtcgtgttttatgtcgtagacatggctttccgttgccatgtttttatgtcgttgcttttgttaggtgttgtttgtctgcttccaataaaagggaattgtctatcgtctctgtctttacagagtttcatgagagatgacacacctatcttatatgtttctagtttatacaagtgtttttatgttcgttggatttgaagcgaggctttaccatctatggtgaatcagatctatttagaacctttagttggtggcttttctccttatcgtcatgttgggtatatggattacagaaatttcagggatagttgcaaataatgttgaagaaaagaagaaatttcattcaccattttaagatgccttttatccgtgatttcaagtgtttgatcaagttttgattcgtattgcaaccagctttatcggtgaaaatcagaaaaatcaatggtcgaatttcagttatcgtcaatggcggaggttgatgttggaaagcttttagaatttcatccaacatgtgtaccagtgttgacacgtttgtttggagatgaaatcaatgagaaactttcttcagattgaagcaatattttgtgtgggcctttatgagctgtaatctgttttgtaacccatcttgttatgaataaaatcttaatattgag

SEQ ID NO: 137856 - DNA, 215 bp, Arabidopsis thaliana columbia
  unsure (1)..(215): unsure at all n locations
tggatccaggatggggtttctaanatcagactccgaccaaatcccaaacagcttganntagttctccaaactcgcgaactcggatgagcttaactcctccttaacccgatattgccangggatccantatcnggtttggtgaccgaacgcatgggcattgatatccttctttctccatccacagactttgacttaagtttgtttaacccccatac

SEQ ID NO: 137857 - DNA, 216 bp, Arabidopsis thaliana columbia
  unsure (1)..(216): unsure at all n locations
aagattgangcnatggtnacnaaagttaaggctgaggacnaangtgaataganganaaggaaantnaanaaatnnaaacacncggcngacatgtcacttagtnttctccgnggtggttcngcccntgagtcgcngggcncantcgccaaggagtgtcaacggtgncctgggaatgtgtcngggacgggggacntggggnntccctaatggtnactg

SEQ ID NO: 137858 - DNA, 224 bp, Arabidopsis thaliana columbia
  unsure (1)..(224): unsure at all n locations
ccatggtacccggatcctccgaattcttttgctttntaccctggaagaaatactcataagccacctctgtnatttacccccaatcttcacaagaaaaactggngatttngatatcgtctctctatgctgtcacctanattcaattcacattgatgaagatcatcctatggatgcnaaaaatggggtatgtcccgtntgtgcggtgaaagtgagctctgatatga

SEQ ID NO: 137859 - DNA, 547 bp, Arabidopsis thaliana columbia
  unsure (1)..(547): unsure at all n locations
agncnggngccgctctacangaaccaaactnannttnacntncgnnctaatcncncctctncgntnctgtaacatatnttcncttacnccnatggtcccacggatcctctacttctgggtctgangacactgnnngaaaataatcactatcaccggatnagtatatcttagcccctnccgtcccaactaaaaacgggaatcgtctctctatgctgtcacattgatgaagatcatcctatggatgcaaaaaatggggtatgtcccgtttgtgcggtgaaagtgagctctgatatgattgctcatataaccctacaacatgcaaatatgttcaaggtgacgcggaaaaggaaatcaagaagatgcggggctcaatccatgctatcgatcttgaagagagagtttcctgatggaaattttcngagcctatttgaaggaacatcacgtgctgtatcctcttcttctgccagtatactgctgatcctttactgtcttcattcatttccccaatggctgatgactttttcctttctgaatcaatctatgtgca

SEQ ID NO: 137860 - DNA, 557 bp, Arabidopsis thaliana columbia
  unsure (1)..(557): unsure at all n locations
gnantcgatcatacccagnanaggtgtcgtatgaggtggtgtcnancaatcngtcncacggnacnttgtggttgcgacttcttttcggtgtnccncgnccttcccgtgtaatangctnnatnancncaaangatttggtgattgagnaanatggggaatcancgtcnctggatctccnccagtnnnctactaggtcngtacnntnagacaccggcncgganggantctgcnnnaccgcttcnagacaatcttntatgtnaatacntcanacgaggcatatacaangcagttgaagctggtanctagcatctttaatcgggccaattcttcgtccatacaaggatacgngcttgtcccgcatnttgccncccncatccggtntggaggatatgtgatcgnctcttgagatgggatcgtgttgtttcgctagccgatctcattctccgttcccagaagagttagaanagattatttatgntaanacggcnttcagaattgtttgttaaatttgttgccnaatccttttgnatanttnttccctcggggtnccctcgttt

SEQ ID NO: 137861 - DNA, 586 bp, Arabidopsis thaliana columbia
  unsure (1)..(586): unsure at all n locations
tnagtcgncggnngctccataggatcctnacttacgtacncntgcangcgacttcgnnactnntctatnctgtcanctaaatncaattnnnggggcnncattanaatcccnctnctnccactncnnatccggaaaccatgncnaccagggantancggatgtngcttctcggantccgcnggccctntatgaaagttcaangtttntgggttccngggggaatatggtcccaaggctnanncttaagagatttgactaaagggcgnccgntctttaggagcccnactaacatccgcttgcntncnacttcctacctcttctaaagtgtccctggatncantnctcncatggtncccaganccncgnatncntcttggacttcaccatgctgagnttnctcggggagtggggactaccgccaaaaacttnnnngaattgacnaaagggcggncgctctanaagaccancttacttccctncntgcnacntctnctcttctatnntgtccctnnatccntcccccntggtnccngatccnccaatcncttggacttnnccnggctgaacttgctccnnnggtggggaa

SEQ ID NO: 137862 - DNA, 193 bp, Arabidopsis thaliana columbia
  unsure (1)..(193): unsure at all n locations
cctacggaggtctanncccccttccggtacangnncgnaatnnncaggncggtnctngcttacganaaatgtnagcaaatgagaaggaagttgangangttgacaaacgtggcggaaatatcactgaaatttacacaagtggnggtacggcgcnnaaatctctctgcatattcacgntggagtntcngcggtt

SEQ ID NO: 137863 - DNA, 316 bp, Arabidopsis thaliana columbia
  unsure (1)..(316): unsure at all n locations
gttnacgancanggtaaatanatgatnntnaannttntcanctngatacactccgcnnatanttcccngatnntccactgcggtggttcggcnccnnagtcgcanntgcncattcaccaccgattntctacggncnctggnntctgtcgnggacntgggacgtggtgcttantaatggttactgttttctagctctttagtggttgaatttacttgtcgtttcttaatgtgtatttttcattgtaatagaataatcgatgttttgtaatatattaatgtatttgatatttctcaactaatttccattgtaatattg

SEQ ID NO: 137864 - DNA, 584 bp, Arabidopsis thaliana columbia
  unsure (1)..(584): unsure at all n locations
aggntcctctacgatcgacctgactannctacnnctgcntgcgacatcttttnncttctctaatgtngcctacanntntnccngacntggtggtcngancctcaactccaancnngacanctnnangntgaactggtnccacgtgtgaggactatccaccaatggaccgatatcaaagaaatgaaggcgatacaagtccaccaatggaccgatatcaaagaaatgaaggcgatacaagtcgaccaatggaccgatatcaaagaaatgaaggcgatacaagtcgaccaatggatcgatatcaaagaaatgaaggcgatacaagtcgaccaatggaccgatatcaaagaaatgaaggcccngatatctgaaaagcataataaatgaatcaatatctaaaatctggtgtttttctctctttcttcttcccaacaatgattgaaaaactctttcttgttatgaataaagatggatgcccattataagggccatcntctaagcccatcatctanatgtttctagggttttaccctttccttgttctcctatataaagaacctttatctcatggataccnctccttctct

SEQ ID NO: 137865 - DNA, 383 bp, Arabidopsis thaliana columbia
  unsure (1)..(383): unsure at all n locations
ggacgaaccggtgtaccacgatttggttcgtcactgtctggcctacccaaaagcggatggaatcttggtgaatacatgggaagagaatagttcagggaggagttagactanccatgatactaaaccgggtttttagtgacgatcatgctattgctggtgttgctgccacttgaaccaaacccgacataccgggtcatcaaagcatttgattaagagattatttgatacattcacaaaattaattaaggctgatcagacattcttttcttttagtagctttatctatgtgacagctaatgcctgtggactgctttgtttagaagtgtttagcattagatcatatgctaattcaatgttattaagtcatcgtatgatcgttttag

SEQ ID NO: 137866 - DNA, 208 bp, Arabidopsis thaliana columbia
  unsure (1)..(208): unsure at all n locations
accagggggcatncaaaaatctaaattagatntgaatgggacagtctttngtcaataatnaagataatcaagagatcctgtgtgccctagtacaccctgctgtagntgcctaacgtccatgtactatgttacgtgtaactgatgggtctgatgagccgtttgtncggtggtatcccaattctcaatnaaatacgaatgtgctggagaa

SEQ ID NO: 137867 - DNA, 738 bp, Arabidopsis thaliana columbia
  unsure (1)..(738): unsure at all n locations
cacaaatggagtctaggtttcacattacttgctttcctcttcatcacttcctcttccgctgagctcatcattaaacaggtcacacagggcagaggaatagagtacaacaactcttacagtctcacgtcgaatcttggagtgacgacaagagagttgagagacgagcgaccatcaagtaagatagtgacaatcacaagcttctctgtgattaaggacagaggagaaccctatgaatcatctatttttgaggctgccggttacaaatggagattanttttgtacgtgaagggtaatccgaaaggcggtatanataatcatatttcactttacgcgaggatagaagagacagaaactcttccaagaaggtgggaagtgaatgttgatctcaaactctttgtccacaatcggaagtnaaagaatattgtctgttacagatggacatgaancgatccacnatgcnaaaaaagatggggatccacattgattctctccacatctcaccgaagaaggtactttcagaccactctttggtgctganactctcnttaccgacgaaacagaaatccttcttcnaccnccnaaanttcctggagactcttcccnctggagaatcatancgagattctntgaacgaacggaacagataccnaggacggtgagaaacatnctcactcttttccagctaggaaccttttcannttgggacgtnccccgtnagacccaaccccccccttntcc

SEQ ID NO: 137868 - DNA, 613 bp, Arabidopsis thaliana columbia
  unsure (1)..(613): unsure at all n locations
ggactcgagcagagccagcaacggttcgtatgggtggttcgaccaccggtcgacggttcgtgttgtagcgagtatgtctcggctaacggtggtggaaccgaagacaacacgccagagtatctaccggaagggttcgtgagtcgtactagtgatagaggtttcgtggtcccctcatgggccccacaagctgaaatcctgtcccatcgggccgttggtgggtttttgacccattgcggttggagctcgacgttggaaagcgtcgttggcggcgttccgatgatcgcatggccactttttgccgagcagaatatgaatgcggcgttgctcagcgacgaactgggaatcgccgtcngattggatgatccaaaggaggatatttctangtggaanattgaagcgttggtgaagaangttatgactgaaaaggaangtgaancgatgaaaangaaagtgaaaaaatttgaaanactcngcgganatgtcactgaaccattgacngtgggtggtttggcgccccaaatccccttttgccnnaattcccccaaggaattttccaccggttttttggaaacnttttccttggaacttgttcccctttgttgccttaaaaaaa

SEQ ID NO: 137869 - DNA, 298 bp, Arabidopsis thaliana columbia
  unsure (1)..(298): unsure at all n locations
aactnntcccaaaggtggggactacnnagcanccctantgctngacanntcntgnatncctctncngctaagttcgggctncctnacgtcccaacgcggcgcaagaattaattanagcacttntnncagtctccatnacaatctnggagtgatgccanacttgacaggtcancgaccnccgactacgatngtcaccatncncngcctcncagngattacangctnaggataacccggtgnnaccncngtttcgnagctgctgntcactngnngagataggtnntgtggatnattngta

SEQ ID NO: 137870 - DNA, 104 bp, Arabidopsis thaliana columbia
aaaacaacgcgcattttggtttctggttatatgggatcatgagtgtttgctaccacgcattataccttcctcttctttacataacgttcctcgcagactttttc

SEQ ID NO: 137871 - DNA, 375 bp, Arabidopsis thaliana columbia
ataaatatgggtaatatatctatcttgcttctactctctcttttcactttttctctgtgtctatttgtctctccgtaagaaacattatgccttcatctgattccacgatgatgaagaaaggaacaaagcgcaaaatcgaaataaagaaacgagaaaccaaagagcaacgagccgtgacttgctctaaacgtcgtcaaactgttttttccaaagccgccgatctctgtcttaactccggtgccaacatcgccgtcttcgtaacctctccctccgatagttccgatgttgtctattccttctccggttactcctctgcctacgaaatcgctgattgtcacctaaattcaattcacccatggtacccggatcctcgaa

SEQ ID NO: 137872 - DNA, 204 bp, Arabidopsis thaliana columbia
  unsure (1)..(204): unsure at all n locations
tcagnggacgatgtcaaagatcaaaacatacctattgatgcagtgcatacatcgatgattntctcttgtgtgatcnagtttnaannccnnnatgntanncggatnctctctttcatcagantccggtccgtgtaagtagatgggtctaacccgganctntntgggtggnccaaccttctccataaaaactgntgttgtggagga

SEQ ID NO: 137873 - DNA, 648 bp, Arabidopsis thaliana columbia
accaaaccaaagtatctctaaggaatcgctgtccttcgatgaggacatacctgccggttcaatggttgaggacgaagtgacgagtgaactctctgtgcgtttccccccaagaggatctccctcaccatctattcctcaagttatcagcattggacagctcatggaatctgcgcttgaggtcgctggtcaagtggttgggtcatctgtctctacttctccgcttccttatgacacaatgactaaccgctgtgaaacctttgggactggtactagagagaagctctcaaggtggttggccactgagaaccgtcagatgaatgggctctatggaaattcacttgaggaatcatctgcacttgagaaggtagtataagatgggaacatctatgggagagaatctggaatgttgcaggattcatggtccatgatgagactacctccagctagtccctttgacaatttcctcmaagcascaggagctggaagatgattccactaacttgatcatatcaatctctgttaaaaagtgtgtaatcttgttgttcttattgggatttgttaaaaaactaactttttctaggggcaatccccaagcttctccttattatctaaaatcattaattaatttatgcctgtttcctttaggac

SEQ ID NO: 137874 - DNA, 603 bp, Arabidopsis thaliana columbia
  unsure (1)..(603): unsure at all n locations
cttgaatgcggaagctaggtgtatgacaaaggcaagaaagctcggggtttgtactccagtcctatatgctgtggatactctgcttcactctttaacacttgagtacattgagggggtctctgttaaggatattttccttgagtttgggaccaatggggttgttgaggaacgtttagatgatgttgctgctcagattggggctgcaattgctaagctccatgatggtggcttggctcatggtgatttgaccacatcaaatatgttagtcagaagtggaacaaatcagctggtactaattgattttggcttgagcgtcacatcgaccttgcctgaagacaaagctgttgatttatatgtacttgaaagagccttactctcaatgcattcgtcatgcgggaatgtgatggatcgtatactgacggcgtatargaatcctcaaagcaatggtcagccacgtttaacaaagctcgcacaagtgaaacaccgaagggaaaaaagcggactatgattggatgaaggcgangaacccaagttctcccattggtactgtccttaaaactttgaacmcaaaaccccccaaawctgtccygttatwattaatcc

SEQ ID NO: 137875 - DNA, 476 bp, Arabidopsis thaliana columbia
  unsure (1)..(476): unsure at all n locations
ataggcganatcccccccaaangattncctgatgtgaggaacatgggganatcatcntggaatcgagcncnngnagtcnccggtnaagtnggtgggtnnacantcncncccnnacngacncngcatgaccncttcactacnanctgttangtttntgggactgntcctacgatataccntctcttggtggtggnnccncgaaactcnnctcaggactnggctcctcgaaattcngatgaagnntgtcccgcctgtgacnacgnnnttcnggattggancgatctangagnngacactctgagaatgtgatcggtgattnntcggtncnctgnatcacattnctcnccttnccantaccacttttnacananttccccttctttttcncaacgngcgatnctngnagaangnatggntaactcggntnccngctctgnatcgnagatancgtngtcctctcggggttccagaggntc

SEQ ID NO: 137876 - DNA, 556 bp, Arabidopsis thaliana columbia
  unsure (1)..(556): unsure at all n locations
gtttatcacgccttgcattgatcagaascccttgctacggcattgagccakgctgccgaagctgtttcttcgggaaattcagatgcaagtgatgccactgcaaaagctggaatcattttgttgcccagcacacatcaacttgacgaagaggttactgmggaacatagtgaggaggaaatgactgaagaggaaccaactcttctcaagtggccaaataagcccgggattccagattctgatttgtttgaccgtgatcaatcgtggtttgatggacctccagagggcttcaatctcacattatcaaatttcgctgtgatgtgggattcactgtttggctgggtatcatcgtcctctctggcatacatatatgggaaggaagaatctgctcatgargagttcttattggttaacgggaaggagtacccccggaggattatcatggtagatgggctttcctcagaratcaagcanacaattgctgggttgccttgccagaactttaccgaaaatcgtcactcatctcagggctgccaatancgatatccrattttaaaaa

SEQ ID NO: 137877 - DNA, 461 bp, Arabidopsis thaliana columbia
  unsure (1)..(461): unsure at all n locations
ccctcccnctcctnntttctanttngnttcngnttctgttatcgngtttttcncnngggtcttttntcgnngccctggaccggaattcncgngtcgaccaactcntcagatgtggtgctncnctacaatgaancaaanngantcacactctcggactnannctctcccctccgcttctgtaaccatancnnctcnacntctatgtctccnatctaaccanctctnngggttcgaggaganataaggagaaaagtangganggacgantatgcttgcccgttctgtncagactattttgatntcntctctctnngcngtcacattgatgaanatcntcctatggatgcttaaantggggtntgtcccgtcctgtgcggtgaaagtgagctcnggatatgattgcntcntatanccccncgncncngccnatatgttcaaggtgacccngatcangaaatcaa

SEQ ID NO: 137878 - DNA, 602 bp, Arabidopsis thaliana columbia
  unsure (1)..(602): unsure at all n locations
cggggcttctraaagacncaatctnatgtactcgtacatgctangtnctatctcttctataatgtctnatcctttctgccctcccacwcgttnccgtagcckcaaawtctcctktgayatttmcctgmtcagaytgtcctgatggatgsggaygttcacmtagataccaaagcacaagaaattcgaaggtgctggagaaaaggcgaccactttcactaagagcatttggctcgaggaagctgatgcgagygccatatccgttggtgaggaagtaactttgatggattggggaaatgctatcgtaaaggaaatcmcmaakgacgaggagggtcgtgtcactgccttatctggtgtcttgaatctccaaggttctgtwaagactacaaagctgaagctgacatggcttcctgatactaatgaattggtccatctcrcmttaacagagtttgattatctaatccccmanaagaaactggaanatgatgatgaaatttgctgattttgctgaatccymmcccnaaaaangaanacmtttggcmcttkggtngattcccaatattgagagaatcttgaaattgttggaaaatntttattcccccttt

SEQ ID NO: 137879 - DNA, 110 bp, Arabidopsis thaliana columbia
  unsure (1)..(110): unsure at all n locations
tctgntccgtctnanacatcgnatcaggtggngngtacaatcatctcnccgttcantaggtgtttacggatttcngcggtcgtatanctngcntgactaaggctttaacc

SEQ ID NO: 137880 - DNA, 371 bp, Arabidopsis thaliana columbia
ggaagttaaagaaatatttgtctgttacagatggaacagtgaagcgatacaacgatgcaaaaaaagagtggggattcacacaattgatttctcttccaacattctacaacgcgaacgaagggtaccttgtgcaggacacagcttcttttggtgctgagatcttcatcgttaacccgacagaaaaacaagagaaagtcacattcatatcaaaccmtsswrmcmrkrtyytcacttggaagatacttcgtttctctaccttgtcacctaaattcaattcatcgtacccggatcctcgattcttttgctttttaccctggaagaaatactcataagccacctctgttatttacccccaatcttcacaagaaaaa

SEQ ID NO: 137881 - DNA, 797 bp, Arabidopsis thaliana columbia
gtgaagcgatmcmwcgatgmwmaaaamkartgkggattyrcayratwgatytctcttcywmyattctwswmcgcgaaygaagggtaccttgtgyasgacrmwscttctttyggtgctgakatcttcatgcgwtamcccgacagaaamacmmkakawagtcwcattcatatcmwaccctccraacaatgttttcacttggaagatacttcgtttctctaccttggaagataaattctattactctgatgattttctcgttgaagaccgatactggagattaggatttaacccgaaaggatctggtggagggagaccacatgcacttccaatcttcctatatgctcaaggccataaggcaaacgcagttgttacaaacacttggggagcggttaatctgcggttaaagaatcaacgaagctccaaccacaaacaattatattctgcagcttggtacccgattcgaagcgattatggtgtgggagtgaacaatataatattgatgtcagagctaaaagatgcatccaaaagggtatatggtgaatgatgccattatctttgaagctgaaatggttaaggtctctgtgacaaacatagtctccgtttaaatatcactacttctttttcaacaacaaccttacgaataaagtggactttgatgagtttaatttgttatacgacaacgttgttgatgcttgtgatgtaatcgttgtttctgctctccgagttttcgttttactttttttttcatgttttgctatcaatgaaataaaggtataaaactctcttggttttaaagt

SEQ ID NO: 137882 - DNA, 719 bp, Arabidopsis thaliana columbia
  unsure (1)..(719): unsure at all n locations
gtgartgttgatctcaaactctttgtccataatgggaagctacacaaatatttgactgttacagatggcttagtgaagcgatataacaatgcgaaaaaagaatggggtttcggacaattgattcctcgatcaacattctacaacgcgaacgaaggttaccttgaccaggacactggttcttttggtgctgagatctttattgttaaaccggctcaacaacaagagaaagttacattcatatcaaaccctccaaacaatgttttcacttggaagatacttcgtttctctaccttggaagataaattctattactccgatgattttctcgttgaagaccgatactggagactaggatttaacccgaaaggggatggaggaggaagaccacatgcacttccaatcttcctatttgctcaaggccataaggcaaatgcagttgctacaaacacttggggagcggttaatctgcggttaaagaatcaacgaarttctaaccatagacaatatwtctgcacttggtacccattggaaacgttatggtktgggaktaacatatctactgttgctgattaacgagcatccaaaggattttggtgatgagccytatcttgaactgaatggttaagkcctataccactctctccctwaattctccttcttntcwcnacatcncyttrataaaaaatttattgataattttttaraaacttatttttkta

SEQ ID NO: 137883 - DNA, 852 bp, Arabidopsis thaliana columbia
  unsure (1)..(852): unsure at all n locations
atgrayamtcaaaaatggagtmtaggtttcatatctctcgcttttctcttcatcacttcctcttcagctgagttcatcattcaacaggtcacaaagggcaraggaatagagtacaacagttcttacagtctcgaggagaatcttggagtgacragagagttgagagaagagcgaccatcgagtaagatagtgacaataacaagcttctcagtgattaaaggcagaggagaaccctatgaatcctctgtttttgaggctgctggttacaaatggagattggttttgtacgtgaatggtaataaaaacgacggtggaaatgatcatatttccctttacgcaaggatcgaagagacaaactctcttccattaggttgggaagtgaatgttgatctcaaactctttgtccataatgggaagctacacaaatatttgactgttacagatggcttarttgaagcgatataacaatgcsaaaaaagaatggggtttcggacaattgattcctcnatcaacattctacaacgcgaacgaaggttacctttgaccaaggacactggttccttttgggtggcyggaaaancctttattgtttaaaccngstccaccaacmaaraaaawwaytttctwtymmtyytccaacaysytycccwwcsaatgttttttcccttnggaaaaanacctncgtttcctcctacctttgggaaaaanaaanttcntttttactcccgaatgaattttccccctttgnaaaaaccgaatncctggttggacttaggaattttaacccccnaaagggggaatggaangaaagaaaaaacccctttgcccnttcccaatccttccctantttgc

SEQ ID NO: 137884 - DNA, 1134 bp, Arabidopsis thaliana columbia
atggccgatggtgaggatattcagccacttgtctgtgacaatggaactggaatggtgaaggctggttttgctggtgatgatgccccgagagcagtgttcccaagtattgttggtcgtcctaggcacactggtgtcatggttggtatgggtcagaaagatgcttacgttggtgatgaagctcagtccaagagaggtatcctcactctgaagtatccaatcgaacatggtattgtaagtaactgggatgacatggaaaagatatggcatcacactttctacaacgagcttcgtgttgcccctgaggagcacccagttctactcacagaggcacctcttaaccctaaagctaacagggagaagatgactcagatcatgtttgagacattcaatgtccctgccatgtatgttgccattcaggccgttctttctctctatgccagtggtcgtacaaccggtattgtgctcgattctggtgatggtgtgtctcacactgtgccaatctacgaggggtatgctcttcctcatgctatccttcgtcttgatcttgcgggtcgggatctcacagactcactcatgaagattctcactgagagaggttacatgttcaccactaccgcagaacgggaaattgtccgtgacataaaggagaaacttgcttatgtcgctcttgactacgagcaagagctagagacagccaagagcagttcttcagtggagaagaactacgagctacctgatggacaagtcataaccatcggagctgagagattccgttgtcctgaggttctgttccagccatcgctcatcggaatggaagctcctggaatccatgaaacaacttacaactccatcatgaaatgtgatgtcgatatcaggaaggatctctatggaaacatcgttctcagtggtggttccaccatgttcccaggaattgctgaccgtatgagcaaagagatcaccgctcttgcacctagcagcatgaagatcaaggtggttgctccgccagagagaaaatacagtgtctggatcggaggatcaatccttgcatccctcagcaccttccaacagatgtggatttcaaagagtgagtacgatgagtcaggtccatcgattgttcacaggaaatgcttctaa

SEQ ID NO: 137885 - DNA, 1413 bp, Arabidopsis thaliana columbia
atgaaacagctttcgacaaaagtgacaagcaatggtcatggacaagactcatcctacttcttgggatgggaagagtacgagaagaatccttatgatgagatcaagaaccctaatgggatgatccagatgggtctagccgaaaaccagctatgtttcgatctaatcgagtcatggttaactaagaacccagacgcggcaagtctcaagaggaacggtcaatccattttcagagagcttgctctatttcaagactatcatggcatgcctgaattcaaaaaagctatggctgagtttatggaagagataagaggaaaccgtgtcacgttcgatccaaaaaagattgttttagcggctggttcgacatctgcgaatgagactctcatgttttgccttgcagagcctggcgatgctttccttttgcctactccttactatcctggatttgatagagatcttaaatggagaaccggagcagagatagtacccattcactgctcaagctctaatggcttccaaatcacggaatcagctctgcaacaagcttaccaacaagcccagaaacttgatctcaaagtcaaaggagttcttgtcacgaatccatctaacccacttggcactgcgttgaccagacgtgaacttaaccttctcgttgacttcatcacttccaagaacattcatctcattagcgacgagatctattcaggcactatgttcgggtttgaacagttcataagcgtaatggatgtcttgaaagacaagaaactcgaagacacggaggtttcaaaacgagtccacgtcgtttatagcctttctaaagatctgggacttcctggtttccgtgtgggagcgatctactccaacgacgaaatgatcgtttcagcagctacaaaaatgtcaagttttggtcttgtttcttctcagacacaataccttctctctgcattgctctccgacaagaagttcactagccaatacctcgaagagaaccagaaacgactcaagtccagacagagacgcctcgtgtctggtcttgagtctgcagggattacttgcctgagaagcaacgcgggtttgttctgttgggtcgacatgagacaccttttggacacaaacacatttgaagcagagcttgacctctggaaaaagattgtttacaacgtgaaactaaacatatcacccggttcttcatgtcactgcaccgaaccgggttggtttagggtttgtttcgctaatatgagcgaggacacactcgatttggccttgaagaggctcaaaactttcgtagaatccacagactgtggacgaatgatatcaagaagcagccatgaaaggctcaagagtttgaggaagaagacagtctctaactgggttttccgggtttcatggaccgatcgtgtacctgatgaacgatga

SEQ ID NO: 137886 - DNA, 750 bp, Arabidopsis thaliana columbia
atgatgtcatgtggtgggaagaagccagtgtctaagaaaacaacgccgtgttgcacgaagatggggatgaagagaggaccatggacggtggaggaagacgagattcttgtgagcttcattaagaaagaaggtgaaggacggtggcgatcgcttcctaagagagctggtttactcagatgtggaaagagctgtcgtctacggtggatgaactatctccgaccctcggttaaacgtggaggaattacgtcggacgaggaagatctcatcctccgtcttcaccgcctcctcggcaacaggtggtcattgatcgcgggaaggataccgggaaggactgataatgaaattaagaactattggaacactcatcttcgtaagaaacttttaaggcaaggaattgatcctcaaacccacaagcctcttgatgcaaacaacatccataaaccagaagaagaagtttccggtggacaaaagtaccctctagagcctatttctagttctcatactgatgataccactgttaatggcggggatggagatagcaagaacagtatcaatgtctttggtggtgaacacggctacgaagactttggtttctgctacgacgacaagttctcatcgtttcttaattcgctcatcaacgatgttggtgatccttttggtaatattatcccaatatctcaacctttgcagatggatgattgtaaggatgggattgttggagcgtcgtcttctagcttaggacatgactag

SEQ ID NO: 137887 - DNA, 741 bp, Arabidopsis thaliana columbia
atggggagaagaccatgctgtgagaagataggattgaagaaagggccatggagtgctgaagaagatcgaatcttgatcaattatattagtctccatggccatcccaattggagagctctccctaaactagccgggctacttcggtgcggaaaaagttgcaggcttcgttggattaattatttgagaccagacatcaaacgtggcaatttcactcctcatgaagaagatactatcatcagcttacatcaactcttaggcaacagatggtctgcgatagctgcaaaattgcctggacgaacagacaacgaaattaaaaatgtttggcacactcatttaaagaaaagactccaccacagtcaagatcaaaacaacaaggaagatttcgtctctactacagctgcggagatgccaacctctccgcaacaacaatctagtagtagtgccgacatttcagcaattacaacattgggaaacaacaatgacatctccaatagcaacaaagactccgcgacgtcatccgaagatgttcttgcaattatagatgagagcttttggtcagaagtggtattgacggactgtgacatttcaggaaatgagaagaatgagaaaaagatagagaattgggagggctcactagatagaaacgataagggatataaccatgacatggagttttggtttgaccatctcactagtagtagttgtataattggagaaatgtccgacatttctgagttttga

SEQ ID NO: 137888 - DNA, 549 bp, Arabidopsis thaliana columbia
gttattgccgaatttttatctacggaagaagtagaagacatcaaagtaatgttcaacaagatggatactgataatgatggtatagtttccattgaggagttgaaagccggacttcgtgattttagtacacagctagcggaatcagaagttcagatgcttattgaagcggtggatactaaaggaaaaggaactctagactatggagaatttgtagcagtgtctctccacctgcaaaaggtagcaaacgatgagcatctccgcaaagccttctcttactttgacaaggatggaaatgggtacattttgccccaggagctttgtgacgccttaaaggaagatggaggagatgactgtgtggatgtcgccaatgatatattccaagaagttgacacagacaaggatgggagaataagctacgaagagtttgcggcaatgatgaaaacaggaacggattggagaaaggcgtctcgtcattactcaagagggagattcaatagcctaagcatcaagctaatgaaggacgggtctttgaacctaggcaacgaatag

SEQ ID NO: 137889 - DNA, 693 bp, Arabidopsis thaliana columbia
atgaagcaattctggagtccaagtagtatcaacaagaacaaagctatggttgagaatctgcaaaatcatggtatagttacttcagatgaagttgctaaagctatggaggctgtggatagaggcgtatttgtaacagatcgttcctctgcttatgttgatagtcccatgtctattggttataatgtgactatatcagctcctcatatgcatgcaatgtgtcttcaacttcttgaaaaacatttgaaaccgggaatgcgtgtacttgatgttggctcggggaccgggtacttaactgcttgctttgcggttatggttggaaccgaagggcgtgctattggtgtggaacatattcctgaattggtggcttcttctgttaagaatattgaagcgagtgctgcttcgccatttctgaaagaagggtctcttgctgttcatgttggtgatgggaggcaaggatgggctgagtttgctccgtatgatgctattcacgtcggagcagcagcaccggagatcccagaggcgttgattgatcagttgaagcccggtgggagactggtgattccggttgggaacatattccaagatctgcaagtggtggataagaactcagatggttctgttagcatcaaggatgaaacttcagttcgttatgttcctttgactagccgtgaagcccagctgagaggggactga

SEQ ID NO: 137890 - DNA, 624 bp, Arabidopsis thaliana columbia
atggagaacatgtcgaatctaactagcaaatttttattaaacccgttgaatgttcataagcattgtgcagtttcagatgaaaatggtgatagaaaatctcatgttctgaaacaggtgtgttcatgtatctgctgttgcaacagaaggaacaagactcaagctaggagccagaaagggtcctactttataaaagggaaggtccatccggtaagtagaatggagaagtgggaggagaagatcacagaagctaatagtcatggcaaaattatagctcgacatgatctgattctttgtaacatggaacagcttgtagtgaatttcaaggcttcgtggtgtttacctagtaaaacaatattaccaatataccaggagcttgcatccacatacacctcaatgatatttgtcactatagacgtcgaagagctcgctatctcgaaactgagcgatttgggtgttaaaatatgtttgatacaggagtttagtcatgaatggaacgtggatgcaactccaacagtagtgttccttaaagatgggaggcaaatggataaacttgtaggtggagatgctgcagagcttcagaagaaaactgcagcagctgcaaatctccttcttagacaatcttaa

SEQ ID NO: 137891 - DNA, 339 bp, Arabidopsis thaliana columbia
atgcaagtggctgacatatccttacagggcgatgctaagaagggtgccaacctcttcaagacccgctgcgctcagtgccacaccctgaaggccggcgagggcaacaagattggccctgagctccacggtctcttcggccgcaagactggttccgtcgctggctactcatacaccgacgccaacaagcagaagggtatcgagtggaaggacgacactctcttcgagtacctcgagaaccccaagaagtacattcccggtaccaagatggccttcggtggtctcaagaagcccaaggaccgcaacgacctcatcaccttccttgaggaggagaccaaataa

SEQ ID NO: 137892 - DNA, 525 bp, Arabidopsis thaliana columbia
atggcgaatgagagtaataatcttggactcgaaatcaccgaactacggctaggtcttcccggagatatcgtcgtctccggtgagtccatctccgggaagaagagggcttctccggaagtagagattgatttgaaatgtgaaccggcgaaaaagagtcaagttgtgggttggccaccggtttgttcgtaccggagaaagaatagtctcgaacggaccaaaagttcgtacgtgaaagtgagtgtagatggagctgcatttttaaggaagattgatttggaaatgtacaaatgttaccaagatcttgcttcggctctgcaaattctgttcggatgctatatcaattttgatgatacgttgaaggaaagtgaatgtgtaccaatatatgaagacaaagatggagattggatgcttgctggagatgttccttgggaaatgttccttggatcatgcaagaggttaaggattatgaagagatcatatgttcccgggtttggaagaaccaaaccacggatcaaactaggctaa

SEQ ID NO: 137893 - DNA, 1275 bp, Arabidopsis thaliana columbia
atggatcctgaaggtttcacgagtggcttattccggtggaacccaacgagagcattggttcaagcaccacctccggttccacctccgctgcagcaacagccggtgacaccgcagacggctgcttttgggatgcgacttggtggtttagagggactattcggtccatacggtatacgtttctacacggcggcgaagatagcggagttaggttttacggcgagcacgcttgtgggtatgaaggacgaggagcttgaagagatgatgaatagtctctctcatatctttcgttgggagcttcttgttggtgaacggtacggtatcaaagctgccgttagagctgaacggagacgattgcaagaagaggaggaagaggaatcttctagacgccgtcatttgctactctccgccgctggtgattccggtactcatcacgctcttgatgctctctcccaagaagatgattggacagggttatctgaggaaccggtgcagcaacaagaccagactgatgcggcggggaataacggcggaggaggaagtggttactgggacgcaggtcaaggaaagatgaagaagcaacagcagcagagacggagaaagaaaccaatgctgacgtcagtggaaaccgacgaagacgtcaacgaaggtgaggatgacgacgggatggataacggcaacggaggtagtggtttggggacagagagacagagggagcatccgtttatcgtaacggagcctggggaagtggcacgtggcaaaaagaacggcttagattatctgttccacttgtacgaacaatgccgtgagttccttcttcaggtccagacaattgctaaagaccgtggcgaaaaatgccccaccaaggtgacgaaccaagtattcaggtacgcgaagaaatcaggagcgagttacataaacaagcctaaaatgcgacactacgttcactgttacgctctccactgcctagacgaagaagcttcaaatgctctcagaagagcgtttaaagaacgcggtgagaacgttggctcatggcgtcaggcttgttacaagccacttgtgaacatcgcttgtcgtcatggctgggatatagacgccgtctttaacgctcatcctcgtctctctatttggtatgttccaacaaagctgcgtcagctttgccatttggagcggaacaatgcggttgctgcggctgcggctttagttggcggtattagctgtaccggatcgtcgacgtctggacgtggtggatgcggcggcgacgacttgcgtttctag

SEQ ID NO: 137894 - DNA, 1173 bp, Arabidopsis thaliana columbia
atgtctcacagaaagtttgagcatccaagacatggttctttgggtttccttccaaggaaaagagctagccgacaccgtgggaaagtgaaggccttccctaaggatgatccaactaagccttgcagactcacctccttcttgggatacaaagctgggatgactcacattgtgagagatgttgaaaaacctggatcaaaactacacaagaaggaaacatgtgaagctgtgacgatcattgagacacctccaatggtggttgttggtgtggttggttatgtaaagacacctcgtggtctgcggtctctatgcactgtgtgggctcagcatctgagcgaagaattgagaaggaggttctacaagaactgggccaagtcaaagaagaaggctttcactagatattctaagaaacatgaaactgaagaagggaaaaaagatattcaaagtcaattggagaagatgaagaagtactgctctgtcatcagagttcttgctcacactcagataaggaaaatgaaaggcgtgaagcagaagaaggcacatctgaatgagattcagatcaatggtggagatatagcaaagaaagttgactatgcctgcagtttatttgaaaaacaagtcccagttgatgccatcttccagaaagatgaaatgattgatatcattggtgtcaccaaaggaaaaggttatgaaggtgtggttacaagatggggagtgacccgacttccaagaaagactcatcgtggtcttcgcaaggttgcttgtatcggtgcttggcatccagctagagtctcctacacggtggctagagctggacaaaacggttaccatcaccgtactgaaatgaacaagaaggtataccgggttgggaaagttggccaggagactcactcagccatgaccgagtatgacagaaccgagaaggatatcacaccaatgggaggatttccccactatgggatagtgaaggaagattatttgatgatcaagggatgttgcgtggggcctaagaaacgtgtggtgactttaagacagactttgcttaagcagacgtctaggcttgctatggaggagatcaagcttaagttcattgacgctgcttccaatgggggacacggtcgtttccagacttctcaagagaaggccaagttctatggtagaaccatcaaagcttag

SEQ ID NO: 137895 - DNA, 957 bp, Arabidopsis thaliana columbia
atgggggaaagagatgatgggttgggtttgagtctaagcttgggaaatagtcaacaaaaagaaccatctctgaggttgaatcttatgccgttgacaacttcttcttcttcttcttcgtttcaacacatgcacaatcagaataacaatagccatccccagaagattcataacatctcttggactcatctgtttcaatcttctgggattaaacgtacaactgcagagagaaactccgacgccgggtcatttctaagaggtttcaacgtgaacagagctcagtcttcggtggcggtagtggacttggaagaagaagccgccgtcgtctcgtctccaaacagcgccgtttcgagtctgagtggaaataaaagggatcttgcggtggcgagaggaggagatgaaaacgaggcggagagagcttcttgctcacgcggagggggaagcggtggtagcgacgatgaagacggcggaaacggcgacggatcaaggaagaaactacggttatcgaaggatcaagctcttgttctcgaggagacttttaaagaacatagcactcttaatccgaagcaaaagctggctctagcaaaacagttgaatctaagggcaagacaagttgaagtgtggtttcagaaccgtagggcaaggacgaagctgaaacaaacggaggttgattgtgagtatttaaagagatgttgcgataatctgaccgaggagaatcgacggctgcagaaagaagtgtcggagctgagggcgttgaagttgtctccacatctctacatgcacatgactcctcctactactctcaccatgtgcccttcttgcgaacgtgtctcctcctctgccgccactgtgaccgctgctccttccactactactactcctacggtggtggggcggccaagtccacagcgattaactccttggactgctatttctctccagcaaaaatcaggtcgctag

SEQ ID NO: 137896 - DNA, 930 bp, Arabidopsis thaliana columbia
atggagaagtacgagaagctagagaaggtcggagaaggaacatacgggaaagtctacaaagcgatggagaaaggaactggtaagcttgttgctctgaagaaaactcgtctcgagatggacgaagaaggtattccaccaactgctcttcgtgagatctcgcttctccagatgttatcaacatcgatctatgttgttcgattactctgcgtcgaacatgttcatcaaccatcaaccaaatctcaatctaccaaatccaatctctatctcgttttcgagtatctcgatactgatcttaagaaattcatcgattcgtataggaaaggacctaatcctaagcctcttgagccttttttgattcagaagttgatgtttcagctttgtaaaggtgttgcgcattgtcatagtcatggtgtgcttcaccgtgatcttaaaccgcagaatcttcttctggtgaaagataaagagcttcttaagattgctgatttgggtcttggtcgtgcttttactgttcctcttaagtcttatacgcatgagattgttactctttggtatagagctcctgaagttcttcttggatctactcattattcaactggtgttgacatgtggtctgttggttgtatctttgctgagatggttcggaggcaagctcttttccctggtgattctgagtttcagcaattgcttcatatcttcaggttgctaggaacaccaactgagcagcaatggccgggtgtttccacactgcgtgactggcatgtttaccctaagtgggagccgcaagacttaactcttgctgttccttctctttcacctcaaggagttgatcttctcacgaaaatgctcaagtacaatccagccgaaagaatttcagcaaaaacagcacttgatcacccatattttgacagccttgacaagtctcagttctga

SEQ ID NO: 137897 - DNA, 1182 bp, Arabidopsis thaliana columbia
atggaggcagagatcgtgagacgatcggaggtaacgggattaagaagggaggtggaagaatcgtcaattggtagaggagattgcgatggtgatggcggcgatgtgggagaagatgcggcagggttcgttgggacgagcgggagaggaagaagagatcgagttaaagggccgtggtcgaaggaggaggatgatgtgttgagtgagctcgttaagaggttgggagcgaggaattggagttttatcgctcggagtattcctggtcgttcaggcaagtcttgtcgtcttcgttggtgtaatcagctcaatccaaatcttatacgcaattcatttactgaggtagaggatcaggctatcatcgcagcacatgccatccacggaaacaaatgggctgttatcgcgaagctcctccccggaagaacagataatgctatcaagaaccactggaactctgctttaagacgtcgattcatagactttgaaaaggccaagaatataggaactggaagcttggtcgtggatgattctggatttgacagaacgacaacagtagcctcatcagaagaaactttatcttcaggcggtggttgccatgtaactactccaattgtatctccagaaggcaaagaagctaccacctccatggaaatgtctgaagaacaatgcgtagagaaaacaaacggagaaggtatttctaggcaagatgataaggatcctccaacgcttttccgcccagtgcctcggctcagttcttttaatgcttgcaatcacatggaaggatcaccctctccacatatacaagaccaaaatcagctccaatcatctaaacaagacgcagcaatgctaagattgcttgaaggagcttacagcgaacggtttgtgcctcaaacatgtggaggtggttgttgcagcaacaatcccgatggcagttttcagcaagaatcattgttgggtccagagtttgtggattacttagactcaccaacgtttccgagttccgaactagctgctatagcaacggaaataggcagcctcgcttggctgagaagcggtttagagagtagcagcgtgagggtgatggaagacgcagttggtcggttaaggcctcaaggctccaggggtcatcgagatcattatcttgtatctgaacaggggacgaacataaccaatgtcctgtccacataa

SEQ ID NO: 137898 - DNA, 1761 bp, Arabidopsis thaliana columbia
atggcgtccactcgtaaacccagtggtcatggagctgaagtcgaagctcagaagcgctcctcttcgaatagtagtactaagtcagccaaagccgagacttttgagccgatgcaattacaaagatcagtaacaaacccaagagctgttggaattccggagagtaaacggttgccagagtcttttaggaagcgatctagcgacccggctgtttgtaaacccgatttcagctccctatccactgttcttgagcatgtagattcattgaccattgatgaaaagaaaacatctggctttggcagcgtcaagaccagctctgcttcagccaaattgagtgatggtacgagcagtcttggcaagactagtggaagtgccaagctaagtggccgccttgatttcatggagagtggcaagagcagtatctgcagaggaagcacaagcagtgatgtgagtgacgagagtagctgcagcagctttagtagcactgtcaacaaaccccacaaggccaatgacttaagatgggaagcaatccaggctgttagggttcgtgatgggcttttaggtcttagtcatttcaggctccttaagcggttaggctgcggggacatcgggagtgtttatctctctgagctgagcgggactaagtgttactttgctatgaaggttatggacaagacatcccttgccagtcgcaagaagcttctccgagctcagactgaaagagagattctccagtctttggatcatccatttctccctaccctctacactcactttgagactgagaaattctcatgcctggtgatggaattctgtcccggaggagatttgcatactctcaggcaacgccagccggggaaacatttttctgagcaagcggtaaaattttacatagcagagtcattgttagctttggaatacctgcacatgcttgggattgtgtatcgagatcttaagcctgaaaacgttctagttcgagaagacggacatataatgctctctgattttgacctttctctccgatgtcttgtcagcccgactctagtgaaatctgccgccatcgagtcagatcctttacggaaaaacgtttactgtgtgcagcccgcttgcattgagccctcctgcattcaaccgtcttgcaccgtccccaccacttgcttctccccacgtttgttctcaagcaaatctaagaaggaccgtaaacccaagaatgacaccgcaaatcaagttaggccattgccagagctggtagccgagccaaccgatgcacgttccatgtcatttgtgggcacacacgagtacttggccccagagatcatcaaaggcgaagggcatggcagtgcagtggattggtggacttttgggatattcctttacgagcttctctttgggagaacgcccttcaagggctcaggaaaccgacaaacactgttcaatgtggtgggtcagcctctgcggttcccagaaacgcctgtggtgagttttgcagcgagagacctcatccggggcttgctcatgaaggagccgcagcagcggctggggttcaaacggggagccactgaggttaagcagcaccctttcttcgaaggtgtgaactgggctttgattcggtgtgcgactcccccggaaataccaaagccggttgagctggaaaaaggagctgtgagtgttgcagaggcaccatcaagccagaagacagcagcgggtttggttctgaatgctcagaaagggtctgataactatttggaatttgatttcttctag

SEQ ID NO: 137899 - DNA, 990 bp, Arabidopsis thaliana columbia
atgatcactacattactccgtcgctctctccttgacgcatcaaagcaagcgacatccattaatggaattctatttcaccaacttgctccagcgaaatattttagggttccggcagtgggaggtctgagagatttcagcaagatgacatttgaaaagaagaaaacatcggaagaagaggaaggatccggtgacggcgtcaaggttaatgatcaaggtaacaaaggggaacaattaatagttagttattggggcgtgaagccaatgaaaatcaccaaagaagatggaactgaatggaaatggagttgctttcggccatgggagacttataaagctgatctaacgatagatttgaagaagcatcatgttccttcaactttaccggacaaaatagcttattggatggttaaatctcttcgatggcctaccgatcttttcttccagaggaggtatggttgccgagcgattatgctagagacggttgcagcggttccaggaatggttggagggatgcttatgcacttcaaatctctcaggcgtttcgaacaaagtgggggttggatcaaagcccttctcgaagaagcagagaatgagagaatgcacttaatgacattcatggaagtagcgaaacccaaatggtacgaacgagctcttgtgatctctgttcaaggggttttcttcaacgcttatttaatcggatacataatctctcccaagtttgctcatcgtatggttggataccttgaggaagaagcaatacattcttacactgagtttctcaaagaactcgataacggtaacatcgaaaatgttcctgcaccggctatcgctgttgattactggaggcttgaagctgatgcaacgcttcgtgatgttgtcatggtggttcgtgctgatgaggcgcatcaccgtgacgttaaccactatgcatccgatattcactaccaaggtcatgagctgaaagaagctccagctcctataggatatcactga

SEQ ID NO: 137900 - DNA, 849 bp, Arabidopsis thaliana columbia
atgggtatgagttctgcatcggcgatggagaagaaagatgaaaatttgacggtaaagaagggtcaaaacggcggggggtcagtagcggttccaagttattggggaatagagacagcaaagatgaaaattactcggaaagatggatcggattggccttggaactgttttatgccatgggagacttatcaagcaaatctgtcgatagatttgaagaagcaccacgttccgaagaatatcgccgacaaagtcgcttaccggattgtcaagctcctccgtattcccaccgatatattttttcagagacgatatggatgcagagcgatgatgctagagacagtagctgcagtaccaggaatggttggaggaatgcttcttcacctaaaatcaatccgaaaattcgaacatagcggcggttggatcaaagcattactcgaagaagcagagaacgagaggatgcatctaatgacgatgatggagttagtcaaacccaaatggtacgagcgtcttctagtgatgcttgttcaaggaatattcttcaactcttttttcgtttgttacgtgatttccccgcggttagctcatagggtcgttggatatttagaggaagaagctatacattcttacaccgagtttcttaaagatatcgacaatgggaagatcgagaatgttgccgcgcccgcgattgctattgattattggagattgcctaaagatgctacgttgaaagatgttgtaacggtgattcgtgctgatgaagctcatcatcgagatgtcaaccattttgcttctgacattcgcaatcaaggaaaagagttgcgagaagcagcagctccgattggttatcactaa

SEQ ID NO: 137901 - DNA, 2007 bp, Arabidopsis thaliana columbia
atgcatataaatgtaaatgtattgttgtcgtctacttcaataacaactccatcaatgaacacatcaatacttgccatactttttctcatacaatgtgttttcactcttggtcttcatttccacccacttgatcccttaactccccaagaaatcaacaaaacaagctttatcgtcaagaaatctcatctaggcaacctcaaagatctcacatttcattatctcgacctcgaagaaccaaacaagagccacgtcctccaatggctatcaccaaatccctccaagaaaccaccacccccacgtcgtcgctcattcgtcgtggttcgagccggtggtcaaacctacgagctcatcatcgacctaatcactagcaagatcgcatcctcccgcatctacacaggccatggcttcccttcattcacattcatagagcttttcaaagcaagcaagcttcctctaacttacccacctttcaagaaatcgattctcgatcgatccctaaacatctccgaggtttcttgcatccctttcaccgttggttggtacggagaaaccaccacgagacgcgaactcaaagcctcttgcttttatagagacggatcagtcaacgtcttcacaagacccatcgaaggaatcaccataactatagatgttgactcaatgcaagtcgtgaagtactccgacagatttcgaaagcctctccctgaaaaagaaggtaacgactttagaaaaaaacacaaacccttcccgttctcttgcaacgtctccgacacaggcttcaagatactcggcaatagagtcaagtgggcaaactggaaattccacgtcggatttaccgcaagagcgggagtaactatatcgacggcttcggttcttgacccgagaaccaaaaggtttcgacgagtgatgtatagagggcacgtgtcagagacttttgttccgtacatggacccaacctacgaatggtactaccgtacgttcatggacattggagagttcggtttcgggagatccgccgtgaatctgcagccactcatcgactgcccgcaaaacgctgcgttttttgatggacacgtggccggaccagatgggacagctcagaagatgaccaatgtgatgtgtgtattcgagaaaaacggttacggtgcttcttttagacacaccgagattaatgttccaggacaagtgataactagtggggcagctgaaataagtttagtggttagaatggtggccacacttggaaactatgattacatagtggattgggaatttaaaaagagtggagccatcagagttggggtggatttgactggagttttagaagtaaaagcgacatcatacacttccaacgagcaaataacagagaacgtttacggtacccaggtggcgaagaacaccatcgccgtaaaccacgaccattacctaacgtactacttggacctcgacgttgacggtaacggcaattccttggtgaaagccaaactcaaaacggtaagagtaacggacgttaacaaaacgtcttctcggaggaagagttactggacggtcgttaaagagacggcgaaaacggaagctgacggtagagttcgactcggctcggagccggttgagctgttaatagtaaacccgaacaagaagacgaaaataggaaatacagttggttaccggctgataccggaacatttaccagccacttcgcttttaaccgatgatgattaccccgagataagagccggttacacgaaatatccggtttgggtgaccgcctatgaccggtccgagagatgggccggtgggttttatagtgataggagccgtggcgatgacggtttagctgtatggagtagtaggaacagagagatagagaacaaagacatagtgatgtggtacaacgttgggtttcatcacattccataccaagaggattttccggttatgccaactcttcacggtggttttactcttcggccttcaaatttcttcgataacgatcctttgattgggtaa

SEQ ID NO: 137902 - DNA, 339 bp, Arabidopsis thaliana columbia
atggcgtcaaagcaactgagcagagaagagcttgatgagaaggcgaagcaaggagagaccgtcgtcccaggtggcaccggtggccacagcctcgaagctcaagagcatcttgctgaaggtaggagcaagggagggcagacgaggaaggagcagctaggacatgaaggttatcaggagatcggtcacaaaggaggagaggcgaggaaggagcagctagggcacgagggttataaggagatgggacgtaaaggaggactcagtacgatggaaaaatctggtggagagcgtgcggaggaagaagggattgagatcgatgagtcaaagttcaccaacaagtga

SEQ ID NO: 137903 - DNA, 489 bp, Arabidopsis thaliana columbia
atggctgaagttatgctaccgaggaagatggagattctcaaccattcttcaaagtttggatcaccggatcctcttcatgttcttgccgtcgacgacagtcacgttgatcgtaaattcatcgagcgtttgctcagagtatcttcttgcaaagttactgttgttgatagtgcaacaagagctctccaataccttggtttggatgttgaggaaaaatcagtcggttttgaggatttgaaggttaatttaattatgactgattactcaatgcccggtatgactggatatgaactcttgaagaagatcaaatgtcttgaagaaggggctgaagatttcttactgaagccggtaaaactctcggatgtaaaaagattaagagattctctaatgaaggttgaagatttgtctttcacaaagagtattcagaagagagagctagaaacagagaatgtctaccctgttcactcgcagctcaaacgcgcaaagatctga

SEQ ID NO: 137904 - DNA, 603 bp, Arabidopsis thaliana columbia
atggatgaacattcaggttcacaaatcagaaagctttattcagatctagctcaactgtggcccaatagtttagttgacaatgatgagatcaggcgtgccatttgccgggaaaaggaaaggcggagagcattggaaggaaacattgggaaggagatggatcaaacgaagataacaaagaagaaacagacacaattggtccctaaatctgagggtattacttatcccgacaaggcttcaggtgttgaagttaaagcaagtgttgtcctaactgcaaccaccacgtccttagtggactgtcaacctgcagcagactcgtcctttgaaaggtcaaagcagcaacatgagaaattaaagcgaacttcgagcttaagcaatcctgcagcagaaggaaagaaagtcagaagaaagacagaaccagctctagaagaaactcacctgcccgcagagaaacccctcgttctggccctgaagcggcagacacatctaaaatccaagacacataaacaggtacaggtacatccacagtccaaggcacataaacaggcacaggtacatccaaaggccaagacacagactcctccagacctgaacctgccaagttag

SEQ ID NO: 137905 - DNA, 423 bp, Arabidopsis thaliana columbia
atgtcgtcgccgagcaaacgtcgagagatggatatgatgaaactgatgatgagtgattacaaggtggatactgtcaacgacgatttgcaaatgttctatgtcacattccatggacccactgacagtctttatcaggggggtgtatggaagataaaagtggaacttcccgaagcttatccatacaaatctccatctgttggatttgtcaacaagatttatcaccctaatgtcgatgaatcttctggtgctgtttgcttagatgttataaaccagacttggagcccaatgtttgaatattgtgagaaatatgcaaaaccagaggagattttaagtgatgatgatgatgatgatagcatgagcgaagatggttcggactctgatgatgatgacgacgacgaaatcgttgggaaagccgatccatga

SEQ ID NO: 137906 - DNA, 429 bp, Arabidopsis thaliana columbia
atgtcttcgccgagcaagcgtagagaaatggatttgatgaaactgatgatgagtgactacaaggtggagatgatcaatgatggcatgcaagagttctttgtcgaattcagtggacccaaagacagtatatatgagggaggtgtgtggaagataagagttgaacttcctgatgcttatccttataaatctccatctgttggtttcattaccaaaatataccaccctaatgtcgatgaaatgtcaggttctgtttgtctagatgttattaaccagacctggagcccgatgttcgagtattgtgagaaatacgcaaagccaagggcggatactgaggaaatgtctagtgatgatgaaatgagtgaagatgaatatgcctcggatggtgatgatgaagatgatgttcgaatcgccggtaaacttgatccttaa

SEQ ID NO: 137907 - DNA, 900 bp, Arabidopsis thaliana columbia
atggcttctcttctcaggccaactccattactctctacacctcgtaagctcactcactctcatcttcacacatctatctctttcccattccaaatctcaactcagagaaagccacaaaagcatcttctcaatctatgtcgttcgacaccaacaccgtcacaacaaaaggcctcacagaggaagagaacaaggtacaggaaacaatacccaggagaaaacattggtataactgaggaaatgagattcgtcgccatgagattacgcaatgttaatggtaaaaaattagatctttctgaagataaaactgacaccgagaaggaagaagaagaagaagaagaagacgatgatgatgatgatgaagtaaaggaagagacttggaagcctagcaaagaagggtttcttaagtacttagttgatagcaagcttgtcttcgatactattgaacgaattgttgacgaatctgagaatgtgtcttatgcttactttaggagaacaggattagagagatgtgaaagtattgagaaggatctacaatggttaagagaacaagatttggttataccagaaccaagtaatgtaggagtttcttatgcaaagtatttggaagaacaagcaggagaaagtgctcctttgtttctttctcatttctacagtatctacttttcacatattgctggtggtcaagttcttgtaagacaggtatctgagaaacttctggaaggaaaggagctggagttcaataggtgggaaggggatgcacaagacttgcttaaaggcgtccgtgagaagcttaacgtgcttggggagcactggagtcgggacgagaagaacaaatgcttgaaggaaacggcaaaggcatttaagtatatggggcagatagttcgcttgatcatcttgtaa

SEQ ID NO: 137908 - DNA, 822 bp, Arabidopsis thaliana columbia
atggaagattacgagcgaataaactcaaactctccaacacatgaagaagattctgatgtacggaaaggtccatggaccgaggaagaagatgcaatcctagtcaacttcgtctctattcatggcgatgctcgttggaaccacatcgctcgttcctctgggctaaagcgaactggtaagagttgtagattaagatggcttaattacttacgtccagatgttagaagaggcaacatcactctcgaagaacaatttatgatcctcaaactccattctctttggggcaataggtggtcgaagattgcgcaatatctaccgggaagaacagataatgaaataaagaattattggagaactcgagtccaaaagcaagccaaacacctaagatgcgatgttaacagtaatcttttcaaggagactatgagaaatgtttggatgccgagattagtggaacgaatcaacgcccaatcattacccaccacgtgtgaacaagtggagtcaatgatcaccgacccaagtcaaccagttaacgaaccgagtccggtcgagccgggtttcgttcaattcagccagaatcatcatcagcaattcgtaccggctacggaattgtcagcaacgtcttcgaattctccggctgagacgttttcggacgttcgaggtggggtggtgaacgggtcaggttatgatccgtcgggtcaaacgggtttcggagagttcaacgattggggctgtgttggtggggacaacatgtggactgacgaggagagtttttggttcttgcaggaccagttctgccccgatacgacatcgtattcgtataattaa

SEQ ID NO: 137909 - DNA, 420 bp, Arabidopsis thaliana columbia
atgtctttatcaggagctgttctcagtggcatgggttcttctttccacaacgtaggagcaaagcagagtggtgttggtaccgtcagagttggccggaagagtgagctcgtcgtcgttgctcagcgcaagaagtcgttgatatacgccgttaaaagtgacggcaacatcctcgatgacctcaacgaagccacaaagaaagcttctgatttcgtgacggataagacgaaggaggccttggcggatggcgagaaaacaaaagactacattgttgagaaaaccattgaagccaatgaaactgcgactgaggaagctaagaaagctttggattatgtgactgagaaaggaaaagaagccggaaacaaggcggctgagttcgtagagggtaaagcagaagaggctaagaatgccacaaagtcctga

SEQ ID NO: 137910 - DNA, 654 bp, Arabidopsis thaliana columbia
gtatttgaacgccgggatattcgctaccggcaacgaagatgacgacaggtcaaacacgcttccccggccggctactagagcagcgatgctcatccgtgtaaacaccctcctccaaggctactctggtatacgctttgagatcctcgaagccatcacaacactcctcaactgcaaaattacaccgctccttcctctccgaggcaccattaccgcctccggggatctcgttccgttatcctatatcgctggattcctcatcgggcgccccaactcccgatccgtgggcccctctggcgagatcctcactgccttggaggccttcaagctcgctggagtatcgtcttttttcgaactcaggcctaaagaagggcttgcgctcgtgaatgggactgcggtggggtctgctttagcctctacggtactgtacgatgccaacattttggtggttttctccgaagttgcttccgccatgtttgcagaggttatgcaggggaaaccagagtttaccgatcatcttacgcataaactcaagcaccatcctggtcagatcgaagccgccgctatcatggagcatattctagacggaagctcttatgtaaaagaagctctacatctccacaagattgatccgcttcagaaacctaaacaagatcg

SEQ ID NO: 137911 - DNA, 1773 bp, Arabidopsis thaliana columbia
atgagtgctccaaagtttggttatgtattactattgattgtattaatcaatattagcaataatggcgtcgatgcatttcacaaagttttcaagaaattgcaatcaaaatcgacatcattggagtcagtaagtcctcttcacagaaccgcttatcactttcaacctccccgccattggatcaacgatccgaatgctccaatgctctacaagggagtttaccatctcttctaccaatacaatcccaaaggtgcggtttggggtaacattgtgtgggctcactcggtttctaaggacttgatcaattgggaagcccttgaaccagccatttacccatccaaatggttcgacatcaacggtacatggtccggttcagctacccacgtaccgggaaaaggaccggttatcctctacaccggtatcaccgagaaccagactcagattcaaaactacgccattccacaagatctttccgacccatacctcaagacatggataaagccagacgataaccccatcgtaaaacccgataatggcgagaacggatccgctttccgtgacccgaccacggcttggttcaacaaaaaagatgggtattggagaatgcttgttggctcaaagagaaagaacagaggaattgcttatatgtacaagagccgtgacttcaaaaaatgggtcaaaagcaaacgtcctatccactcaagaaagaaaaccggtatgtgggaatgtcccgatttcttcccggtatccgtaaccgacaagaaaaaccgtttggacttcagctacgacggtccaaacgccaagcatgtgttgaaggttagtttggacttgaccagatacgagtactacactcttggaacgtatgacaccaagaaggatcgttacaggccagacggttacactcctgacggttgggatggtttgagatttgattatggtaactactatgcgtcaaagacattctttgatgacaagacgaacagaagaattctttgggggtgggccaatgaatccgacaccgttcaagatgataccgtgaagggttgggccggaattcagcttatcccaagaacaatcttgcttgactctagcggtaagcaactcgtgttttggcctattgaagagattgagtcattgagaggaaagaatgtccaaatgaccaaccagaaaatggagatgggccaacgctttgaggtccaaggaatcactcctgctcaggtggatgtggatgtgacattcaacgttggaaatctagagaaggccgaaaagtttgacgaaagcttcgcaactaaaccactagagttatgtaacttgaaaggttcgaatgtgaatggtggagttggtccttttggtttgatcacgttggctacatctgacttagaagaatacactcctgttttctttagagtcttcaaagatgccgcatccaacaagcctaaggttctcatgtgctctgacgccaagccttcgagtctcaaaaaagacaccgggactgacgccaaggagaggatgtacaaaccatcgtttgctggttttgtggatgtcggtctccttgacggaaagatctctctaaggagtttgattgatcactcggttgtggagagctttggagcaaaaggaaagacagtgataacatctagagtgtatccgacaaaagcagtaggagaaaaagctcatttgtttgtctttaacaacggctcacaacctgtgaccgtagagagcctcaatgcatggaacatgcagaagcctctgaagatgaaccaaggtgcaaagtga

SEQ ID NO: 137912 - DNA, 945 bp, Arabidopsis thaliana columbia
atggcttcttctatagttacctctagcttgaagcctttagccatggccgattcttcctcttctaccattttctcccatccttccatctcctctaccatctcttcctccagaattcgcagctccagtgtttccctccttaccggacgcattaacctgcccctctctttctctcgcgtctctctatctcttaaaaccaaaacccaccttaaaaaatccccctttgtctccttcgttgcccagacttcggattgggctgaagaaggtggagaaggaagcgtcgctgttgaggagaccgagaacagtttagagtcacaagatgtgagcgaaggagatgagagcgaaggagatgtgagcgaaggagctgtgagcgaaagagctgagttcccggagccatcggaagaagccaagcttttcgtcggaaatttggcttatgatgttaatagccaagctttggctatgctctttgagcaagccggtactgttgaaatcgccgaggttatatacaatagggaaactgaccagagtcgtgggtttggatttgtgacaatgagttctgtggacgaagctgagacagctgtggagaagttcaaccgttatgatcttaacggacgtctactaactgtaaacaaggcagctccaagaggatcacgtccagaacgtgcgcctcgggtatatgaacctgcattcagagtatatgtagggaatctaccatgggatgtggacaatggccgtctagaacagcttttcagtgagcatggtaaagttgtggaagctagggtggtttacgaccgtgagacaggtcgttcacgtggattcgggtttgtcacaatgtctgacgtggatgaactcaacgaagccatctctgccctcgatggacagaacttggagggtagagcaatcagagtgaatgtagcggaagagcgtcctccaaggcgtggatattaa

SEQ ID NO: 137913 - DNA, 963 bp, Arabidopsis thaliana columbia
atgggcatggttggtctaagagatgtattccttgttgctccggcttatcaccaccagaacgccggagtgatatctggatccgatcatatgaacagcaatgcagctgcggcggcggcgctcggtgtcggagtgattcctctactcacggcgggtccaccgcagcaaaacgtggaagactccgacattaacttcctcggaaacaaccggagatggcagaataacaacaacaaccacgaaacgcagtatcttcacttcaagagtactaaccagacaacggtcggaacgagctcgaacaactcgggttctggctcaggcgcatcaggaaccgccacgtgtcaagactgtggaaatcaggcgaagaaagagtgtaagcagaggcggtgtaggacttgctgcaagagccgtggctttgattgttctactcacgtgaagagcacgtgggtctctgctgctcggcggagagagaggcaggtcatgcctaccggcgctaatccaacggctggctcgtctctttcgacctcctccgggacgaagaagccgaggatcgtagggtctcaacaacaacaacaacaacaagccacttctcatacttcaacttctaacacaccacctcaaagtttcgagaccagctccagccgacaagacggaggagggtcaagggaagcatggccagggcaggttagggcagcggcggtgttcaagtgtgttagagtaacggcagtggaggacggggatgatgagtacgcgtaccaagcggtggtgaaaatcggcggccatgtctttaaaggattcttgtacgatcaagggcttgaaccaaaagaaggttttcctagtatgtcggatttgcatttaggtggttcagccaataaccataacggagtttctgcctcggtgcctattctcgacccgcctaatgttgtttatggtggtggtggaggttcaggcggtgggttttacagttaa

SEQ ID NO: 137914 - DNA, 1425 bp, Arabidopsis thaliana columbia
atggttcaattgtcaagaaaagctacatgcaacagccatggccaagtctcttcgtatttccttggttgggaagagtacgagaagaatccttacgacgttaccaagaaccctcaaggcattatccagatgggtcttgcggaaaatcagctatgctttgatctactagagtcatggcttgcacaaaacacagacgcagcctgtttcaagagagatggccagtctgttttccgggaactcgctctctttcaagactaccatggcctctcttccttcaaaaatgcctttgctgatttcatgtcagaaaatagaggaaatcgagtttcttttgattcaaacaaccttgtgctcactgctggagccacttccgcaaacgagactctaatgttttgtcttgcagatcccggtgacgctttcttgcttcccacgccatattatccagggtttgatagggatctaaaatggcgaaccggggttgagattgtaccaatccaaagctcaagtactaacgggtttcgcataacgaaacttgcactcgaagaagcctacgagcaagccaagaagcttgacctaaacgtcaaaggaatactcatcaccaacccatctaaccctttgggtacgacaacaacccaaaccgaactcaacattctatttgatttcatcaccaagaataagaatatacatttagtaagtgacgagatatattcgggcacagtattcaactcttcagaattcatcagcgtcatggagattctaaaaaataatcaactcgaaaacaccgatgttttgaaccgagtccacattgtttgtagcttatctaaagatctaggcctccctggttttagagttggagccatttactccaatgacaaagatgtcatctctgccgctacaaaaatgtcaagtttcggccttgtctcctcccagacacaatacctactatcctcattattatctgacaagaagttcactaagaactaccttagagagaaccaaaaacggctcaagaacagacagagaaagctcgtgttgggtctagaggccatcgggatcaaatgtctgaagagtaatgcgggactcttttgttgggtcgacatgagacctctccttagatctaaaacgttcgaagcggaaatggatctttggaagaagattgtttacgaagtgaagctcaacatctctcctggttcgtcgtgccattgtgaagaaccgggttggtttagagtttgtttcgcgaacatgattgatgagacattaaagcttgctttaaagagattgaagatgttggttgatgatgaaaactcaagtagaagatgccaaaagagtaaaagcgaaagactaaacggttcgaggaagaagacgatgtcaaatgtctctaactgggttttccgactatcgtttcacgaccgtgaggctgaggaacgatag

SEQ ID NO: 137915 - DNA, 243 bp, Arabidopsis thaliana columbia
attgtaggctggcctccggtagcgacagcgaggaaaacagtgaggcggaaatacgtgaaagtggcgttggatggtgcggcctatctcagaaaggttgatcttgggatgtacgattgctatggacagcttttcaccgctctagaaaacatgtttcaggggataataacaatatgtagagtgacagagttggagaggaagggagagtttgttgctacttacgaggacaaggatggcgattggatg

SEQ ID NO: 137916 - DNA, 2073 bp, Arabidopsis thaliana columbia
ttccctcaatcgttcaaatgcaagatttcttcggctccgttcgtcgatcgcttgttttccgtccttcttccgacgacgataaccaggagaaccagcctccgtttcccggtgttctcgccgataagatcacctcttgcatccgcaaatcgaagatttttatcaaaccctccttctcgcctcctcctcctgctaacactgtagacatggcacctccgatttcgtggaggaaaggtcagttaattggtcgcggcgcgtttggtacggtgtacatgggtatgaatcttgactccggggagcttctcgccgtcaaacaggttctgattgcagccaattttgcttccaaggaaaagactcaggctcatattcaggagcttgaagaagaagttaagcttcttaaaaatctctcccatcctaatatagttagatatttgggtacagtgagggaagatgataccctgaatatccttctcgagtttgttcccggtggatcgatatcatcgctcttggagaaatttggaccttttcctgaatcagttgtccggacatacacaaggcaactgcttttagggttggagtacctgcacaatcatgcaattatgcacagagacattaagggggctaatatccttgtggataataaaggatgcattaagcttgctgattttggtgcatccaaacaagtagctgagttggctacgatgactggtgcaaaatctatgaaagggacaccatattggatggctccggaagttatccttcaaactggacatagcttctctgctgacatatggagcgtcggctgtacagttattgaaatggtgactgggaaggctccttggagtcagcagtataaagaggttgctgctatcttcttcataggaacaacaaaatcacatcctccaatacctgatactctctcctctgatgcaaaagattttctgctcaagtgtctgcaggaggtaccaaatctgcggccaaccgcatctgagctactaaagcatccttttgttatggggaaacacaaggagtctgcttctactgatcttggttctgtcctgaacaatcttagcactccactaccgttacagataaataacaccaagagcactccagattctacttgcgacgatatgatgagaatttcttgacatttgacggagaaatgagttctacccttgaaaaagattgtcatctgaagaagagctgtgatgacataagtgatatgtccattgctttgaagtccaaatttgacgaaagtcctggtaatggagagaaagagtctacaatgagcatggaatgtgaccaaccttcatactcagaggatgatgatgagctgaccgagtcaaaaattaaagctttcttagatgagaaggctgcagatctaaagaagttacagactcctctctatgaagaattctacaatagtttgatcacattctctcccagttgtatggagagtaatttaagtaacagtaaaagagaggacactgctcgtggtttcctgaaactgcctccaaaaagcaggtcaccgagtcggggccctcttggtggttcaccttcaagagcaacagacgcaactagttgttccaagagcccaggaagtggaggtagtcgtgaattgaatattaacaatggaggtgatgaagcttcacaggatggtgtatcagcacgggtcacagactggaggggcctcgttgttgacactaagcaggaattaagccagtgtgttgctttgtcagagatagagaagaagtggaaggaagagcttgatcaagaactggaaagaaagcgacaagaaatcatgcgccaagcagggttgggatcatccccaagagacagaggcatgagccgacagagagagaagtcgaggtttgcatcaccaggaaaatgacttgcacaaaaagtctccggctttttgatttttgattgctcaactagtatatatatctgtaactcttatctcgctgtgatgaaaagtagacacgaggtttggtctgaatatatgattctgaactggttgttgaaggtattagatgtgtgtaatgtgagtgtcgggtgcatatttaagtgcgc

SEQ ID NO: 137917 - DNA, 584 bp, Arabidopsis thaliana columbia
ctctctctctcactcttttcttttccgagaacccaacaaaaaaaaagctactattaatccttcccctcgtgaggaaatcatttcttcttgtttctcgagatttattctctttctctctctctttctctgtgtgtttcgtgtcttcagattagttcgatgtttcgttcagacaaggcggaaaaaatggataaacgacgacggagacagagcaaagccaaggcttcttgttccgaagaggtgagtagtatcgaatgggaagctgtgaagatgtcagaagaagaagaagatctcatttctcggatgtataaactcgttggcgacaggtgggagttgatcgccggaaggatcccgggacggacgccggaggagatagagagatattggcttatgaaacacggcgtcgtttttgccaacagacgaagagacttttttaggaaatgattttttttgtttggattaaaagaaaattttcctctccttaattcacaagacaagaaaaaaaggaaatgtacctgtccttgaattactattttggaatgtataattatctatatatataagaagaaaaaattgcttaggaattt

SEQ ID NO: 137918 - DNA, 1033 bp, Arabidopsis thaliana columbia
ctctcttattctctcactcttttttttttatattcctctctctctaaatctataaaatatatttaaaaacttgatcgtatataataaagtaaataaagaataataacaaaaaaaatggagaaaagaggaggaggaagtagtggaggttcgggatcatcagcagaagcagaagtgagaaaaggaccatggacgatggaagaagatcttattcttatcaactatatcgccaaccacggcgatggtgtttggaattctctcgccaaatctgcaggtctaaaacgaaccgggaaaagttgccggctccggtggctgaactatctccgccccgacgtacgacggggaaacatcactccagaagagcaacttatcatcatggaacttcatgctaagtggggaaacaggtggtcgaaaatcgccaaacatcttccaggaagaacggacaacgagatcaaaaatttctgtaggacaagaattcaaaaatacatcaagcaatcggatgtaacaacaacatcgtccgttggatctcatcatagctcagagatcaacgatcaagctgcaagcacgtcgagccataatgtcttttgtacacaagatcaagcgatggagacttattctcctacaccgacatcatatcaacataccaatatggaattcaactatggtaactattcggccgcggcagtgacggcaaccgtggattatccagtaccgatgaccgttgatgatcaaaccggtgaaaactattggggcatggatgatatttggtcatcaatgcatttattgaatggtaattgattgatcggtggacaaaacatggaatattaattgagtattatatatgatttttaggagtactattattagtacgtgacatgtatatgtttttgcctcgttgtagaggtttggggttataattaatatataatgttatctaatatgcaaccttgatacatatttggatctttattgaacccatgttatacataaataaaattgttgaaggggtcataaaaaaaaaaaaaaaaaaaaaaaa

SEQ ID NO: 137919 - DNA, 1094 bp, Arabidopsis thaliana columbia
gcttactgattacagtttcagttccaaagatgagaactttgagctcccaattatactccaatggtggtctcacttggttccagaagaagaatcagagctctctgttcatcaagcatctcagagtctctaaaccatcgagggttcagctcatatctgctgttcaattccgtccgtgcatcgatattcataagggaaaagtgaaacagatagttggatccacacttcgtgacttgaaagaggatggttcagttctcgttacgaattttgaatcggataagtctgcggaagagtatgcaaagatgtacaaagaagatgggcttacgggtggtcatgtgataatgcttggagcagaccctttaagccaagctgcagctattggagcattacatgcttatcctggcggtttgcaagttggaggtggaatcaattctgagaattgcatgagttatattgaggagggagcaagccatgtcattgtcacttcgtatgtatttaacaatggaaagattgatcttgaaagactcaaagatattgtgagcattgttgggaaacaaagactgatattggaccttagctgcagaaagaaggatggaagatacgcaattgttactgatagatggcagaagttcagcgacgtcatccttgacgagaaatcattggagtttcttggaggattttcagatgagtttctggtgcatggcgtagacgttgaaggaaagaagctagggatcgatgaagagcttgtagcattgcttggcaactactctccgattccagtaacttatgcgggaggtgtgacggtaatggatgatgtagagaggatcaaggacgcaggaaagggacgtgtagatgtaacagtgggaagtgccttagacattttcgggggaaatcttccatacaaagacgtcgtcgcttggcatcacaagcagcactcactccattgatatcgccattttcacctttgctcatcttttttatttgcattaccccaaaccttaagcttcaatatttgcaacattaatcttcagctttaaacttttgtgcttctttctaaactcttcaagaatttgtcaattttgaatattttttcgatt

SEQ ID NO: 137920 - DNA, 1388 bp, Arabidopsis thaliana columbia
gagacgctagaaagaacgcgaaagcttgcgaagaagatttgcttttgatcgacttaacacgaacaacaaacaacatctgcgtgataaagaagagatttttgcctaaataaagaagagattcgactctaatcctggagttatcattcacgatagattcttagattgcgactataaagaagaagatggctgtatatgaacaaaccggaaccgagcagccgaagaaaaggaaatctagggctcgagcaggtggtttaacggtggctgataggctaaagaagtggaaagagtacaacgagattgttgaagcttcggctgttaaagaaggagagaaaccgaaacgcaaagttcctgcgaaagggtcgaagaaaggttgtatgaagggtaaaggaggaccagataattctcactgtagttttagaggagttagacaaaggatttggggtaaatgggttgcagagattcgagaaccgaaaataggaactagactttggcttggtacttttcctaccgcggaaaaagctgcttccgcttatgatgaagcggctaccgctatgtacggttcattggctcgtcttaacttccctcagtctgttgggtctgagtttactagtacgtctagtcaatctgaggtgtgtacggttgaaaataaggcggttgtttgtggtgatgtttgtgtgaagcatgaagatactgattgtgaatctaatccatttagtcagattttagatgttagagaagagtcttgtggaaccaggccggacagttgcacggttggacatcaagatatgaattcttcgctgaattacgatttgctgttagagtttgagcagcagtattggggccaagttttgcaggagaaagagaaaccgaagcaggaagaagaggagatacagcaacagcaacaggaacagcaacagcaacagctgcaaccggatttgcttactgttgcagattacggttggccttggtctaatgatattgtaaatgatcagacttcttgggatcctaatgagtgctttgatattaatgaactccttggagatttgaatgaacctggtccccatcagagccaagaccaaaaccacgtaaattctggtagttatgatttgcatccgcttcatctcgagccacacgatggtcacgagttcaatggtttgagttctctggatatttgagagttctgaggcaatggtcctacaagactacaacataatctttggattgatcataggagaaacaagaaataggtgttaatgatctgattcacaatgaaaaaatatttaataactctatagtttttgttctttccttggatcatgaactgttgcttctcatctattgagttaatatagcgaatagcagagtttctctctttcttctctttgtag

SEQ ID NO: 137921 - DNA, 1028 bp, Arabidopsis thaliana columbia
ggaactagtagcaatatctctcttctatcttttcatttcctactcttttctcactatggccaaagacggtggcgtttcttgtctacgaaggtcggagatgatcggtataggaatcggagaacttgaatctccgccgctagattctgatcaagtccacgttctcgccgttgatgacagcctagttgatcgaatagtcatcgaaagattgcttcgaatcacatcctgcaaagtcacggcggttgatagcggatggcgtgctctcgaattcttaggattagacgacgacaaagccgccgtcgaattcgatagattgaaggtggatttgatcatcactgattactgtatgcctggaatgactggatacgagcttctgaaaaagattaaggaatcgacaagttttaaggaagttcctgttgtaattatgtcgtcggagaatgtaatgactcgtatcgacagatgtcttgaagaaggtgcggaggattttttactgaaaccggtgaaactcgccgacgtgaaacgtctgaggagttacttgacgagagacgttaaagtcgccgccgaaggaaacaaacggaagctgaccactccaccgccgccgcctccgctctcagccacatcctcgatggaatcttcggactctacggtggaatcgcctctgtctatggttgacgatgaagattcgttgacaatgtcgccggagtctgcaacttcgcttgtggattcgccgatgaggagtcccggattagcttagagagatccgtgtgataacgatctccgttaactttttacttttgacggttttattgactgcaacgttgacttgaacgccgtcagtttatacttatagatctctctctctctttttatatcgttgcacgtggggtctctttgctcacgaaggaacttttataaaaacaagtattgtatttatttaattacgtatatttgataattttaaaattaaataatgtttctatttctaataatatcataataatcaaataatgtgtgacagtttacctctgtgt

SEQ ID NO: 137922 - DNA, 1682 bp, Arabidopsis thaliana columbia
tttgagagtaacaaagaaaaagtagttatcatggcggcattggaggagctaaagaagaagctgtctccattgtttgatgctgagaagggtttttcttcatcttcatctttggatccaaacgattcatatttattatctgatggtgggactgtgaatttacttagtagatcatatggagtttataattttaacgagctcgggttacaaaaatgtacatcttctcatgtggatgagtctgaaagttccgagacgacgtatcaatgtgcttctcacgaaatgcgggtttttggagctataggaagcggagctagcagcgttgttcaacgagctattcatatccctaatcatagaattttagcgttgaagaagattaatatctttgaaagggagaaaaggcagcaattgcttacagagatacggacattgtgtgaagctccttgtcatgaaggacttgtggattttcacggagcgttttatagtccagactcgggacaaatcagcatagctcttgaatatatgaatggaggatctcttgctgatattttaaaagtaacaaagaagatacctgagccggttctttcatcattgttccacaaacttttgcaaggattgagctacttgcatggagtgagacatcttgttcatagagacattaaacctgctaatttgcttataaatctcaaaggggaaccgaagataaccgattttggcataagtgctggccttgagaattcaatggctatgtgtgctacttttgttggaactgtcacctacatgtcaccagagaggataaggaatgacagttattcttatccagctgatatatggagccttggtctcgctctttttgaatgcggcactggagagtttccgtatatagctaatgaagggcctgttaatcttatgttgcagatattggatgatccttcaccaacaccaccaaaacaagaattctcaccagagttctgttccttcattgatgcttgcctccagaaggatccagatgctcgaccaacagctgaccagctcttgtcacacccttttattacaaaacacgagaaggaaagagtagatttggcgacttttgttcaaagcatctttgatccaactcagagattgaaagatttagctgatatgctcaccatacattattactccctctttgatggatttgatgatctttggcaccacgcaaaatcgctctacactgaaacttcagttttcagtttctctgggaaacataacacaggatcaactgaaatcttctcagcattatcagacattcgtaacacattaacaggagatttaccgagtgagaaacttgttcatgtcgttgagaagcttcattgcaaaccttgcggcagtggtggagtcataattcgtgctgttggatcgtttattgttggaaatcagtttctgatctgtggtgatggagtccaagcagaagggcttccgagtttcaaagatcttggcttcgatgtcgcaagtagacgtgttggccgatttcaagaacagtttgttgttgaatctggtgatcttattggaaagtattttcttgctaagcaagagctttatattacaaacttagattagataaacacacatgagaaaacgtttgttctctactgtactataatgtaactatgaacttgtttaattactaacatatgtaattgtatttg

SEQ ID NO: 137923 - DNA, 1950 bp, Arabidopsis thaliana columbia
atgtccgggactattaatcccccggacggaggagggtccggtgcaagaagcccaccagtcgttcgtcagagagtgctagctcctccgaaagcgggtttactaaaggacatcaagtccgtggttgaagaaactttcttccatgatgctccgcttagggatttcaagggccaaaccccagctaaaaaagcgttgctcgggatccaggctgtcttcccgatcatcgggtgggccagagaatacactcttcgcaaatttagaggtgatctcatcgccggtctcaccattgctagtctttgtatccctcaggatatcggatatgcaaaactcgcgaatgtcgatccgaaatacggactttattcgagtttcgtgccaccgctgatttacgcgggcatggggagttctagggatattgcgataggaccagtcgctgtggtgtctcttcttgtgggaactttgtgccaggccgtgatcgacccaaagaaaaacccggaggattatctccgacttgtcttcactgccactttctttgctggaattttccaagccggcctcggatttctacggttgggattcttgatagactttctgtcgcatgcggccgtggttgggttcatgggaggagcagccatcacaatcgctctccaacagcttaagggctttcttggcatcaaaacatttaccaagaaaactgatattgtttctgtcatgcactccgtattcaaaaacgctgagcatgggtggaattggcaaactatagtcattggcgccagtttcttgacctttcttctcgtcaccaaattcattgggaagagaaacaggaaactattttgggttccggcaattgcgcctcttatttcagtcattatctctaccttctttgtcttcatttttcgtgctgataaacaaggagtccaaattgtgaaacatatagatcaaggaatcaatccgatttccgttcataagattttcttctccggaaaatatttcaccgaaggaatccgaatcggaggcattgcgggtatggtcgccttaacggaggctgtagcgattgcaagaacatttgcggcaatgaaagactatcaaattgatggaaacaaagagatgattgccctagggactatgaacgtcgtcggttcaatgacctcttgttacattgccacgggttcgttttcgcgatctgccgtgaacttcatggcgggagtcgaaacggcggtttcaaacatagttatggccatagttgtagctctaaccttagagttcatcacaccactcttcaagtacactccaaatgctatcctcgcggccatcattatatcggctgtcctcggtcttatcgatattgacgcagcgattctcatatggaggatcgataaactcgacttcttggcttgcatgggagctttcttaggagtcatcttcatctcggttgagatcggtctcttgatcgctgtggtgatctcttttgcaaagatattgcttcaagtgacgagaccaagaaccacggttctagggaagctgccaaattcgaatgtatatcggaacactctacagtatccggacgctgcccaaattcccggaatcttgatcatccgtgttgactcggccatctacttttccaactccaactatgtccgagaaagggcatcaagatgggtgcgagaggagcaagaaaatgctaaggaatatggcatgccggcaatcagatttgtgattattgagatgtcaccggttaccgatatcgataccagtggtatccactccatcgaagaacttctcaagagcctcgagaagcaagaaattcagttgattctagcaaatccaggaccagtggtgattgagaaactttatgcttcaaagttcgtcgaggagattggagagaaaaatatcttccttactgttggcgacgcggtcgcagtttgttctacggaagtggctgagcaacaaacttaa

SEQ ID NO: 137924 - DNA, 778 bp, Arabidopsis thaliana columbia
cgtttgccttatccgttcagctcatcttcttcttcttcttcgtcacctctgaattagtttcccagaatccgaaattcctaggaagagaacataacaatggcgcagatggttgcgatgcccgtagcgcactcgctctcactcatttgcaattgggcaaaatccaatcctctctctcgcaacactcttgccctcccagcttcaaacactcccaataagcagagtctaagcatcagatgtgctcgtgttggtggagtggagattccggctaataagagaattgagtactctcttcagtacattcatgggattggtcgaactagggctcgtcagattcttgttgatcttcagatggagaacaagattactaaagacatggctgaggaagaactcatcattcttcgtgatgaagtctccaagtacatgattgagggtgatctgaggaggttcaatgctcttgcaatcaagaggttgaaggagatccagtgttaccgtggggtaaggcacatccaagggctgccatgtcggggccagagaaccaagaacaactgcaggactcttaaaggcaagaaaattgctattgcagggaagaagaaagtttccaagtgaaaattgctattgcagggaagaagaaagtttccaagtaatcatcttcatgatctccttcttcttctgtaatactctttttagtttgtctagtcatctctgtttaaatgtgattgtaattcccaaacctttgttcgaactgagccctttccagtttatcttcggctttttagct

SEQ ID NO: 137925 - DNA, 1806 bp, Arabidopsis thaliana columbia
gtttcctctctcccccaccattctttctcctctctccgcttcttcttcttcccctgttcctcttataacccctctcgtctcatgtctacctcctcctcttcttccgacaacggagccggtggaagcggcggcgttttcgaggccccatctccatcccgccctcgccgcggagccaacgatgtttggccggagccttttcttgaatctctcgccgttcaagttgccgttaacgcttccacatccgccggcctcctcgccgcagctccggctcttgccaacgtttttcgggtttgcaccacgtggctagctgtctctcgctccgaccatctatggcaactactatctcgccaagtttgggcaagaacacatttgatgcacgacacgtggcgggacgagttcatctaccgtcatcggacggctagaaacttccggacgcgtactcacacctacttcactctccaatttgacccgtctgatgtggacgagcctgatagtctctcttgccgttgtctcaccctctcagacctctacttagccggagggttcgccgacggaaccgtccggctttttcttctaaacaaccgactccacgtcaggaccttacggccacctctacgtgaccgctttggtagattctcacgagccgtctcaggcattgttatctccgactcaaggctcacgttcgctacgatggacggagacatccacgtggcggaaatagacggtgttggtcacacacgcacggcttacgcaggagatatagttaacgacggtgcgttggtagatttcactggctgtggacgttggtgggtcggtcttttcgcgggtgtgccaggtcgtgcctttcacatatgggactgtaacagcgaagagacaacattcgtcggtggtacactcaccgaccctgaagctgtcatgggatggcacacgttaacagagctaacaacgtcccttggccgtctcagaatctccggtaacgagacggcggtagcatgcacgagatggagaatcatggtgatcgatctaagaaaccaaggagtgatcatcggagaagacgaagagccacgtagaggactaatagtgacaggcttcgatgccaacgacgaagcgtacgttagattggacagtagaggaaacgctagcgtgcgaagggtgaacacgcaacaaacggtgtgtgagttccgtgttagtggagcggcgcagagaagagtaatgggttgtgttaatagactgcacgcgctaatgtgcgcaggtggtataatgcgcgtgtgggaggtagagagaggagagtatctgtacagtattagggagagagtaggagaagttgacgccattgttgccgatgatagacatgtggcggttgcgtcagcttcatcaacggctcagagtattatacatctatgggatttcggtgcactgtagcgtaccagattactaaaatttttttttttaacttgaaaaaaaagaaactatttttctctgaaaaagcgaaaccctaaacctaggtgtatatgtagggtttctgattataaattaaattgggaaagtgacggagggaagatggtgacaggagggtgaaatttacaagggaaattgattctttctacaaagtttgaccaaaaaattaagttactgtttttgtctaaaaccaaacaaagtggactttttcttgttgttcttgtttttttccttgtgtttagggctctctcaattttgactttgtacgaaatgtctttttttttttcttctacttgtaactcttcactttactggagtttattattttgtataatggtcccaaaaaaa

SEQ ID NO: 137926 - DNA, 1882 bp, Arabidopsis thaliana columbia
atacaactttttgtctctttctctactaataataataatccgaactttgtttgttcttctacttcaattcataatctttgacggcgatgactatggagcaagaaattgaagtcttggaccagtttccggttgggatgagagttcttgctgttgacgatgaccagacttgtctccgtattctccagactttgcttcagcgctgccaatatcacgttacaacaacgaatcaggcacagaccgcattggagttgttgagggagaacaagaataagtttgatcttgttattagcgatgtcgacatgccagacatggatggtttcaagctgcttgagcttgttggtcttgaaatggacttacctgtcataatgttatctgcgcatagcgatccaaagtatgtgatgaaaggagtcaagcacggtgcctgtgattatctgcttaaaccggttcgaattgaggagcttaagaacatatggcaacatgttgtgagaaagagcaaacttaagaagaataagagcaatgtgagtaatggttcaggaaactgtgataaagcaaacagaaaacgtaaagaacagtatgaagaggaggaagaggaagaaagagggaatgataatgatgatccaacggcgcagaagaagcctcgtgttctttggacgcatgagctgcacaataaattcctagcagctgttgatcatttaggcgttgagagagctgttccaaaaaagattctagatctgatgaatgttgacaaactcactagagagaatgttgcaagccaccttcagaaattccgcgttgctctgaagaaggtgtctgatgacgccattcaacaagctaacagggcggctattgactcacattttatgcaaatgaattctcagaaaggacttggtggcttctaccaccaccaccgcggaatacctgttggatccggtcagttccatggtggaaccacaatgatgaggcattactcttcaaataggaatcttggtcgtctgaattcccttggagcaggaatgttccaaccagtctcatcatcgtttcctcgtaaccataatgatggaggaaacatacttcagggtttgccgctagaagagcttcagatcaacaacaacatcaacagggcttttccaagctttacttcacaacaaaactctccaatggtagctcccagtaatctgttacttctcgagggtaacccgcagtcatcatctttaccctcaaacccgggtttttctcctcatttcgagatcagcaagcgtctagaacattggtcaaacgctgcattgtcaaccaacattccacagagtgatgttcattcaaaacctgacaccttggaatggaatgcgttctgcgactcagctagtccgctagtaaacccaaacctggatacaaatccggcatctctctgcagaaacacgggttttggatccacaaatgctgcacaaacagacttcttttatccattacagatgaatcagcagcctgcaaacaactcaggtccagtgacagaagctcaactgtttagaagtagcaatccaaacgaaggtttactcatgggacaacagaagcttcagagtggtttgatggcttctgatgctggttccttagatgatatagtcaattccttaatgacacaggaacagagccaatctgatttctcggaaggtgattgggatttggatggtttagctcactcggaacatgcatacgagaaactccattttcccttttctttgtcagcttgagaaacctgttttattcagacacaatcaattattattatcttttggttctgtctcttctctcttctctgtaatgaaagtgtaagctattgtttaccgctcccccactggtttgagcaacttaggaagatccaaatcca

SEQ ID NO: 137927 - DNA, 2007 bp, Arabidopsis thaliana columbia
cttcttctccttctctgatcgttcgttttctggacgagagagatggtaaatccgggtcacggaagaggacccgattcgggtactgctgctggtgggtcaaactccgacccgtttcctgcgaatcttcgagttcttgtcgttgatgatgatccaacttgtctcatgatcttagagaggatgcttatgacttgtctctacagagagcagagagcgcattgtctctgcttcggaagaacaaagaatggttttgatattgtcattagtgatgttcatatgcctgacatggatggtttcaagctccttgaacacgttggtttagagatggatttacctgttatcaatctgaatgttttgaaacctttggttatagtgatgtctgcggatgattcgaagagcgttgtgttgaaaggagtgactcacggtgcagttgattacctcatcaaaccggtacgtattgaggctttgaagaatatatggcaacatgtggtgcggaagaagcgtaacgagtggaatgtttctgaacattctggaggaagtattgaagatactggcggtgacagggacaggcagcagcagcatagggaggatgctgataacaactcgtcttcagttaatgaagggaacgggaggagctcgaggaagcggaaggaagaggaagtagatgatcaaggggatgataaggaagactcatcgagtttaaagaaaccacgcgtggtttggtctgttgaattgcatcagcagtttgttgctgctgtgaatcagctaggcgttgacagtgagttaaaaacttgcttgcttatgcatttgtgtgtgtcgattggtaacattgtggaattccagaagtatcggatatatctgagacggcttggaggagtatcgcaacaccaaggaaatatgaaccattcgtttatgactggtcaagatcagagttttggacctctttcttcgttgaatggatttgatcttcaatctttagctgttactggtcagctccctcctcagagccttgcacagcttcaagcagctggtcttggccggcctacactcgctaaaccagggatgtcggtttctccccttgtagatcagagaagcatcttcaactttgaaaacccaaaaataagatttggagacggacatggtcagacgatgaacaatggaaatttgcttcatggtgtcccaacgggtagtcacatgcgtctgcgtcctggacagaatgttcagagcagcggaatgatgttgccagtagcagaccagctacctcgaggaggaccatcgatgctaccatccctcgggcaacagccgatattgtcaagcagcgtttcaagaagaagcgatctcactggtgcgctggcggttagaaacagtatccccgagaccaacagcagagtgttaccaactactcactcggtcttcaataacttccccgcggatctacctcgcagcagcttcccgttggcaagtgccccagggatttcagttccagtatcagtttcttaccaagaagaggtcaacagctcggatgcaaaaggaggttcatcagctgctactgctggatttggtaacccaagctacgacatatttaacgattttccgcagcaccaacagcacaacaagaacatcagcaataaactaaacgattgggatctgcggaatatgggattggtcttcagttccaatcaggacgcagcaactgcaaccgcaaccgcagcattttccacttcggaagcatactcttcgtcttctacgcagagaaaaagacgggaaacggacgcaacagttgtgggtgagcatgggcagaacctgcagtcaccgagccggaatctgtatcatctgaaccacgtttttatggacggtggttcagtcagagtgaagtcagaaagagtggcggagacagtgacttgtcctccagcaaatacattgtttcacgagcagtataatcaagaagatctgatgagcgcatttctcaaacaggtttgattattactcgaatacagtgcactctaaaac

SEQ ID NO: 137928 - DNA, 1778 bp, Arabidopsis thaliana columbia
aaatcatattgagaacaaatagatttggttatatatggcttttacgcacgtttgtttatggacgttagtcgccttcgtgctgacgtggacggtgttctaccttaccaacatgaagaagaaggcgacggatttggctgatacggtggctgaggatcaaaaagacggtgctgctgacgtcattatcgtcggggctggtgtaggtggttcggctctcgcatatgctcttgctaaggatgggcgtcgagtacatgtgatcgagagggacatgagagaaccagaaagaatgatgggtgagtttatgcaacctggcggacgactcatgctttctaaacttggccttcaagattgcttggaagacatagatgcacagaaagccacgggtttggcagtttataaagatggaaaagaagcagacgcaccttttccagtggataacaacaatttttcttatgaaccttctgctcgatcttttcacaatggccgattcgtccaacaactgcgtcgaaaggctttttctctttccaatgtgcgcctggaagaaggaacggtgaagtctttactagaagaaaaaggagtggtcaaaggagtgacatacaagaataaagaaggcgaagaaacaacagccttggcacctctcactgtggtatgcgacggttgctactcaaaccttcgtcggtctcttaatgatgacaacaatgctgagattatgtcgtacatagttggttacatctcaaagaattgtcggcttgaagaacccgaaaagctacacttgatattgtctaaaccatctttcaccatggtataccaaataagcagcactgacgttcgttgtggttttgaggttctccccgaaaattttccttctattgcaaatggtgaaatgtctactttcatgaagaatactatagttcctcaggtacctccaaaactccgcaaaatatttttgaaaggtatagatgagggagcacacataaaagtggtgccggcaaagcgcatgacatctactttaagcaagaagaaaggtgtgattgtattgggagatgcattcaatatgcgtcatccagttgttgcatctggaatgatggttttactgtcggacattctcattctacgccgtcttcttcagccattaagcaacctcggcgatgcaaacaaagtctcagaagttatcaattccttttatgatatccgcaagccaatgtcggcgacggttaacacattgggaaatgcattttctcaagtactaattggatcaacggatgaagcaaaagaggcaatgagacagggtgtctatgattacctttgtagtggcgggtttcgtacgtcagggatgatggctctgctcggcggcatgaatcctcgtcctctctctctcgtctatcatctttgtgccatcactctatcctccattggccaactgctctctccatttccctctccccttcgcatttggcatagcctcaagctttttggtttggccatgaaaatgttggttcccaatctcaaagctgaaggagttagccaaatgttgtttccagcaaatgcagccgcgtatcacaaaagctatatggctgcaaccactctctaaactttgatgctctcaatcgcaatatatatggagcacgaatctatgtgattgtgcatttggtaaacgtgtattgcagtgcttataattattagtatgtaacggggaaaagttctaaacacaaaaaaataaacttttgaatgttatatgtgtgaattatttttgttgttacaagtaatgctctttttttttt

SEQ ID NO: 137929 - DNA, 756 bp, Arabidopsis thaliana columbia
atggtgaagaagagttacccggaagtgaaagaagagtacaagaaagctgttcagagatgcaagaggaagctccgtggtcttattgccgagaagcactgtgctcccatcgtcctccgtcttgcatggcactcggctgggacatttgatgtgaagacgaagacaggaggaccgtttgggacgataaggcatccccaagagctagcccatgatgccaacaatggtcttgatattgccgttaggcttcttgaccctatcaaggagctgttccctattctgtcatatgctgacttctaccagctagctggagttgttgctgttgagatcactggaggaccagagattccatttcatcctggtagactggacaaagttgagccacctcctgaaggtcgtctgcctcaggccaccaaaggtgtggatcatctaagagatgtgtttggtcggatgggactcaatgacaaagatatcgttgcattgtctggtggacacaccttgggtcggtgccacaaggagcgttcaggattcgagggtgcatggacaccaaacccgctcatttttgacaactcctatttcaaagagatactaagcggagagaaagaaggacttcttcaactaccaaccgacaaggctcttcttgatgatcctctctttctcccatttgttgaaaaatatgctgcagatgaggatgcctctttcgaagactatacggaagctcatctaaagttgtcagaactcgggtttgctgacaaggagtaa

SEQ ID NO: 137930 - DNA, 1140 bp, Arabidopsis thaliana columbia
tgcccccagctagtcacatactcatgattgcaaaatctctctctctctctgcctctctatatattaacctttcttcttcctttactttctcatcttctatctctcaaaagaaaagcagacaactttatttgcaaaaacagagtttttttttcttatcttgagaaagttcaacagaagatgatgttcgagaaagacgatctgggtctaagcttaggcttgaattttccaaagaaacagatcaatctcaaatcaaatccatctgtttctgttactccttcttcttcttcttttggattattcagaagatcttcatggaacgagagttttacttcttcagttccaaactcagattcgtcacaaaaagaaacaagaactttcatccgaggaatcgacgtgaacagaccaccgtctacagcggaatacggcgacgaagacgctggagtatcttcacctaacagtacagtctcaagctctacagggaaaagaagcgagagagaagaagacacagatccacaaggctcaagaggaatcagtgacgatgaagatggtgataactccaggaaaaagcttagactttccaaagatcaatctgctattcttgaagagaccttcaaagatcacagtactctcaatccgaagcagaagcaagcattggctaaacaattagggttacgagcaagacaagtggaagtttggtttcagaacagacgagcaagaacaaagctgaagcaaacggaggtagactgcgagttcttacggagatgctgcgagaatctaacggaagagaaccgtcggctacaaaaagaagtaacggaattgagagcacttaagctctctcctcagttctacatgcacatgagcccacccactactttgaccatgtgcccttcatgtgaacacgtgtcggtcccgccaccacaacctcaggctgctacgtcagcgcaccaccggtcgttgccggtcaatgcgtgggctcctgcgacgaggatatctcacggcttgacttttgacgctcttcgtcctaggtcctaagtctttttacttgcaaccaaagggcattttggtcgttttttaagtttcatggaccagatatgcatgtagttgttaacatgtatgtattttcttaaaaaaaaaaaaaaa

SEQ ID NO: 137931 - DNA, 1527 bp, Arabidopsis thaliana columbia
gcacgagttaggattttgattgtcgtgtttctttctttattctgtgtttggggaatcctttgattgattttctctctttatattccaccaaaaaaaaagcatcttttttgtttctttatctatctgattgtttgtatagttctcaattccaaaaccaaacagaatgattaatcaatcaaaaagggcccagctttgacatatctctctctttctctctttagccaactagggtttttgtgatttttgttctgggtttgttgtgggaaaatgggatctgcaagtgggttttactcaaacgaagagtttgaattggatcctaaatggcttgttgatcctcgtcatctctttgttggtcctaagatcggtgaaggtgctcatgccaaagtttatgagggaaagtatagaaaccaaacagtggcgattaagattattaaaagaggagagtcccctgaagagattgctaaacgagataaccggtttgcgagagagattgctatgttgtctaaagtccagcacaagaatttagtcaagttcattggagcgtgcaaagaacccatgatggttatagttactgagcttctactaggcggtacattgcgtaaatatcttgtcagcttacggccaaagcgtttagacattcgtttggctgttggttttgctcttgacattgctcgtgcaatggaatgtttacattcccacggtatcattcaccgcgatcttaaaccagagaatttgatcttatcagcggatcataagacagtgaaactcgctgatttcggtttagctagagaagaatcattaactgagatgatgaccgcagagactggtacataccgatggatggcccccgagctctacagtacggttacgttaaggcaaggagagaagaaacactataatcataaagtagatgcttacagctttgccattgtcttgtgggaactcattctcaacaagttaccatttgaaggcatgtcaaatctacaagcagcatatgctgctgcattcaagaacttgaggccaagtgcagaggatttaccaggggatttagagatgattgtaacttcatgctggaaagaagatcctaacgaacggccaaatttcacagagataattcaaatgctccttcgttacctgaccactgtttcggcaccacagatcattcctccactaaatagaagagtcttctcatcagaaaacatcgttttatcaccggaatctcctggaacatgctctctgatgtctgtcagagacggagacgtttctcgtcagaccgttaacactgctgattcgtcagagaaacaaacaaaaggaagcttcttctcctgctgctcatagatgatatatttggttgtgtaatctgtaaaggaaacgagaggaaagtgtttatgatgaaaaaaagtataatgtattaagcttagaaatttagatcacagtcatcagaaaattgttcgtgtataaaaatattgagcctgaaacattaatgttacgtttttgcgtaaaaaaaaaaaaaaaaaaaaaaaaaaa

SEQ ID NO: 137932 - DNA, 962 bp, Arabidopsis thaliana columbia
gagaaaatgtgtggcggtgctattatttccgattatgcccctctcgtcaccaaggccaagggctaaactcacggctgaggaactctggtcagagctcgatgcttccgccgccgacgacttctggggaaactattccacctccaaactccatcccaccaaccaagttaacgtgaaagaggaggcagtgaagaaggagcaggcaacagagccggggaaacggaggaagaggaagaatgtttatagagggatacgtaagcgtccatggggaaaatgggcggctgagattcgagatccacgaaaaggtgttagagtttggcttggtacgttcaacacggcggaggaagctgccatggcttatgatgttcccgccaagcagatccgtggtgataaagccaagctcaacttcccagatctgcaccatcctcctcctcctaattatactcctccgccgtcatcgccacgatcaaccgatcagcctccggcgaagaaggtctgcgttgtctctcagagtgagagcgagttaagtcagccgagtttcccggtggagtgtataggatttggaaatggggacgagtttcagaacctgagttacggatttgagccggattatgatctgaaacagcagattgcaccatcctcctcctcctaattatactcctccggccgtcatcggccacgatcaaccggatcacgtccggcgaagaaggtctgcgttgtctctcagagtgagagcgagttaagtcagccgagtttcccggtggagtgtataggatttggaaatggggacgagtttcagaacctgagttacggatttgagccggattatgatctgaaacagctatcgagcttggaatcgttccttgagctggacggtaacacggcggagcaaccgagtcagcttgatgagtccgtttccgaggtggatatgtggatgcttgatgatgtcattgcgtcgtatgagt

SEQ ID NO: 137933 - DNA, 1207 bp, Arabidopsis thaliana columbia
gcgtcattgttgatgagatcgtcttgttgctcctctgcgattggtgggttcttcgaccatcgacgtgaattatcaacctcaacacccatttccactcttcttcctcttccatcaaccaaatcttctttctctgttcgttgttctcttcctcagccatcaaagccacgctctggaaccagctctgttcacgccgttatgacactcgctggatcgttgacagggaagaaacgagtggatgagagtgagagtttgactcttgaaggtattagaaactctttgatccgtcaagaggacagcattatatttgggctattggagagagccaagtactgttacaatgctgatacttatgatcctactgcttttgacatggatggtttcaatggttctttggttgagtacatggttaaaggcactgagaagcttcacgctaaggttggtaggtttaagagtcctgatgaacatcctttcttccctgatgatctaccagagcctatgttgcctcctcttcagtacccaaaggtgttgcattttgctgctgattcgataaacataaacaagaagatatggaacatgtacttcagagaccttgttccaagacttgtgaagaaaggcgatgatggtaactacggctcaacagctgtctgtgacgctatctgccttcagtgtctctcaaagagaatccattacggtaaatttgttgcagaagctaaatttcaagcctcacccgaagcatacgagtccgccatcaaagcacaagataaggatcgactgatggatatgctgacattcccgactgtggaagatgcgataaagaagagagttgagatgaaaacccgaacatacgggcaagaagtgaaagttgggatggaggagaaagaagaagaagaagaagaagggaatgaatctcatgtttacaaaatcagtccgatcttagttggtgacttatatggagattggatcatgcctttaacaaaagaggttcaagtggagtacttgctcagaagactggactgaggcaacaacaaaataaacaatatggctttggtagtagagtagaaaggtttttgaatgttctttggttttttttttttactttacaatatttctaaacgttgttacactattattccactgtacaaagcgtgcatggtcagtggtattgaagaagggtaattagccgttactcaaacggtgtcgtttatgt

SEQ ID NO: 137934 - DNA, 1389 bp, Arabidopsis thaliana columbia
gggattaatgttcaaactggagaagaagttgctcttaagctggaacctgtgaagacaaagcatcctcagctccattatgaatcaaaagtatacatgcttcttcaaggagggacgggtgttccgcatatcaaatggttcggtgttgagggtaactacaattgtatggctattgaccttcttggtccaagcttggaagacttgttcaactattgcactcggagtttttctttgaaaactgttctaatgcttgctgatcagttaataaacagagttgagtacatgcactctcgaggatttcttcaccgtgatattaaaccggataactttttgatgggtctcggtcgcaaagcaaaccaagtgtacattattgattatgggcttgctaaaaagtatagagatcttcagacacacaagcatataccttacagggaaaataagaatctgactggaactgctaggtatgcaagtgtcaacacacaccttggcattgagcaaagtagacgagatgatctggagtctcttggttatgttctgatgtattttatacgaggaagtttaccatggcaaggtctaaaagctggtactaagaaacagaaatacgagaagataagtgaaaagaagatgcttactcccgtagaggttctttgcaagtcatatccatccgagttcacatcatatttccattactgccgttcattgaggtttgaggataaaccagattattcatatctgaaaagacttttcagggacctttttattcgggaaggttatcagtttgactatgtgtttgattggacaatcttgaaatatcctcagagtggctctatttcaaaaccaaggccaaatcctaaaccagctctagaccctccaggaccatctgcagaacgaaatgaaaagcctatagtggggcaggatctacgagaaagattctcaggtgcagttgaagcattcgctagacgaaatgtaccgagtcatggcattcgcccgaagcacattttttctgatgatgcttccaaagaagtgcaagtgtctgaaaaaacccgaaatgagattgctacaaagatggcagtgatgtctagcagccaacctggctcatcaggtgagctgagtgagaaccgctcaagtaaacttttttcaagcagtgcccaaaagattcaaccggtgcaagaaactaagttatctgcaaggcttgggcgtgatgacggcctgagaagcttcgatatgcttactatcggttccggaaagcggaaatgagtcactcaagaaagcttgcgatcggagtttggaagaatctgaaaatgtgtaaacaatgtaaaactgtctcccactttatgtgtttatagttcttcatagaattttataaagtggtatatgtaacttgtaacacaa

SEQ ID NO: 137935 - DNA, 1124 bp, Arabidopsis thaliana columbia
atgttgaaacaagagagtaacgacataggtagtggagagaacaacagggcacgaccctgtgacacatgccggtcaaacgcctgcaccgtgtattgccatgcagattctgcctacttgtgcatgagctgtgatgctcaagttcactctgccaatcgcgttgcttcccgccataaacgtgtccgggtctgcgagtcatgtgagcgtgctccggctgcttttttgtgtgaggcagatgatgcctctctatgcacagcctgtgattcagaggttcattctgcaaacccacttgctagacgccatcagcgagttccaattctaccaatttctggaaactctttcagctccatgaccactactcaccaccaaagcgagaaaacaatgaccgatccagagaagagactggtggtggatcaagaggaaggtgaagaaggtgataaggatgccaaggaggttgcttcgtggctgttccctaattcagacaaaaataacaataaccaaaacaatgggttattgtttagtgatgagtatctaaaccttgtggattacaactcgagtatggactacaaattcacaggtgaatacagtcaacaccaacaaaactgcagcgtaccacagacgagctacgggggagatagagttgttccgcttaaacttgaagaatcaaggggccaccagtgccataaccaacagaattttcagttcaatatcaaatatggctcctcagggactcactacaacgacaatggttccattaaccataacgcatacatttcatccatggaaactggtgttgtgccggagtcaacagcatgtgtcacaacagcttcacacccaagaacgcccaaagggacagtagagcaacaacctgaccctgcaagccagatgataacagtaacacaactcagtccaatggacagagaagccagggtcctgagatacagagagaagaggaagacaaggaaatttgagaagacaataaggtatgcttcgaggaaggcatatgcagagataagaccgcgggtcaatggccggttcgcaaagagagaaatcgaagccgaggagcaagggttcaacacgatgctaatgtacaacacaggatatgggattgttccttcattctgata

SEQ ID NO: 137936 - DNA, 1372 bp, Arabidopsis thaliana columbia
caatttcgccgacgacgaatccgacgtcagtaacttccgaccgcagtttccgaaactcgtgatcgctttctctttcgaaaatgttggcgtcggtacgggtgaatcagctgcaaagacttcttctctctgctcgtcgattatcttcttcaccaataatacctccgtcgcgtttacttcaccagcggctattctcgacctcagacactgatgcttcggctgcatctttttcttcttcgcatccgaaaatacaaacgcttgaaggcaaagcttctaataaaagccgaagcacatcgtcaacaacatctttgaatgaagatgaacttgccaaattctctgccattgctgatacctggtggcattctgaaggaccctttaaaccgttgcatcaaatgaatccaactcggttggctttcatccgctcgaccttatgcaggcacttcagtaaggatccgagttctgctaagccttttgaaggactgaaatttatcgatataggttgcggtggcggactactttctgagcctctagcacggatgggagcaactgtcacaggagttgatgctgttgataagaatgtcaaaattgctcgtcttcacgctgatatggatccagtgacttcaacgattgaatacttatgtactacagcagaaaagctagcggatgaaggcaggaagtttgatgctgttctttctttagaggtcatcgagcatgtagcaaaccctgcagagttctgtaagtcgttgtcagcattgactatccccaacggggctacagtactttctacaatcaatcgcactatgcgagcatatgcatcaaccattgttggagcagagtacattctacgttggcttcctaaaggcacacaccagtggtcaagttttgtaactcctgaagaaatgagtatgatattacaacgtgcttcagtcgatgtgaaagagatagctggatttgtgtacaacccaataacaggaagatggttattgtcagatgatattagtgtcaactatattacttatgggacgaaaaggaaggatcttggagacatataatcaatcgttccaagtcgtgtttctctgcatatctgcttctgagttacaactctagttcatgctttaaaaactaggtactctggaagttgcttaggacgaggacagtagttgttttgcaataagtgagaaacattcaaagaatatttggtcttctgaatcacacttctgtcatctgatagaagattaatgtttgtcgatatctcgttttgtggtaaatatggcatagttcggaggaccaaaaaaaaaaaaaaaaaaaaaaaaaaaaaaaaaaaaaaaaaaaaaaaaaaaaaaaaaaaaaaaaaaaaaaaaaaaaaaaaaaaaaa

SEQ ID NO: 137937 - DNA, 593 bp, Arabidopsis thaliana columbia
caatggctcattgtttctttgatatgactatcggcgggcaacctgcaggtcgaatcatcatggaactatttcccgatgtccccaaaacggccgagaacttccgagctttgtgcacgggcgaaaagggaatcgggccgtccgggaaaaagatgacttacgaggggagcgttttccaccgtgttatcccaaaattcatgctccagggtggcgatttcactctaggaaacggacgtggcggcgagtcgatctatggcgccaagtttgccgatgagaatttcattcacaagcatactacaccgggtctactctccatggccaacgcaggtccaggaaccaatggctcgcagttcttcatcaccactgtggctacgccccacttggatggcaagcacgtcgtatttgggaaggtcgtcgagggcatggacgttgtgaggaagattgaggccacacaaaccgatcggggcgataaaccactgtcagaagtaaagattgctaagtgtggccagctctaacttggcggggctctttgccttgatatgtaaatgagaatctgaaaattcatgggtgtgaatgctaaaaaaaaaaaaaaaaaa

SEQ ID NO: 137938 - DNA, 923 bp, Arabidopsis thaliana columbia
gcatcacttcccttaaagcttcaaccttctccgatatgccgacgtcgactccggtgaaccacggcgaatagctatgaaacctaacggcgtaacagttccgatttctgaccagcaagaacagcttccatgtcctcgttgtgactcatccaacactaagttctgttactacaacaactacaacttctctcagcctcgtcacttctgcaaagcttgtcgtcgttactggactcacggtggtactctccgtgacgttcctgtcggtggtggtactcgtaaaagcgcgaaacgttcccgcacttgctcgaactcttcttcctcctctgtttctggtgtcgtctctaactctaacggtgttccgttacaaacgacgcctgttctcttccctcagtcgtcaatctctaacggcgttactcacacagtaactgaaagcgacggaaagggaagtgctttatctctctgtggaagtttcacctccactctgttgaaccataacgctcgtgcgacggctacgcatggatccggttcggttattggtatcggaggttttggaatcggactcgggtcgggttttgatgacgtcagctttggactcggaagagcgatgtggccgttttcaactgttggtactgcgacaacgacgaatgttgggagtaacggtggtcatcacgctgttccaatgccagccacgtggcagttcgagggtttagagagcaacgctggtggtggatttgtctccggtgagtactttgcgtggccggatctttccatcacaactccgggaaactcactcaaatgagaaaagcttctgtcttcatcaaagggcttcaaagtctcttcctttttttagtctctattggtgatgttgatctcttagtttgtgtcttgtcaatttagaaacttgtcttcggaaactagaaaacaga

SEQ ID NO: 137939 - DNA, 1283 bp, Arabidopsis thaliana columbia
caaatacttacttttgaatccgtttttttcattgtttgatcgattatgggaaaggttcttcagaaagaggcgttcggattagccgcgaaagacaattccggagttctctcgcctttcagtttcactagaagggaaacaggagaaaaggatgtgaggttcaaagtgttattttgtggaatttgtcactctgatttgcatatggtcaagaacgagtggggaatgtctacttatcctcttgtcccagggcatgagatcgtgggcgtggtgactgaagtcggagccaaagtgactaaattcaaaaccggagaaaaagtcggagttgggtgtttggtcagctcgtgcgggtcatgtgacagctgcaccgaaggtatggaaaactattgtccaaaatcaatccaaacgtacggattcccgtactacgacaacaccataacatacggtggttactccgaccacatggtttgcgaggaaggtttcgtcatccgtattccagacaatctccccttggacgccgccgcaccgctcctctgtgccggtatcacggtctattcccctatgaagtatcacgggctcgacaaacccggtatgcacatcggtgtggtaggattaggcggtttaggtcatgtaggagtgaaatttgccaaggctatgggtactaaggttacggttattagtacttcggagaaaaagagagatgaggcgattaatcggcttggtgcggatgctttcttggtgagccgtgacccaaaacagattaaggatgcaatgggtactatggatggtataattgataccgtctctgcgactcattcacttcttccgttgctcggtttgctgaagcataagggaaaacttgttatggttggtgcacccgagaagccactcgagctacctgtcatgcctctcatctttgagaggaagatggtaatgggaagtatgataggagggataaaagagacccaggaaatgatagatatggccgggaaacacaacatcactgcggatattgagcttatctctgccgattatgtcaacaccgccatggaacggctagagaaagccgacgttaggtaccgctttgtgattgatgttgccaacacattgaagcctaatcctaatttataagttttaagcattaaacttcctcaaatgttattttcttgtttggtttgtcgtactaattaagttttgtgttgttgtataactatataatttggtatgcttaatccaataaatgaatagtatgatatatatgataagattttgggggtaaaaaaaaaaaa

SEQ ID NO: 137940 - DNA, 789 bp, Arabidopsis thaliana columbia
actagtctcttatctttcagcaactactctcatactttccgactaaaaaaatggttaccgtcaagctctacggcatggcctactcgacctgcactaagcgtgtatacaccaccgccaaggaaatcggtgtcgatgtcaagatcgttcctgttgatcttatgaaaggcgagcacaaggagcccgcgtaccttgacaactaccacccattcggtgttatccccgtccttgaggacgaagatggaacaaagatctatgaatctcgcgctatttcccgttacttggtcgccaagtatggaaaaggttcttccttgcttcccagcccgagcgaccccaaggcatatggactgtttgaacaagcagccagcgtcgagtactcgagctttgaccctccggcttcctcccttgcctacgagcgggtctttgcaggaatgaggggtttgaaaaccaacgaagaattggctaaaaaatacgtcgacacgttgaatgcgaagatggatggctacgagcgcattttgtccaagcaaaagtatctcgctggaaacgatttcaccctcgccgacttgttccatttgccctacggtgccatggtagctcagctcgagcctaccgtcctggattccaaaccccatgtcaaggcgtggtgggctgcatcccttcgcgtgattcctggaaggctgctcaggaactcaagtaaggagttcatgtgatgccaagtgtgtgtagtagctacgattgaaagtgaaatatacaagcaatacttacgaagcgagaaaaaaaaaaaaaaaaaaa

SEQ ID NO: 137941 - DNA, 1259 bp, Arabidopsis thaliana columbia
aatctctcaaaatggccgtaagtttcgtaacaacatctcctgaggaagaagacaaaccgaagctaggccttggaaatattcaaactccgttaatcttcaacccttcaatgcttaaccttcaagccaatatcccaaaccaattcatctggcctgacgacgaaaaaccttccatcaacgttctcgagcttgatgttcctctcatcgaccttcaaaaccttctctctgatccatcctccactttagatgcttcgagactgatctctgaggcctgtaagaagcacggtttcttcctcgtggtcaatcacggcatcagcgaggagcttatatcagacgctcatgaatacacgagccgcttctttgatatgcctctctccgaaaaacagagggttcttagaaaatccggtgagagtgttggctacgcaagcagtttcaccggacgcttctccaccaagcttccatggaaggagaccctttctttccggttttgcgacgacatgagccgctcaaaatccgttcaagattacttctgcgatgcgttgggacatgggtttcagccatttgggaaggtgtatcaagagtattgtgaagcaatgagttctctatcattgaagatcatggagcttctcgggctaagtttaggcgtaaaacgggactactttagagagtttttcgaagaaaacgattcaataatgagactgaattactaccctccatgtataaaaccagatctcacactaggaacaggacctcattgtgatccaacatctcttaccatccttcaccaagaccatgttaatggccttcaagtctttgtggaaaatcaatggcgctccattcgtcccaaccccaaggcctttgtggtcaatatcggcgatactttcatggctctatcgaacgatagatacaagagctgcttgcaccgggcggtggtgaacagcaagagcgagaggaagtcacttgcattcttcttgtgtccgaaaaaagacagagtagtgacgccaccgagagagcttttggacagcatcacatcaagaagataccctgacttcacatggtctatgttccttgagttcactcagaaacattatagagcagacatgaacactctccaagccttttcagattggctcaccaaacccatctaagaaataaaatattcatgtcttgtcttgttagttactagtatcttctttatatttcatgtatgtatatggtaataggcaataacaccttttagcatctcaaaaaaaaaaaaaaaa

SEQ ID NO: 137942 - DNA, 2189 bp, Arabidopsis thaliana columbia
ctcactatagggctcgagcggccgcccgggcaggtaagtctcacctttcaattcaaaaccccttccatttttgtgattaatatgcctacttggtggggaagaaagtcctgcaagaacaaggacgataatcacagaggaatcatctccacagatagagatatcaagagctctgctgttgttgatcctcctctcactcctactcgtggtggtacacctcgttgcagtcgtgaattcgctggagcttcttctgctttctctggttttgactctgattctaccgagaagaaaggtcaccctcttcctcgtcctttgctctctcctgtttcgatccatcatcaagatcatgtaagcggatccacttctggatctacatctgtttctagcgttagctcatctggatcagctgatgatcagagtcaacttgttgcttctaggggtcgtggtgatgtgaaattcaatgtagcagcagcaccacgtagtcctgagagagtttctccaaaggcagctactattactactaggcccacgtctccacggcatcagcgtttgtctggagttgtgagcttagagtcttctacagggaggaatgatgatggaaggtcctcctctgagtgtcatcctttgcctcgaccacctacttctcctacaagcccttctgctgtgcatggttccaggattggaggaggctacgagacctctccttcggggttttccacgtggaaaaaagggaaatttcttgggagtggcacctttggtcaagtctatcttggtttcaacagtgagaaagggaaaatgtgtgctattaaagaggtcaaggtaatttctgacgatcaaacatcaaaagaatgtctgaagcaactaaatcaggagataaatttgcttaaccagctttgtcatccgaatattgtccagtattacggaagtgaactgagtgaagaaaccttgtccgtctacttggagtacgtgtcaggtggttcaatccataaactacttaaggattatggttctttcactgaacccgttatccaaaactacacgcggcagattcttgctgggcttgcctatttacatggacgaaatacagtacatagggacatcaaaggagcaaatatattatttaaagggagtccttactggatggcacccgaggttgtgatgagccaaaatggctacactcatgcagtcgatatctggagtttgggttgtactattctggaaatggcaacatcaaagccaccttggagccagtttgaaggggttgctgcgattttcaaaatcggaaacagtaaagacaccccggaaatacctgatcacctttcaaatgatgcaaagaattttataaggctttgtctgcaacgaaatccgacagtacgtcctacagcttctcagcttctagaacacccttttctacgtaacacaacaagagtggctagtactagtttgcccaaagacttccccccacgttcctatgatggaaacttctcactgcagcctacaagggaaccctatccagggagactgagccatgataattatgcaaaacagccattgtctagaactataaagagcccgagcagagaaaacgtaagacctatcacatccttaccagtatctccatgttcaagccctttacgccaacttgggccagcatacaaaagttgtttcctgtcacctcctcacccgtcttacgcatttcctgggcaagacagtgggtacaacctagcagagtttgctgcaagccctttcaggatgaagaaagacgcaatgatggaaccatctagtttcaggactcaaacaccgaattcaccattgagatcaagactggtgtagaaatggagcaaagattgagagactgaaagccacatactataaacaaggcccaatgaccatgtataaaacagtgtctacccctagttttggccttctccttctcaacacccagggaaatatgaagttatgagaccttagttgtgtgtgtgtggagcatctcctagaagtggagatttttggaacaagaaggagaaatttggggggaaaacagaaagatgtaaagagaaacatgaaaatgaatacaaagttagtgtgagaagtatagatagtaagttgtgttgtcacacaaagataatattcaaccatttgttttcaacctacagtgtgaatatacttttcagaaagtaaattagttactc

SEQ ID NO: 137943 - DNA, 885 bp, Arabidopsis thaliana columbia
ccttgcgcttgtgatatgccctactagagaacttgccaatcaagctgctacagaagcaaacaccttgctaaagtatcatccatctattggtgttcaagttgtgattggaggtacgagacttggtttagagcaaaagcgtatgcaaacaaatccttgccagattttagtggctacacctggaaggctcaaagaccatatcgagaacacgccaggctttgcaacgaggttaaagggtgtgaaagtccttgtgcttgatgaagctgatcatcttttagatatgggctttcgcaaggacattgagaggataatttccgctgttcctaaggagagacaaacttttctattttccgccacagtacctgaagaggtacgccaaatatgccttgttgctctaaggcgggatcacgagtttgtcaattgtgttcatgaaggcactatagagacgcatcaacaggtcagacaaatgcacatgattgcatcactggacagacatttctctcttctgtacacacttcttcgcgaacacattatgggtaacgtagactataaggtcattgtcttctgtacaacggccatggttacaaaattagtggctgatctacttggtgagctaaacttaaacgtgagagagatccattctagaaaaccgcagagttacaggacaagggtttctaacgagttccgaaaatccaagggtttgattctcgtaacatctgatgtatctgctcgaggagttgattaccctgatgtgacccttgttttacaggttggattgccaaaagacagagaacaatatatacacagacttggtagaaccgggcgaaaaggaaaggaaggagaaggcatattgttgttggcaccatgggaggaatactttctatcatc

SEQ ID NO: 137944 - DNA, 259 bp, Arabidopsis thaliana columbia
gcccttaagcttcactagcaggacaagaagggatgttctagttctagaagactgtctagaactaacaaagtgggctctttttaaaattgagggcttaattagttatgagttataacaaataatatagagttataacctataatatgtatgcttattattgctttagggttttagagtctttagtagctagcttttagctctacaacactcttttccccttttggtgatataaatctctctttttctataaaaaaaaaaa

SEQ ID NO: 137945 - DNA, 2196 bp, Arabidopsis thaliana columbia
gtcaaacactaaacacaaagatctagcttttgctttaatcttcaagaaccaatgaagcagaggagtttgttttcagtcctctgttttttcttcataagttttggtgttgcttcagtttcagcacaaacatgcacgacggacaaggggactttcagacccaacggtacttacgacgtaaatcgccgtctcatcctctcttctcttccttcaaatgtcacggaccaagacggcttatactacaacggttccataggacaacaaccgaaccgtgtctacgcaatagggatgtgcatcccaggatcaacttcagaagactgttctgattgtatcaagaaagagtctgaattttttttaaagaattgtcctaaccaaacagaggcgtattcatggccaggtgagccaacgctttgctatgtgcgctactccaacacttctttctcaggatctgctgatctgaacccgcgaaattggctcaccaacactggagacctagactcaaatctaacagagtttacgaaaatatgggaaggattaatgggtcgtatgatttctgcagcttccacagcaaaaagcacaccttcttcaagtgataaccattactcagctgattcagcagtcttgacacctctcctgaatatatatgcattgatgcaatgcacgccggatctttcctccggtgattgtgaaaactgtctgcgacaaagcgcaattgactatcagtcgtgctgtagccagaagcgaggaggtgttgttatgcggccaagctgctttttgcggtgggatttgtatacatattctaacgcttttgataatcttacggtggcttctcctcctccagaatctcctgtgactgtgccacaacctgcaggtgatcaggacaacccgaccaacaatgatagcaaaggaatctcagctggagttgttgtggcgatcaccgttcccactgttattgccatcttgatactgctggttttaggatttgttcttttccggagaagaaaatccaaccaaagaactaagactgaatctgaaagtgatatttcaactacagattcattggtatacgattttaagacaattgaagccgcaactaacaagttttcaacaagtaataagctcggtgaaggtggattcggtgcggtttacaagggtaagctttctaacggaactgatgtagctgtgaagcgactgtcgaaaaagtcaggacaaggcacaagggagttcaggaacgattctgttcttgtgacaaaacttcaacataggaatctggttagacttcttggattctgtttggaaagagaggaacagattctgatctatgaatttgtccacaacaaaagccttgactactttcttttcgacccggaaaagcaaagtcagctagactggacccggcgatacaagatcattggaggaattgctcgagggattctatatcttcatcaagattcacggctcaaaatcatacatcgtgacctcaaagccagcaacattctcttagatgcagacatgaacccaaaaattgcagattttggattggcaactatttttggagtggagcaaactcaaggaaacacgaacagaattgctggaacctacgcttacatgtctcccgagtatgcgatgcatggtcaatactccatgaaatctgacatttatagctttggagtcttagttcttgagattataagcggcaagaaaaacagcggcgtctaccagatggatgaaactagtactgcaggaaacttggtcacttatgcttcgaggctttggagaaacaagtcaccattagagctggtggatccaacttttggaaggaattatcagagtaatgaagtcactaggtgcatccatatcgcgctgttatgtgttcaagaaaatccagaagaccgtccaatgttatcaacaatcatcttaatgctgactagtaacacaattactctaccagtgcctcgcctaccgggatttttcccacgaagcaggcaactgaaactggtatctgaaggatcagagtctgatcagtatacaagcaagtcttcctcatttagttcgtaaaaaatgatgtggttcctcatcatagcttaaaagttgtaacagaaaaatggtcagatgacatttatattatttgtccacggacataagaaacatagcaggtttatctgtaaaaaaaaaaaaaaaaaaaaaaaaaaaaaaaaa

SEQ ID NO: 137946 - DNA, 1227 bp, Arabidopsis thaliana columbia
atctctttactaccagcaagttgttttcttgctaacttcaaacttctctttctcttgttcctctctaagtcttgatcttatttaccgttaactttgtgaacaaaagtcgaatcaaacacacatggagccgccacagcatcagcatcatcatcatcaagccgaccaagaaagcggcaacaacaacaacaagtccggctctggtggttacacgtgtcgccagaccagcacgaggtggacaccgacgacggagcaaatcaaaatcctcaaagaactttactacaacaatgcaatccggtcaccaacagccgatcagatccagaagatcactgcaaggctgagacagttcggaaagattgagggcaagaacgtcttttactggttccagaaccataaggctcgtgagcgtcagaagaagagattcaacggaacaaacatgaccacaccatcttcatcacccaactcggttatgatggcggctaacgatcattatcatcctctacttcaccatcatcacggtgttcccatgcagagacctgctaattccgtcaacgttaaacttaaccaagaccatcatctctatcatcataacaagccatatcccagcttcaataacgggaatttaaatcatgcaagctcaggtactgaatgtggtgttgttaatgcttctaatggctacatgagtagccatgtctatggatctatggaacaagactgttctatgaattacaacaacgtaggtggaggatgggcaaacatggatcatcattactcatctgcaccttacaacttcttcgatagagcaaagcctctgtttggtctagaaggtcatcaagacgaagaagaatgtggtggcgatgcttatctggaacatcgacgtacgcttcctctcttccctatgcacggtgaagatcacatcaacggtggtagtggtgccatctggaagtatggccaatcggaagttcgcccttgcgcttctcttgagctacgtctgaactagctcttacgccggtgtcgctcgggattaaagctctttcctctctctctctctttcgtactcgtatgttcacaactatgcttcgctagtgattaatgatgcagttgttatattagtagttaactagttatctctcgttatgtgtaatttgtaattactagctaagtatcgtctaggtttaattgtaattgacaaccgtttatctctatgatgaataagttaaatttatatat

SEQ ID NO: 137947 - DNA, 3254 bp, Arabidopsis thaliana columbia
cggtttctcacatacacaagaagaaaataaccgttttgagttaaagtaaagcttttgaaccaatggaggaggagaagtcgttctcggcgtggtcttggtctgttgagcaatgtttgaaagagtacaagacaagattagacaagggtttaactagcgaagatgtccaaatccgccgtcaaaagtacggttttaacgagcttgctaaggagaaaggcaagcctttatggcatcttgtattggaacaattcgacgatacgcttgtgaagattcttctcggtgctgcgtttatctctttcgttttagcctttttaggtgaggaacacggctcaggttcagggttcgaggcctttgttgagccttttgtgattgttttgattctgattttaaacgctgtggttggtgtgtggcaagagagtaatgctgagaaagcacttgaggctcttaaagagatgcaatgtgaatctgcaaaggttttgagagatgggaatgtgttgcctaatttgcctgctagagagcttgttccaggggatattgtggagttaaatgtaggagataaagtccctgctgatatgagagtttccggtttgaaaacatccactttaagagtcgagcaaagctcgttaaccggtgaagcaatgccggttttgaaaggagcgaatcttgtagtcatggatgattgtgaactgcaagggaaagaaaatatggttttcgctggaacaacggttgttaacggaagctgcgtttgcattgtgacaagtataggtatggatacggagatcgggaaaatccagagacagattcacgaggcgtcgcttgaagagagcgagactccgttaaagaagaagctagacgagtttgggagtagattgactacagctatttgcattgtctgtgttcttgtgtggatgataaactacaagaactttgtttcttgggatgttgtggatggctataaacctgtgaatatcaagttttcattcgagaaatgtacttactacttcaaaatcgctgttgctctcgcagtggcagcgatacccgagggtttacccgctgtgatcacgacatgtttagctttagggacgaggaaaatggcgcagaagaacgcgatagtgaggaagctcccgagtgtagagacactcggttgcacaactgtgatctgttcagataaaaccgggactttaacaacaaaccagatgtctgcaaccgaattcttcacattaggcggtaaaacaacgactactcgagtgttttcagtcagtggtacgacttatgatcctaaagatggtggaattgtggattggggctgcaacaatatggatgctaacttgcaagctgttgctgagatatgttcaatttgtaatgatgctggagtgttctatgaagggaagttgtttagagcaacaggtttgcctacagaagcagcattgaaagttcttgttgagaagatgggtatcccggagaagaagaacagtgagaacatcgaggaagttacaaacttttcagacaatggtagctcagtgaagctagcttgttgcgattggtggaacaaaagatcgaaaaaggtagcgacattagagtttgatcgcgttcgtaagtccatgagtgttattgtgagcgaaccaaatggacaaaaccggcttctcgttaagggtgctgctgagagtatacttgagagaagttcttttgcacagcttgctgatggatctcttgtagctttagatgaatctagcagagaagtaatccttaagaaacattctgaaatgacttcaaaaggattaagatgtttaggattagcttacaaagacgaattaggagagttttcggattactcttccgaagaacatccttcacacaagaagcttttggacccttctagctattcgaacatcgaaacaaatctaatctttgttggagttgttggtctaagagatcctccgcgtgaagaagttggaagagcaattgaagattgcagagacgcagggataagagtaatggttataactggagataacaaatcaacagctgaagctatttgttgtgaaattagattgttttcggagaatgaagatctttcgcagagtagcttcactggtaaagagtttatgtctcttccggcttcacggagatccgagattctgtcaaaatctggagggaaagtgttctctcgagctgagccaaggcataagcaagaaatcgttaggatgcttaaggaaatgggagaaatagttgccatgacaggtgatggtgtgaatgatgctcctgctttgaaacttgctgacattggtatcgccatgggaatcactggaactgaggttgccaaagaagcttcggatatggttcttgcagatgataatttcagtactatagtatcagctgtagcagaaggtcggtccatttacaacaatatgaaagcttttatcaggtatatgatatcatcaaacgttggagaagtaatctccatcttcttaaccgcggcattggggataccggaatgtatgataccggttcagcttctttgggttaatcttgtaactgatggtcctcctgctactgcgttaggcttcaatccagctgatattgatatcatgaagaagccaccccgcaaaagcgatgattgtctcattgattcatgggttcttattcgatatctagtgattggttcttatgttggagttgcaactgttggaatctttgtcttgtggtacacacaagcttcattccttgggattagcctaatctcagatggacacacattggttagcttcactcagcttcagaactggtcagagtgttcttcgtggggaacgaacttcacggcgactccttacacagtcgcaggtggtcttaggaccatcgcgtttgagaacaatccttgcgattacttcactctcgggaaagtcaagccaatgacattatcactcaccgttcttgtggctatcgaaatgtttaactcgctgaacgcgttgtctgaagacaacagtctcttaacgatgccaccatggagaaacccttggctactagtggccatgactgtctcctttgcgctacactgtgtcatcctctatgttcctttcttagctaatgtgtttgggattgtgcctttgagtttcagggaatggtttgtggttattcttgtttccttccctgtgattctgatcgatgaagctctcaagttcattgggagatgcagaaggacaagaatcaagaagaagatcaagacaatgtaaaagtctgatcaacacaaaagacaaaag

SEQ ID NO: 137948 - DNA, 1234 bp, Arabidopsis thaliana columbia
acataaaatcacaaaacacgacaatggcacaacgtcctaacttgttatctcatttgcaagatctggtcaccaaatttaaaaacatgacaatggcacaagatcggttcaagttcgttttcactgccaacgaagcagcgttggaaggtgtcaccgaccccatcagacttccaaatctgatcagaaaggcgatgtgtctcgctcgggctccaatctccaaatacaaagtcggagccgttggacgcgcatcatcaggtcgggtctacttaggcgtcaatgtcgacttcccaggtcttcctcttcaccactccatccacgccgagcaattcctcgttaccaacctcgcactcaactacgagaaagacctctgtaagttagccgtcgccatctctactgacggcctcgaattcggcacaccgtgcggaaactgcctccaatttcttatggagatgagcaacgcgcttgatatgaaaatcctgtccaaaccaaagcatgaagcaggatcattctcgagccttagactcctccttccgaacgtcctcccgaaaggttcccctttccttctcgagaagcgctataactgcctcaccctctcgggttctgccggagagatatgctcattagattgttcccatttgaagcgcagggctctggccgcggcaaacaattcgttctcgccgtacaccgagtctccgtcgggagtagcgctgctggataacgacgggaactggtaccgtggatggtatattgaatcagtggcgtcgaaccctagtttgggtccggtacaagctgcgctggttgatttcgtggctcgtagccgaggcaaaatgttcaataagatcgtccaagcggtgctggtggaaaagaataacgcgagcgtgagtcaagagcgcacagcgaagataattttagacactatagctccgaactgcgatttcaaggtctttcattgctccgtggattgcgcaaaaagactgaagtatcttcgtgaaaccctggtgatagatacgttaggggattacactggtcttcattattaaactaatttattattctatcataattatgctttttgtttacttcttggtttggtttggttcgttaaaaccttttagatttttaataatgtcatagaatcataattacgttatgttttcttctccggttcatgttacttttaatttcagtggtgtcaatatataatatattctaattatgttttaaaaaaaaaaaaaaa

SEQ ID NO: 137949 - DNA, 468 bp, Arabidopsis thaliana columbia
gacaaacacttgaccgatgaacaggtctccgctctcgaagatcatttgagcttcaacagcatgaagaagaacccggctttgaatttagaaccaatccttgctatgatggaaaaagaaccatcgaaagagacgaatcccgacgaaacatttataaggaagggaaaagttggtgactggaaaaactacatgtcggaagagctatcggctaaatttgacaaattcacagaggaaaatttgaaagggactgacctcgcttttgaaacatattgatatcattgaaactatttatattttaaatttgtataaaaatatcaaccttagtattatttttatcactcttagtttataagtatccagataataagaactacgtattaacatctaaaaaacgttgtatgtacaaattatattattaaataacatttctttcatgctatttttaaaaaattgtatttccaaaaaaaaaaa

SEQ ID NO: 137950 - DNA, 3521 bp, Arabidopsis thaliana columbia
ctaagaaagcgcgcgaaaattggcaacccaagttcgccatagccacgaccacgaccttccatttctcttaaacggaggagattacgaataaagcaattatgggcaagcaaaagcagcagacgatttctcgtttcttcgctcccaaacccaaatccccgactcacgaaccgaatccggtagccgaatcatcaacaccgccaccgaagatatccgccactgtatccttctctccttccaagcgtaagcttctctccgaccacctcgccgccgcgtcacccaaaaagcctaaactttctcctcacactcaaaacccagtacccgatcccaatttacaccaaagatttctccagagatttctggaaccctcgccggaggaatatgttcccgaaacgtcatcatcgaggaaatacacaccattggaacagcaagtggtggagctaaagagcaagtacccagatgtggttttgatggtggaagttggttacaggtacagattcttcggagaagacgcggagatcgcagcacgcgtgttgggtatttacgctcatatggatcacaatttcatgacggcgagtgtgccaacatttcgattgaatttccatgtgagaagactggtgaatgcaggatacaagattggtgtagtgaagcagactgaaactgcagccattaagtcccatggtgcaaaccggaccggcccttttttccggggactgtcggcgttgtataccaaagccacgcttgaagcggctgaggatataagtggtggttgtggtggtgaagaaggttttggttcacagagtaatttcttggtttgtgttgtggatgagagagttaagtcggagacattaggctgtggtattgaaatgagttttgatgttagagtcggtgttgttggcgttgaaatttcgacaggtgaagttgtttatgaagagttcaatgataatttcatgagaagtggattagaggctgtgattttgagcttgtcaccagctgagctgttgcttggccagcctctttcacaacaaactgagaagtttttggtggcacatgctggacctacctcaaacgttcgagtggaacgtgcctcactggattgtttcagcaatggtaatgcagtagatgaggttatttcattatgtgaaaaaatcagcgcaggtaacttagaagatgataaagaaatgaagctggaggctgctgaaaaaggaatgtcttgcttgacagttcatacaattatgaacatgccacatctgactgttcaagccctcgccctaacgttttgccatctcaaacagtttggatttgaaaggatcctttaccaaggggcctcatttcgctctttgtcaagtaacacagagatgactctctcagccaatactctgcaacagttggaggttgtgaaaaataattcagatggatcggaatctggctccttattccataatatgaatcacacacttacagtatatggttccaggcttcttagacactgggtgactcatcctctatgcgatagaaatttgatatctgctcggcttgatgctgtttctgagatttctgcttgcatgggatctcatagttcttcccagctcagcagtgagttggttgaagaaggttctgagagagcaattgtatcacctgagttttatctcgtgctctcctcagtcttgacagctatgtctagatcatctgatattcaacgtggaataacaagaatctttcatcggactgctaaagccacagagttcattgcagttatggaagctattttacttgcggggaagcaaattcagcggcttggcataaagcaagactctgaaatgaggagtatgcaatctgcaactgtgcgatctactcttttgagaaaattgatttctgttatttcatcccctgttgtggttgacaatgccggaaaacttctctctgccctaaataaggaagcggctgttcgaggtgacttgctcgacatactaatcacttccagcgaccaatttcctgagcttgctgaagctcgccaagcagttttagtcatcagggaaaagctggattcctcgatagcttcatttcgcaagaagctcgctattcgaaatttggaatttcttcaagtgtcggggatcacacatttgatagagctgcccgttgattccaaggtccctatgaattgggtgaaagtaaatagcaccaagaagactattcgatatcatcccccagaaatagtagctggcttggatgagctagctctagcaactgaacatcttgccattgtgaaccgagcttcgtgggatagtttcctcaagagtttcagtagatactacacagattttaaggctgccgttcaagctcttgctgcactggactgtttgcactccctttcaactctatctagaaacaagaactatgtccgtcccgagtttgtggatgactgtgaaccagttgagataaacatacagtctggtcgtcatcctgtactggagactatattacaagataacttcgtcccaaatgacacaattttgcatgcagaaggggaatattgccaaattatcaccggacctaacatgggaggaaagagctgctatatccgtcaagttgctttaatttccataatggctcaggttggttcctttgtaccagcgtcattcgccaagctgcacgtgcttgatggtgttttcactcggatgggtgcttcagacagtatccagcatggcagaagtacctttctagaagaattaagtgaagcgtcacacataatcagaacctgttcttctcgttcgcttgttatattagatgagcttggaagaggcactagcacacacgacggtgtagccattgcctatgcaacattacagcatctcctagcagaaaagagatgtttggttctttttgtcacgcattaccctgaaatagctgagatcagtaacggattcccaggttctgttgggacataccatgtctcgtatctgacattgcagaaggataaaggcagttatgatcatgatgatgtgacctacctatataagcttgtgcgtggtctttgcagcaggagctttggttttaaggttgctcagcttgcccagatacctccatcatgtatacgtcgagccatttcaatggctgcaaaattggaagctgaggtacgtgcaagagagagaaatacacgcatgggagaaccagaaggacatgaagaaccgagaggcgcagaagaatctatttcggctctaggtgacttgtttgcagacctgaaatttgctctctctgaagaggacccttggaaagcattcgagtttttaaagcatgcttggaagattgctggcaaaatcagactaaaaccaacttgttcattttgatttaatcttaacattatagcaactgcaaggtcttgatcatctgttagttgcgtactaacttatgtgtattagtataacaagaaaagagaattagagagatggattctaatccggtgttgcagtacatcttttctccacccgcataaaaaaaaaaaaaaaaaaaaaaaaaaaaaaaaa

SEQ ID NO: 137951 - DNA, 1093 bp, Arabidopsis thaliana columbia
atttatcgtgtacgatactttattccttttatctattcttgaaaaaaagttaccaattcttgagaagaagaagaaatcagaatcaagagaaggagagagaaagatgggaagagggagagtggagatgaagaggatagagaacaagattaatagacaagtgaccttctcaaaaagaagaaacggtttgctgaagaaagcttatgagctttctgttctttgcgatgccgaagttgctctcatcatcttctcaagccgtggcaagctctacgagtttggtagtgttggaattgaaagcacaatcgaacggtataatcgttgttacaactgctctctaagcaataataagcctgaagagactacacagagttggtgtcaggaggtgacaaagcttaaatccaaatacgaatctcttgttcgtactaacaggaatttgcttggagaagatcttggagaaatgggtgtgaaggaactgcaagcgctcgagaggcagctcgaagccgctcttaccgcgactcgacagcgcaagacacaagttatgatggaagaaatggaagaccttaggaaaaaggagaggcaactaggagacataaacaaacaactcaagattaagtttgaaacggaaggccatgctttcaaaacctttcaagacttatgggcaaactcggcggcatcggtggccggggatccaaacaattctgaatttccggtagagccttctcatcctaatgtattggattgcaacaccgaaccctttttacaaatagggtttcaacaacattactacgtgcaaggtgaagggtcttcggtatcaaagagtaacgtggcaggtgagactaatttcgtccaaggttgggttctttgactctctgttgattagcccacgatgccacggtcaggccaatttcagctctctacagttgttcttttttcaaattagatttctggttttttttttcctataagaaaaacttttgcactagatgtttgtcatttaatttccagctcgtgtgaatctatattcgcatgtatgtgctttgaagaatttctcctcttactcctacttgatctaaaacattatttttcttttgggttt

SEQ ID NO: 137952 - DNA, 2745 bp, Arabidopsis thaliana columbia
cctcaaactcaccccacccgagttttctttctcaatctcgcgggcgagggaaaaggaatctacaagtatttaaacctttgctgatttagaaacgcctgagtgcatcatcttcgaggatagcagtataaacatagctagttgattgtagagaatgtataaagcagtaagtaagcgggtaactagaagtagtggatctggtttgaagcagacaaatgtagataatggaggagagattagtccaactgttgacagagtatctgaacaaggcaaatcatcagaggcagggagtcacatgccaactgatgcaaacggaaatggacatttgcatcatgagttatggatcatggaaaggggaatgaagaacagaaaccaacccctcaaaccgtgaagaaggattctaataccaataccaaattttcagggtctcatcgtgagcttgtcatcggtcttccttgccgtggacaatttgaaatccacaaccggtccagggcatctacgagttcgaagaggttaggaggaggtggagaaaggaatgtgttgtttgcaagtcacaagagagctcagagatctaaggaagatgctggaccatcttcggttgttgctaattccacacctgtaggtcgaccaaagaaaaagaacaagactatgaacaaaggacaagttagagaagatgatgagtacacaagaatcaaaaagaaacttcgatactttctaaaccggattaactatgagcaaagcctaattgacgcctattcgttagaaggctggaaaggttcaagcctggaaaagataaggccagagaaagagcttgaacgagccacaaaggaaattttgcgggcaagcttaaaattagatctttttcagcaccttgacacactctgtgctgaaggaagccttccagagtctttatttgatactgatggagagatttctagcgaggatatcttctgtgcaaaatgtggttcaaaggacttgtctgttgataatgatatcatactatgcgatgggttttgcgatcgaggctttcaccaatactgtcttgaaccacctctgcggaaagaagatattcctccggatgatgagggttggctatgccccggatgtgattgcaaagatgacagcttggacttgcttaatgattctttagggacaaaattttcggtcagcgacagttgggagaaaatatttcctgaggcagcagcagcgctggttggtggaggtcaaaatcttgactgtgatcttccttcagctgattctgatgatgaagagtatgatccagattgtttgaatgataatgaaaatgatgaagatggcagtgatgacaatgaagaatctgagaacgaagatggtagttctgatgaaactgaattcacatctgcatctgacgaaatgattgagtcatttaaagaagggaaagatataatgaaagatgtaatggcccttccatctgatgattctgaggatgatgactatgatcctgatgccccgacttgtgatgatgataaagaaagttcaaattctgattgtacatcagacactgaagatcttgaaacttccttcaaaggagatgagactaatcagcaagctgaagatacaccacttgaggatcctggcagacagacgtctcagctccaaggtgatgcaattttagagtcagatgttgggcttgatgatggtcctgccggtgtatccagaaggaggaatgttgaaaggctggattacaaaaagttgtatgatgaggaatatgacaatgttccgacttcgtcaagtgatgatgacgattgggataaaactgcaagaatgggaaaagaagattccgagtcggaagatgaaggggacactgtacctctgaaacagtcttcaaatgcagaagatcatacttctaagaaacttatacggaagtcgaaaagggcagataaaaaggataccttagaaatgccacaagaaggtcctggagaaaatggtggttctggtgaaattgaaaaaagcagctcttcagcatgtaaacagacagatcccaaaactcagagactgtacatatcttttcaagagaatcaatatccagacaaagccacgaaggagagcttagccaaagagctacaaatgacagttaagcaagttaataactggtttaagcataggcgttggtcgataaacagcaaacctttagtttcagaggaaaatgtcgagaagttaaaaacaggcaaggaaggtgaatgtgagacatctgttgctggaagtagcaaacaaactatggaaaccgagtcagttgcagagaaaccaaccaatactggatcacggaaaagaagaagaaagtagactttagattcaatcatgaaggttttagatctaatgcaaggacaatactggaacacatacttacccaaaccccgagatatgaagacaccaaaccctgcaaagcatcgggtttgttcagttctttgtttcacatttttggggtactttgaagaccttgaaatttgaggcaaaagaaagaaagaaagattttcttcgaaattggatgataggttcatttttaacagttaaagaagttaaggctttgtgttatgattatgaaagtttttgtttatttccatctggagagatgttttgagttatggtttctgtaatcgatagagaccggtttaagagatcaagagatttaaactttaaaagtcttgtttgaaccggttttaaaccctcaaatgtgaacgtttaaccggtctgtaattgcttattattaaa

SEQ ID NO: 137953 - DNA, 656 bp, Arabidopsis thaliana columbia
actgcgttattaccttgaaatcccaagttaccaaaagaagcaataattggtaatttttgttgtctttgttttggtgtaggaggaggaggaaactacatgatgaacagatcaatgtcgttcacgggagtatcagatcatcttcatctaactcaaaaaagcccgacaacaacgaacaacatgaatgatcaagaccaggtaggcgaggaagacaacctatcagacgatgggtcacatatgatgttaggagagaagaagaagaggctgaatttagagcaagttagggcattagagaagagcttcgagctagggaacaagctggagccagagaggaagatgcagcttgctaaggctttaggattgcagcctaggcagattgcaatatggtttcagaacaggagagctaggtggaagacaaagcagctcgagagagactatgattctctcaaaaaacagttcgatgttttgaaatcggacaatgattctcttcttgcccacaacaagaaactacatgctgaggtatataatatacacacaaattctactaatcgttgaacatcgcgttagtttttaagcgctaatcttatcgaaacgattttcgattagattgataagaaatgtttttacaaatcactaattaatatgaatattatatgtac

SEQ ID NO: 137954 - DNA, 771 bp, Arabidopsis thaliana columbia
atttcaacatcttcttaaagccctataattgcgataatggcggaagccggtgtgggcgtaatagaaccaagattccgattacgtcttaatcgcctctacccctcgagcacttccagttcaacgttggggcccgaattgggaaggactatatcgagtcatcggaatctcaatcaattcttactctcgacagttccagttcaacgtagatctacgttgaactggaagtgccttacttcgcaacaacaacaacagcagctacaacaactagtggaagccgggagcctcgtacaaactcgaagcaggaaacggtgcagaactaccaaaaaggtgttacgtgatgcatttaaagtgatactactgcaaaggatcgatctcatttacttttttataatattacgaatggtactagcacctccagttccacgtagacaaccaaatacgactacactgaacccccgaatatgtttatccagttataaaataaaatctagttctgtttcattgtatactatttatacttgaagtatactttttatccttgttaatctttcattaagaaaggaaaatgaatttcaaaaatttgatcttataaaatgtcagcttttaaaatcgttaaatcatttttcattttctaaaactaaaaatataatacaattcttctagaatcttttaggattttaaattaaatcgtcaaattcttgtccatacatttttattagtaaaacttatcttttactaattaatttctattttcatattcttaaataattc

SEQ ID NO: 137955 - DNA, 2418 bp, Arabidopsis thaliana columbia
ttaattcatatgaatctgactcgtgtgtttgattgtcacagtctctgctttggctttgtagtagccatcgcaattcatcatcatctattgcaactatctccaaggttttgatttccacaatggcaacaacaactctcaatgacagtgtcaccactacacttgcttcagagcctcaaaggacttaccaagttgttgttgctgcaactaaagaaatgggtattggtaaagatgggaaattgccatggaatttgccaacagatctcaagttctttaaagacattactttgaccacttcagattcctctaagaaaaatgctgttgtgatgggtagaaagacttgggagtctattcccattaagtataggccgctttcgggtcggcttaacgttgttctaactcgttctggtgggtttgatatagccaacactgagaatgttgtcacttgtagtagtgtagattctgctcttgatttgttacgtgcgccgccgtattgtttatctattgagagggtttttgttataggaggtggtgacatattgaggtaatggttgttgattttcatttattatcccttttggtgattcggaatcttgttgttggttggaactaagtgttggttggttgtatttgtgtagggaagcattgaataggcctagttgtgatgctatccatttaactgagattgatacaagtgttgactgtgatacgtttatacctgcgattgatacttctgtttatcagccttggtcttcatcgtttccagtaactgaaaatggacttcggttttgcttcacgacttttgtccgtgtaaagagttctgctgatgaatcttctgatgaaagcaatgggtcacagtctcttcaatttgatgggaagaagtttttgtttcttcctaagatggtttttgatcagcatgaggagtttctgtatttgaatatggttgaagatattatctctaatggcaatgtgaagaatgataggaccgggactggtacattatcaaaatttggttgccaggtgatataaatccgtttctttatgtattctgtttatctctagttggttaaatgatctctcatttccttggaacacagatgaaattcaatttacgcagaagttttccacttctgacaacaaaggtatgctcactttttccttaactttccacgtttactcgcaaaaggagaatgctttgtcttctgttgtatttagtggcagttgcatatctacactagctcataatcaaactcacgcaatctgtttgcttttttttttgtagagagttttctggagaggtgttgttgaggaacttctatggttcataagcggttcaaccaatgcaaaagtaaattaagccagagtgtctctgctatgctctaaaactatgcaaatgaattggttatatctatgatagactttatacatgggcaggtccttcaggaaaaaggtatccatatatgggatgggaatgcgtcaagagagtatctcgatgggtaatatttgtaacctgcattatctttttggttaaagaaatattgatcttgacgacctatttgctgatttatccaccgtattttcagtatcggcctgacagagagagaggaaggcgaccttggacctgtatacggatttcaatggcgacactttggtgctaagtcagtaacttttcaatgcatatgttggttttttcttctctgttccgatggatttgttttggtgaaacatctttctcttgttttacaggtacacagatatgcatgctgattatactggtcaaggatttgatcaacttgtagatgtaattgacaaaatcaagaacaatcctgatgatcggcgtattataatgtcagcttggaatccttctgatcttaagctgatggcacttcctccatgccatatgtttgcacaggtaatgccactttatcttctaattctgttgtttctcctacaatgagtttgattacttattctttttttttttgcagttttatgtggcagaaggggaactctcatgtcaaatgtatcagcgttcagcagatatgggccttggtgtgccgtttaacattgcttcttactctcttcttacttgcatgctggctcatgtgtgtgatcttgttcctggtgattttatccatgttcttggggatgctcatgtgtacaaaactcacgtgaggcctcttcaagagcaacttctgaatcctccaaaaccctttcctgtaagtatatcgccgacaatgatcatcgaggaatgcatattcacctatccttaccgtgtttttgtttgtcgtcatgggctcactactgcaggtattgaagataaacccggagaagaaacaaatcgattcttttgtggcttctgactttgacctcacaggctatgatcctcacaagaagatagaaatgaaaatggcggtttag

SEQ ID NO: 137956 - DNA, 2849 bp, Arabidopsis thaliana columbia
gaaactacaggctcctgcttcagtcacacacttacacacacacaaaaatccccaaattaggaaaaagtaagaatcctagtttctcgacttcgattgagaaggttttcgatttgattctctaagatcttgagaatcaatcggagattttattgtcggtaacccgaatttagggagaagactaccattttgggatttttatgcacttgacgagcgaaaggagaagaaatttgtagcaattttgagtctcggagatggcttctcgcaaccagaatcgtcctcctcgcagtccaaacgccaaaaaggagggtctcggtggcatttcatttgacaagcgaaggaaagtggaaacgcaaggaggtactgggagaagacaagctttttcggctgtgaataaacaagatgtcacgatgaacagcgatgtagggagcattgaagaatgtggtaaagttgactttacaaaagatgaaatattggcgttgctcagtgagagagcaaaagctggaaagtttgatactaaggctaagattgagcaaatgacggatattatcaagaggctgaaggtttgtgtaaaatggttccaacaagctgatgaaacccatgtccaagagaaggaaaatttgaaggtttctttggaatcttcagaacaaaaatacaaccacaaagagttggaggctaggacaaaagaggaagagctacaggccactatctcaaagttggaagagaatgtagtgtcactacatgaaaagcttgcaaaggaggagtctagtacacaggacgccattgaatgtcatagaagagaaaaagaagctagagttgcagctgaaaaagtgcaggcttctctcggagaagaacttgataaagttaaggaagagaaaatggctgccaagcagaaggtgacgtcacttgaggatatgtacaaaaggctgcaagagtacaacacaagtttgcaacaatataacagcaaacttcagactgatcttgaaacagttcgagctgcactcacacgtgctgaaaaagagaagtcaagcatcctggagaatcttagtacacttaggggacacagcaagtcgctgcaggatcaactatcttcaagcagagtgttgcaagatgacgctataaaacagaaggattcattgctttcggaagttactaatcttcggaatgagctccaacaagtccgggatgaccgtgatcgccaagttgtacagtcacagaagctgtctgaggagatcaggaagtaccaggagaatgtcggaaagtcatcgcaagagctagacatcttgacagcaaaatcaggatcgttggaggagacatgttcgttgcagaaggagcgtttaaatatgttagagcagcaattagcaatcgccaatgaaaggcaaaagatggcagatgcatcagtatctcttactaggacagagtttgaggagcagaagcatctactgtgcgaactacaagaccggcttgcagacatggagcatcaactgtgtgagggagagttattgcggaagaagcttcataacactattcttgaattaaaaggaaatatacgtgtcttctgccgagtgcgtcccttgttaccagacgatggaggacgacatgaagcaactgtaatagcctatcctacttcaacagaagcccaaggaagaggtgttgatttggttcagagtgggaacaaacatcctttcacctttgacaaagttttcaaccacgaagcttcccaggaggaagtattctttgaaatatctcaacttgtacagagtgcattggatggctataaggtttgtatctttgcctacggtcagaccggttctggaaagacctacaccatgatgggccggcctgaggcgccagatcagaaaggactgatccctcgatcacttgaacagatattccaagccagtcaatcactcggtgcacaaggctggaagtacaagatgcaggtatcgatgttggagatatataatgagaccatcagagatttgctctctacaaatcgaacaacttctatggacttggtgcgagcagacagtggcacctcaggaaagcaatatacaatcactcatgacgtaaatggacacacccatgtcagcgacttgaccatatttgatgtgtgcagcgttggaaagatatcctcactcttgcagcaggctgctcagagcaggtcagtagggaagactcaaatgaatgagcaatcatctagaagtcatttcgtgtttactatgaggatttcaggtgttaatgagagcaccgaacagcaggtacaaggtgttctcaacctaatagatcttgctggaagcgagaggctatcgaagagtggggcaactggagatcgattaaaagagacacaggctataaacaaaagtttatcagctttgagtgatgtaatatttgcattggctaagaaagaagatcatgttcctttcagaaactcaaagctaacatatctgctccagccttgcctaggaggagattcaaagaccttgatgttcgtaaacatttcgcctgacccaacttctgctggagagtctctttgctcactccggtttgctgctagagtaaatgcgtgtgaaattggtatacctaggcgacaaacttcaacgaagctccttgactctcgcttaagctatggctaaaaatgttcagaagatctgccaattattgattcacaactcttctcttgtgggttttgacacatcaatctcttatcttgtaacctcttaaactcattactaacattttttccggatctttatgatagtagagcagcttgctgtcttagcaatgtggctttctctatgttgtatgagaaacataatcctctgctattcaatgtttaaatgtattttttc

SEQ ID NO: 137957 - DNA, 1666 bp, Arabidopsis thaliana columbia
ataaactcagccatcacagaaattcgttggaaaaaaataaatttttagggaaaaactttttagggaaaaactttttaggtccaaagatcgagagagaagagaagattttgaattttttttgttttataaagtttcgtcttaagcgatcgattttttgtgcgaaagattgaaactttttggtaagataattgtgttgtgtggttggatcgtggaggtgggtcttctttccgaatggcgcaacaagggcagggaagcatggaccctgccgctctcgatgatatcattcgtcgtttgttggattacagaaaccctaagcctggtaccaaacaggctatgctcaacgagtctgagatccgtcagctttgcatcgtctctagagagatttttcttcaacagcctaaccttcttgagctcgaagctcctatcaagatctgcggtgatattcatggacaatactcagatctattgaggctgtttgagtatggaggcttcccacctacagctaactatttattcttaggagattacgtagacaggggcaagcagagtttggagactatttgtcttctgcttgcttacaaaatcaaataccctgagaacttttttcttctaagaggaaaccacgaatgtgcttctattaacagaatctatggattctatgatgaatgtaaacgtcgattcagtgtgagactctggaaagtgtttacagattcttttaactgtctccctgttgctgctgttatagacgataagatattatgtatgcacggtggcctttctcccgatttgaccaacgtggaacagattaagaacattaagcgacctactgatgttcctgactctggtttgctctgtgatctgctttggtctgatccaagcaaagatgtcaaaggttgggggatgaatgaccgtggagtctcttacacgtttggccctgacaaagtcgcggagtttctaataaagaatgatatggatctcatctgccgtgcccaccaggttgtagaggatggatatgagtttttcgccgatagacagcttgttacgatattttctgctcccaactactgtggtgaatttgacaatgctggtgctatgatgagtgttgatgaaagtttaatgtgctctttccaaattcttaagcctgctgatcgaaagccccggttcttatgaagtaaagaggtagttcaagtcttttatactaacttgtgatgagtgtttcaattcctgtttcagtctttcagatttccagattgctataaaaagttcatcatgcatttcttctcaaattacttagattatgacatttgttcatcttttgcttacacaacttgtttaagatttgattgagtaaaacagaaggggtttcgttttgaactttgtgaatatgagctcagagcttggatctcagattcaatcacttacaggaaaacttgtttcatttttgcatgttgcagttgaaacctcgcgggaaagaagaggaaaaaggcgatacgaaagcgggagagacatttgaagctccctgagactttgtccggagccttcaaaggcaaaaaacataatttacatgttatatatcttatttgaactcttgcccatttcttttctcaaaacacttatctctatgatctctctcgtatcctctatatagacagtaaaaaaagtctgc

SEQ ID NO: 137958 - DNA, 1256 bp, Arabidopsis thaliana columbia
cgggcaggtcgacgtgttcgatttacaacgattcggtggctattggttgtaagatttagaattaaaggttaaaggagacgacgacgagagatgccgttaaacggagatctcgaccgtcagatcgaacagctaatggagtgtaagccgttaggtgaagcagacgtgaagatcctttgcgatcaagctaaagcgattcttgttgaggaatataatgttcaaccggttaagtgtccggttacggtatgcggcgatatccatggccagttttatgacctaattgagctatttcgtattggtggtaatgctcctgatactaattacctcttcatgggagattatgtagatcgtggctactattctgtagaaacagtctctctattggtggcattaaaggtgcgttacagggacagacttacgatcctgcgagggaatcatgagagccgtcagattacacaagtctatggtttttatgacgaatgcttgaggaaatacggaaatgcaaatgtgtggaagtattttacggaccttttcgattatctccctcttacagcactcatagagagtcaggttttctgtttgcatggaggcctttcaccttctctggatactcttgacaatatccgaagcttggatcgaatacaagaggttccacacgaaggaccaatgtgcgatctactctggtctgatcccgacgatcgttgtggatggggaatatctcctcgtggtgctggttacacgtttggacaggacattgctactcagtttaatcataacaatggactgagtctgatctcaagagcgcatcaacttgtaatggaaggctataattggtgtcaggaaaagaacgtagtgacagtgtttagtgcaccgaactactgttacagatgtggaaacatggccgcaattcttgagattggagaaaagatggaacagaacttccttcaattcgatccagcacctagacaagtcgaacccgataccacgcgcaagacccctgattattttttgtgatttcattttttttcttccaaagtttgtttgttgctgtatcattgtagatgtgtctgttttattttgttttttcgagtctctagatggaatgtgataccaaagacgaaaaacccatcatttttttgttgatgttgatactgaaacaggtttgtagaagcctcttcttattatagaaaatgtcttttgataaaaaaaaaaaaaaaaaaaaaaaaaaaaaaaaaaaaaaaaaaaccccccccgggttt

SEQ ID NO: 137959 - DNA, 2799 bp, Arabidopsis thaliana columbia
gcggccgccagtgtgagtaatttaggagaaattcaaaaaccttgagtggaaactcctcatcgttcgtataataatcgtttgacctcttttgtttggagttgtgactttctccacactttcacatacatacacttttaatttccaagtatttatttaatacattaaggaaaaattttttcattctaaaaatttttctttttttattattattgtcataaatacttatttgttgttgtgtatatttaatcttgttttaaataccctttctcactctcactcactttcatatttcttactcttagttgagttagtcggccttcgatacacatataaaagtgtttattttaacttttttgtgaattcacttgtcaattttgtgtaattagtttgactaattattattattattatttttgatctattcttttttttatcttttgtactacattgttttttaatctttcgcttgtttacgttatttttctcttcctcttttttcccttttaatattcgcctcttttgttttctcgtttcattgtaattattttatacccaaaaattgttcttgaaacttctgttcattctcttttttattattatttttgattttcatacgatcgatttcctacattcaatttacctgtgtttacaatgagtagcattgaagaacaaattacgaaatcggactccgatttcatcatttcagaagatcaatcctacttaagcaaggagaaaaaggctgatggttctgccaccatcaaccaagctgacgaacaatcctccaccgatgaactccaaaaatccatgtccaccggcgtcctcgtcaatggtgacttatacccttctcctaccgaagaagaattagccacccttcctagtgtttgcggtactattccttggaaagcctttattatcattattgtcgagctttgcgaacgtttcgcttactatggactcactgttccctttcaaaattatatgcaattcggtcctaaggatgctactccaggtgcccttaatttaggcgaaaccggtgctgacggtctttctaatttcttcacattttggtgttatgtcaccccggttggcgctgcacttattgctgatcaattccttggtaggtacaataccattgtttgctctgctgtcatttactttattggtatcttgattcttacatgtactgctattccttctgtcattgatgccggaaaaagtatgggtgggtttgtcgtctctttgatcatcattgggcttggaaccggtggtatcaaatccaatgtttcccccttgatggctgaacagcttccaaaaattcctccttatgtaaagacaaagaaaaatggtagcaaggtcattgttgacccagtcgtcaccacctctcgtgcctatatgattttctactggacaattaacgtcggttctctctccgtattagccacaactagtttggaaagtactaaaggttttgtttacgcatacttgcttcccttgtgcgtctttgttatccccttaattattttggctgttagtaagacagcttttacaagcacactcctccctccggttccatctttgttcgtgttggtcaagtgttcttccttgctgctcaaaacaaatttaatctcgaaaaaactaaaccatcttgcactactactgttggagcgttacgtcaaggatcagtgggatgacttgtttatcgacgaattgaaacgtgccttacgcgcctgcaaaacttttctcttttaccctatctattgggtatgctatggtcaaatgaccaacaacttaatttctcaagctggacaaatgcaaacgggtaatgtctctaacgatcttttccaagccttcgattcaatcgccttgattattttcattcccatttgtgacaatatcatctatccattattgcgtaagtataacatccctttcaaacccatccttcgtattactttagggtttatgtttgctactgcttccatgatttacgctgctgttttacaagcaaagatttatcaaagaggcccttgctatgcaaattttactgatacatgtgtttccaatgacatcagtgtttggatccaaatccctgcttacgttttgattgctttctctgaaatttttgccagtattactggtttagaatttgcatttaccaaggcccctccttcaatgaaatccattattactgctttgttcttgttcaccaatgcattcggtgccattctatctatttgcatttcttctactgctgtcaatcctaagcttacttggatgtacactggtattgccgtcactgcctttattgctggtattatgttttgggtttgcttccaccactatgatgcaatggaagatgaacaaaatcaacttgagttcaagcgtaatgatgcgttaacgaagaaggacgttgaaaaggaagttcatgatagttatagcatggcagatgagtcccaatacaatttggaaaaagctaactgctgaagaggaaatcatgaaaagcacataatacttaatttaacttaattcgtatttgcggatggccaatttttcttttcaaaatttcaaaaaattggggtttgcatgttttgtttccatctttttttttgttatgatgctgttgttctactgatgctccttatttaaatgcagtagtacttatccactctcagaaaatagagttttacagtgggtctatataccagaatttactacagtgtgatttaatgaaaatatatattgctgtgcataatttaaaaaaaaaaaaaaactaaattactcacactggcggccgcccgc

SEQ ID NO: 137960 - DNA, 3262 bp, Arabidopsis thaliana columbia
cattaccagtgagaggacttcttgttatatatcatatcttcttcgttctcgatttacgagatccttgattctctctttctctaatcttatctcatctgaagtatagttaagaattcactcgttgttcgagagtagtaagctgaagaaatggagagctacttgaacgaaaacttcggcgatgtgaagccgaagaactcgtccgatgaggcgttgcagcgttggaggaagctctgctggatcgtcaagaatcctaaaaggagatttagattcactgctaatctgtctaagcgttccgaggccgaggcgattcggcgttccaatcaggaaaaatttcgagtggcggtcttagtttcacaagctgcacttcagttcattaatagtttaaagttgtccagtgagtatacactatctgaagaagtaagaaaagcagggtttgagatttgtcctgatgagttgggatcaattgtagaaggtcatgatttgaaaaagttgaaaattcatggtggaactgagggcctcactgaaaaactttccacgtctattgctagtggaattagtacatctgaagacctgctgagtgtaagaaaagaaatttatggaatcaaccaattcacagaaagccccagccgtggcttttggttatttgtttgggaagcccttcaggatacaacacttatgattctagctgcatgtgcgtttgtttcacttatagttggaatactgatggaagggtggcctattggtgcccatgacggacttggtatagtggcgagtattctgcttgttgtgtttgtcactgccactagtgattataggcaatccctgcaattcaaggacctggatgcagagaagaaaaagattgtggttcaggttacgagagacaaactgaggcaaaaaatctcaatatatgatctactccctggagatgttgttcatcttggcattggagaccagattccagcagatgggctttttatctcagggttttctgttctgataaatgaatcgagcttgactggagaaagtgaaccggttagtgtcagtgtggaacacccgtttcttctctctggtaccaaggttcaggatggatcttgcaaaatgttggtgactacagttggaatgaggactcaatggggtaaactgatggctacactaagtgaaggcggtgatgatgagacaccgttgcaagtaaaacttaatggtgtggcaaccatcattggtaaaataggtctattttttgctgtcattacgtttgctgttttggttcaaggattggctaatcagaagcgcctagataattctcactggatctggactgctgatgaattgatggcgatgctagaatattttgctgttgctgtaacaattgttgtggttgcagttccggagggtctgccgttggctgtgacattaagtcttgcttttgccatgaaaaagatgatgaatgacaaagcgctagtgcgcaatcttgctgcttgtgagacaatgggatctgcaacaactatttgtagtgacaaaactggaactcttacaacaaatcacatgacagttgtaaaagcctgcatctgtgaacaagccaaagaggttaatggtcctgatgctgctatgaaatttgcctctggtatccctgagtctgctgttaaacttctactgcaatctatatttactaacactggtggtgagattgttgtgggcaaaggaaacaaaaccgagatactgggaactcctacagaaactgctctgttagaatttgggttgtcactcggaggggacttccaagaagtaaggcaagcctcaaatgttgtgaaagttgagccctttaactctacaaagaaaagaatgggagttgtcattgagctgcctgaaagacatttccgggcacattgtaagggtgcttcagagatagttttagattcttgtgataagtacatcaacaaagatggtgaagttgttcctctcgatgaaaaatcgaccagtcacctgaagaacataattgaggaatttgctagcgaagcacttcgaactctttgcctagcgtatttcgaaattggtgatgaattccgggagaaaagtgatgaggaactgctcaagctaatcccaaaattgcaggtgatggcacgatcctcgcccatggataagcatactttggtgagactcctccgcacaatgtttcaggaagtcgttgcagtgacaggtgatggaacaaatgatgctccagcacttcatgaagctgatattggactcgcaatgggcatttccggaactgaggtggcaaaagaaagtgcggatgtgattatcctagatgataacttctctacgattgtcatagtagccaaatggggccgttctgtgtacataaatattcagaaatttgtccagttccagctgacagtaaatgttgtggctcttattgtcaacttcttatcagcctgcctcactggaaacgcgcctctgactgctgtccaactactgtgggttaacatgataatggacacacttggagcactcgcgctagcgactgaaccaccacaggacgacctgatgaagagatctccagtgggaaggaaaggaaacttcataagtaatgtaatgtggaggaacatccttggtcagtcactctaccagcttgtcatcatatggtgtcttcaaacaaagggaaagacaatgtttggtctcgatggccccgactctgatctaacactcaatacccttattttcaacatttttgtcttctgccaggtattcaatgagataagctcgagggaaatggaaaaaattgatgtgttcaaggggatactaaagaactacgtattcgtagcggttctaacatgtacagtggtgttccaagtaatcataatcgagctgctgggtacatttgcggatacaacaccattaaatttgggacaatggttggttagcatcatactcgggttccttggcatgcctgttgctgctgccttgaagatgatccctgttggttcacactaagcaacacattgtataatgtgattccttgtgccacaactttggcattgaaaggtaccaattttttctccggcctttggaagtttgatatcccaagatggccttggactagttacggtgcttttttatgttttcattttggccaaatgtataagtgatttggaggagcatttgcttcgtaaatatttcaatgttgtggaacttgttactttatcttttgttcttctgttagataccttttactgaataagtgaagcataggctaaattgtctctca

SEQ ID NO: 137961 - DNA, 3185 bp, Arabidopsis thaliana columbia
gccctgacgtagccgattccttttccaaaaaaatgctttattgtcttattctcctcctatgtctctcttctacgtatctaccaagtctatctctaaaccaagatgccaccattctccggcaagccaaactgggcttatccgacccggcccagtccctatcttcatggtccgacaacaacgacgtcaccccatgcaagtggctaggcgtgagctgcgacgccacgtcaaacgttgtctccgtcgatctctcaagcttcatgctcgtcggacctttcccctccatcctctgccaccttccttctctccattccctctctctatataataactccatcaatggctctctctccgccgacgacttcgatacgtgtcacaatctcatcagtcttgatttatcggagaatctattggttggatccatcccaaagtcacttcctttcaatctcccaaacctcaagttccttgaaatctccggaaacaacttatcagacacgatcccgtcgagcttcggagagtttcgaaagcttgagtctttaaacctcgccggtaacttcctctccggtacaattcccgcctctctcggtaacgtcacgactcttaaagaactcaaactcgcttacaatttgttttctccgagtcaaatcccgagtcaactcggaaacctcacggagctccaagttctctggctcgccggctgcaacctcgtcggtccgatacctccgtctctgtcccggttaactagtttggttaacttggatttgacatttaaccaactcacaggatctatcccaagttggatcacgcagctaaaaaccgtcgagcaaatcgaactattcaacaactcgttctcaggcgagttaccagaatccatgggtaacatgacgacgctaaaaagattcgacgcgtcgatgaataagctgacaggaaaaatacccgacaacttgaatctgttaaacctcgagtcactcaatctcttcgagaacatgctcgaaggtcctttaccggagagcataactcgctccaaaaccttgtcagaactcaagcttttcaacaacagactcaccggagtattaccgagtcaactcggcgctaactcaccgttacagtacgtggacttatcgtataaccgattttccggcgaaataccggcgaatgtctgcggtgaagggaagctagagtatctaattcttatagacaattcgttttcaggagaaatctctaataatctcggaaagtgtaagagcttgacccgggtccgattgagtaacaacaagctttcgggtcaaatcccacatggattctggggattgcctcgcttgtcacttctcgaactctctgacaattcgttcaccggaagtattcctaagacgatcatcggcgcgaagaatctatcgaacctacgaatctcaaagaatcgattttcaggttcaatccccaacgaaatcggatcgcttaacggaataatcgagatttccggagcggagaatgatttctccggtgagattcctgaaagcttggtgaaattgaagcaattgagcaggcttgatctcagtaagaatcaactctccggtgagattcctagagaacttcgtggttggaagaatctaaacgagcttaatttggctaataatcatctctccggtgaaatccctaaagaagtcggaatcttacctgttctcaattaccttgacctttcaagcaatcaattctccggtgagattccgttggagttacagaatctgaagctaaacgttttaaacctttcgtataatcacctctccggtaaaatccctcctctctacgctaataaaatctacgcacatgacttcatcggaaatcccggtttatgtgttgatctcgacggcctttgtcggaagatcacacggtctaaaaacatcggctatgtatggattcttttaacgattttcttactcgccggtttggttttcgttgtcgggatcgttatgttcattgccaagtgtagaaaactcagagctttgaagagttctactttagcagcgtcgaaatggagatcattccacaagcttcatttcagtgagcacgagatagctgattgtctcgatgaaaagaacgtaatcgggtttggatcttctggtaaagtctataaagttgagcttagaggtggagaagttgtagctgtgaagaaacttaacaaaagtgttaaaggaggagatgatgaatacagtagtgattcgttgaatagagatgtttttgcagcggaggttgaaacgttggggacgattaggcacaagagtattgtgcgtttgtggtgttgttgcagctctggtgattgtaagttgttggtgtatgagtacatgcctaatgggagcttagctgatgtgttgcatggtgaccgcaaaggcggtgttgtgttgggttggccagagcggttgaggattgctttggacgctgccgagggtttatcatacttgcaccatgattgtgttcctcccattgtgcaccgcgatgtgaagtcgagtaacatactgctagatagcgattatggggctaaagttgctgactttgggatcgctaaagtcggtcagatgagtggttccaaaactccagaagctatgtccgggatcgccggttcttgtggttacattgcaccagaatacgtatacacacttcgggtgaatgaaaagagcgatatctacagctttggtgtggtgcttttggaactggttacagggaagcaaccaactgattcagaacttggagataaagatatggcaaaatgggtgtgcactgcacttgacaaatgcggtttagaacccgtgatcgatcccaaactcgatctcaagttcaaagaagaaattagtaaagtcattcacattggtctactctgtacgagtcctctccctctaaacagaccttccatgagaaaagttgtgatcatgcttcaagaagtctctggtgctgttccttgtagcagtccaaacacatctaaacgatctaaaaccggtgggaaactctcgccttactacacggaagacttgaacagcgtttgaacattccaatatgggctgagaatcggtttgggccggggatagcaatttgatgttatgatgctaggtgaactgtaagaaagatatcaaaaacagaaaagtggagctttctgattaggtaattgctcttaaagctaatataaagttataatttgg

SEQ ID NO: 137962 - DNA, 2544 bp, Arabidopsis thaliana columbia
atgcatcaaataaagaataaactgttctgttttgaatttgttaaataggagagtgcaagctcaagaacaagctgtttcataaataaataaaatatattttctaaaatcaagtaaagtaaaaaaaaaatagatattgtactaaatgaataaacttgattcaacaaagttttgtacgttgttataatttcacttaaataatttagtgcgtcaaaaaaacaaaattaaaacgtaattggtcaaggaaaaaaaaacaagtctcaagggaaaaggaaaacaaaaaaaaaggaaaatttaataagcaatctggaccgttcatactttttagatctgacggctgacagagaactaccattgggcatcttttataaacagagagatttgtttgattccggtcgaactcaaaacataatttgctctcaataagacattaacaaagtcccagaggcagagagagagaatcagagagagagaagtcgagatgtttttccacatagtattggagcggaacatgcagttgcatcctcgtttctttggtcgtaacctaaaagaaaacctcgtatctaagctcatgaaagatgtcgaaggcacttgcaggttttctttctctattcacttctagtagaaaatcaccaatttcggatgctttaatcgcaaacccttttcctcaattctcaattcggattcgttttccttaagacaacttcgaaaaagttgcatattttttcgaaccctaatctccgtctagttcaatttgttaggttttagggattagagtggattaaattcgaataaagatcgttcttttaactaaattgtagtctttctctgctgcttgtgactaaagtctgatttttagcagaatttttttccaaagggatttgctttgaagcctttagctttcttaggattaagatatgacttcatccagctcacttagatgcctgattgcaaatcattcagatccagtatcttgttttgtatttgatactcaagtctaaaactttgttctttagtatagttcgcttaatccattgcttgtgacagagatttgtattttgaggcctctagctttttgtatttgctttaggtttaagatgtgaagtttcatcattgcaatgtcatattgatacttatcaatatttgctcttttcgttttgtggtatggacagtggccgacatggatttgtagtggcgataactggaatagatacaataggaaagggtttgatcagagatgggactggttttgtcacctttccagttaaataccaatgcgtcgttttcagacctttcaaaggcgagattttggaagctgttgtcactttggtcaataaggtaatgtatctatatagtcttatttttttagtcaaatgtctttagtgacaaatcaaccttatggattttcctaatattatcacagatgggattcttcgctgaagctggccctgttcagatttttgtgtctaagcatgtaagcttatgatcttccatcatgaatttgacctcgagttcatttttgattctaggtgttatgtacttactcttgttctcctctcttttatcaccacagttgattccagatgatatggagtttcaagctggagacatgcctaactataccacatcagatggatcagtgtgtttctttctctagttcttatttcccaacagtattatatgtgtttcatctatcttcaaggaactcatttttccaatgcttctcttgcaggttaagatccagaaggagtgtgaagtgagactaaagattattggaacaagagttgatgccactgcgattgtatgcaccatctcctccataactctagtcacaatccaacttatagtttttagattattcttatcaatttacacatttgttttttgattttgcagttttgtgtgggtaccatcaaagacgattttttgggagtcataaacgaccctgcagcggcataaaaagtttcaagcagatttcaattttggtcttctttctttcacagagaatgctgtcttgtgataaagttgtattatagttgaagttttggatctatttaatccgaaagattggaaccacgcttgttggatttaacttatatgcaagtttagtgaacttcgtatttgatcaaaactgttgtcattttgagaacaatatagtaccgagtagtggatcaaattctacatgtctcaatgaaaattgtataatttgaaattgaatggatgtttcattgattgttagttatattgtttcatatgttgtggaagatattgaaactcttgtttcatacgttgtggttctgtttatcaaatatttgataaatctaagaaaacatgttaaaagtcatcaattgcttctctcattcatcaactttccttataggatttggtttttggtaagacctctttgactatcgagtaaaatatctaattgtatgatatattgaccaaaatgtactaattaaattcattgaaagttttctgaattttaacacattcaatgaatttgaaaacgcttttttcaaataaatttccatatagtttcataac

SEQ ID NO: 137963 - DNA, 757 bp, Arabidopsis thaliana columbia
caacttagaaaaatgaattttactggctattctcgatttttaatcgtctttgtagctcttgtaggtgctcttgttcttccctcgaaagctcaagatagcccacaagattatctaagggttcacaaccaggcacgaggagcggtaggcgtaggtcccatgcagtgggacgagagggttgcagcctatgctcggagctacgcagaacaactaagaggcaactgcagactcatacactctggtgggccttacggggaaaacttagcctggggtagcggtgacttgtctggcgtctccgccgtgaacatgtgggttagcgagaaggctaactacaactacgctgcgaacacgtgcaatggagtttgtggtcactacactcaagttgtttggagaaagtcagtgagactcggatgtgccaaagtgaggtgtaacaatggtggaaccataatcagttgcaactatgatcctcgtgggaattatgtgaacgagaagccatactaatgaagtaatgatgtgatcatgcatacacacgtacataaaggacgtgtatatgtatcagtatttcaataaggagcatcatatgcaggaygtatcaatatttatcaaataatacaaataagagctgagattacgagaatctatttaaattaaaagttacatacttaattattatagttatatatgtaaaatatgtggcctttttaaaagttacataattaattattatagttaatgtctttcaaaaaaaaaaaaaaaaaaa

SEQ ID NO: 137964 - DNA, 1406 bp, Arabidopsis thaliana columbia
gttttatgaaattgaagaacgaaattgaagtgaaaagtgaaatcgtgcaattttcatcttcctcttctccttaaaccctgatttcggattctcacaatcgaacttggctgcagagaaggatggggactaacgaagtaacaaggattgtgactgatgaagaaaagagagaagcgaagaacttcaacatatttgatctccctgacgttcctaccggacttcctccgcatcttgagctccagcgaactcgcgttgtctgtaagaaggattctaatattcatcctacggctatcactttctcgggtgcctattcctctatgggagtggacaacagtgtgagactagaaaacttctctgaggatttcaaagttgatgtgattagtctcacagagacagatatggtattcgatatgatcggtgtccatgcaggaatcgctaatgctttccgaagaatcctcttagctgagcttccttcaatggctattgaaaaagtgtatgtagcaaacaacacatcggttattcaagacgaagttcttgctcacaggttgggtcttattccaattgccgcagatccgagactctttgaatatttatctgaaaacgatcagccaaatgaaaagaacaccattgttttcaaactccatgtgaaatgtctaaaaggtgacccgcgtcgtaaagtcttaacaagcgaattgaaatggttaccaaatggaagtgagcttatcaaagaatctggaggttcaaccacaacgccaaaaacttacacttcattcaaccatagccaagattccttccctgaatttgctgaaaatcctatcaggccaaccttaaaagatatcttgatagcaaaacttggccctggccaggaaatcgagcttgaggctcatgccgttaagggcattggtaaaacacatgcaaagtggtccccagtagcaacggcttggtatcgaatgcttcctgaggtggttctactaaaggaattcgagggtaaacatgccgaagaactcgtaaaagtctgccccaagaaagtttttgacattgaagacatgggccaaggtaggaagagggcaacagtagctcggccgcgtgattgttcgttgtgtagagaatgcataagagatggagtggaatgggaggaccaagtggatctgcgccgtgtcaagaaccattttatatttacaattgagtccacgggatcacagcctccggaggttcttttcaacgaagcagtgaagatattggaagataaatgtgaaagagtaatctctgaactctcctgaaaagagattaaattggtttagctctaccggcttggttccggtttagttcagttttgggttttgtatcgaagttaatacaaagaacattgaaatttatatatacttggtttcggctcggttcaaatttag

SEQ ID NO: 137965 - DNA, 1791 bp, Arabidopsis thaliana columbia
cgagagagtctctgtctctgtaaaagatatttgagcttgagaagaacagaagaaacttccaggatcaatcaatcgatcaactttagtgaactaactcttgatttttcattcgaagttatggaatcggttcccgaatccgtaccatcgccgaactcgaatacaccgtcaataccaccgccggtgaactccgtaccgcctttcttgagtaaaacctacgacatggttgatgatccgttgaccaatgaggtcgtttcgtggagcagcgggaacaacagcttcgtcgtctggagtgccccggagttctcgaaggtactcttgcccaagtatttcaagcacaacaacttctccagcttcgtcagacagttaaatacttatggtttcagaaaagttgatcctgaccgatgggaatttgcaaatgaaggatttcttagaggccgaaaacaactactgaagagtattgtcaggagaaaaccttcgcatgtgcagcagaatcagcaacaaactcaagttcagagctcatctgttggtgcttgtgtcgaggtggggaagtttggaatagaagaagaagtggaaagacttaagcgggataagaatgttcttatgcaagaactcgtcaggttaaggcagcaacagcaagctactgaaaaccaactgcagaatgtgggacagaaagttcaggtgatggagcaaaggcaacaacaaatgatgtcgtttttagcaaaggctgttcaaagtccaggtttcttaaaccagttagtacaacagaataataatgatggcaacagacaaattccaggaagcaacaaaaagaggagacttcctgtagatgagcaggagaatcgtggtgacaatgtggctaatggtcttaaccgccagattgttagatatcagccgtcgataaacgaagcagcacaaaatatgcttcgacagttcttaaatactagtacctcacctcggtatgaatcagtttcaaacaatcctgacagtttcctattgggtgatgttcccagttctacctctgtagacaatgggaacccttcaagtagagtttctggagtaacattggccgagttttcacccaacacagttcagtcagcaacgaatcaagtacccgaagcaagtttggctcatcatcctcaagctggtctggttcagccaaatataggtcaaagtccggctcaaggagcagcacctgcagactcttggagccctgaatttgatttagttggatgcgagacagatagtggagagtgttttgatccaataatggctgttttagatgagtcagaaggcgatgcaatttctcctgaaggtgagggcaagatgaatgagttactggagggagtccctaagctgcccggaatccaagatccattctgggaacagttcttttctgttgaactcccagcgattgcagatacagacgatattctatcaggatcagtggagaataatgacttggtattggaacaagaaccaaacgagtggacccgtaatgaacaacaaatgaagtatcttactgaacaaatgggactgctttcctcagaagcacagaggaaataaagattttcaggggaggttgcaaaaggagatatgaaggaacgaggaatatatcagatggtgtgtataccctttacatttttacttaaatgaaaaaaaaacagagagaagaaacataaaagatttaccaccaagcttgtgaatagttagtagagatcggtttttgtgttgtttatattatacttttgtgtgaaaacgttcatcttgttcaattatcaaaaaaaaaaaaaa

SEQ ID NO: 137966 - DNA, 652 bp, Arabidopsis thaliana columbia
aaaacagagcaaacgcaaagagtagcaatcacaagaggaagtgaaacgatgtctctaattccaagcatcttcggaggaagaagaacaaacgttttcgatccgttctcgctggatgttttcgatccgttcgaaggtttcttgacgccgtcaggattggcaaacgcacccgctatggatgtggcagcgttcacaaacgctaaagtggattggagggagacacctgaggcgcacgtgttcaaggcggatttaccgggactgaggaaggaagaggtgaaagtggaggttgaggatggcaacatacttcagataagtggagagaggagcaatgagaatgaagagaagaatgacaagtggcaccgtgtggagcggtcgagtgggaagttcacgaggaggtttaggctgccggagaatgctaagatggaggaaatcaaagccagtatggaaaatggtgtgttgtcggttaccgtgcccaaggtgccagagaaaaagccagaggttaagtccattgatatctctggttaaagggaattgtttaagaccaaaaatgtgtgatggtagtgaaataattggtgtgtgatgtgtttttcttgtaatcatgaatctcgttgtatcattatcataaaatcttaataagagtgtgctttgtctcgtg

SEQ ID NO: 137967 - DNA, 1529 bp, Arabidopsis thaliana columbia
ttgatcggaatattccttttagaatgccaagattcattcttcatctctcgagctcctcatgaatttcttctctgcttatcaatggagatgatgagctcttcttcttctactactcaagttgtatcattcagagacatggggatgtatgaaccatttcaacagttatctggttgggagagtcctttcaaatcagatatcaacaatattactagtaatcagaataacaatcagagttcttcaacaacacttgaggttgatgctagaccagaagcagatgataacaatagagtgaattatacttctgtgtataataactctcttgaagcagaaccgtcgagtaataatgatcaggacgaagaccggatcaatgataagatgaaacggcgtttggctcagaaccgagaagctgctcgcaaaagtcgtttgagaaagaaggcccatgttcaacagttagaagaaagccggttgaagttgtcacagctcgagcaggaacttgtaagagctaggcagcagggattatgcgtacgcaattcttcagatactagttatctaggaccagctgggaatatgaactcaggtattgctgcatttgagatggaatacacacactggctagaagagcaaaacaggagagttagtgagattcgaacagcgctccaagctcatataggtgacattgagctcaaaatgttggtagatagttgcttgaaccactacgcaaatctcttccgcatgaaagctgatgctgcaaaggctgatgtgttcttcttgatgtcgggaatgtggcgaacttcaactgaacgcttcttccaatggattggaggtttccgcccatccgagcttttaaatgttgtgatgccatacgttgagcccttaaccgatcagcaactgttggaggtgcgtaacctgcaacagtcgtctcagcaagcagaggaggctctctctcaaggcttagataaacttcagcagggtttggtcgaaagcatagcaattcagataaaagttgttgagtctgtgaatcacggggctccaatggcttcagccatggagaatcttcaagcattggagagttttgtgaaccaggcggatcatctgagacaacagaccctgcagcaaatgagtaagatattgacgacaagacaggctgctcgagggttgctcgctctaggagaatacttccacaggctgcgtgctcttagttctctctgggcagctcgtccacgagaacacacttgacaagttaggaggcaaacaaaacaaagagaaagaagcacaaggcagatgatgttagctatagggacttgctttatctctcagaaagtgttggctgatattttctccattagagagcatcatcttcctcattgatgattttgtttacttgaaaggaataagagatgtgtaaatttgggtggaaaacatgtaatgtctttgatgcattaggctctttatttgtaaaatatatagggtttgttgtcactcatctcctcgtatatgaaaatttgagcccacaatcaaattttttgtct

SEQ ID NO: 137968 - DNA, 925 bp, Arabidopsis thaliana columbia
caattcttttactttcattctctttatatattctctctacgctataatatatattacacagaatatacatggaaccgtccatcaaaggagatcaagaaatgttaaaaatcaagaaacaaggtcatcaagatcttgagttggggttgacccttttgtcacgtggaaccgcgacctcatcagagctcaatctcatcgattctttcaaaaccagctcatcatcgacttctcatcatcagcaccagcaagaacaattggcagatccgagagtgttctcgtgtaattattgtcaaagaaagttctatagttcacaagcgctaggcggtcaccaaaacgctcataaacgtgagcgcaccttagccaaacgtggacagtattacaagatgactctctcctccttgccttcttcagcgtttgcgtttggccacggttcagtcagcagattcgcaagcatggcatcgttaccattacatggctcggtgaataacaggtcaacgttagggattcaagctcattcaacgatccataagcccagcttcttaggaagacaaacgacgagtttaagtcatgttttcaaacagagcattcaccagaaaccgaccataggaaagatgttgccggagaaatttcaccttgaagtcgccggaaataataacagtaacatggttgctgctaagttggagagaattggacatttcaagagcaaccaagaagatcataatcagtttaagaaaattgacttgactcttaagctatgagctctgccatcttctttttagtcttcattataactttttttattctcatctttgtttgatataatgattgacggcagggtgtgttagagtttcactaatgatcaagttgtactttttatatatttcattgataccttgttgatgtaattcaatattttaggtctgttttt

SEQ ID NO: 137969 - DNA, 728 bp, Arabidopsis thaliana columbia
aagcttgatatcgcctctctctaatctctctttctctctctatctctaagaatatataaaggtatggactaccagccaaacacatccctacgtctaagcctaccaagttacaagaaccaccaactaaacctagaacttgttctcgagccttcttccatgtcttcttcttcatcttcttccacgaactcatcatcatgtttggagcagcctagggtattctcatgtaactattgtcaaagaaagttttacagctctcaagctcttggtggtcatcaaaacgctcataagcttgagagaaccttagccaagaagagtcgagaactctttagatcctcaaacactgttgattctgatcagccttacccgttctccggtcgctttgagctttacggccgtggctaccaaggatttctcgaaagtggcggctcgagggacttctccgcccgccgtgtgccggagagtggtcttgatcaggatcaggagaagagtcaccttgacttatccttaaggctctaaaagaatcttatattttgttagtctatatattatcatatcaattgttaatcttaaaattgattgttttacttattagtcatttcctattatctgaaagttttctttgtaagttgtaactatggtcctaaattcaaatccaaatttgattttggaagatggtacctaatgcagtagttaaataagttaaaaaaatgaaggatctataattctct

SEQ ID NO: 137970 - DNA, 947 bp, Arabidopsis thaliana columbia
gaaagagaaagaaaaaaatcatctcctgaaaaaatctatccctttttagctctcatggacgcttcaatagtttcctcatccactgcttttccatatcaagattctctaaaccagagcatcgaagacgaagaaagagacgttcataattctagtcacgaactcaatctcatcgactgcatagacgacacaacgagtatcgttaacgaatctacaacatccacagaacaaaagcttttctcatgcaactattgtcaaagaactttctatagctcacaagcacttggtggtcaccaaaacgcacacaagagagagagaacgttggcgaagagaggacaacgtatggcagcgtcagcctcagcttttggacatccttacggtttctctccacttcctttccacggacagtacaacaaccataggtctttagggatccaagcgcattcgataagccacaagctaagttcttataacgggtttggtggtcactatggtcagatcaactggtcaagacttccatttgatcaacaaccagccataggtaaatttccctcaatggataattttcatcatcatcatcatcagatgatgatgatggctccttcagtaaattcacggtccaataacatcgatagcccaagcaacacaggacgggttctagaagggtcaccgactcttgaacaatggcacggagacaaaggattgttgttaagtacaagtcatcatgaagagcagcagaaacttgacttgtccctcaagctttgagattctttttcttgattcttgaatttagtgtctttttactgttttttcatgtgattgttagtactattttgtgtatatttttttctagtaaagataatctaatgtacatctttttcacatatctactttagtctgagatttgtaaactatttaactatacattaatggatttcaagtagacatcc

SEQ ID NO: 137971 - DNA, 1032 bp, Arabidopsis thaliana columbia
gttgcgtttccacatttgtttaaacataactctctctctctctctctctctctctctctctcagtacctcttattcttatgctcttcttcaccaatcctatctcttctatctgtctttattttctctacatgtgaattgacccatttctggtaaacacatagagtaccacttttcttatttagattcttcttcctcttcatagcttccaagtcaactacttcagcttctgtcggctgtctcttcccagatctcgttaagaccaaaacttggaataaatgacggaatctgatgatgcctcacgagaaacaccagccagcagaggaggagaagcctcgtcaaatcaagatctgtccaaaccagaatcaaaccatgtttcactcgatctcaagctcaacgatactttcaacgatgacacaaagagcacaaagtgtgaagcaaacccaagagtcttctcttgcaactactgcagacgcaagttctatagctctcaagctcttggaggtcaccagaacgcacacaagcgagaaagaacaatggccaaacgagcaatgcacatgggaagaatgtttggtcaccatcacaggccttacacatacacttcttcttcccttgggatgcaagctcactccggtttacttcatcacaccttatctcagcctcagcctcttgtttctaggtttcatcatcaagggtattttggtaacaccgtgccgttgttctttgactatgacgatggtggtagcgacttcttctggcccggcagcttccgtcaggtggttgaggaagctgaggctccggtggttgtggtggctagtactgagtcaggccttgatttgaactcggttgcggcaaatggaggtgtagataataatagctcaaagcctgatcttaccttaagactctaaaaggattaaggagattatatctttattgttatttttctattgttagacattcagaagataagttggagacagttgatagaaattgatgaaaaactttgttgttatattaaatgaggttgttcatta

SEQ ID NO: 137972 - DNA, 1876 bp, Arabidopsis thaliana columbia
atacatggtcttacgactttgcggagacctgtgtttttggtaaacagtcgcaagagccatgtcactgagacccaacgctaagacggaggttcgccggaaccgatacaaagttgcagtggatgcggaggaaggacgacggaggagagaagacaacatggttgagatccgtaaaagcaagcgtgaggagagtttgatgaagaagagacgtgaaggtatgcaagctcttcagggtttcccttcagcttccgccgcctccgtcgataagaagttggatagtctgaaggatatggtcgctggggtttggtccgatgaccctgccttgcagcttgagtccactactcagttcaggaagcttctctctattgagagaagtcctccaatcgaggaagtgataagtgctggtgttgttcctaggtttgttgagtttcttaagaaagaagattaccccgccattcagtttgaggcagcttgggctctaacaaacattgcatctggaacatcggattacactaaggttgtaatcgatcacaatgctgttccaatctttgttcagcttcttgcttcccctagcgatgatgttcgtgaacaggctgtatgggctttgggtaacgttgctggtgattcaccacggtgccgtgatcttgttcttggatgtggggcactgcttccgctgctcaatcagcttaatgagcatgctaaattgtccatgcttcgaaatgccacttggaccttgtcaaacttctgtcgtggcaagcctcagcctcactttgaccaggtcaaacctgctcttcccgcccttgaacgactaattcattcagatgatgaagaagtcttgacagatgcctgttgggctctttcttacctctctgatgggaccaatgacaaaatccagactgtcatccaggccggtgttgtcccaaaacttgttgaacttctcctccatcattctccatctgtgctaattcctgctcttcgcactgttggaaatatagttactggagatgatatacaaacacagtgcgtgatcaatagtggtgctctaccttgtcttgccaacctgctcactcaaaaccataagaaaagcataaagaaggaagcttgctggacgatttcaaacatcacagcaggcaacaaagatcagatccagacggtagttgaggctaatttgatttccccgttggtgagtctgcttcaaaatgctgaatttgacattaagaaggaagctgcatgggcaatttcaaatgcaacttcaggtggttctcatgatcaaataaaatacctggtggagcaagggtgcataaaaccattatgcgatctcctggtttgcccagatccaagaatcataactgtctgccttgaaggattggaaaacattttgaaggtgggagaggcagagaagaacttgggtcacacaggagacatgaactattacgctcagctgattgatgatgcagaagggctagaaaagatcgagaaccttcagagccatgacaacaatgagatctatgagaaggctgttaaaattctggagacatactggcttgaagaggaagatgatgagacacagcaacctccaggtgttgatggttctcaggctgggttccagtttggagggaatcaagctccagtaccatccggaggattcaacttcagctgaaggaatggaattggaagcttgcaacttgagaatggtgaaaggtcagagtcagtcagagtctagtttcactgccatggttatactccaggtctggtctggtctggtctcagaggtttgtaccgggtggtcggtttaaaagtacagcgtctgagaaagtgtttggttcattgtccagggctatttttttgaaatgactggtacaacggtcgtgagtcgacc

SEQ ID NO: 137973 - DNA, 1015 bp, Arabidopsis thaliana columbia
ctgtctctcactttccttcattatttactcattgcccaaaataattcatttatcatatcctcaaacttttttttttctatacctcgaaatccaaaaaaataaatacattggtttagtgtggcattgatgtttttggtataaagctcttcaccaatgatagcttcagagagtaccaagagctgggaagctagcgcagtcagacaagagaatgaagaagagaagaagaaaccggttaaagattccggtaagcatccggtttatcggggtgtccgaaagaggaactggggaaaatgggtgtccgagatacgtgaacctaggaaaaaatcccgaatatggctaggaacgtttccttccccggagatggcggcgcgtgcacacgacgtagccgctcttagcatcaaaggagcctccgctatactcaatttccctgacctagccggctctttcccacgccctagctcgcttagccctcgagacatccaggtcgcggctctcaaagccgcacacatggagacctcacagtctttttcttcttcttcttctttaacgttttcatcttcacagtcttcttcttcgctagagtctctcgtgtcttcctccgcgaccggctccgaggagctaggggagattgtagagctcccaagtttgggatcgagctatgatggtttgactcagctaggtaacgagtttatattctctgactccgcagacttatggccttatccaccgcaatggtcagaaggtgattaccaaatgattcctgcctcgttatcacaagattgggatcttcaaggactgtataattattaagtcataatcataaaaatatactagtaatgctgtgtttaataattactttttaatgacccctttattttgtatagggcggctttaggtttatttgtctttgaatcttcttttctcaatttgtgggtgtgagagagctcgatatatgaatacttgtacatacttctcataacatgtgttttttttttcttaataaatgtggaaactt

SEQ ID NO: 137974 - DNA, 3334 bp, Arabidopsis thaliana columbia
aaaaactctctttctatcagaaagaaatgacatttttaatattacatgcctatacagttacaagaatacggttcatcctatagattgtcatgtaatctgcttatgaatgtttcatggtgaaatcattgggaaacctgcaggcgatctgatggacacatttcgttttggatgatcatagtttctgagataggagaccaatacaggcctgattatggcaaattcctttagaaacgattttatattcgttttctgtagcggctgccccttgcaactattaaaggttttttttgcaaaattataaacaaaaggtttcctgtagaaaagaagattgtatttcttttgtttactagtcgtcaactttgcaagtataattttgaagggaccaaaccaaatcaaggattttatttgacttttgtttatatatgtattgtaactgtaattgtaattgtatatcaacccaacatgctaatactataacttagatggagttgaagcgggtacgtgtagtagctgtccttttgatcttgcctcgtctatatattgcatgagagaacattttccataagaaagtaatcaaacacatttggtgataatgacacgtctacgccttctttcatggatttcaatcacgagctgtgtttgtctcgtttttgctcaagaccaatcaggttttattagtatcgattgtgggataccagatgattcaagctacactgatgagaaaacaaacatgaaatacgtttcggatttgggttttgttgagtctggaacaagtcatagcatagtctctgaccttcaaacaacttctcttgaaaggcagttccaaaacgtaagaagcttccctgaaggtaagagaaactgttacgacataaggcctcagcaagggaaaggtttcaagtatctgattagaactcgttttatgtacgggaactatgatggttttagtaaaacacctgagtttgatctctatattggagccaatctttgggaatctgttgttcttatcaatgaaacggctataatgaccaaagaaatcatttatacacctccatcagaccatattcatgtgtgtcttgttgataaaaacagaggaactccttttctctctgtcttggaaataagatttttgaagaacgatacatatgacactccttatgaagcgcttatgcttggtcgaagatgggatttcggcacagcgaccaatcttcaaatcaggtacaaagatgatttctatgatcgcatatggatgccttataagtctccgtaccagaaaactttgaatacatccctcaccatcgatgaaactaaccacaacggtttcagacctgctagtatagtcatgagatctgcgatagcacctggaaacgaaagcaatcccttgaagtttaactgggcaccagatgatccgaggtcgaagttttatatatacatgcacttcgctgaagttcgagagctacaaagaaacgagacacgagaattcgatatatacataaatgacgttatacttgccgagaatttccgtcctttttatttgtttacagacacacgctccactgtagatccagttggcagaaaaatgaatgaaattgtccttcagagaactggtgtatcgacccttccaccgatcatcaacgctatagagatctatcaaatcaacgagttccttcagttaccaacagatcaacaggatgttgatgccatgacgaagattaagttcaagtatagagtaaagaagaactggcaaggagacccatgtgttccagtggacaattcttgggaaggtcttgaatgtctccatagtgataataatacttctccaagatccattgctctgaacttatcctccagtggactgactggccagattgatccagctttcgccaacctaacatcaataaataaattagacttatcaaacaacagcttaacagggaaagtacccgatttcctcgccagtttaccaaacttgactgaattaaacctggaaggaaacaagttaactggttcgattccagctaaactgttggagaaatcaaaagatggttctctttcgcttagatttggtggaaacccggacctttgtcagtctccctcatgtcaaacaacaacgaagaagaaaattggttacatcgtcccagtagtagcatcactcgcaggattgctcattgttttgaccgcattagctttgatctggcattttaaaaaacgatcacgaagaggtacaatctcaaacaaaccattaggtgtcaacaccggaccattggacacagccaaaagatactttatatactcagaagttgtgaatatcacaaacaacttcgagagagttcttggtaaaggaggttttggtaaagtataccatggtttcttgaatggagatcaagtagctgtgaagatactttccgaagagtcaactcaaggttacaaagagtttcgagcagaggttgagcttctgatgagagtccatcacacaaatttgacatctcttatcggatactgcaatgaagataaccacatggcacttatctacgagtacatggctaatggaaacttaggagactatttgtcaggaaaaagttccttaatcttgagctgggaagagagattacagatatcattggatgcagcacaaggcctcgagtatctccattacggttgcaagcctcccatagttcacagagatgtgaagccggcaaatatcttactgaacgagaatcttcaagccaagatagctgactttggtttatctagaagcttcccagtcgaaggtagtagtcaagtctccaccgttgtcgctggaaccatcggttacttagaccctgagtattacgcaacgcggcaaatgaacgagaagagtgatgtttacagcttcggggtggttcttcttgaagtaataacaggaaaaccggcaatttggcattcaagaacagagagtgtgcatctaagtgatcaggttggttcaatgttggcgaatggagacataaaaggtattgtggatcaacgtctgggagatagatttgaggttggctcggcttggaagatcactgaactagcattggcttgtgcgtctgagagttcagaacaaagaccgacaatgagccaagtcgttatggagctgaaacagagtatctttgggagagtgaacaatcgaagtgaccataaggaccctgtgagaatggttacgatgaacctcgatactgaaatggttcctcgggcgaggtaaagatggatatttgtatcttcataaaactatcagtgtattatcatcccatcattaccgttactatcagtatcattcaaaatcagccatgaatcatgttaaatgcacttgaaa

SEQ ID NO: 137975 - DNA, 1000 bp, Arabidopsis thaliana columbia
gtttcgggttgtataatgaaaacgccggctcgtcgatcgaagcgggttaatcaggaggaatcggagacaaatgttacaacccgagtagtcctacggacacgaaagaccaactgttccaagacacgagcggctcgggtcagacccgattacccactgacccgcaccacctccgagtccgagatgaagttaatgcctccggagttctttcagatcgacgcacttgatcttgcgccacgtttgcttggcaagttcatgaggagagacaatgttgtgcttcgaattacagaggtagaagcttatagaccaaatgattcagcttgccatggacgatttggtgttaccccacggaccgcaccagtttttggaccaggaggacatgcttatgtttatctatgttatggtcttcatatgatgctcaatattgttgctgataaagaaggagtcggagctgctgttttgatacggtcttgttctcctgtttccggaatggagactatacaggagcgtcgtggcctgaaaaccgacaaacctgttcttttaaatggaccaggaaaggttggtcaagcgcttggactctcaacagagtggtctcatcatccactttattctcctggaggactggagcttctggatggaggagaagatgtggagaaagtaatggttggtcctcgcgttgggatagattacgcattgcctgaacatgtgaatgccttgtggagatttgctgttgcagacactccatggataagtgctcctaagaacactcttaaacctctctaacttcaactcaaaactcctttgtacctcttctttgtaaatagacatctgcatgtcatattaactctttggtgtgtgtgttgtataaactattttgccaaagattgtgatttgggttttttggtttataaagaaaaaacaattggggcaatgttgtaaagattggaaactggaggtatatttaagctccccgaaactttctttatttattcttttgccctcc

SEQ ID NO: 137976 - DNA, 1581 bp, Arabidopsis thaliana columbia
caacaactttgacctatctttgaacacaaagaatgggtttccagtctttgccactgtggtggaagctaactatgttacaaagaaacaagacctcttctctgcgtacaagctaacccaagaagacaagacacaaatcgaagagctatccaaggatccacgaatagttgaacgtatcattaagtcaattgctccgtcaatatatggccacgaagatatcaaaacagctcttgctcttgctatgtttggtggccaagagaaaaatatcaaagggaaacacagattgcgtggagatattaatgtacttttactaggtgatccaggaacagcaaaatcacaatttctgaagtatgttgaaaaaactggtcaaagagctgtctacacgactggaaagggagcttctgctgttggtctaaccgcagcagtacacaaagatccagttacaagggagtggacgcttgaaggaggggctcttgtacttgctgaccgaggaatttgtcttatcgatgagtttgacaagatgaacgaccaggacagggtgagtatccatgaagccatggaacaacagagtattagtatatcgaaggcaggaatagttacttctcttcaagctcgttgctctgttattgctgcagctaatccagttggtggaaggtatgattcatcgaaatcatttgcacaaaatgtcgagttgacagatccgatcctttctcgttttgatatcttgtgtgttgtcaaggatgtggttgacccagttacagatgaaatgctagctgaatttgttgtcaatagccacttcaagtcacaacccaaaggtggtaagatggaagatagcgatcccgaagatggcattcagggatctagcgggtcaactgatccggaggtccttcctcagaacctgctgaagaaatacttaacatactcgaagttgtatgtattcccaaaactgggtgaactagatgccaagaagttagagactgtttatgctaatctaagacgagaatcaatgaacggacaaggagtttctatagcgacaaggcaccttgagtccatgatccgaatgtctgaagcacatgctaggatgcaccttaggcaatatgtcacagaagaggatgttaatatggccattcgagtcctacttgactctttcatatcaacccagaaatttggtgtccagagaactctaagagagagtttcaaacggtacattacatacaaaaaggacttcaactcattgctgctcgttcttctcaaagagctcgtaaagaacgccttgaagtttgaagaaatcatttcaggatcgaactcaggactacctacaatcgaggttaagatagaggaactgcagacaaaggccaaggaatacgacattgcagatctacgacccttcttttcaagcacagatttttccaaagctcacttcgagttggatcatggccgaggaatgatcaagtgtccaaaaaggctgatcacttggtaaaacaagaagacgagcttcaagttactatcaacttaggtttatttatcattgcatgaaaaaaatgttggatatttaggaagatagtttcgttttgtgttaagatt

SEQ ID NO: 137977 - DNA, 967 bp, Arabidopsis thaliana columbia
accgactcagccactttcaatctctctctctctctctctctctctctctctctctctctctctctctctctctccctctctctctctctctctcctcgggatcaagaaaagtgaagaagaatgagaatgacaagagatggaaaagaacatgaatacaagaaaggtttatggacagttgaagaagacaagatcctcatggattatgtccgaactcatggccagggccactggaaccgcatcgccaagaaaactgggctcaagagatgtgggaaaagctgtaggttgagatggatgaactacttaagccctaatgttaacagaggcaattttactgaccaagaagaagatctcatcatcagactccacaagctcctcggcaacagatggtcgttgatagcgaaaagagttccgggaagaacagacaaccaagtaaagaattactggaacacacatctcagcaagaaacttggtctcggagatcattcaactgccgtcaaagccgcatgcggtgtagagtctccaccgtctatggcccttataaccacaacgtcctcctctcatcaagagatctccggtggaaaaaattcaactctaaggttcgacactttagttgacgaatccaaactcaaaccaaaatccaaactagtccacgcaacaccaactgacgtagaagttgcagctacggttccaaatctgttcgataccttttgggttcttgaagacgacttcgagcttagttcactcactatgatggattttactaatgggtattgcctttgaatatctttgatgattagcttctaaaaagtaattaatcatcgaataatagattataatgaacaataataataatatgaatacaattaaatttttttccgaatatttgcttgtagcttttgtactttcttttgtaaaagtaaggatgatcagttgataaaaaaatcttatactagaaagttatttggtt

SEQ ID NO: 137978 - DNA, 1030 bp, Arabidopsis thaliana columbia
tgagtgaatagaaaatcgaaaatgtacatagctgttccagctgaaatacttggaataattctaccacttctactaggagtagcctttttagtgctagctgaacgtaaagtaatggcttttgtgcaacgtagaaagggtcctgatgtagtgggatcgttcggattgttacaacctctagcagatggtttgaaattgattctaaaagaacctatttcaccaagtagtgctaattttttcctttttagaatggctccagtggctacatttatgttaagtctggtcgcttgggccgttgtaccttttgattatggtatggtattgtcagatttgaacatagggctactttatttgtttgccatatcttcgctaggtgtttatggaattattatagcgggttggtctagtaattcgaaatatgcctttctaggagcattacgatctgcagctcaaatggtctcttatgaagtatctattggtcttattcttattactgtactaatatgtgtaggttcttgtaatttgagtgagattgtcatggcgcaaaagcagatatggtttggtattcccctgttccctgtattggttatgttctttatttcttgtctagcagaaactaatcgagctccgtttgatctcccagaagcggaagctgaattagttgcaggctataatgtagaatattcttcaatggggtttgctcttttttttttgggagagtatgccaatatgatcttaatgagtggtctatgcacattgttctttctaggaggttggctgcctatcctagatcttcccattttcaagaagatcccgggctcgatctggtttagtatcaaggttcttttctttctgttcctatatatatgggtccgtgcagcatttccacgatatcgttatgatcaattaatgggacttggctggaaagtgttcttgcctctatcattagcttgggtagtctctgtttctggtcttttagtcacctttcaatggcttccttaattttattatgtgcgaggaattgccctcttgg

SEQ ID NO: 137979 - DNA, 1095 bp, Arabidopsis thaliana columbia
caagaacatcagtctcaacagatggagacactgatcataataacctaatgttcgatgaagggcatttgggtatcggtgcttctgattctagtgaccgttcaaagagtaaaatggatcaaaagacgcttcgtaggctcgctcaaaaccgtgaggctgcaaggaaaagcagattgaggaagaaagcatatgttcagcagctagagaacagtcgattgaagctaacacaacttgagcaggagctacaaagagcacggcaacagggtgtctttatctcaagctctggagaccaagcccattctaccgctggagatggggcaatggcatttgatgtagaatacagacgatggcaggaagataaaaacagacagatgaaggagctgagttctgctatagattctcacgcgactgattctgagcttcggataattgtagatggagtaatagctcactatgaggagctttacaggataaaaggcaacgcagctaagagtgatgtcttccatttattatcagggatgtggaaaaccccagctgagagatgtttcttgtggctcggcggtttccgttcatcagaacttctcaagcttatagcgtgtcagttggagcccttgacagaacaacaatcgctagacataaataacttgcaacagtcaactcagcaagcagaagatgctttgtctcaagggatggacaacttacagcaatcactcgctgatactttatcgagtgggactctcggttcaagttcatcagggaatgtagctagctacatgggtcagatggccatggcgatggggaagttaggtacccttgaaggatttatccgccaggctgataacttaaggctacaaacatatcaacagatggtgagactattaacaacccgacaatcggctcgtgctctccttgcagtacacaattatacattgcggttacgtgctcttagctctctatggcttgccagaccaagagagtgaaccatgactctattatacttcaacgaaggtccagaaaatttgagattcttagcataagatttgacgactttagacacgtagctcgtatacaagattatgattatactgttttgtgttg

SEQ ID NO: 137980 - DNA, 985 bp, Arabidopsis thaliana columbia
gcattggtcggagcgtggaaggcagcttgtaaagtggtcggagggaaagtggagattccggcagggacacagtttttggtgaaggcagtgacactgcaagggccgtgtaaggaggagacggtggttcaaatagaaggaatcttagtggctccagagaagatagggtcatggcctaattcaagcttgtttcaatggcttaacttcaaatgggtcagtcatttgaccatccaaggctcagggactcttaacggtcgtggctataactggtggaacttagacacttatcaaactcagacgagaaataagtatatcccaccaatgaaaccaacggcacttcggttttattcaagtaataacgtcacggtccgtgatataagcatcgtgaacagtccattatgtcatttgaagttcgatgattcggatggagtcaaagtcaacaacattacgatctcttcgccggagaatagccctaacaccgacggcatccacctccagaacacacgtaacgtcgagattcaacactccaacatcgcttgtggagatgactgtgtatccattcaaaccggctcctccaatgtacatattcaccacatcaattgtggccctggccatggcattagcataggtggactagggaaagataagagtgtggcatgtgtttctgatatcattgtagaggatatctctatacaaaacactcttgctggtgttcgaatcaagacttggcagggaggattaggggtcgtcaagaacctaacgttttcgaacattcaagtaaaggacgtgaaggtaccaatagtaatcgaccaatattactgcgacaagtccaagtgtaagaatcagacgcgtgcagtgtcgatttccggcgttaaatacaacaacattgtcggtagtttcacggtgcaaccggtacgtattgcatgcagcaacaacgtgccatgcatggacgtggatcttatggatataaggctacgaccttctggag

SEQ ID NO: 137981 - DNA, 1272 bp, Arabidopsis thaliana columbia
caggtgcaacagagcgcttccttgtacttgtaggaccggccttagactcccttgctgctgcttgcccctggccctgcatgcctattgtgacatcgctgtggacccagaaagtgaagcgctggagcgactttcttatcttttcagcctccagaactgtgttccaccacaacagagatgctgttattcagctcctcagaagctgcttcacttgcacccttggtctaacacctacttcccaactctgcagctatgggggagtgggtgcactccttggccatggctttgggtcccgttactctggaggaatttccacagctgccccaggaatcttgtacataaaagtgcacagatcgatcagagatgtcatgttcctgacagaagaaatcctgtctcttctgatgttctctgtgaagagcattgccacgagggagctaccagcagggcaagcagagaaattgaagaaaacgaaagatgggtcgaggtacgggattgggcaggtttcactttctttagcaatgagacgtgtcaagctggcagcttccctgggagcctctctggtgtggatctccggtggcctaaacctggttcaggcactgatcaaggagacattaccgtcttggttcatctcggttcacggagaagaagatgagttgggaggtatggttccgatgctaagaggctatgctttagcctactttgcaatcctgagcagtgcatttgcctggggagtggactcctcatatcctgcatcaaaacgtcggccaagggttctgtggctgcatttggagtttatggtgagtgccttggaagggaagatatcactgggctgtgattgggcgacatggcaagcttacgtgacaggctttgtgagcctgatggtgcaatgcacgccggcttgggtgctagaggtggatgttgaagtaataaagagactaagcaaaagtctgaggcagtggaacgagcaagacttggctctggctctgctttgtgccggcggccttgggacaatgggtgcagctacagaactcattgtggagacttgccatcaacattagcttgacgtctttcaactttcttttctcgactaatctaaactgtgatcatgatcacttttgttcctgagattagctctctcttttttttttttgtttgtctatattgtatattatatttattatttagagcaacatgattcgctatgtgtcacagacactgactggggaaacaacattagattatgaaaggaaatgaagccaagatttttcagatttc

SEQ ID NO: 137982 - DNA, 2147 bp, Arabidopsis thaliana columbia
attgatgaagaagaaaacgaagaagaagactcttcaaatgctcgcgcgaactcacttctgacgaaaaccatacttcctcagtctcattccctttccgacgaactattctcctgaagaagaagacgaaaatggcgaacaagctcaaagtcgacgaactccgtttaaaactcgccgagcgtggactcagtactactggagtcaaagccgttctggtggagaggcttgaagaggctatcgcagaagacactaagaaggaagaatcaaagagcaagaggaaaagaaattcttctaatgatacttatgaatcgaacaaattgattgcaattggcgaatttcgtgggatgattgtgaaggaattgcgtgaggaagctattaagagaggcttagatacaacaggaaccaaaaaggatcttcttgagaggctttgcaatgatgctaataacgtttccaatgcaccagtcaaatccagtaatgggacagatgaagctgaagatgacaacaatggctttgaagaagaaaagaaagaagagaaaatcgtaaccgcgacaaagaagggtgcagcggtgctagatcagtggattcctgatgagataaagagtcagtaccatgttctacaaaggggtgatgatgtttatgatgctatcttaaatcagacaaatgtcagggataataataacaagttctttgtcctacaagtcctagagtcggatagtaaaaagacatacatggtttacactagatggggaagagttggtgtgaaaggacaaagtaagctagatgggccttatgactcatgggatcgtgcgatagagatatttaccaataagttcaatgacaagacaaagaattattggtctgacagaaaggagtttatcccacatcccaagtcctatacatggctcgaaatggattacggaaaagaggaaaatgattcaccggtcaataatgatattccgagttcatcttccgaagttaaacctgaacaatcaaaactagatactcgggttgccaagttcatctctcttatatgtaatgtcagcatgatggcacagcatatgatggaaataggatataacgctaacaaattgccactcggcaagataagcaagtccacaatttcaaagggttatgaagtgctgaagagaatatcggaggtgattgaccggtatgatagaacgaggcttgaggaactgagtggagagttctacacagtgatacctcatgattttggttttaagaaaatgagtcagtttgttatagacactcctcaaaagttgaaacagaaaattgaaatggttgaagcattaggtgaaattgaactcgcaacaaagttgttgtccgtcgacccgggattgcaggatgatcctttatattatcactaccagcaacttaattgtggtttgacgccagtaggaaatgattcagaggagttctctatggttgctaattacatggagaacactcatgcaaagacgcattcgggatatacggttgagattgcccaactatttagagcttcgagagctgttgaagctgatcgattccaacagttttcaagttcgaagaacaggatgctactctggcacggttcacgtctcactaactgggctggtattttatctcaaggtctgcgaatagctcctcctgaagcgcctgtaactggttacatgtttggaaaaggggtttactttgcggatatgttctccaagagtgcgaactattgctatgccaacactggcgctaatgatggcgttctgctcctctgcgaggttgctttgggagacatgaatgaacttctgtattcagattataacgcggataatctacccccgggaaagctaagcacaaaaggtgtggggaaaacagcaccaaacccatcagaggctcaaacactagaagacggtgttgttgttccacttggcaaaccagtggaacgttcatgctccaaggggatgttgttgtacaacgaatatatagtctacaatgtggaacaaatcaagatgcgttatgtgatccaagtcaaattcaactacaagcactaaaacttatgtatattagcttttgaacatcaactaattatccaaaaatcagcgttttattgtatttctttcaaactccttcatctctgattttgcacggttcactcg

SEQ ID NO: 137983 - DNA, 1672 bp, Arabidopsis thaliana columbia
tgttcgtgtaaaaccctagaatgacgatgatagctttgaacagggaggtcgaaactcagtcactgaaaaaactcagtctaaaatctgttagacgagctcgtgaaattttctcccccgtccatggccaatttcctcagcctgatcctgaaagcaaaagaattcggctctgccataagattcaagttgcatttggaggcgtagaacctgcaagtaagcctacacgtattgctgaccataacagtgaaaagacggctccattgaaagcccttgcgcttccaggtccaaaagggtccaaggaacttcgaaaaagcgcaacagagaaagctttagttgttggtccaactttaccgccaagagacttgaacaatactggtaatccaggcaaaagcacggccattcttcctgcacctggatcattttccgaaagaaatctgtcaactgctgctttaatggagagaatgcctagtagatggccccgtccagagtggcatgcaccatggaagaattacagggtgctccagggacacttgggttgggtcagatctgttgcgtttgacccaagcaatgaatggttttgcactggttcagctgatcgtaccatcaagatatgggatgtagcgactggagttctgaaactcacacttactggacatatagggcaagtacgaggcctcgctgtaagcaatagacatacctatatgttttctgctggtgatgacaagcaagtcaaatgctgggaccttgagcagaataaggttattcgatcttatcatggtcatttgcatggcgtttactgtttagctcttcatcctactcttgatgttgtactaaccggagggcgagactctgtctgcagggtatgggatatccgtacgaagatgcaaatttttgtactcccacatgacagcgatgttttttccgttttggcccgcccaactgatccacaagttattacagggtctcatgactcaaccatcaaattttgggacctccgatatggcaaatcgatggcaaccataacgaatcataagaagactgtccgagcaatggctctccatccgaaagagaatgattttgtttctgcatcagctgacaacatcaagaagtttagccttcctaagggagagttttgccacaacatgctttctctacagagagacataattaacgcagtggctgtgaatgaggatggcgtaatggtcactggaggtgataaaggtggcttatggttctgggactggaagagtggtcacaatttccaacgggcagaaactattgtacagcctggttcgctggagagtgaagcaggtatatatgcagcgtgttacgatcagacgggttcaaggctggtaacgtgtgagggagacaaaacaataaagatgtggaaggaagacgaggatgcaactcctgaaactcatcctctcaacttcaaacctcccaaagagatcagacgcttctgaggtttccctctcttacaagttacacctctctaatatcaaactcgaagccagaaaaaaaaaatcactaatctcactctggattaaaaaaaaccttggttatgctatataatttcttcttcaagatagatatggaaaaagaaattatatagcataaccaaggttttttttaatccagagtgagattagtgatttttttacctgcccgggaattc

SEQ ID NO: 137984 - DNA, 553 bp, Arabidopsis thaliana columbia
aatatccatatatagcggggatgggtgtttacgtatttagaaaagagggtttgctaaagcttctaaggtcaagttatcctacatccaatgactttggttctgaaattatccgtgcccgtaggaaactccataatgttcaggcatttttgttcaatgactattgggaggatattggaaccataggatcattctttgatgccaatttagccctcacggaacagcctcctaaattccaattctacgatcaaaaaacacccttcttcacttctccaagattcttgccacctaccaaagttgataaatgcaggatacttgattccatagtttcacatggatgcttcttgagagaatgcagtgtgcagcactcaatcgttggcatacgatcacgtctcgagtctggagtagagcttcaggatacaatgatgatgggagctgatttctaccaaacggaagctgagatcgcgtctcttttggcggaagggaaagttccggtaggggttggccagaacacaagaatcaagaactgtatcatcgatataaacgcgcgcatagg

SEQ ID NO: 137985 - DNA, 873 bp, Arabidopsis thaliana columbia
cgacccacgcgtccgttcaggtttcttttctaacaagcaaaaactccaacctttactttatttttgttttgttttgtaaccctctcagatcttaattctcaaagaagtatgaagagagaaagatctgatttcgaagaatccctcaagaatattgacattgctaaatgtctgatgatactagcacaaacctccatggtcaaacagatcggtttgaaccaacataccgagagccatacaagcaaccaattcgaatgcaaaacatgtaacaagagattttcttcgtttcaagcccttggtggccaccgggcaagccataagaagccaaagctcaccgttgagcagaaagatgtgaaacatcttagcaacgattataaaggaaatcattttcacaagtgttccatatgcagtcagagttttgggaccggacaggctttaggtggtcacatgagacggcataggtcaagcatgacggtcgagccatcgttcatctctccgatgattccatccatgccggttttgaaacgatgcggtagtagtaagaggattttgagtttggatttgaatctgactccgttagagaatgatcttgaatatatctttgggaagacatttgtcccaaaaatagatatgaagttcgttctttagttttttttttctttatctttaagaagacatttgtcccaaaaatgattcatttgtattgtaattcctattcttttaattcttcaaacgttaatgtcaacaaacttcatggtatatgtgtggggtccctactccctatatagtatattcatatgtgcgttcttggttatcatgtacgctagagaaagattttaaactaaattatttagtttccaaaaaaaaaaaaaaaaa

SEQ ID NO: 137986 - DNA, 643 bp, Arabidopsis thaliana columbia
cctagaagtcactaagtcgattcaaaatggttgcgagaagtgaggaaattgtgatagtggaagaagatacgactgcgaaatgtttgatgttgttatcaagagtcggagaatgcggcggcggctgcgggggagatgaacgtgttttccgatgcaagacttgtcttaaagagttctcatcgtttcaagctttgggaggtcatcgtgcaagccacaagaaacttatcaacagtgacaatccatcacttcttggatccttgtccaacaagaaaactaaaacgtctcatccttgtccgatatgtggagtgaagtttccgatgggacaagctcttggtggtcacatgaggagacataggaacgagaaagtctcaggctcgttggttacacgttcttttctaccggagacgacgacggtgacggctttgaagaaatttagtagtgggaagagagtggcttgtttggatttggacttagattcgatggagagtttggtcaattggaagttggagttgggaagaacgatttcttggagttaagtttttgggttgtatacagtttcacatgattttgtaatctttgttgatccaattatcgtaccgatcgatgtgaatattattttgatacaataaaaaaaaaaaaaaaaaaa

SEQ ID NO: 137987 - DNA, 1227 bp, Arabidopsis thaliana columbia
ctagaggatctactagtcatatggattcccgaattcatgtcttatgagaaggagctagccgctgcaaagaaagccgtcactctagctgctcgtctcagccaggaagtgcagaagactcttttgcaatcccaagtttggaaaaaatccgatagaagtccggttactgcagctgattacggctcacaagctgtggttagtcttgtattggagagggagctccaacctgataaactgtcattagtagctgaagaggaaactggagatctgcggaagaatggaagtgaggcgtttctagaagatattgcaaagcttgtgaaagatactctagcctctgaggaatcgtacaccagctctcctctatccacagatgatgtgttaaatgctatagactgcggtaaatcagaaggcggttgcaaaggttcccactgggttcttgatcctatagatggaaccagaggatttgtaagaggagagcaatacgcggtggggttagccttgcttgtggaaggcaaagtggtgcttggtgtcatggcttgcccaaatcttcctttggcttctgcggtttgcgcgactgataattcttcccaggaagatgttggctgtcttttctttgctacaacgggttcagggacttacgtgcaatcgctcaaaggcaattctctgccacaaaaggtgcaagtgagtagcaatgagaatcttgatgaagcgaagttcttagaatcataccacaaaccaattcccatccatggtaccattgccaagaaactcgggattaaagcattacctgtaaggatcgatagccaagctaagtatgcggctttgtcgcgaggagacgcagagatatacttgcgtttcactctcaatggataccgtgagtgtatttgggaccatgcacctggttcaataatcactacagaagctggaggcgtagtgtgtgatgctacagggaaatctctggacttctcgaaaggaaagtatcttgctcacaaaacggggatcatagttaccaccaagaaactcaagccatggatattgaaggcagtcagagaatccatagaagaagagaatctttatttctgaggcacaacagaaactgtacaatacagtatttgtatttgtctgaactagtaattggtgtatattcttagttcatatatcgtatacatcagatatgaaagatatttttgcttagataatgaataatgatactaaggaagattcgatttg

SEQ ID NO: 137988 - DNA, 186 bp, Arabidopsis thaliana columbia
gatcggcatagttttcctgatgatttcatctttgggacagctgcctcggcgtttcagtacgaaggtgcaacaagtgaaggtggcaagtctccaactatatgggatcacttcagcctcacgtatccagaaaggaccaaaatgcataatgcagatgtagcaattgatttttatcatcgttacaaggat

SEQ ID NO: 137989 - DNA, 1797 bp, Arabidopsis thaliana columbia
atgtattccatatcactagtagtaaacatgcaatgcatatcagcttatggatctatactctctcttcctttacgttccaatttattttcggtaagaaaactctctagctttccccacaagtcattttcaggtcagcatggaaagcttgttcgcatgaaggccacccctactcgggcctgtcatgatcaagaaagtaatcgcaagttcaagagactgccgctttcaaaatggggtcaccatttcctctctgctcaagttgatgtctcggaaatgaatgcccttgcccaagagattgagagactaaagccggaagtaggggagatgctcatgttttcttcgaaaagcattgagtcgaccaagaagaggattcttttcatatatatgcttgtgagccttggtgtagcgtttcactttgaagatgagattgagcagagtctagaagagggttttgaaaagatacaggagatgatagccggtgaagatgatttgtacacgatttccatcatgttttgggttttcaggacatacggttacaacatgtctaccgatgttttcaagagattcaaaggggagaatgaaaagtttatggaatctataaccagtgatgtcaagggcatggtgagtttgtatgaagctgctcacttaaggacaacaagagaagatatcttggaggaagcgttaagcttcactacaagaaacttggagtcgttagctagagctggagcaagttctccccatatcttaatgcgtatacgaaatgctctttgcatgcctcaacattacaatgccgaaatgatattcgcgagggaatacatttctttctatgaacaagaagaagatcacaacaagatgctacttagatttgccaagatcaatttcaagtttttgcagctaaattggattcaagaattgaaaactctgaccaaatggtggaagcagcaagaccttgcatctaaactcccaccttacttcagggatagattgatcgaatgctatttatttgcaataatgatatatttcgagccacaattttcacttgggagagtttcactagctaagatcaacacagtcttcacccttgttgatgacacgtgtgatagatacggtaatgtttctgaagttgcagctcttgttcaatgcgtggaaagatgggatccagattgcatggacagtttaccagattatatgaaaaccgtcttcaagttcgcttggaatactttcgaagagtgtgaaaacgcaggcataatggaagagggattgtcttatgacgtgcaaggtgcacttgaagagtgggaacaaggagacgtggtgcctacatttgacgagtacttggagattggaggagtcgaagtaacaatgtatgtaagtatagcatgcagttttcttgggttgggacaaagttctagggaacaagcttataaatggctaaaatccagaccaaaatttgttgaggctcaggctaaaagggctcgtctaatgaatgacatagccggctttgagggtgacatgagcagagggtttgatgttaatgccatcatgtactatatgaagcaatacaaagttaccgaggaggaaactttcacaaggcttcaaaagatggctagggacttggatacaactgtgaacgaggagatattaaagacaacaaagagtgtgccgcggcaaattctaaagcgggccattgattttggaaaaatgatagagttcacttataggtctggcgaagaatacacacatcccgaaggaagatttaaggatcatatcacatctttgtttgttgatcttattcgtctttga

SEQ ID NO: 137990 - DNA, 1182 bp, Arabidopsis thaliana columbia
gcaagtgatgctcggaaggagctgttggagaaggagagagaaaatcagaatctgaaacaagaggttgtgggcttaaaaaaagctcttaaagatgcaaatgaccagtgtgtattactctacagtgaagtgcagagagcgtggaaagtttcatttacattgcaatcagatttaaagtcagagaatattatgcttgtagacaaacatagactagagaaggagcagaattctcagttaaggaatcaaatagctcaatttttacagttggatcaggaacagaagctgcaaatgcaacaacaagattccgccattcaaaatctccaggctaaaattacagacttggaatcacaagtaagtgaagccgttagatctgacacaacaagaacaggagatgccttgcaatctcaggacatattttctccaataccaaaagcggttgagggtacaactgattcttcttctgttaccaagaaacttgaggaagaattgaaaaaacgtgatgcactgattgagaggttgcatgaagaaaacgaaaagttgtttgacagattaacagaaaggtcaatggctgtttcgacccaggtgttgagtccctcattaagagcttcgccaaacattcagcctgccaatgttaacaggggtgaaggatattcggcagaagccgttgctttaccatctacaccaaataagaataacggagcgattacgttagtaaaatctggcactgatttagtaaaaaccactccagctggagaatacttgacagctgcattgaatgactttgaccctgaagaatatgaaggtcttgctgccattgctgacggcgcaaacaagctactaatgctggttttggcagctgtcatcaaggctggtgcttccagagagcatgaaatccttgctgagattagagattctgtcttttcatttattcggaaaatggaaccaagaagagtaatggataccatgcttgtttcccgagttaggatactatacataaggtccttactggcacgatcaccggagcttcagactatcagggtctctcctgtcgagtgctttcttgagaagcctaatactggtagaagtaaaagcactagcaggggtagcagcccaggtagatcccctgttcgatatcttgatacgcagatccatggctttaaagtaaatataaaggcagaaaggagg

SEQ ID NO: 137991 - DNA, 2297 bp, Arabidopsis thaliana columbia
aactcaaagtccttacctttcccttctctaacctctctttctctttctctgtctctttgtgagaaatgggcatggaagctttgagatttcttcatgttatcttcttctttgtgctaattcttcactgtcattgtggaacatctctctctggttcttctgatgtgaagcttcttttaggaaaaatcaagtcttcactacaaggaaacagtgagagcttactgttgtcttcttggaactcctctgttcctgtttgtcaatggagaggtgtaaaatgggtattttcaaatgggtctcctcttcaatgtagtgacctctcttcaccacaatggactaatacctctctgttcaacgactcttctcttcaccttctctctcttcagcttccttctgctaatctcactggttcactccctagagagattggtgagttctctatgcttcaaagtgtgttcctcaacatcaattcattaagtgggtcaatccctcttgagcttggttacacttcttctctctctgatgttgatttgagtggtaatgccttagctggggttttgcctccatcgatttggaacctctgtgataagcttgtctctttcaagattcatggtaataacttgtctggggttttgcctgagcctgctttgccaaattcgacttgtggtaatctccaagttcttgatttgggtggtaataagttctcaggtgagtttcctgagtttataactaggtttaaaggtgtgaagtcacttgatctttcaagtaatgtctttgaaggtcttgttcctgagggtttaggtgtattagagctagaaagtctcaatctttctcataataacttcagtgggatgttgccagattttggtgagtcaaagtttggagcagaatctttcgaagggaacagtcctagcctttgtggtttgcctttgaagccttgtctaggctcctctaggttaagtccaggtgctgttgctggtctggtgattggtttaatgtctggagctgttgttgtggcctcgttgttaatagggtatttgcagaacaagaaaagaaagagtagtatagagagtgaagatgatttggaagaaggtgatgaagaagatgaaatcggtgagaaagaaggcggtgaaggaaagttagttgtgtttcaaggtggtgagaatctgacgttggatgatgttttgaatgctactgggcaagttatggagaagactagctatggtactgtctataaagctaagcttagtgatggagggaatattgcattgaggctattgagagaaggtacttgcaaggatagaagttcttgtctgcctgttataaggcagttaggacgcattcggcatgagaatttggttcccttgagagctttctatcaagggaagagaggagaaaagcttctcatctatgactatcttcccaacataagcttacatgatttgttgcatgaaagtaaacctcgaaagccagctttgaattgggctaggagacacaagattgcacttggaatagcgaggggacttgcttatcttcatactggacaagaagttcctatcatccatggaaatattagatcaaagaacgtgcttgtggacgactttttctttgcaaggctaactgagtttgggcttgacaagataatggtacaggcagtagcagatgagattgtctcgcaggcgaaatccgacgggtacaaagcacctgaactccacaagatgaagaaatgcaatccaaggagtgatgtttacgcctttgggatccttctcttggagatattgatgggtaagaaaccaggaaagagtggaaggaacggtaatgagtttgtggacttgccttctttggttaaagctgcggtgttggaagagacgacaatggaggttttcgacttggaggcaatgaaagggattaggagcccaatggaagaaggtttggttcatgcattgaagctagcgatgggatgttgtgctcctgttacaacagttagacccagcatggaagaggttgtgaagcagttggaagagaacagaccgaggaatagatccgcattgtacagcccaaccgaaaccaggagcgacgccgaaactccattttgagtctaattgtgttcttctacaagctttttttttcttctgtaattcctcactttagttggctatatttgtttccttggcaagaaaccattctgatttgattttatctatatttgttgatgagaaatggtgtaagtgtaacagaagcagttcaaagtattaatattgatagaagaatatatgatacatgatgataaaaaaaaaaaaaaa

SEQ ID NO: 137992 - DNA, 1260 bp, Arabidopsis thaliana columbia
gcaagacttttgcggactactccttaatttctcgagatttaggtccaaagccaaaggtcacatttttaatctctcttcatcacattgtaacttgtatctttgttggataactaggtggcttagtctcatgtttgtcatcaatataagctctttatcttacgtaatgaagttggaaaacacacatttttaaatgtcaaacttattacacttgaaaacagattctgataggagccaacgagaaggaaaatttcagagaagggaaagatcttgttggtagaaacagagtccaaggagccttccagggtctgtatgagctcagtcatgaccatggcagaaaagatgatgttcttgtggctaatcttggtcaacctgaaagcattagatcccggctccggtcttatagtagatcttttgctcatcatgacttgcttaagcagggtttgtctcaaactattcttcctactactcagaacaaaagtgacaaccaaaccgaagagaagaagtctgattctgaagaagagagagaggtcagttctgatgctgctgagaaggagagtaattcgcttccatctatacttagactcagtcggtctagacctcaaccggtttcagagaaacatgatgacatagttgatgagtctgattctgcatctgcttgtggagtcttactagaagatggtactacttgcactacaactccagtcaaagdaagaaagagatgcacagagcataaagggaagagactttctcgtgtttcccccgggatccacataccgtgtgaagttcctaccgtaagagaatgtgaagaaactgagaatatatgtggagtgattttacctgacatgatacgttgcagaagtaaacctgtttcaaggagaaaacgatgcgaggatcacaagggaatgagagttaacgccttcttttttctgctgaacccaacagaacgtgataaagccgtcaatgaggacaaatccaaacctgagacaagtacaggcatgaaccaagagggttcgggtcttttatgtgaagctacaacaaagaatggattgccttgtacaagaagtgctcctgaaggcagcaaaagatgttggcagcacaaagataaaacattgaaccacggatcatctgaaaatgttcagtcagcaactgcaagtcaagtaatttgtggctttaagctgtacaatggatcagtatgcgagaaatctccagtgaaaggaaggaagagatgtgaggagcacaaggggatgagaatcacatctt

SEQ ID NO: 137993 - DNA, 3180 bp, Arabidopsis thaliana columbia
ggacaatccgaaattaggtaaccatgttcattgaatttatcgtttcaacacattcgaatcactgagtcctacgtttcagtttaattccctgatgcacattttgaattcggtttgcgtattggtcttcgagttttccgtcggcggccatggacgcgttcaaggaggagatagaaatcgggagctcggtggagtctttaatggagctattggattcgcagaaggtgctttttcatagccagatcgatcagctccaagatgtcgtcgttgcgcaatgcaaacttaccggcgttaatccccttgcgcaagaaatggctgctggtgctttgtccattaaaattggaaagcggccaagagacttgttgaatcctaaggctgttaagtatctacaagcagttttcgcaattaaagatgctattagtaagagggaatctcgggagataagtgctttatttggcatcacagtcgcccaggttcgagaattttttgttactcaaaagacaagagtgaggaaacaggtgaggctttcaagggagaaagtagttatgtccaatacgcatgctttacaagatgatggtgttccggaaaataacaatgccacaaatcatgttgaacccgttcccttgaactctatacatccggaggcatgttctataagctggggtgaaggtgaaacagtggcacttattccacctgaagatattccacctgacatcagcgattcagacaaatactttgttgagaatatattttctctgctgcgtaaagaggaaacattttcaggccaggtgaaactaatggagtggatcatgcagatacaagatgcttctgtgctgatctggtttttatcaaaaggaggggttttgatacttacaacatggttaagtcaagctgctagtgaagagcaaacaagtgtcttacttcttatcctgaaggttctttgtcatttacctctccacaaagcatctcctgaaaatatgtctgccatattacaaagcgttaatggacttcgtttctataggatatcagacatatcaaacagggcaaaaggtttgttatcaaggtggaccaagttatttgcgaaaatccaagctatgaagaaacaaaatcgtaacagttcgcaaattgattcgcagagtcaattgcttctgaaacagagtattgctgaaatcatgggtgatagtagcaatcctgaagatattcttagtctctcaaatggaaagtcagagaatgtcaggaggattgaatcgtcacagggtccaaaactgttgcttacttctgcagatgattcgaccaagaaacacatgcttggttcaaatccatcgtataacaaagaacgcaggaaagtacagatggtggaacaaccaggccaaaaagctgctggaaagagtccgcagacagtaagaataggaacttcaggtcgaagccgcccaatgtctgctgatgatattcagaaagcaaagatgcgtgccctttatatgcagagcaagaacagtaaaaaggatcctttaccaagtgccattggtgattcgaaaatcgttgctcctgagaagcccttggctcttcattcagccaaggattctccacctattcagaacaatgaagctaagactgaagacacacctgtactctcgactgttcagcccgtcaatggattttcaactattcagcccgtcaatggaccttcagctgttcagcccgtcaatggacctttggctgttcagcctgtcaatggaccttcggctcttcagcccgtcaatggaccttcggccgtaattgtcccggtacaagctgatgaaattaaaaaaccttcaacacctcctaaaagcatttctagtaaggtgggagttatgatgaaaatgagttcacaaactattctcaagaattgcaagagaaaacagattgattggcatgtaccaccaggaatggaacttgacgaactctggagagtagccgctggtggtaatagcaaggaggctgatgttcagagaaacagaaaccggcgagaaagagaaacaacatatcagtctcttcaaactataccgttgaaccctaaagaaccatgggatagggaaatggactatgatgacagtttgagccctgaaattccatctcaacagccaccagaagaaagtttaacggaaccacaggattcacttgatgaacgaagaattgctgctggtgctgccacaacctcttcatctctaagcagtcctgaacctgatctcgagttattagctgcgttacttaagaacccagatcttgtttatgcactaacttcgggaaaacccagtaatttagccggccaagatatggtaaaactgcttgatgtgattaagactggtgcaccaaactcaagcagtagctcaaataaacaggttgaagaaagggtcgaagtttcccttccatctcccactccatcaactaatcctggaatgagtggatggggacaagaagggattcggaatccattttcaaggcaaaaccaagttggtactgcagttgctagatcgggtacacagcttcgtgttggttcaatgcaatggcatcaaacaaatgaacaatcaatcccacgacatgctccatcagcatacagtaactcgatcacattggctcacacagaaagagaacagcaacaatatatgcaaccaaaacttcatcacaatttacattttcaacaacaacaacaacaaccaatctcaacaacctcgtatgcagttagggaaccagtaggacaaatgggaacaggtacatcgagttcatggaggagtcagcagagtcagaacagttactactcacatcaagaaaacgagattgcatcggcttcacaagttacttcataccaagggaatagccagtacatgagtagcaatccaggatatgaatcatggagtcctgataatagcccaagtaggaaccagcttaacatgaggggacaacaacaacaagcatcaaggaaacatgattcttctactcatccatattggaaccaaaacaaaagatggcgttaaaccatatataagactatggttctttggtccttcaatatttgcttgtcatggttgaattagcattatactctgttcagacacagattttcatttttaactcacaacagattcatcagagataataaactaaaagaaagaatgaatggataaagttattactgtctcaaaaaaa

SEQ ID NO: 137994 - DNA, 1651 bp, Arabidopsis thaliana columbia
tttgtgagatcccggaaaaggtcatagtagcttcaaaagttagcatcaaaagtagaactaaacactaacctccacaagccaatcaaccagaattccccgcatggactgggtgacatccttctgtattctctccaagacctcttgggagatcagcttctacaggtgatccatttaacacaagttttcatatgattagttcctattgtataaaggagtggtctttaatgtcttataaatcttttttgcaaatggttacagctgagaaaagtgctgttattggtagttcaactgtaccggatatcccaaaatttgtagacatcgattcagatgacaaggatcctttactgtgctgcctctatgcccctgaaatccactacaatttgcgtgtttcagaggtaattcctaggctttgatagtctctaaagaaacttggtgagccaaaggactgaaagttttattgcttgtgattctgtgtcacttctcttctggcagcttaaacgcagaccacttccggactttatggagagaatacagaaggatgtcacccagtccatgcggggaattcgggttactgagcaacaagaacatggatcaggtgtcatggagttacttcaagttgtagatattgattccaacgtcgaagatccacagtgttgcagcttgtatgctgctgatatatatgacaacatacatgttgcagagcttcaacaacgacccttggctaattatatggagcttgtgcagcgagatatcgacccagacatgagaaagattctgattgactggcttgtagaagtttctgacgactacaagctggttccagatacgctttaccttacagtgaatcttatcgaccggtttctgtccaacagttacattgaaaggcaaagactccagctccttggtgtctcttgcatgcttatagcttcaaaatatgaagagctttccgcaccaggggtggaggagttttgcttcattacggccaacacatacacaagaccagaagtgctgagcatggagattcaaattctaaattttgtgcactttagattatcggttcctaccaccacaacatttctgaggcggttcattcaaccagctcaagcttcgtacaaggtgcctttcattgaactggagtatttagcaaactatctcgccgaattgacactggtggaatatagtttcctaaggttcctgccatcactaattgctgcttcagctgttttcctagcccgatggacactcgaccaaactgaccatccttggaaccctactctgcaacactacaccagatatgaggtagctgagctgaagaacacagttctcgccatggaggacttgcagctcaaacaccagtggctgtactctcgctgccacccgtgagaaatacaaccaaccaaagtttaagagcgtggcaaagctgacatctcccaaacgagtcagatcactattctcaagatgacaccaagcaacatcgaaaacagagcccaagtcaggtgatcaaaatacctattttcagacattggatgttatgtcgtctctttgccagttttgtctgtctgtaattctgtagctattgtgtggcgccttaattgtaggccattacttgtcacaccacttagctttaaataaatgttatggaatttttcta

SEQ ID NO: 137995 - DNA, 454 bp, Arabidopsis thaliana columbia
caagattttttaaccaaaaaaatggcgaattgtatcagaagaaatgctcttttcttcttgactcttctctttttattgtcagtctccaacctcgttcaggctgctcgtggtggtggcaaactcaaaccccaacagtgcaactcaaagtgtagctaccgttgttcagcaacatcacacaagaagccatgcatgttcttttgcctcaagtgttgcaaaaaatgtctttgtgttcctcctggcactttcggcaacaaacaaacttgtccatgttacaacaactggaagactaaagaaggccgtccaaaatgtccttaaaacttctttttagatatatttgataatattcatctagttttggattatcaaacacttactactctgttttaatctgtttctacaagttggcgatttgtctctacactttttttgtgtcttttgctcttaactgttgtgt

SEQ ID NO: 137996 - DNA, 2228 bp, Arabidopsis thaliana columbia
  unsure (1)..(2228): unsure at all n locations
aaagaagagtcaagtcactaaaataactttcacagtctttgattcgaagatctttgtcgccgagagatatccactctgatttgagttctgattattttggattttaggactcacagattacagatttcttatcaatcattctctgttattgttatagaactattctctggaggaggttgaggtctgaaatcatggaacaacttggttagagtgtggaattttagctgatttgatctttgattcatctgtgatcataataactatgaagatggacaaaaagactatagtttggtttagaagagacctaaggattgaggataatcctgcattagcagcagctgctcacgaaggatctgtttttcctgtcttcatttggtgtcctgaagaagaaggacagttttatcctggaagagcttcaagatggtggatgaaacaatcacttgctcacttatctcaatccttgaaggctcttggatctgacctcactttaatccaaacccacaacacgatttcagcgatcttggattgtatccgcgttaccggtcctacaaaagtcgtctttaaccacctctatgatcctgtttcgttagttcgggaccataccgtaaaggagaagctggtggaacgtgggatctctgtgcaaagctacaatggagatctattgtatgaaccgtgggagatatactgcgaaaagggcaaaccttttacgagtttcaattcttactggaagaaatgcttagatatgtcgattgaatccgttatgcttcctcctccttggcggttgatgccaataactgcagcggctgaagcgatttgggcgtgttcgattgaagaactagggctggagaatgaggccgagaaaccgagcaatgcgttgttaactagagcttggtctccaggatggagcaatgctgataagttactaaatgagttcatcgagaagcagttgatagattatgcaaagaacagcaagaaagttgttgggaattctacttcactactttctccgtatctccatttcggggaaataagcgtcagacacgttttccagtgtgcccggatgaaacaaattatatgggcaagagataagaacagtgaaggagaagaaagtgcagatctttttcttaggggaatcggtttaagagagtattctcggtatatatgtttcaacttcccgtttactcacgagcaatcgttgttgagtcatcttcggtttttcccttgggatgctgatgttgataagttcaaggcctggagacaaggcaggaccggttatccgttggtggatgccggaatgagagagctttgggctaccggatggatgcataacagaataagagtgattgtttcaagctttgctgtgaagtttcttctccttccatggaaatggggaatgaagtatttctgggatacactttnggatgctgatttggaatgtgacatccttggctggcagtatatctctgggagtatccccgatggccacgagcttgatcgcttggacaatcccgcgttacaaggcgccaaatatgacccagaaggtgagtacataaggcaatggcttcccgagcttgcgagattgccaactgaatggatccatcatccatgggacgctcctttaaccgtactcaaagcttctggtgtggaactcggaacaaactatgcgaaacccattgtagacatcgacacagctcgtgagctactagctaaagctatttcaagaacccgtgaagcacagatcatgatcggagcagcacctgatgagattgtagcagatagcttcgaggccttaggggctaataccattaaagaacctggtctttgcccatctgtgtcttctaatgaccaacaagtaccttcggttgttcgttacaacgggtcaaagagagtgaaacctgaggaagaagaagagagagacatgaagaaatctaggggattcgatgaaagggagttgttttcgactgctgaatcttcttcttcttcgagtgtgtttttcgtttcgcagtcttgctcgttggcatcagaagggaagaatctggaaggtattcaagattcatctgatcagattactacaagtttgggaaaaaatggttgcaaatgatcaaaataatgtgctgttataaagcctaacatgtagatgtgtgaatgtgtcttttaactctttgtttccttttggttatactcaaaaggatatgattgcataaacatattatgctgatattatttca

SEQ ID NO: 137997 - DNA, 1070 bp, Arabidopsis thaliana columbia
accacgcgtccgttcactaaagaaaaaaaaactaagaagtaataatgagtttgtggggagggatgggaggaggatggggaatggtagaagaaggttggagaaaaggaccttggactgctgaagaagaccgccttttgatcgattatgtgcagcttcacggtgaagggcgatggaactctgttgcgaggctccgggggttgaagagaaatgggaaaagctgcaggttaagatgggttaactacctaagaccagacctcaagagaggacaaatcactcctcatgaagaaaccattatccttgagttacatgctaagtggggcaataggtggtccacgattgcacgtagtttaccgggaagaacagacaacgaaatcaagaactattggcgaacccatttcaagaagaagacgaagctccaactaacagtgcggagaagacaaagaaccgaatcttgaagaggcaacaatttcagcagcaaagacaaatggagttgcagcaagaacaacagttgcttcaattcaatcaaatcgacatgaaaagatcatgtcgttactagatgacgacaacaacatggtgataacaccttcagcagtagcagtagtggcgaaagtggagcattatatgtacctcatcagatcacacattcaacaacaacttctggttgtgaaccaaatagtaacgggtattaccggtggttccggtaacaatacctgaggctaatgtgaatgaagataacgctatttgggacggtttatggaatctggattttgaaggacaaggaagttttggtggcgctgcttgtgccccaaggaagcactatttccagaacatggtcattcccttctgttaacttgacctttaaaatatcttatctgccggataatgaaagagaaaaacttgaccgacaacttaggtcgagtttgagtttagtttgtggtttcatttatttgagatttttggttttaacatatataattttggtatgaattgtgtgtgatgtaagaagctcatttggttttatcataaaagagtgatgtagtagaatttaagaaagtaaaaaaaaaaaaaaa

SEQ ID NO: 137998 - DNA, 609 bp, Arabidopsis thaliana columbia
atagatccttcggattcgttacttttcttgagagagaagacgcttctgctgctatggataatatggacggtgctgagctttatggtcgtgttctcactgttaattatgctctccctgagaaaattaagggtggtgaacagggttgggctgctcatccactttgggcagatgcagacacatggtttgagaggcagcaacaggagaaggagattctgaagatgcaagctgagaacaaggctgccatggagactgctgaggagcttcacaggaagaaattggcggaagatcgacaaggagagatggaggaagatacagataccaaaaatgatcctatggccagagcagaggctgatgctctaagtcacggcgatgcctaatgaaagtaagcgttaccggattctcttatgcaccttgtcctgtaggataacaagtatgttatcgcctgagtgtgtaacactgtcactatcacctcatagagtttttgaggttagattgtttcttgaggttgattaccatgttattgctatagttaatagatttggtagtttggtgaaacttgcttgcttagaaaagtaagagtcatgtatctaaaccggatgctcttcaaaa

SEQ ID NO: 137999 - DNA, 1044 bp, Arabidopsis thaliana columbia
ggaaaatggcagctaggttattgttccgtcgaagttctcaaatcctccgatcaattcaacgaaatcctcaaatctcatcgtcattcgaatcaccaccttgcccgatttttcactcattgaccaccgcctcaccagatccatcgcgattatcatccttaaccttcctccgatctctctccatcgctcgtcgcggtccaacacgtcctaagaaaatcgatatcggagccaaagcgcgtcagatgcagaatcgccgtttatggacctacgcgctaaccttcagctgcatcgccggattcgtagttatcgtccttaaccaatttcaggatcagcttgtcttctacctaacgccatcagacgctatggagaaattcgcagagaatccaacaaagaacaaattcagactcggtggtttggttctagaaggtagcgttgcgcagccggcggcgtcacaggagatggagtttgtgatcactgatctgatcactgatattttggttaggtataaaggatctttgccggatctgtttagggaaggtcattcagttgtggttgaaggattcattaagccgtatacagatgaagtaaggaaggaagtttctacaaaacctatttcgaagaaagctaggaacctcgattgtttcttctcggcgactgaagttttggctaagcatgatgagaagtatatgccacaggaagttgcggcggcgattgagaagaataagaaaattattgaagcggcggcgactgaacaagctgctgaagttgcggcttcttagattggtataaacttcattctttttaagttaatcaaaattttccccaagttcgagcttttggtgagtattgttcatcttataaggttatatttgattatagtttctggaaaagagtaggaagattggaatgttatattcctggaaaacagagatttgatttttgagtctatttgagaattaagtggagaaatgtgatacactatacaatagctttgtttgattccacaaagctataagctaatctactttcttgttgtgttgatcaaat

SEQ ID NO: 138000 - DNA, 1337 bp, Arabidopsis thaliana columbia
agaatggcttagcatctctgcaaaaccaacacaaagctatattctcttaaaaatcagttcaacaaaagaagaacctgaacacagttggcccaccaccaccactaccacaatctcctcctccaccaccaccacctagtcaccggaaaccaattcatgccctagattaagaaccagaatccttttgagacaagatctatatatacactctacacatttacttatacactttatctagatatagatgtgtgtgtgtataaaggttctttttcattacttgttggtttagtgataaaaaggaggagagttttcagttgggttttggtttcttggtgagagaagagagaaaaagagaggatgggaagagggaaagttgagctgaagaggatagagaacaagatcaatagacaagttacttttgcaaagagaagaaatggtttgctcaagaaggcttatgagctttctgtcctttgtgatgctgagattgctcttctcattttctctaaccgtggcaagctctacgaattctgcagcagccctagtggtatggcgaggacggttgataagtatagaaaacatagttatgcaacaatggatccaaatcaatcagctaaagacttgcaggataagtatcaagactacttgaagcttaaatcaagagttgagatccttcaacattcacaaaggcatttgctaggtgaagagctatccgagatggatgtgaatgagcttgagcatctcgaacgccaagtagatgcatcactaagacaaataagatctaccaaggctcggtctatgcttgatcaactatctgacctcaaaactaaggaggaaatgttattggaaaccaatagagatcttaggagaaagttggaggacagtgatgcagcacttactcaatcgttttggggaagttctgctgcagaacaacaacaacaacatcaacaacagcaacaaggcatgagctcttatcaatcaaaccctccaattcaggaagcaggtttcttcaagcctctacaaggcaatgtagcattgcaaatgagcagtcattacaatcacaatcctgcaaatgcaaccaactctgcaacaacatcacagaatgttaatggattcttccctggatggatggtctgaaaacaatacatatctatatatgtacacatatgtgtgttttatagatcaaagatcattgcttgtgtcatttgatttttgccagagaaacatagttcattattacaaaactttgttatataatcaaggctctaatgtcaaacaccagattattacttttttgttctttgttttttggctctcttgaaatataaaatattgttttggga

SEQ ID NO: 138001 - DNA, 833 bp, Arabidopsis thaliana columbia
ggctggaggttcgtttgttctacgtccgtatcgctccttgcgtcgttgagaacgtccctgacttcctcaccctccgtcaccctcgtcgcgaaaccggtgcttctcttgaggttaacggcgttcgcgttccttcgtcgcagacggcgtcgcttaaactccgccgtgacagagtcgaccgggaatcgtcggaggtgacttacgtgagcactgagaccgttcgcgttaccggatgcgttgatttcgaggtttatgataacgaggatatggtcttgtgtgggaacctagatagaatcgaaggtgcttggaacaatggaactgtgagtgatcccaagactggatggggcatggattgttacattgctatgggaaacggacacgtgtcaggtccttctgcctctgtgtttttccagccaaagtttggagtctcgtctccgtccgtcgaggtttatatagctggttgttgtggtggtgtcccggtgatattgaccaagacgattcaggcgagtccgaggaggaaggtggctaggcacgtgacactcgacgctatccctgaggatgaggaagttggcaaagagcaagacattggtaccattggtgatgaattggcccgtcaaagcaaagtacagatgatggaatcagaagttgatgaatacgatgactcagatatgaaaatggcacagagatattaccctgaaggaatgtacgttgatgaggatggtcagctctcatggttcaatgcaggagtcagagtcggagttgggataggccttgggatgtgtcttggtgtaggcattggagttggattactcatgcgttcgtatcaagcaacaact

SEQ ID NO: 138002 - DNA, 463 bp, Arabidopsis thaliana columbia
ggaaaagtaaaaaagagagatctgagaaatgggaaatgagacgaagaccaacggtggtcctgcaagtatggccggaggcggaggattcagagctaaaatggaacattacgtttacagtggtgaaaagaagcacgtcttggtcgggatcggaatcgtcaccatcatcttcggagttccttggtatttgatgactcaagggtcaaagcatcaatctcaccaagattacatggacaaggccgataaagctcgaaaagcacgcctctcatcgtcttcatcagctaacaagtagtctgtctgaaggattgagtcatttgcacactgttatctcgtactcattttcccacacaagttaaaacttagtcaaaatctgagtcttttttgtgatttagattcaaaatcattctcattttcatgcaccatgtttggttatccgttttttaataaaaagatcaaagattctatc

SEQ ID NO: 138003 - DNA, 1139 bp, Arabidopsis thaliana columbia
cacaacatcatacccaccaacatatataatcttgatcatagagagataaacagaggccgctatcaagaacaagactaagaacaagacttcactaggagtacaagtatgggaagagcaccgtgttgtgacaaagcaaacgtgaagaaagggccttggtctcctgaggaagatgcaaaactcaaatcttacattgaaaatagtggcaccggaggcaattggatcgctttgcctcaaaagattggtttaaagagatgtggaaagagttgcaggctgaggtggcttaactatcttagaccaaacatcaaacatggtggcttctctgaggaagaagaaaacatcatttgtagcctttaccttacaattggtagcaggtggtctataatcgctgctcaattgccgggacgaacagacaacgatataaaaaactattggaacacgaggctcaagaagaaactcattaacaaacaacgcaaggagcttcaagaagcttgtatggagcagcaagagatgatggtgatgatgaagagacaacaccaacaacaacaaatccaaacttcttttatgatgagacaagaccaaacaatgttcacatggccactacatcatcataatgttcaagttccagctcttttcagaatcaaaccaactcgttttgcgaccaagaagatgttaagccagtgctcatcaagaacatggtcaagatcgaagatcaagaactggagaaaacaaacctcatcatcatcaagattcaatgacaacgcttttgatcatctctctttctctcaactcttgttagatcctaatcataaccacttaggatcaggagagggtttctccatgaactctatcttgagcgccaacacaaactctccattgcttaacacaagtaatgataatcagtggttcgggaatttccaggccgaaaccgtaaacttgttctcaggagcctccacaagtacttcggcagatcaaagcactataagttgggaagacataagctctcttgtttattctgattcaaagcaatttttttaattataataatatattattcttaagatgaaacgtacatcattattattaattgggggtacgtaacgtatatatggaataacgatctagtttgtttaaatttaaaa

SEQ ID NO: 138004 - DNA, 3037 bp, Arabidopsis thaliana columbia
aaattgatctcatcttcaatcaaattcatcatcttcgatactcgtttcttctctctttggtttcatacagatcccaaatttctagggctcctagtcctttgatttcttcgactggaatcgcaattccccactacgtcaagctggacagacaccgaagggatcgccatgagagtggcggctacgaggattcctaccataaccaccgagcccatcccagaggtccatctcgtccctcagattcacgcttcgaagaggatgatgatgattttcgccgccaccgtcgtcgtcgtggaagcagccctagcaattatcgaattggaattgggggcggaggaggaggtaatggtggtcgacgctgggaagatgacactcctaaggattttgatggtcccggagatggaggtttccggcagatgaatggtcccccagatagagtagattttaagcctatgggtcctcaccatggtggaagttttcggcctatggggtttgcctacgatgatggttttcgtccaatgggtcctaacggtggtgtgggaggagaagggacacggtcaattgttggagctcggtataactatcccgcgaagtatcctccttcagagagtccagacaggaggagatttatcggtaaagcaatggagtctgattattctgtaagaccgactacaccgccggtccagcagcctctttccggtcagaaaagagggtatcctatctcagaccatggcagctttactggaactgatgtctctgatcgtagcagtacagtcaagctttttgttggatctgtaccaaggacagctacagaagaagaaatccgtccctatttcgaacagcatggaaatgttctggaggttgctctgatcaaggacaagagaactggacagcagcaaggctgttgttttgtaaaatatgcaacttcgaaagatgcggatagagccatcagagcactgcacaatcagatcactcttcctgggggaactggtcctgttcaagttcgatatgctgacggggagagagaacgcataggcaccctagagtttaagctttttgttggttcactaaacaagcaagccactgaaaaagaagttgaggagatctttttacaatttggtcatgtggaagatgtctatctcatgcgggatgaatatagacagagtcgtggatgtgggtttgttaaatattcaagcaaagagacggcaatggcagctatcgatggtctcaacggaacttataccatgagaggttgcaatcagccattgattgttcggtttgctgagccaaagaggcctaaacctggcgagtcaagggacatggcacctcctgttggacttggttcagggcctcgttttcaagcttcaggaccaaggcctacctctaactttggtgactctagtggggatgtaagccacacaaatccttggcgtccagctacttcacgaaacgtaggcccacctagtaacactgggatccgtggtgccggtagtgacttttcccctaaaccaggtcaagcaacattgccttcaaatcagggtggcccgttaggtggttatggtgttcctccccttaaccctctcccagtccctggagtttcatcttctgccacattgcaacagcaaaatcgggcagctggccagcatataacaccattaaaaaaacctcttcacagtccacagggtctccctctccccctccgtccgcaaactaatttccctggggcccaggcacccttgcagaatccttatgcttatagcagccagttgcctacctctcagctgccaccacagcaaaacatcagtcgtgcaactgctcctcaaactcctttgaacattaatctacggccaacaactgtgtcttctgcaactgttcaatttccccctcgttcccagcagcaaccgctacaaaagatgcaacatcctccttctgagctagctcagctcttgtcgcagcaaactcagagtctacaagcaacattccaatcgtctcagcaagcaatttctcagctgcagcagcaggtgcagtctatgcagcaaccaaaccaaaatttaccactctcacagaatggccgagctggtaaacaacagtgggctggatctgcaattccaagagtggctagcaccactggttcgacaccagtgagctatgtgcaaacagctgcacctgcagtaagtcagagcgtaggttctgtcaaatgtacctggaccgagcatacctcgcctgatggatttaaatattattacaatggtctaacgggtgaaagcaagtgggaaaaacctgaggaaatgatagtgttcgaacgagagcaacagaaacagcaacaacatcaagagaagccaactatacagcagtcccagacccaattacagccgttgcagcaacaaccacaacaagttcagcagcaatatcagggccagcaattacagcagccgttttattcttcactgtatccaactccaggggccagccataatactcagtatccatcattgccagttggtcaaaatagccagtttcctatgtcaggaattggtcagaatgctcaggattatgctcggacacatatacccgtgggagctgcttcaatgaatgatatatcaagaactcaacagagccgtcaatctccccaagaactcatgtggaagaataaagcttgaggtacatgagacgaggagctaaactatctcagtagctagatagaaatttctggaactaattagtcaaggagaggaaaagcagcaatggtagtgtccttagtctctgatttttttagttaaccccttcagttataatagataggcgatcgtagaccatctgcattctatcttttctctaatcagatatctcctcctttttcattttaagagctgccaaacaatggcctgttgtaacataactagcgcaagttatgtctcatgttgtgttactagtagtaacttagctgggtaaaccaaactttgatccagattaggagtcatatataattatataaatagaatatgtacattcatagataaaaaaaaaaaaaaaaaaaaaa

SEQ ID NO: 138005 - DNA, 2880 bp, Arabidopsis thaliana columbia
aaattgatctcatcttcaatcaaattcatcatcttcgatactcgtttcttctctctttggtttcatacagatcccaaatttctagggctcctagtcctttgatttcttcgactggaatcgcaattccccactacgtcaagctggacagacaccgaagggatcgccatgagagtggcggctacgaggattcctaccataaccaccgagcccatcccagaggtccatctcgtccctcagattcacgcttcgaagaggatgatgatgattttcgccgccaccgtcgtcgtcgtggaagcagccctagcaattatcgaattggaattgggggcggaggaggaggtaatggtggtcgacgctgggaagatgacactcctaaggattttgatggtcccggagatggaggtttccggcagatgaatggtcccccagatagagtagattttaagcctatgggtcctcaccatggtggaagttttcggcctatggggtttgcctacgatgatggttttcgtccaatgggtcctaacggtggtgtgggaggagaagggacacggtcaattgttggagctcggtataactatcccgcgaagtatcctccttcagagagtccagacaggaggagatttatcggtaaagcaatggagtctgattattctgtaagaccgactacaccgccggtccagcagcctctttccggtcagaaaagagggtatcctatctcagaccatggcagctttactggaactgatgtctctgatcgtagcagtacagtcaagctttttgttggatctgtaccaaggacagctacagaagaagaaatccgtccctatttcgaacagcatggaaatgttctggaggttgctctgatcaaggacaagagaactggacagcagcaaggctgttgttttgtaaaatatgcaacttcgaaagatgcggatagagccatcagagcactgcacaatcagatcactcttcctgggggaactggtcctgttcaagttcgatatgctgacggggagagagaacgcataggcaccctagagtttaagctttttgttggttcactaaacaagcaagccactgaaaaagaagttgaggagatctttttacaatttggtcatgtggaagatgtctatctcatgcgggatgaatatagacagagtcgtggatgtgggtttgttaaatattcaagcaaagagacggcaatggcagctatcgatggtctcaacggaacttataccatgagaggttgcaatcagccattgattgttcggtttgctgagccaaagaggcctaaacctggcgagtcaagggacatggcacctcctgttggacttggttcagggcctcgttttcaagcttcaggaccaaggcctacctctaactttggtgactctagtggggatgtaagccacacaaatccttggcgtccagctacttcacgaaacgtaggcccacctagtaacactgggatccgtggtgccggtagtgacttttcccctaaaccaggtcaagcaacattgccttcaaatcagggtggcccgttaggtggttatggtgttcctccccttaaccctctcccagtccctggagtttcatcttctgccacattgcaacagcaaaatcgggcagctggccagcatataacaccattaaaaaaacctcttcacagtccacagggtctccctctccccctccgtccgcaaactaatttccctggggcccaggcacccttgcagaatccttatgcttatagcagccagttgcctacctctcagctgccaccacagcaaaacatcagtcgtgcaactgctcctcaaactcctttgaacattaatctacggccaacaactgtgtcttctgcaactgttcaatttccccctcgttcccagcagcaaccgctacaaaagatgcaacatcctccttctgagctagctcagctcttgtcgcagcaaactcagagtctacaagcaacattccaatcgtctcagcaagcaatttctcagctgcagtaagtcagagcgtaggttctgtcaaatgtacctggaccgagcatacctcgcctgatggatttaaatattattacaatggtctaacgggtgaaagcaagtgggaaaaacctgaggaaatgatagtgttcgaacgagagcaacagaaacagcaacaacatcaagagaagccaactatacagcagtcccagacccaattacagccgttgcagcaacaaccacaacaagttcagcagcaatatcagggccagcaattacagcagccgttttattcttcactgtatccaactccaggggccagccataatactcagtatccatcattgccagttggtcaaaatagccagtttcctatgtcaggaattggtcagaatgctcaggattatgctcggacacatatacccgtgggagctgcttcaatgaatgatatatcaagaactcaacagagccgtcaatctccccaagaactcatgtggaagaataaagcttgaggtacatgagacgaggagctaaactatctcagtagctagatagaaatttctggaactaattagtcaaggagaggaaaagcagcaatggtagtgtccttagtctctgatttttttagttaaccccttcagttataatagataggcgatcgtagaccatctgcattctatcttttctctaatcagatatctcctcctttttcattttaagagctgccaaacaatggcctgttgtaacataactagcgcaagttatgtctcatgttgtgttactagtagtaacttagctgggtaaaccaaactttgatccagattaggagtcatatataattatataaatagaatatgtacattcatagataaaaaaaaaaaaaaaaaaaaaa

SEQ ID NO: 138006 - DNA, 1826 bp, Arabidopsis thaliana columbia
ctttgatcactcactcactagtaatggaggctcttcaattttccagcgtgaatagagttccttgtactctgagctgtaccggaaataggagaattaaggctgccttcagctctgcgttcaccggtggcaccatcaattcagcttctctgtcctcctctaggaatctctccacgcgagagatatggagttgggtgaaatcgaagactgttgttggccatggaagatacagaagaagccaagtgagagccgagatgtttggtcagttgactggtggcctcgaggctgcttggagcaaactcaaaggcgaagaggtcttgactaaggacaatattgctgagccaatgcgggatatcagaagagctctcctggaagcagatgtgagtctcccagttgttagaaggtttgttcagtctgttagtgaccaagccgttggaatgggtgtcattcgtggagtcaaaccagatcagcaattggtcaagattgtacatgatgagctagtgaaattgatgggtggagaagtatctgagttacagtttgctaaatcaggtcctacagtaatattgttggctgggctccaaggagttggaaagacaacggtttgtgctaaactagcttgttacctaaagaagcagggaaaatcttgcatgcttattgctggagatgtataccgacctgctgctatcgatcaacttgtcattttaggtgaacaggttggtgtgccggtttatacagcagggactgatgtaaaacctgcagatatagctaagcaaggtctaaaagaagctaaaaagaacaatgttgatgtagttattatggatactgcagggaggcttcagatagataaaggcatgatggacgaattaaaagacgtgaagaaatttctgaatccaacagaagtgttactagttgttgatgccatgactggacaagaagctgcagcactggtgacgacattcaatgtagagataggaattacaggagccattttgacaaagctagatggtgattcaagaggtggtgctgctttgagtgtcaaggaggtatcaggaaaaccgattaaactggtaggacgtggagagcgaatggaggatcttgaacccttttatccagatcgaatggctggacgaattctaggaatgggagatgtgctttcatttgtagagaaggcaacagaagttatgcgtcaagaagatgcagaagatctgcagaagaagataatgagtgcaaagttcgacttcaacgattttctaaagcagactcgtgctgtagcgaaaatgggttcgatgacacgagttcttggaatgattcccggaatggggaaagtgagtccagcacaaatccgagaagcggaaaagaatcttttagtcatggaagcaatgattgaagtgatgacacccgaggaaagagagagaccagagttactagcagaatctccagagagaagaaaaagaatcgctaaagattcaggaaagacagaacaacaggtgagcgcacttgtagcacaaatcttccaaatgagagtgaaaatgaagaacttgatgggagtgatggaaggaggatcaattccagcattaagcggtctcgaggacgcattgaaagcagaacaaaaggctccacctggaactgcaaggaggaagagaaaggcagactcaaggaagaaatttgtagagtcagcatcaagcaagcctggtcctcgtggcttcggctctggtaactaaaactatttcagcccaatttggttaatttctaaacggattatttttttgtataagttaatgaatgagacagaaaccttacaagttaattaccaatttgttgacaaaact

SEQ ID NO: 138007 - DNA, 1633 bp, Arabidopsis thaliana columbia
gataagaaaatgtctatctttctttgtttcctcttacttcttccactctctttaatcttcttgaaaaagctcttaccgtcgaaagggaagcttcctccgggacctaagggtcttccgatcatcggtaacttgcaccagtttggaagatttcttcacaaatctcttcacaaaatctcccaagaatatggaccggtgatgcttctccatttcggggtggtccctgtgataattgtctcttccaaagaaggagctgaggaagtgctcaagactcacgatcttgagacttgtagccgacctaagacggtggggagcgggttgtttacttacaactttaaagatattggttttgctccgtatggtgagaattggcgagagatgaggaaaattgcggtttccgagctctttagccagaagaagctcaaatctttcaggtatattagagaggacgagagccaattgttggtccggaaggtatcaaaatctgctcttgagacaccaacttcatcagttaatttgaggaaggtcatttttaccttcgcggcaagtatcatttgtagactttcttttggacaaaatttttgcgattttgtcgatatggagacagtggaagagttggtgcttgaatcggagaccaacctcggctccctggcgtttgctgacttcttacctgcagggtggatcatagatcggatctccggtcagcattccacggtgatgaaagccttttccaaactcaccaatttctttgaacttgtgattgatgatcatttgaagagtgggaaaatcgaagatcactcagacatcatcagtgtcatgttggatatgatcaacaaacccaccgaagttggttcttataaagtcaccgatgatcatctcaaaggacttatgtcggatgtgtttttggctggagtgaacgcgggttccatcacaatgatatggacgatgacagagttaagtagacatccgagagtgatgagaaaacttcaagaagagattcgagcagcgctcggacccaacaaagagaaaatcacagaagaagacctcgagaaagttgagtacttgaagatggtgatcgaggaagcattcagattacacccaccggctcctctcttactcccaagactaacaatgtccgacatcaatattcaaggctacagcattccaaagaacaccatgatccaaatcaacacgtacacaattggacgtgaccccaaaaactggacaaaacccgacgagttcatccccgagaggtttgtcgataaccctatcgaatacaagggtcaacattttgagctattgccgtttggagccggacgtagggtctgtcccgggatggccacggggatcaccatcgtcgagcttgggcttcttagccttctttacttcttcgattggagtttgcccaatggaatgaccactaaagatattgacatggaagaagacggagcttttgtcatcgccaagaaagtctctcttgagctcgtaccaactcttcatcgctggtgaagcatgcaactataactatgttaaataatgacaagaattctatatttatgtccactttactaccggtttggattttgctttgttcatgtaatccgcatgtttcatgttatctttcaagttctgtttt

SEQ ID NO: 138008 - DNA, 3677 bp, Arabidopsis thaliana columbia
aattattcactcaaattcacaaagggtttcgactttgctccgaggaagaagataatatgaaaagagctttttagggtttatcattctccttgactttgcaaaacgtgaaataagcttcttccttggaggactaatcaagacagaaatctgttcctctaaaaacgatcgccgttctagttcactcaaatgatggtgaaagttacaaagcttgtggcttcacgtccaattgtggtcttttgcgtcctggcattcctggtggttgttttcgagtgcatttggatctcaaattggcgaacaacaacggagaacctagtcaaagaggtcgcttcatttaccgaagatctccggacaagtctagtttcggagattgaaaacatcggaaaatttacatatgctaagacaaacttatctacgatcggtttagcgagagttatagattcttatatcaccaacaacgacactggttttacagagattcaaacacagatcgcaccattgttgtttgtagcttattcaacgatccttcaagtctcacaagtttcgtacatcagtagggacggtctcatgttttcttacattgcagaatcaaacacaagtgtcgctgtttttgccaattcctcgtcgaattcaagtcgtggagactacacttggtacactcaaaccgtggatcagttaactggtcgtcttaacgggaactcaacgaaatctcagtcgttagatgtaacccatacagattggttccaagcagcacagagtaataactacactacagcctttgtaggaacgagcttgggaggagaagataacgagactctaatacagagcgtggttagcttgtacagcaagaaaggtcttgtttctttagggtttccggttaagactttaaccgaagttttgaacagtttgaatctacacggcgaagagctttacatgtggacaaaggacgggacggtgcttgttcgtgaaggttcactgaatgattctttcttcatctccaatggctcgatttgcttcggtagagaatcgaactccctctggtctcaatgcatccctgaaaattgcagttccagtggctacgaggtggagatcaaaagattaagataccaagctttttgctctgttattgaagtttcgggcgttcctctgagatacacactcatgtttcccaacaaaggaggagcaacacgcatcaagcaccaagcggaaaaggcaaaatatcaacttattgtggttatgatatttcttggcttcggttggcctgtatggtttgtgtggtttatgatgcaagcaacaaggagagagatgcatatgcgtgcaacgctgataaaccaaatggaagcgacacaacaagctgagagaaagagcatgaacaagagtcaagcatttgcaaatgctagccacgatattagaggtgcccttgcagggatgaaaggtctgattgatatatgtcgtgatggagttaaacctggctccgacgtagacaccactctcaaccaagtgaatgtttgcgccaaggatttggttgctctgctcaactctgttttggacatgagcaaaatcgaaagcgggaagatgcagttagtggaagaagatttcaacttgtcgaaacttcttgaagacgtcatcgatttttaccatcccgttgcgatgaagaaaggggttgatgtagttttggatccgcacgatggctcggttttcaaattctcgaatgtacgaggggatagtggcagactgaagcagattctgaacaatcttgttagcaatgctgtcaagttcaccgtcgacgggcacattgcggtaagagcttgggctcagaggccaggttccaatagctctgtggtccttgcatcatatcctaaaggtgtgtccaagtttgtaaagagtatgttctgcaagaataaagaagagtcatcaacctacgagacagaaatatcgaattccataagaaacaatgcaaacacgatggagtttgtgtttgaagtggatgatactggtaaagggatacctatggagatgcgtaagtcggtatttgaaaactatgttcaagtaagagaaacagctcaaggacaccaaggaactggtttagggctcgggattgtgcagtctttggtaagattaatgggaggggagataagaatcaccgacaaggccatgggagagaaaggaacatgtttccaattcaatgttttattgacaacattagagtctcctccagtgagtgacatgaaagtgagacaggagatcgaagcaggaggcgattatgtatccacgccaaacctcgggctgactataaacacttcacttggaggtagcatgaatatacgtaacctgagtcctagattcaacaactgtctcagctcaagtccaaagcaagaaggttctagagtggttcttctattgaaaaatgaagaacgcagaagagttacagagaaatacataaagaatcttgggattaaagttacagtggtggagaaatgggagcatttgagttatgctttggagagactttttggattttcacctcagagttccatgggaagagcagagtgtagtttgtcatgtccgagctcaagggagttacctttcattggcatggacggtattgattcaagaagccaacttcctaaaaggagaagcatcagtttctctgcagttgtccttttggtgattgatgcaaaaactggaccattttttgagctgtgcgatattgtcaaacagtttcgtagaggcttgccccatggaatatcctgtaaagttgtttggcttaacgaatcgagcactcgtgtaagtgagagaggggacattagttgttcgagacctttgcacggatcgcgtcttatggaagtcttgaagatgttgcctgaatttggaggaactgtgctaaaagaaccacctactgagctgcaaagggaatcattgctgagacattcttttgttgcagagagatcaccaaaacataaagtccaagaagaggggccaagctcaatgtttaacaaaaaattaggtaagaggataatggcatcaacagattcagagagtgagactagggtcaagtcagtgcgtaccggtcgaaagcctattgggaacccagaggacgagcaagagacttccaagccgagtgacgatgaattcttaagaggaaagagagttcttgtggtcgatgataactttatatcacgtaaagttgcaacaggaaagctgaagaagatgggagtctcagaggtcgaacaatgcgacagtgggaaagaagctttgagattagtcactgaagggcttacacaaagagaagaacaaggttcagtagataaacttccgtttgactacatattcatggactgccaaatgccagaaatggatggctatgaagcaactagagagattaggaaagtggagaaaagttatggggtgcgtacaccaattatagctgtatctggtcatgatcctggttcagaggaagcaagagaaaccattcaagctggaatggacgccttcttagataaaagcttgaatcaacttgcaaacgtcattagagaaatcgaaagcaaacgtcactagtattgtataagtagacagcacgcagctttgtgctactaccattagtgttttagacaatacttttttagtatgacgatgtcatagcagttttcttctaagtttatttaaagtccatttcagat

SEQ ID NO: 138009 - DNA, 1123 bp, Arabidopsis thaliana columbia
acggtacccctagaaacaatggaagtgatgagcttgactgccccatcttcaccgagacaattatctggctgcttcttaagcgcaccaacaagccctagaagattcaatgagttttatagagagtttggagaggccgcaacaaagaaacttctccgaccgtcttacggttccttttgattgggaagagactccaggcacgcctaggaagatcaccaacgatgatgatgatgatattgatttcgctttcgagattggtgggaaactcgaaacgacgtcgctttttgctgaagagctttttgatggaggcaaaatcaaacccttgaagcctcctccgtatttacaattagaccatcatcatcagcctcagattttatctccaaggtctccaagatcacctattgctcatggtaagaacattatccgcaaagctttttccccaagaaagaaaccggataacgtggatccttttgaggtcgccatggataaagctaggaatggcttaggagaggaaagagggagagggagacgtcaaaactctggtcgtagagttgctcgatcactttcgccttttcgggtttcggcttatccatgggaagaacaagaacaagaacaagaacaagaacagagagatgtacaagaacagaggaaagggaccttgtcttctattccatctacatcttcatcagcttgcgtgtcttgcaagtcatcttcctcaaagaaatggagactaaaggactttcttctgttccgaagtgcatccgaaggaagagcaaggcacaacaaagattcggtaaagacgtttacaagtttgtttaggaagcaagaagacaccaagaactcgagttcacgaggaagagggtcatcatcggtctccgcccatgaattccattacatgtctaagaaagcagaaacgaaagatttgaagaagaagactttcttgccttacatgcaaataggacgattcgccttctaaattagttcttccaaagccagaagtaaaaagatttatttgtttgttcaattatgttctatgaaggaccaagtctcttcttctctcttgtgtggttgatttgtgctcagaagtttgtagaaattaacatcttttgtacacattagttttgct

SEQ ID NO: 138010 - DNA, 1318 bp, Arabidopsis thaliana columbia
agctccaccgcggtggcggccgctctagaactagtggatcccccgggctgcaggaattcgatccaaaaaaaaaggaaccgtactgtttattctctgtggcgttgaatctgcgatggcgggaatcagattgctaccggaagaacctgagacgactcctcaacaacaagccagagccgccgccgcggtgacaacgacaacaacggatagtttggcttccgatgacgatcgatctatcgcggcggattcgtggtcgatcaaaagtgagtatggaagcactctcgatgacgatcaacgtcacgccgatgccgccgaggctctctcgtccgctaacttccgtgtctcttccgattacagttctgataaggaagagccagatgctgatggaggaggtcaatcaatgcttggtcttcaaagctattgggatgcagcgtattccgatgagcttactaatttcagagagcatggtcatgctggtgaagtttggtttggagatgatgtgatggagattgttacttcttggactaaagacttatgcgttgagatttctcaaagaaacatgtctgtttctgaaaacgatgttacgacagaggtgaatgatcaggctgataagtatttgtctagttggaatgtgcttgatcttggtactggaaatggcttactccttcatcaacttgctaaggaagggttctctgatttaaccggaactgattacagtgacggggctgtagaactcgctcaacatctttcccaacgtgatggctttccaaatatccgtttcatggttgatgatatccttgacacaaaattggaacagcagttcaagctggtaatggacaaaggaactttagatgctattggtttgcatcctgatggccctgtcaaaagagtcatgtactgggattcagtgtccaagctggttgctcctggtggaatattggtgatcacatcgtgtaaccacacaaaggacgaactggtggaagaagtagagaatttcaacatcagaaaatccaacttatgtagaggagatggaaatgacgcaaacaatgtactttccctctggctctgaagctgcaagcagaattgatcaacctccgtttggagtatctcagccatgttaggacatacccgacgttcatgttcagtgggtctgtaggatcgcgtgtgccaacggttgcttttctgcggaagtgagaacaaacctgttggatttgttttaacataatgcccagaccttttctcttctttttatgttggtgtcaagcaagactgttgatgtgcttttgggagttcttaataacctctaaagttcttttaagag

SEQ ID NO: 138011 - DNA, 889 bp, Arabidopsis thaliana columbia
atcgagaaaatgatcgtactttctgttggttccgcttcttcatctccgatcgtcgtcgtcttttccgtcgcgcttcttctgttctacttctctgaaacttctctaggagctccttgtcccatcaatggcttgccaatcgtgaggaatattagtgaccttcctcaggataactatggaagaccaggtctttcccacatgactgttgctggctccgtattgcatggaatgaaagaggttgaaatatggcttcagacatttgctccaggttcagagacaccaattcacaggcactcctgtgaagaggtttttgttgtcctaaagggcagtggtactctgtatctcgctgaaacacatggaaatttccctgggaaaccaatcgaatttccaatctttgccaacagtacaattcatattccgatcaatgatgctcatcaggtcaaaaacaccggtcatgaggacctgcaggtgttggttatcatatctcggccgcctattaaaatcttcatctacgaagactggtttatgccacacactgctgcaaggctgaagttcccttactattgggatgagcaatgcattcaagaatcacaaaaagacgagctttaaagcaaagtccgaggctaaaagcaagcacaacctttagatagtaaaatcatagttgaggttttgtgacactacgtagatactggtaaattggcaaggattttacatgaatgttgttgttaccagaaagtaaataaatgttcaatctttgatgttcttaagtaagtgagtcctattggtcatgaaaatatgtaagtgtgcacatcttgattgcatttgcgataaatttatagagtttcactcactaaaaaaaaaaaaaaaaaaaaaaaaaaaaaaaaaaaaaaaa

SEQ ID NO: 138012 - DNA, 1722 bp, Arabidopsis thaliana columbia
cagattctatggatatgtataacaacaatatagggatgttccggagtttagtttgtagctcggcgcctccatttacagagggacatatgtgttctgattcgcatacggctttgtgcgatgatctgagtagtgatgaggaaatggaaatagaggagcttgagaagaagatctggagagacaagcagcgtttaaagcggctcaaggaaatggcgaagaacggtctaggaacaagattgttgttgaagcagcaacatgatgattttccagagcactctagtaagagaaccatgtacaaggcacaagatgggatcttgaagtacatgtcgaagacaatggagcgatataaagctcaaggttttgtttatgggattgtgttagagaatgggaaaacggtagcgggatcttctgataatctccgtgaatggtggaaagacaaagtgaggtttgataggaacggcccagctgctataatcaagcaccaaagggatatcaatctttctgatggaagtgattcagggtctgaggttggggattctaccgcacagaagttgcttgagcttcaagatactactcttggagctctgttatcggctctgtttcctcactgcaaccctcctcagaggcggtttccgttggagaaaggcgtgacaccgccatggtggccaacggggaaagaagattggtgggatcaactgtctttacccgttgattttcgaggtgttccgccaccttacaagaagcctcatgatctcaagaagctgtggaaaattggtgttttgattggtgtaatcagacatatggcttctgacattagcaacatacccaatctcgtgagacggtctagaagtttgcaggagaaaatgacgtcaagagaaggcgctttatggctcgctgctctttaccgagaaaaggctattgttgatcaaatagccatgtctagagaaaacaacaacacttctaactttcttgttcctgcaaccggtggagacccagatgttttgtttcctgaatctacagactatgatgttgaactgattggtggcactcatcggaccaatcagcagtatcctgaatttgaaaacaactacaactgtgtttacaagagaaagtttgaagaagattttgggatgccaatgcatccaacactcctaacatgtgagaacagtctctgtccttatagccaaccacatatgggatttcttgacaggaacttaagagagaatcaccaaatgacttgtccttataaagtcacttccttctaccaaccaactaaaccctatggtatgacgggtttaatggttccttgtccggattataacgggatgcagcagcaggttcagagctttcaagaccagtttaatcatcccaacgatctctacagaccaaaagctccacaaagaggcaacgatgacttggttgaggatttgaatccttctccttcgacgctgaatcagaatcttggtttagtcttacctactgacttcaatggaggtgaggaaacagtaggaacagagaacaatctgcataatcaagggcaagagttgcccacatcttggattcagtaaagaaagcttcagagttttctttttatgttttctagtctttatagctttgtctcttgcttattctctcattaaacacagtttttgatctctccatttcatagcccatgtagcaatggagaagattaggtttcataataagttaataaccaaattcaaa

SEQ ID NO: 138013 - DNA, 2228 bp, Arabidopsis thaliana columbia
agagagagagagagagagagagagagagaggatctacctatagaggtggaaactgcagaatcagctccgaaaaacctcgagttctatattgatgaagaagactgtcatttgattccagttgaattctataaaccgagtgaagaagttcgagagatttccgacattaacggagattttatcctcgatttcggcgttgagcatgatttcacggcggcggcggagacggaggaaatctccgactttgcttcgccgggtgaatcgaaaccggaggatgcagagacgaatctagttgcttcggaaatggaaaacgacgacgaagaaacagacgcagaggtttctataggtacagagattcctgatcatgagcaaatcggagatattccttctcaccagctcattcctcaccacgatgacgatgatcatgaggaggaaacgttggagttcaaaacagtaacgattgaaaccaagatgccagtcttaaacatcaacgaagagcggattttagaagctcaaggctcgatggaaagctcgcatagtagtctacataacgctatgtttcacttagagcaaagagtatctgttgatggtattgaatgtcctgaaggagtactcactgttgataagttgaagtttgagttacaagaagagagaaaagcacttcacgcgttatacgaggagctggaggtagagaggaatgcgtctgctgttgctgccagtgaaacaatggcgatgatcaataggttgcatgaggagaaagctgcgatgcagatggaagcgttgcagtatcagagaatgatggaggagcaagctgagtttgatcaagaagctttgcagttgttgaatgagcttatggtgaatagagagaaggagaatgctgagcttgagaaggagctagaggtgtatagaaagagaatggaggagtatgaagctaaagagaaaatggggatgttgaggaggagattgagagattcctctgttgattcgtatagaaataatggcgattctgatgagaatagcaatggagagttacagtttaagaacgtgaaggggttacggattggaaatatagagagaatgagatggagaatacgccggtggatgttgtacttcgtcttgatgagtgtttagatgattatgatggagagaggctttcgattcttgggagattgaagtttcttgaagagaaactcacagatcttaataacgaagaggacgacgaggaggaggctaaaacgtttgagagtaatggtagcatcaatggaaatgagcatattcatggcaaagaaacaaacgggaagcacagagttatcaagtcaaagagattacttcccctgtttgatgcggtcgatggagagatggaaaacgggttaagtaacggaaaccatcacgaaaacgggtttgatgattcggagaagggtgagaatgtgacgatagaagaagaagtggatgagctttacgagaggttagaagctctagaggcagatagagagttcttaagacattgtgttggttcattgaaaaaaggagacaaaggtgtacatctcctccatgagattctgcaacatcttcgtgatctaaggaatatcgatcttactcgcgtcagagaaaacggagacatgagtttatgagtttgattttgagttttgggtttgagtccactctttgcatagtgacacaaagaacaagaaaaatcatacaggtatggaagtgacatgttgcttgagaggcaaggaacaacgacaaggtttcagatgaagaagaaaacgttctcagaataaaagtattttaagtatatactctgaggaaaagtgtcagatcagaatgttcgtctttcttcgttcattttcattattataagttttgttttttatattgaagatttatttagagagagggaagtgtcagtataatttcacttttatattttatatttgggagttgtctttatgagtggtggtaatagaaaaaggtagaatgatgagtgtatgtgtgtgtagtgtagtgtagttgagtactagtacttagtaaggtgagctattggtataaaaaaatgccaaaggcaagctgtcaaatttcttggatgtttgtggcagagctggaatgatttcagcaaagatgccaacaccaatgtacatatgcctttttggactttttagaacatttagaaaatttctgggcgactttagaattattgcttttaggtggggtaaaaaaaaaaaaaaaaaaaa

SEQ ID NO: 138014 - DNA, 1016 bp, Arabidopsis thaliana columbia
gtcgacccacgcgtccgcccacgcgtccgatccaagatcctccaactcacagaaaggcagattcaagaacagtagtgaaggagagatctggtaaaatggcgagagagaagataaggataaagaagattgataacataacagcgagacaagttactttctcaaagagaagaagaggaatcttcaagaaagccgatgaactttcagttctttgcgatgctgatgttgctctcatcatcttctctgccaccggaaagctcttcgagttctccagctcaagaatgagagacatattgggaaggtatagtcttcatgcaagtaacatcaacaaattgatggatccaccttctactcatctccggcttgagaattgtaacctctccagactaagtaaggaagtcgaagacaaaaccaagcagctacggaaactgagaggagaggatcttgatggattgaacttagaagagttgcagcggctggagaaactacttgaatccggacttagccgtgtgtctgaaaagaagggcgagtgtgtgatgagccaaattttctcacttgagaaacggggatcggaattggtggatgagaataagagactgagggataaactagagacgttggaaagggcaaaactgacgacgcttaaagaggctttggagacagagtcggtgaccacaaatgtgtcaagctacgacagtggaactccccttgaggatgactccgacacttccctgaagcttgggcttccatcttgggaatgaatctgagagagagaaagatccagcagagttgacttcgatggaagcccacaaatattaagtctaccttttccctttcttttctttgaataagtgttgaaaaagaattgagatgggaaggatgaattctcattgcattgcagagaagcaagtttcagatattgtacgtgttattgggtctttataactatttttctccccaaaaaaaaaaaaaaaaaaaaaaaaaaaaaaaaaaaaaaaaaaaaaaaaaagggcggccgc

SEQ ID NO: 138015 - DNA, 1739 bp, Arabidopsis thaliana columbia
ggcaaatctctccgtttcttatttttcttctcctttcccgtttattttctgtgtcccttgtttggttccagagaaaccgcgagaaacaaaaaaatcagagaagaagaagagaaaacaaaaaaaaatctgtcttcttcccgtcgtttaacgccttcagtttcgaaagttgtatctgcatttttctcagggtctatatttctctgaggaattggattcttatagaagttaaacctgcagagcttcttctatccaatagtcctctgagaatcgtcgatatatataaagtttgctgatatagttgttatggacatgaaatctggtcactcgtctcctgtaatgactgattctccaccaataagcaactcaagattaaccattcgtcagaatagacttccttactcatcagcagcagccacggctatctcacagaacaacaatctcttactaaccgttccaagaaagaaaactgggatccttgatgatgttaagtctaatggttggcttgatgcgatgaaatcttcttctcctcctccaacaatacttaacaaagataacttaagcaatgatgctacggatatgacttatcgcgaatggatgcagctcaagtatccatcagctcttacctcttttgagaaaatcatgagttttgcaaaaggcaaaagaatagcattgtttcttgattatgacgggacactttcgcctattgttgaggaacctgattgtgcatacatgtcaagtgctatgcgtagtgcagtgcaaaatgttgccaagtatttcccgaccgcgatcattagtggaagaagccgggataaggtgtatgagtttgttaatttgagtgaactttattacgccggaagccatgggatggacatcatgagtcccgcaggagaatctttaaaccatgaacatagccgtactgtatcagtttacgaacaggggaaagatgtaaatctattccagcctgctagcgagtttctcccgatgatcgataaggtgctttgttctcttatagagagtacaaaagatatcaaaggggtaaaagtagaagacaacaagttctgcatctctgtgcattaccgcaatgtagaagaaaagaactggacattggttgcacagtgtgtagatgatgtcatcagaacatatccaaaactacggctaacacatggccggaaggtgttagagatccgtcctgtgattgactgggacaaagggaaagctgtgacatttctacttgaatcactcggcctaaacaactgtgaggatgttcttccaatctatgttggggatgatcgaacagacgaagatgcatttaaggtattacgagatggaccaaaccacggttatggtatattagtctctgctgtgcctaaagacagcaatgccttttactcgcttcgtgacccgtctgaggtgatggagtttctgaagtcattggtgacatggaagagatcaatgggttaaagtagaagaagaagatgtagaagaaaagtggttaacgttaatatatattacaaatatgcaagttagaggtttattgttacttttcggctttatacaaaaactaccgttgagatttaacttaacggtatcggaggagagatcacatgatggcttaaaacatgccggagatactttttccgaccaatctctttatcttctacaactgtaaattcctccatctccggattaattcaagacatttttgtttaaaaaaaaaaaaaaaaaaaaaaaaaaaaaaa

SEQ ID NO: 138016 - DNA, 1257 bp, Arabidopsis thaliana columbia
cacaaaccacagtctctctttctctctctatctatcttctctttctctctctatctctatcactgaaacccaaagagatccaccatttgttcttttttccttcacacagagaactgttttcttccacacttcctttttactaggcagtgttaaccaattgagagagaaaaatgatggttgatgaaaatgtggaaaccaaggcctctactttagtggcaagtgttgatcatgggtttggatccgggtcgggtcatgatcatcatgggttatcggcgtctgtgcctcttcttggtgttaactggaagaagagaaggatgcctagacagagacgatcttcttcttcctttaaccttctctctttccctcctcctatgcctcctatttcccacgtgccaactcctctccccgcacgtaaaattgacccaagaaagctaagattcctcttccaaaaggaactcaagaacagtgacgtcagctctctccgacgtatgatactcccgaagaaagccgcggaggctcacttgccggcacttgaatgcaaggaagggattcctataagaatggaagatttggacggttttcacgtttggaccttcaagtataggtactggccaaacaacaatagcagaatgtacgtgctagaaaacacaggcgattttgtgaatgctcatggtctgcagctaggtgacttcatcatggtttaccaagatctctactcaaacaattacgttatacaagcaagaaaagcatcggaagaagaagaagtagacgtaatcaatcttgaagaagacgacgtttacacaaacttaacaaggatcgaaaacactgtggttaacgatcttctcctccaagattttaatcatcacaacaacaacaacaacaacaacagcaacagcaacagcaacaaatgttcttactattatccagtcatagatgatgtcaccacaaacacagagtcttttgtctacgacacgacggctcttacctccaacgatactcctctcgattttttgggtggacatacgacgactactaataattattactccaagttcggaacattcgatggtttgggctccgttgagaatatctctctcgatgacttctactagataatcaatcgatgggctcatggtattcttgatggtgatcagctatttaatatccttataatatatataagaattaaatgcaatttgcatatatattatcaagtgttgtaatataacattacagtttaaaaaaaaaaaaaaaaaa

SEQ ID NO: 138017 - DNA, 1709 bp, Arabidopsis thaliana columbia
aaacttgaattttctcaaaggaacttgatacgtttaaaatacatgggttctactgatgagcccagaagttccatgcatggagttaccggtagagaacagagctatgctttctcggtagatggtagtgagccgaccaacacaaagaaaaagtacaatctgccggtggacgcggaggataaggcaacggttttcaagctcttctccttcgccaaacctcacatgagaacgttccacctctcgtggatctctttctccacatgttttgtttcgacgttcgcagctgcaccacttatcccgatcatcagggagaatcttaacctcaccaaacatgacattggaaacgctggagttgcctccgtctcggggagtatcttctctaggctcgtgatgggagccgtgtgtgatcttttgggtcctcgttacggttgtgccttccttgtgatgttgtctgccccaacggtgttctccatgagcttcgtgagtgacgcagcaggcttcataacggtgaggttcatgattggtttttgcctggcgacgtttgtgtcttgtcaatactggatgagcactatgttcaacagtcagatcatcggtctggtgaacgggacagcagccggatggggaaacatgggtggcggcataacgcagttgctcatgcccattgtgtatgaaatcattaggcgctgcggatcaacagcgttcacggcctggaggatcgccttctttgtccccggttggttgcacatcatcatgggaatcttggtgctcacgctaggtcaagatctgccaggtggaaacagagctgccatggagaaagcgggagaagttgccaaagacaaattcggaaagattctatggtacgccgttacaaattacaggacttggattttcgttcttctgtatggatattccatgggagttgagttaagcacagacaatgttatcgccgagtacttctttgacaggtttcacttgaagcttcacacagcggggattatagcagcatgtttcggaatggccaatttctttgctcgtccagcaggaggctgggcatctgacattgcagccaagcgcttcggaatgcgagggaggttgtggactttgtggatcattcagacgtccggtggtctcttttgtgtgtggctcggacgtgccaacaccctcgtcactgccgttgtatctatggtcctcttctctttaggagcacaagccgcttgcggagccacctttgctatcgtgccctttgtctcccggcgagctctaggcattatctcgggtttaaccggggctggagggaactttgggtcaggactcacacagctcgtctttttctcgacttcgcgcttcacaactgaagaagggctaacgtggatgggagtgatgatagttgcttgcacgttgcctgttaccttaatccactttcctcagtggggaagcatgttcttccctccttccaacgattcggtcgacgctacggagcactattatgttggcgaatatagtaaggaggagcagcagattggcatgcatttaaaaagcaaactgtttgctgatggagccaagaccgagggaggcagcagcgtccacaaagggaacgcaaccaacaatgcttgatcatgtgtcattgatatcaagaaattaataatttcacttatgtgaaatggacataaactgttggaaaataaagaaccatttctttcatcatttgcttt

SEQ ID NO: 138018 - DNA, 1215 bp, Arabidopsis thaliana columbia
cagtgtgagtaatttagcaagaacataaatatcttaaactcatgtctgaatgtggatgtttttcggcaacaactatgttgagaatttgtgtagtattgataatatgtttgcatatgtgttgtgcctcgagtgattgtacaagtcacgatgatcctgtgtctcaagacgaagcagagaaagcgacgaagctaaagcttggttcgatagctttacttcttgtagccggaggagtcggcgtgagtctaccgttgatcgggaaaaggattccggcgttacaaccggaaaatgatatcttcttcatggtgaaagcttttgctgcaggagtgatcctctgcacaggtttcgttcatatcttaccagacgcgttcgagagattgagctctccatgtcttgaggacactacagctgggaagttcccgtttgctggttttgtagcgatgctgtcggcgatggggactcttatgatcgacacattcgcgacagggtattacaagaggcaacattttagcaataaccatgggagcaagcaagtgaacgtagtagtagatgaagaagagcatgcgggtcatgttcacattcacacgcacgctagtcacggacacacacatggttcgaccgagttgatcagaagacgtatagtgtcgcaggtgcttgagattgggatagttgtgcattcggttattatagggatatcacttggagcttcacagagcatagacaccataaagccactcatggctgcactatctttccatcagttctttgaaggtcttggcctcggtggatgcatctccctggcggatatgaagtcgaaatcgacagtgctaatggcgacatttttctcggtgacggcgccacttgggataggaatagggttggggatgtcaagtggtttaggctacaggaaagagagcaaagaggcaataatggtggaaggaatgttgaatgctgcatctgctgggatactcatatacatgtcacttgttgatcttcttgctactgattttatgaatccaagattgcaatccaatctctggcttcacttggctgcttatctctctctcgtcctaggcgcaggttccatgtctctcctcgccatctgggcctgattcttgatctgaaactaacaaacaaacaaaccaaatgccgctcttttttctcaaatctgtaatggtgtttctaatctcagaatcaatactattctatcttgaacac

SEQ ID NO: 138019 - DNA, 1249 bp, Arabidopsis thaliana columbia
gtgtgagtaatttagaaaagccctaattttaaaataagatagagattatgaagactaagagcgtgaaactcttattcttcttcttctccgtctccctccttctcatcgccgtcgtcaacgccgccgaaggccattcacatggtggaccaaaatgtgaatgctcacacgaagacgaccatgaaaacaaagccggagctcggaaatacaagatcgccgcaattcctacagttctaatagccggcataatcggagttcttttccctttgttaggcaaagtcttcccttctttgcgtccagaaacatgtttcttcttcgtcacgaaagctttcgcagccggagttatcttggctaccggatttatgcatgtcttgcctgaggcttacgagatgcttaactctccatgtttgatatctgaagcatgggaatttccgttcaccggatttattgcgatgattgctgcgatcttgacgttatccgttgatacatttgccacttcgagtttctataaatcgcattgcaaagcgtctaagagggtcagtgatggagaaaccggcgagtcctccgttgactccgagaaggtccaaattctccggactagagttattgcacaggtattggagttgggaataatagtacactcagtggtaataggaatatcactaggagcttcacagagcccagatgctgcaaaagctctgtttattgccttaatgtttcatcaatgcttcgaaggtctaggccttggtggttgtattgctcagggaaaattcaagtgtttgtcagtaacaatcatgtcgacgttcttcgcaataacgacaccgataggaatcgttgtgggaatgggaatagcaaattcttacgatgagtcttcaccaacggctctgatcgttcaaggagttttgaacgctgcatccgcaggcattctcatctacatgtctttggttgaccttctcgcagcagatttcacgcaccctaaaatgcaatccaatactgggcttcaaattatggcccatattgctctccttcttggtgctggcctcatgtctctattggctaaatgggcttgatagctccttaattcaactcttctagtttttgctcatggccttttatggccaccttgaattcgaattatttgttcttattttcccccttttcaatgatatttttgagatctctattttctgaaacacttcatgtactcatgtttaacattattacaattgtgtatattgatcagtgtccaagg

SEQ ID NO: 138020 - DNA, 2531 bp, Arabidopsis thaliana columbia
atggcagcgagaaacaaacaaaagaaacgcgctgagccagagtcagatctgtgcttcgctggcaaaccaatgtctgttgtggagtcgacgattcgatggcctcatcgctaccaatccaagaaaacaaagctccaagctccgaccaaaaaacctgcaaataagggtggcaaaaaagaagatgaagagattataaagcaagctaaatgccactttgacaaagctttggttgatggagttctcatcaacctaaacgacgatgtctatgtcacgggtctaccagggaagctgaaattcattgcaaaagttatcgagctctttgaagctgatgatggggtcccgtattgtcgctttcgatggtattatcggcctgaagatactttaatcgaaagattttcccaccttgtgcaaccaaagagagtgtttctctcaaatgatgagaatgacaatcctctcacctgcatctggtcaaaagtcaacatcgctaaagtcccattacctaagattacctccagaatcgagcaaagggttattcctccttgtgattactactacgatatgaagtacgaagttccttatctcaactttataagtgcagatgatggtagtgatgcctcatcaagtctttcaagtgactctgccttgaattgctttgaaaatctccacaaggatgaaaaattcttattggatctatacagtgggtgcggagcgatgtccacaggtttctgcatgggagcttccatatcaggagtaaaattgattacgaaatggtctgtggatataaataagtttgcttgtgatagtcttaaacttaatcatcctgaaacagaggtgagaaacgaagccgcagaagattttctagctcttctcaaagaatggaaaaggctctgtgagaagttttctctcgtttcaagcaccgaaccagtggaatcaatttctgagttagaagatgaagaagttgaagaaaatgatgacatagatgaggcaagtactggtgctgaactcgaacctggagagtttgaagtagaaaagttccttggcatcatgtttggagatcctcaaggcacaggggaaaagacacttcaacttatggtaaggtggaagggatacaattctagttatgacacatgggaaccttactctggcttaggcaactgcaaggagaagctgaaggagtacgtgatagatgggtttaagtctcatctcttaccacttccgggtactgtctacacagtgtgcggtgggcccccttgccaagggatcagtgggtataaccggtatagaaacaatgaagcaccgcttgaagatcagaagaaccagcaacttttggtgtttttagacatcattgacttcctcaagccaaactatgtgctgatggaaaatgttgtagaccttcttaggttttcaaagggtttcctggcacgtcatgctgtagctagctttgttgcgatgaattaccagacgcggttgggaatgatggctgctggatcttacgggctccctcagcttagaaacagggtttttttatgggctgcacaaccatcagagaaacttcccccttatcccctcccaacacatgaagttgctaaaaagttcaacacacctaaagaattcaaagatttacaagttggacgtattcaaatggagttccttaaattggacaacgctcttacgctggctgatgctattagtgatctgccaccggtgacaaattatgtggcaaatgatgtgatggattataatgatgctgctcctaagacagagtttgagaactttattagcctcaaaagatctgagacactgttacccgcatgtggtggagatccgacacgcaggttgtttgatcaccaacccctcgtattaggagatgatgacttggaaagagtttcctacataccaaaacagaagggggcaaactatcgcgacatgcctggtgttttagttcacaacaacaaagcggaaattaatcctaggtttcgagcaaagttgaaatctggaaaaaatgtggtccctgcttatgcaatttcattcataaaaggaaaatcaaaaaagccgtttggtagactttggggtgatgaaatcgttaacactgttgtgacaagggctgaacctcacaaccagtgtgtaatccatccaatgcaaaaccgtgtgttgtctgttcgtgagaatgcgagattacaggggttccctgattgttacaagctctgtggaacaattaaggaaaagtacatccaagttgggaatgctgtggcagttcctgtaggggttgcattaggatatgcctttggtatggcgagtcaaggactgacggatgatgaaccagtaatcaagctgccattcaagtatcccgaatgcatgcaggcaaaggatcaaatctgattgacagtctccatcaagtcgtcatgatgaaactatctttaggaatcatacttcattttctagactttcttttaacttttttgggttatcaagagctatatgctcaaacaatggcggcttaaactgttagctctttcttgttggtttatctttga

SEQ ID NO: 138021 - DNA, 1324 bp, Arabidopsis thaliana columbia
atgatgaatgcggtaataacatcagccaccatcaactgcaactctctgtcgccgtcatggacatgcggagacaattcgccgtcaaagcttctgttgggggaaatatctgccgcgttatcacgacggaggaccgtgaaggtgtcatgcggcaagagcagcccagatgattaccactcaaccctcaaatcactcaattctcgtggtcggtttcccagaaagtccctcggccagcattacatgttgaattcggacatcaacgaccagctagcctctgcggctgatgtgaaagaaggagattttgtattagagattggtcctgggactggttctttaaccaatgtccttatcaatttaggtgctacagttcttgccatcgaaaaggatcctcatatggttgatttggtgagcgaacgatttgctggttctgacaagttcaaggttttgcaagaggattttgtcaagtgtcacatccgttctcacatgctctccattttagagactagaaggttatcacatccagattctgctcttgcaaaggttgtttccaatttacctttcaatataagtactgatgttgtgaagcttctacttcctatgggtgatatcttctcaaaagttgttctcttactccaggacgaggcagcattgcgattggttgaaccagcactgcgaacatctgaataccgtcccatcaacattttgatcaacttctattctgaaccggaatacaatttcagagttcctagggaaaacttcttccctcagcccaaggttgatgctgctgtcgtaacattcaagctgaagcatccgagggactatcctgatgtttcctccaccaaaaatttcttctctttggtgaattctgcattcaatgggaagaggaaaatgttgagaaagtccctccagcacatatcatcatctcctgatatcgaaaaagcactaggagttgctggtcttccagccacttcaaggcctgaagagcttaccttggatgactttgtcaagttgcataacgtaatcgccagagaataagaccaacgagaaggaccatcagtatccatgttttgtcggctttagagttatacgaagccacctgaaaacagaacagtgacggcaacaagacgaggaagatacaacgttgcagtgcaagctgttgattgccgaaagacgaatgtgaccaatatccatacagtcaggaatcagggagtaagtagaatacagtcccaatctggtttgttattgttagaatttttctgtctatgagatgatctttgtaaattgttgattttgtaataccaaaccgacaaatagtctttacaatcac

SEQ ID NO: 138022 - DNA, 2401 bp, Arabidopsis thaliana columbia
acggcgactcaatctctcgtctacactagccaaacaaaccagtaatggaaacagaacacgatgaaaattatgaagatatagctgctgcaaaccgttcaatccgaggaaaaagtgatattgcttggtcctatgtaattcaatcaaaagacgaaaaaggaaaaacggttttggaatgtgcattttgtcataaaaaaaaaagaggaggtggaattaataggatgaaacaccatcttgctggcgtgaaagggaatacagatgcatgtttgaagatttctgcagatattagatttaagatagtgaacgcattgaaagaagctgagaacaagaagaagcaaaatattgttttggatgatacgaacttagacggtccagaaattgaagatgttgatggagatgatatccgagttgatgttcggccaagtcaaaagaggaagaaacaaggtattgatctacatgattattttaaaagaggtgtgcatgatcagacccaaccttctataaaagcatgcatgcaaagcaaagagaggatacatgctgtggacatgtctgttgcattgtggttttatgacgcttgtattccgatgaatgcggtgaattctccactttttcagcctatgatgagtatggtagcaagtatgggacatggatatgtgggtccttcataccatgctctgcgtgttggattgttgcgtgatgctaagttgcaagtttctttgatcattgataagtttaaaagtagttgggctagtactggatgtactcttatggcagatggatggaaggacacaagacaaagaccactgattaacttcttagtttattgtcccaagggaattacatttcttaagtcagttgatgcttcagatatctatgcaagtgctgagaatttatgcaacttgtttgctgaacttgtgggaataattggttcagaaaatattgttcattttgtgactgatagtgcacccaactacaaagctgctggaaagcttcttgttgaaaagtttcccaccattgcttggtctccttgttcagctcactgtatcaatcttattttggaagatgtggcaaaactaccgcatgttcaccatatagtgcgccgtatgtctaaggtaaccatttttgtttacaaccataagccggctttaaattgggtgagaaaaagatcgggttggagagagatcattcgtcctggagaaacacgttttgctacaactttcatagctctacaaagtctctatcaacataaagaagatctacaagctttggttacaagtgcagatcccgaactcaagcagcttttcaaaacatctaaagcaaaagtagctaaatcggttatcttggatgagcgaatgtggaatgactgcttgataattgtcaaggttatgactcctatcatccgtttgttacgtatttgtgatgctgatgagaagccttctttgccatatgtgtatgaagggatgtaccgagcaagattaggaattaaaaatattttccaagaaaaagaaaccctctacaagccctatacaaacatcattgatagaagatgggatcgtatgttgcgccacgatcttcatgctgcagcgtactatttaaacccggctttcatgtatgatcaacctacattttgtgagaagcctgaggttatgagtgggttgatgaacttatttgagaagcaaaaaaatgacagcaaaacaaaactttttcaagaacttagggtgtatagagaacgtgaaggaagtttttctcttgatatggctttaacttgcagcaaaacctctcagccagatgaatggtggagatattttggtcatgacgctcctaatttgcaaaagatggcaatacgaattcttagtcaaaccgcttcttcatctggatgtgagcgcaattggtgtgtatttgagcggattcataccaagaagcggaatagactagagcatcaacgacttaacgatctcgtctttgttcactacaatttacgtttgcaacataggtcaaaaagaaaaagatcatatgatcctgttgactacgaatctattgataagacagagttttgggtcgttgaagaagaagaagcaggtgagcttgaatatgatgaattagagaatgctcttgctgaggaatatcccaaagatcttgaagacacaaatcctgaaacatcgaatgattttgatgaagacttcacattgccgcctgaagaggatgtatggaatgatgaggaagacaatcgagattagttgttttgaatttgcgatgttttattactttatttctgttattgacttattggtgatctactagactattgttattttagtattttaaaggttttatggatttaaattttttaaactttatgtattgttatacttcttattgttattaaacatggtattattattat

SEQ ID NO: 138023 - DNA, 730 bp, Arabidopsis thaliana columbia
gataatccgatttggtcaaaatccggcggagaaaaaccctaaaaatggagaaagagacgaaggagaagatcgagaaaactgtgatagagatactcagtgaatcggatatgaaagagataacagagttcaaggttcgtaaactcgcttcggagaaactcgcaatcgatctctcggagaaatctcacaaagcatttgtacgaagcgtcgtggagaaattcctcgacgaagagagagcgagagaatatgaaaactcacaagtgaataaggaagaagaagatggagataaggattgtggtaaaggaaacaaagagtttgatgatgacggcgatcttatcatttgcaggttatcggataagagaagagtgacgattcaggaatttaaagggaagagtttggtttctatcagagagtattacaagaaagatggcaaagaacttcctacttctaaaggaataagcttaacagatgaacaatggtcaaccttcaagaaaaacatgccagccatcgaaaatgctgtcaagaaaatggaatcgcgtgtctgaatgaagaacatgtgatactttatctctaaacatgtgtaagtgtcttcttaagtagttagttgttcgaatgttcaggtctctcatgtaactgtcttttttattttcttctctcgaattggtcgttatgtgtctcgtactgagttgtatccatttcgctttaaccgattccaaaaactttggaccaaagt

SEQ ID NO: 138024 - DNA, 2309 bp, Arabidopsis thaliana columbia
aggcgagtggttaatggagaaggaaaaccatgaggacgatggtgagggtttgccacccgaactaaatcagataaaagagcaaatcgaaaaggagagatttctgcatatcaagagaaaattcgagctgagatacattccaagtgtggctactcatgcttcacaccatcaatcgtttgacttaaaccagcccgctgcagaggatgataatggaggagacaacaaatcacttttgtcgagaatgcaaaacccacttcgtcatttcagtgcctcatctgattataattcttacgaagatcaaggttatgttcttgatgaggatcaagattatgctcttgaagaagatgtaccattatttcttgatgaagatgtaccattattaccaagtgtcaagcttccaattgttgagaagctaccacgatccattacatgggtcttcaccaaaagtagccagctgatggctgaaagtgattctgtgattggtaagagacaaatctattatttgaatggtgaggcactagaattgagcagtgaagaagatgaggaagatgaagaagaagatgaggaagaaatcaagaaagaaaaatgcgaattttctgaagatgtagaccgatttatatggacggttgggcaggactatggtttggatgatctggtcgtgcggcgtgctctcgccaagtacctcgaagtggatgtttcggacatattggaaagatacaatgaactcaagcttaagaatgatggaactgctggtgaggcttctgatttgacatccaagacaataactactgctttccaggattttgctgatagacgtcattgccgtcgttgcatgatattcgattgtcatatgcatgagaagtatgagcccgagtctagatccagcgaagacaaatctagtttgtttgaggatgaagatagacaaccatgcagtgagcattgttacctcaaggtgaggagtgtgacagaagctgatcatgtgatggataatgataactctatatcaaacaagattgtggtctcagatccaaacaacactatgtggacgcctgtagagaaggatctttacttgaaaggaattgagatatttgggagaaacagttgtgatgttgcattaaacatacttcgggggcttaagacgtgcctagagatttacaattacatgcgcgaacaagatcaatgtactatgtcattagaccttaacaaaactacacaaagacacaatcaggttaccaaaaaagtatctcgaaaaagtagtaggtcggtccgcaaaaaatcgagactccgaaaatatgctcgttatccgcctgctttaaagaaaacaactagtggagaagctaagttttataagcactacacaccatgcacttgcaagtcaaaatgtggacagcaatgcccttgtttaactcacgaaaattgctgcgagaaatattgcgggtgctcaaaggattgcaacaatcgctttggaggatgtaattgtgcaattggccaatgcacaaatcgacaatgtccttgttttgctgctaatcgtgaatgcgatccagatctttgtcggagttgtcctcttagctgtggagatggcactcttggtgagacaccagtgcaaatccaatgcaagaacatgcaattcctccttcaaaccaataaaaagattctcattggaaagtctgatgttcatggatggggtgcatttacatgggactctcttaaaaagaatgagtatctcggagaatatactggagaactgatcactcatgatgaagctaatgagcgtgggagaatagaagatcggattggttcttcctacctctttaccttgaatgatcagctcgaaatcgatgctcgccgtaaaggaaacgagttcaaatttctcaatcactcagcaagacctaactgctacgccaagttgatgattgtgagaggagatcagaggattggtctatttgcggagagagcaatcgaagaaggtgaggagcttttcttcgactactgctatggaccagaacatgcggattggtcgcgtggtcgagaacctagaaagactggtgcttctaaaaggtctaaggaagcccgtccagctcgttagtttttgatctgaggagaagcagcaattcaagcagtcctttttttatgttatggtatatcaattaataatgtaatgctattttgtgttactaaaccaaaacttaagtttctgttttatttgttttagggtgttttgtttgtatcatatgtgtcttaactttcaaagttttctttttgtatttcaatttaaaaacaatgtttatgttgttaaaaaaaaaaaaaaaaaa

SEQ ID NO: 138025 - DNA, 1292 bp, Arabidopsis thaliana columbia
atgtcaagaaagccatgttgtgtgggagaaggactgaagaaaggagcatggactgccgaagaagacaagaaactcatctcttacattcatgaacacggtggaggaggctggcgtgacattccccaaaaagctggactaaaacgatgtggaaagagttgtagattgcgatgggctaactatttgaaacctgacatcaagagaggagagtttagctatgaggaggaacagattatcatcatgctacacgcttctcgcggcaacaagtggtcagtcatagcgagacatttgcccaaaagaacagataacgagattaagaactactggaacacgcatctcaaaaagctcctgatcgataagggaatcgatcccgtgacccacaagccacttgcctatgactcaaacccggatgagcaatcgcaatcgggttccatctctccaaagtctcttcctccttcaagctccaaaaatgtaccggagataaccagcagtgacgagacaccgaaatatgatgcttccttgagctccaagaaacgttgttttaagagatcgagttctacatcaaaactgttaaacaaagttgcagctagggcttcttccatgggaactatactaggcgcctccatcgaaggaaccttgatcagctctacaccgttgtcttcatgtctaaatgatgacttttctgaaacaagtcaatttcagatggaagaatttgatccattctatcagtcatctgaacacataattgatcatatgaaagaagatatcagcatcaacaattccgaatacaatttctcgcagtttctcgagcagtttagtaacaacgaaggggaagaagctgacaatactggaggaggatataaccaagatcttcttatgtctgatgtctcatcaacaagcgttgatgaagacgagatgatgcaaaacataactggttggtcaaattatctccttgaccattccgatttcaattatgacacgagccaagattatgacgacaagaacttcatatgatccgttgattgcttaccggactagagttgaccggttaatgtcatatggttctcttagatatttgtcaagttatagtaaaggtccactatagggtcactatatattaatattcagtaatggattctcttagttagagaaccttgtgatgccgtggatcaattagtatttgatttgcgggagacacgagttttttttccttctattgttgtttgtggatttacgtactataaataataaataaaacacccatttgattgcaaaaaaaaaaaaaaaaaaaaaaa

SEQ ID NO: 138026 - DNA, 1020 bp, Arabidopsis thaliana columbia
gaagatcataaagatcaaaaggagagaggtattaaaaaatgatgtgtagtcgaggccattggagacctgcagaagacgagaagctaagagaactcgtcgagcaatttggtcctcataattggaacgccatagctcagaagctctctggtcgatctggtaagagttgtagattgagatggtttaatcaattggatcctaggattaaccgaaaccctttcacggaggaagaagaagaaaggcttttagcgcctcatcggatccatgggaacagatggtctgtgatcgctagattttttcccggtcgaactgataacgctgttaaaaaccattggcacgtcatcatggctcgtcgtggccgagaacggtccaagctccgtccacgaggccttggccatgatggcacggtggctgcgactgggatgattggtaattataaagactgcgataaggagagaagattggcaaccacaaccgctatcaattttccttatcaattctctcatattaatcattttcaagtcctcaaagagtccttgaccggaaagatcgggttcagaaatagtactactccaatacaagaaggagcaatagaccaaactaaacgaccgatggagttctacaattttctccaagtaaacacggattcgaagatacacgaattgatagataattcaagaaaagacgaagaagaagatgtcgatcaaaacaaccgaattcgtaacgagaattgtgttccatttttcgactttttgtctgttggaaactctgcctctcagggtttatgttaatttgtccgtaccacatgtactataaggtggaccatatgttaactaaagataatgtagaaagtactaatcaattagagctcctgtttgagccaaatgtgaaaattagttaagacatcccaaacattttcttgtataacacatataaggttgtacttttatcaggtctaattttctatttttattttaaggatgtttaatcagacccataaccattcgataaaaaaaaaaaaaa

SEQ ID NO: 138027 - DNA, 1041 bp, Arabidopsis thaliana columbia
gttcttgtattggtttggatcggtatacttagttgattacgtaattaaatagatcggcgtgaagaagaaaaatgatcatgtgcagccgaggccattggagaccagctgaagacgagaagctcaaggatcttgtcgaacaatacggtcctcacaattggaacgccattgctctcaagcttcctggtcgctctggtaagagttgtagattgagatggtttaatcaattggatccaaggatcaaccgaaaccctttcacggaagaagaagaagaaagacttttagcggctcatcggatccatgggaacagatggtccatcatcgcaaggcttttccctggaagaactgataacgccgtcaagaaccattggcacgtcatcatggctcgtcgcacacgccaaacctctaagcctcgtcttcttccctcgacgacttcgtcttcttctttaatggcgagtgaacaaatcatgatgagttctggtggttataatcataattatagttccgatgatcggaagaaaatatttccagcagactttataaatttcccttacaaattctctcatatcaatcatcttcacttcctaaaggagtttttccccggaaagatcgctttaagtcacaaagcaaatcagagtaagaagcctatggagttctacaattttctacaagtaaacacagattcaaacaagagcgagattatagatcaagattcaggtcaaagcaaacgcagtgactcggacaccaaacatgaaagtcatgttccattcttcgactttttatccgttggaaactctgcctcctaggattagtttttttgcagtaactcctaaatttctagattaactatttagtccgtatacgtacgagattatctaggtcgttagcatgtatgcttgatgtgtataatcactaactagtgagctattacctgcgaaaattgtaagaaaaatacataatgttgatgtatcacacattctcaatgtctgtaaaatttccatcgagttgttaactatcaaagttatccgtttgaaaaaaaaaaaa

SEQ ID NO: 138028 - DNA, 2661 bp, Arabidopsis thaliana columbia
atgaagtcttcttacggttcttcctctaatgatctccacgcttttgtcaatgagatcaagggagaaattcagttgtccaacattaatcttgatccttactcatttgtctctccttccgcttacgacacggcttggttatccatgatcgaagaagacatcaacgtagatgataatgagcttaaaccgatgttccaaggttgtctagattggattatgtgcaatcaaaatgccagagaaggtttctggatgaactccaccagttatacaacggtggctgatggcagagacgaagacggcgaaaaggacatgtgtattctaacttccactcttgcttgtgttgtagcacttcagaaatggaatattgggtgttttcatctccacaaagggacgagatatatcgaaagaaatacggagatgataattgggaaatacatcaacgaagaaggatcttatcctcgttggttcgctatcaaattcacaggaatcctagagcttgctcaaaaacttggcttacactttgttttctctagtcgctgtatcgaaatgatcaaagggatgttttatcaacgccaagagattatccaaagagaaaaattggtacatgactgtaattataaacctttactggcctatctagaggtgttgccatcgaaattatatgtcacaaatcaagaagacatcattgtgaagagtctcgacagtatggatggctctttgtttcagtcaccttcagcaactgcatcagcgtttatgctcactcgcaacacaaaatgtctagcttatcttcaaaatctcgttcaaaaatgccctaatggagtgccacaaaagtaccctctcaatgaagatctcataaaactctccatggttaatctaatcgagagtactggtttaggagagttctttggtatagagattgaacacgttctggaacaagtttacagccgctacgaagaaaaagattttgagagaatgcccatgagttatctggcggatcaattgcacaaagactctcttgcatttcgaatgttaagaatgcatggtcgggatgtttcacctagaagcttttgctggttcttgaatgatcaagaaactcgaaatcatttagaaagaaatatagactctttcttgcttgtgatcctaagtgtttacagagccacggatctcatgtttccgggagagcatgatcttcaagaagcaagagaatatactcggaatttactcgagaaacgtcggtccatcaaagaaaaaatggtaccaatatatctcaataaggtgaaaattatgcatgaattaagtactccatggatagctcgactcaaacaccttgaccataggatgtggattgaggacaagaactcaaatgttttatccatggaaaaagcctcttttctaagactacatagttcgtatagcgacaaactgactcatcttgctgcaagaaacttcgagtttcaacaagccaaatactgtcgcgagctggaggaactgacaatgtgggtaaagaaatggggacttagtgatattggtttcggtagagagaagacaacatattgttactttgcaactgtgacttcgttgccctatgaatatgccattaaatttggtaagcttgcagcaaaaactgctatcctcatcacaattgccgatgacttcttcgatgaaaaaggttccttcaatgacttggaaggtcttactaaagcagttttaagatgggaaggagaagagcttaaaagttacggcaatatcatttttagagcacttgatgatattgtaagagagactgcaaatacttgtcgtacgcaccacaaaaccgacataattgtccatcttcgcaacatctggggtgaaacatttgagtcgtggctacgtgaagctgaatggagtaaaaagggacacacatcgtcaatggacgaatatattcgaaacggaatgatctcaatcgcagcacacaccattgctctttccatctcatgtctcatggaaccttgttttccccacaacaaactcaaaccgggaaattacgatagcataactacattgctcatgatcatacctcgacttttaaatgacctacaaagttatcagaaggaacaagaacaagggaagatgaactccgtgctgctccacatgaagaatcatccaggtctggagattgaggactcgatcgctcatatcgaaaagattatcgattcaaaaaggaaagagtttctggagcatgtactagttgatggactaagcgatttgccaaaaccgtgcaaggagattcacatgtcttgttgtaaagtcttcgagatgttttttaacaagaagaaccgttatgattcaaacacggagatgcttcatgacattaagaaggctctctatgatcccatcaatgtttatgaactatcagagatggagcctatgccactgatggcacatggtgatgaatatatgattcttcctttgcttttgaacagtttgccaaatattcttgaatttaagaggaaggacggatacggagcaatgaaaacatctatgtgctttggaagaagttatcgtgttaataaacgcgttatggcctcacagcttgatgatcaacataagcctctcaagattgttgcgtcgcagcggaaaccggtaccaatgatgcaatcgatattcgcaccatgcttctactaa

SEQ ID NO: 138029 - DNA, 1083 bp, Arabidopsis thaliana columbia
acataaagccaaaatataaacacataagccttttagcatgagttcaacgttgagcgatgtgtttagatcgcatcccattcacatcccactctcaaacccacctgacttcaaatctctcccggattcttacacgtggactcctaaagatgatctcctcttctccgcctccgcctccgacgaaaccctgccgctcatcgacctctccgatatccacgtggccactcttgtgggccatgcttgtaccacgtggggagcgttccagatcaccaaccacggcgtcccctcgcgacttctcgacgacattgagttcctcaccggaagtcttttccggcttcccgtacagcggaagctcaaggcggctcggtcagagaatggcgtctccggctacggcgtagctcgtattgcttcgttctttaataagaagatgtggtccgaaggtttcaccgttattggctctcccctccacgatttccgtaaactctggcccagccaccacctcaaatactgtgaaattattgaagagtatgaagaacatatgcaaaagttggcagccaagttgatgtggttcgcattaggttcactgggagttgaagaaaaggacatacaatgggccgggcctaattcagactttcaaggaacccaagcagctatccaactaaaccattatccaaaatgtccagaaccagacagagccatgggcctcgcagcccatacagactcgaccctcatgaccattctgtaccagaacaacaccgccggtctccaagttttccgggatgacgtgggctgggttaccgcgccacctgtccctggctcgctggtggtcaacgtcggtgacttgctccacattttaaccaacggaatcttcccgagcgtgcttcaccgagccagggttaaccacgtccgatctcggttctcaatggcttacctgtggggtccaccatccgatgtaatgatctctccacttcccaaactggttgatcctctccaatctcctctctacccatctctcacttggaaacaataccttgctaccaaagctactcattttaatcaatctctttccattattagaaattaact

SEQ ID NO: 138030 - DNA, 859 bp, Arabidopsis thaliana columbia
caatccactaacgatccctaaccgaaaacagagtagtcaagaaacagagtattttttctacatggatccatttttaattcagtccccattctccggcttctcaccggaatattctatcggatcttctccagattctttctcatcctcttcttctaacaattactctcttcccttcaacgagaacgactcagaggaaatgtttctctacggtctaatcgagcagtccacgcaacaaacctatattgactcggatagtcaagaccttccgatcaaatccgtaagctcaagaaagtcagagaagtcttacagaggcgtaagacgacggccatgggggaaattcgcggcggagataagagattcgactagaaacggtattagggtttggctcgggacgttcgaaagcgcggaagaggcggctttagcctacgatcaagctgctttctcgatgagagggtcctcggcgattctcaatttttcggcggagagagttcaagagtcgctttcggagattaaatatacctacgaggatggttgttctccggttgtggcgttgaagaggaaacactcgatgagacggagaatgaccaataagaagacgaaagatagtgactttgatcaccgctccgtgaagttagataatgtagttgtctttgaggatttgggagaacagtaccttgaggagcttttggggtcttctgaaaatagtgggacttggtgaaagattaggatttgtattagggaccttaagtttgaagtggttgattaattttaaccctaatatgttttttgtttgcttaaatatttgattctattgagaaacatcgaaaacagtttgtatgtacttttgtgatacttggcg

SEQ ID NO: 138031 - DNA, 1090 bp, Arabidopsis thaliana columbia
agaaaatatttcgagatttacactctttttgttgtcgccgcagttgatactcactgcaagcgtctcttgtaagctcatttagagtcttcttcaccactcttcttcttcttcttctttagttccttaaacttctgggttttgagttttgttcttggactaagagaatgagtgcttcgaagttcataaaatgtgttactgttggagatggggctgttgggaagacatgtatgcttatctgttacactagcaacaagtttcctactgattatataccgactgtgttcgacaatttcagtgccaatgtagctgtggatggacaaatcgttaatttagggctatgggacactgccggtcaagaagattacagtaggttaagaccattgagttatagaggagctgatatcttcgtcttagccttttcgcttattagcaaggcgagttacgaaaatgtactcaagaagtggatgcctgaacttcgtcggtttgcgccaaatgttcccatagttcttgttggtacaaagctagatctccgggatgacaagggatacctcgcggatcacaccaatgtcattacctctactcagggagaggaattgaggaagcaaattggtgcagctgcttatattgagtgtagttccaagactcaacaaaatgtgaaagcagtgtttgatacagcgatcaaggtggttcttcagcctccaaggaggaaagaggtcccgaggaggaggaagaatcatagaagatccggttgctccattgcgagtattgtctgtggaggttgcaccgctgcttaagacacaacaaaagtttcaacaacaatgtattcgtgactctctttctgtggttgttttctagttcgtaggatgaaactctccaactgtgaagataaggaaactgttggttctcttatttgtatgtgaagaagcttctttctctgtttatggttgtggatagatttgcagattctgtaacattcttgtcttgttaacaagttttggatcttttagcaaatttggaattcttatattgtgttatttttgaattttgatcatgcaataaaatcagattaaaccaaaaaaaaaaaaaaaaa

SEQ ID NO: 138032 - DNA, 869 bp, Arabidopsis thaliana columbia
tagaatggcttcgagtgcttcaaaattcatcaaatgtgtgactgttggagatggtgccgttggaaaaacttgtatgctcatctgctacactagcaacaaattccctactgactacataccaacagtttttgacaactttagtgttaatgttgtggttgaaggcatcactgtgaacttaggcctttgggacactgccgggcaagaagactataacagactaaggcctttaagttacagaggagcagatgtttttgtgttggctttctcattgatcagccgagctagctatgagaatgtgtttaaaaagtggatccctgaactccaacactttgcaccaggagtccccattgtgcttgttggtaccaaaatggatcttcgtgaagatagacattacttgtctgatcatcctggactgtccccggtaactacatcacagggagaggaactccgcaagcatatcggagcgacttattacattgaatgtagctcaaaaactcaacagaatgtgaaagccgtatttgatgctgctattaaagtagtaattaaaccagcagtgaaacaaaaggagaagaagaagaagcagaagcctcgcagcggatgtctctcaaacattctgtgtgggaagaattgatgagtcaattccatctgatgattgttcacttcttttttttttcttttcttttctaattggccagtttgtgattctgataagtcggaattacatagactctggcagagatgagcctcaattagtagcttcttcgattctgtttgtatatgtgtccctgatgtttgtttgtttcgatttggtttgacccttatagaattgttatagccattttgtagccaaaacttggagtagttcacga

SEQ ID NO: 138033 - DNA, 1495 bp, Arabidopsis thaliana columbia
ccacgcgtccggaccttcatatctctagaagtttcataagtagttatgtctaaatctagagatacggttagacataaattgtttgggaggacaatcacatctcttttagatgtgaattgttatgatccgtcgtcgttgtcccctgttcacgatgtttcttctgatccaagcaaggaggattcgtcttcttcttcatcttcttgttctccaactattggaccaatcagggttccggttaaaaaaagtgagcaagagagtaacaaattcaaagatccatatatattatccgatctaaacgaaccaccaaaagcagtatctgagatttcatcaccaagaagttccaagaacaactgtgatcaacagagcgagatcacaacaacaactaccacaagtactacatcaggagagaaatcaacggctctcaagaaaccggacaagcttattccatgtcctagatgtgaaagcgcaaacaccaaattctgttattacaacaactacaacgtgaaccagccacgttacttctgcaggaactgtcagaggtattggacagctggtggatctatgaggaacgttcctgttggctcaggtcgtcgcaagaacaaaggatggccttcttcaaaccattacttgcaagtcacttctgaggattgtgataataataactcggggacgatccttagtttcggttcttcggagtcttcggttacagagactggtaagcatcagtcaggtgatacagcaaagataagtgctgattcagtttctcaagaaaataagagctaccaagggtttcttcctccgcaagtaatgttacctaataattcttctccttggccttaccaatggagtccaacgggtcctaacgctagtttctaccctgtccccttctactggggatgcacggttccgatataccctacctcagagacttcatcatgtttaggaaaacggtcaagagatcaaactgaaggaagaatcaatgatactaatacaacaataactactacaagagcaagattggtctcagaatctcttagaatgaatatcgaagctagtaagagcgctgtgtggtctaagttaccgacaaaacccgagaaaaaaacgcaaggattcagtttgttcaatggatttgacacaaagggaaacagcaacagaagtagcttggtctccgaaacttctcacagtctacaagcaaaccctgcagcgatgtctagagctatgaacttcagggagagcatgcaacaataatcagacactaatatagatatatattcatgaactgagagatttgagtttggctaattgttaccttgtggaagaaggcaaagctgtgtagatagttttgttgtttggaactaagagtagatatagtatttactgttgtacacaaacagagatatttttggagctgtagatatttctctccactgtgtgatgaagttgcaacatatataaacctttagattaatatctacgtgatctatcttgaacccgg

SEQ ID NO: 138034 - DNA, 1374 bp, Arabidopsis thaliana columbia
  unsure (1)..(1374): unsure at all n locations
tgaaacctagatttctgcaactgaattcctaattcgaaaaagaatggagggttcgtcgtcgacgatagcaaggaagacatgggaactagagaacagcattctaacagtagactcacctgattcaacctccgacaacatcttctactacgacgatacttcacagactaggttccagcaagagaaaccgtgggagaatgatcctcactactttaaacgagtcaagatctcagcgctcgctcttcttaagatggtggttcacgctcgctctggtggtacaattgaaataatgggtcttatgcaaggtaagaccgatggtgatactatcattgttatggatgcttttgctttaccagtggaaggtactgagacaagggttaatgctcaggatgatgcttatgagtacatggttgagtattcacagaccaacaagctcgcggggcggctggagaatgttgttggatggtatcactctcaccctggatatggatgctggctctccggtattgatgtttctacgcagacgcttaaccaacagcatcaggagccatttttagctgttgttattgatcccacaaggactgtttcagctggtaaggttgagattggtgctttcagaacatactctaaaggatataagcctccagatgaacctgtttctgagtatcaaactattcctttaaataagattgaggactttggtgttcactgcaaacagtactattcattagatgtcacttatttcaagtcatctcttgattctcaccttctggatctactatggaacaagtactgggtgaacactctttcttcttctccactgctgggtaatggagactatgttgctggacaaatatcagacttagctgagaagcttgagcaagccgagagtcatctggttcagtctcgctttggaggagttgtgccatcatcccttcataagaaaaaagaagatgagtctcaactaactaagataactcgggatagcgcaaagataactgtggaacaggtccatggactaatgtcgcaggtcataaaagatgaattattcaactcaatgcgtcagtccaacaacaaatctcccactgactcgtcggatccagaccctatgattacatattgaagttgctcttcttttggtttctanttttggattgacccatcatttgttgtcctttcatttattttctgttgtgtaaagaattataatgncgncgcgaattcgcggccgctaaaaaaanacaggaaattgaaaanaattcnnccattccaacatctttatttaatattatctcctcnattatataatattcaaacatccctantancttcatttgaccgtccccctccctcccgtgttgcnttggtgctggcccc

SEQ ID NO: 138035 - DNA, 2276 bp, Arabidopsis thaliana columbia
tcttttttccctctcaccacttctctctcaaactaaagacaaaagctcttctctcttccctctctcttctccggcgaacaaaaagatgattacggcggcggacttctaccacgttatgacggctatggttccgttatacgtagctatgatcctcgcttacggctctgtcaaatggtggaaaatcttcacaccagaccaatgctccggcataaaccgtttcgtcgctctcttcgccgttcctctcctctctttccacttcatcgccgctaacaacccttacgccatgaacctccgtttcctcgccgcagattctctccagaaagtcattgtcctctctctcctcttcctctggtgcaaactcagccgcaacggttctttagattggaccataactctcttctctctctcgacactccccaacactctagtcatggggatacctcttctcaaaggcatgtatggtaatttctccggcgacctcatggttcaaatcgttgttcttcagtgtatcatttggtacatactcatgctctttctctttgagtaccgtggagctaagcttttgatctccgagcagtttccagacacagcaggatctattgtttcgattcatgttgattccgacattatgtctttagatggaagacaacctttggaaactgaagctgagattaaagaagatgggaagcttcatgttactgttcgtcgttctaatgcttcaaggtctgatatttactcgagaaggtctcaaggcttatctgcgacacctagaccttcgaatctaaccaacgctgagatatattcgcttcagagttcaagaaacccaacgccacgtggctctagttttaatcatactgatttttactcgatgatggcttctggtggtggtcggaactctaactttggtcctggagaagctgtgtttggttctaaaggtcctactccgagaccttccaactacgaagaagacggtggtcctgctaaaccgacggctgctggaactgctgctggagctgggaggtttcattatcaatctggaggaagtggtggcggtggaggagcgcattatccggcgccgaacccagggatgttttcgcccaacactggcggtggtggaggcacggcggcgaaaggaaacgctccggtggttggtgggaaaagacaagacggaaacggaagagatcttcacatgtttgtgtggagctcaagtgcttcgccggtctcagatgtgttcggcggtggaggaggaaaccaccacgccgattactccaccgctacgaacgatcatcaaaaggacgttaagatctctgtacctcaggggaatagtaacgacaaccagtacgtggagagggaagagtttagtttcggtaacaaagacgatgatagcaaagtattggcaacggacggtgggaacaacataagcaacaaaacgacgcaggctaaggtgatgccaccaacaagtgtgatgacaagactcattctcattatggtttggaggaaacttattcgtaatcccaactcttactccagtttattcggcatcacctggtccctcatttccttcaagtggaacattgaaatgccagctcttatagcaaagtctatctccatactctcagatgcaggtctaggcatggctatgttcagtcttgggttgttcatggcgttaaacccaagaataatagcttgtggaaacagaagagcagcttttgcggcggctatgagatttgtcgttggacctgccgtcatgctcgttgcttcttatgccgttggcctccgtggcgtcctcctccatgttgccattatccaggcagctttgccgcaaggaatagtaccgtttgtgtttgccaaagagtataatgtgcatcctgacattcttagcactgcggtgatatttgggatgttgatcgcgttgcccataactcttctctactacattctcttgggtctatgaagagatattaccaaaacacagggactttgttttattcttttgtgggatgatgaattgtgaaaagaacaatgccctttttgttgaaaacccacaaattaaatcagaagcagctttagagaatctttgaggataattgaagctcttgaagaagagaagaagaaggagacttaagtaggagctcagcaagttttacctttttcttaattttaatgaacattcgtgtttcctcttttggtaggttttaggaatttgtaaaagctttggctacttttagtgaattaaaaacgttaaggaaaatatcaaaaaaaaaaaaaaaaaaaaa

SEQ ID NO: 138036 - DNA, 1986 bp, Arabidopsis thaliana columbia
atgtgtgggattctcgctgtgttaggctgcgtcgataactctcaagctaaacgttcccgtatcatcgaactctctcgcagattgaggcatagaggtcctgactggagtggtctacattgttatgaggattgttatttggctcatgagcgtttggctatcgttgaccccacttctggagatcaaccactctataacgaagataagaccattgctgtcacggtcaatggagagatttacaaccacaaggatttgcgtgaaaatttgaagtctcaccaattccgtactgggagtgattgtgaagtgattgcccatctttacgaagaacatggagaggaatttgtcgacatgttggatggcatgtttgcatttgtgcttcttgatacccgagacaaaagctttattgctgcaagggatgccattggtatcactccactctacatcgggtggggtctcgatggttctgtttggtttgcttccgagatgaaagcacttagtgatgattgtgagcagtttatgtgcttccccccaggccacatctattcaagtaaacaaggtgggcttaggaggtggtacaaccccccgtggttctctgaggttgttccttcaaccccatatgatcccctagtggtgcgcaatacttttgagaaggctgttataaaacgactaatgactgatgtgcctttgggtgtcctcctatctggtggattagattcatcccttgttgcttcagtagcattacgccatctggaaaaatcagaagctgcttgtcagtggggttcaaagttgcacacattttgtatcggtttgaagggatccccggatcttaaagctggcagagaagtcgctgactatttaggaactcgccaccacgagttacactttacagttcaggacggaatagatgccatagaagaagtcatctaccatgttgagacctatgatgtgactactattagagccagcactccaatgtttcttatgtcgcgaaaaatcaaatcgcttggtgtaaagatggttctttctggggaaggctctgatgaaatttttggaggatatttgtacttccataaagctcccaacaagaaggaatttcatgaggaaacatgtcgaaagatcaaagctcttcatcaatatgactgcttgagggctaacaaatcaacttctgcatggggtgttgaggctcgtgtacctttcctcgataaagaatttataaatgtcgcaatgagcatcgatccagagtggaagatgattaggcctgatttgggaaggatcgagaaatgggtgttacgcaatgcctttgatgatgagaaaaatccttacctaccaaagcacattctatataggcagaaagaacagttcagtgatggagttggatacagctggattgatggtctaaaagatcatgcaaacaaacatgtctctgacacaatgctgatgaacgcaagctttgtcttccctgataacacacctttgacaaaagaagcttactactacagaaccatctttgaaaagttcttccctaagagtgctgctagagcaactgtaccaggaggtccaagtgtggcatgtagcacagcaaaagctgtggaatgggacgcagcttggtcacagaatcttgacccatcaggtcgtgcggctcttggagttcatgtttcagcttatggggaagataaaaccgaagattctcgtcccgagaagctacagaaactagcagagaagactccagccattgtttgaggataaacaaacaaggtttcagctaatgttgaatcgtgcaatactcttattgtctcaaagacaatagatatcctcttctataggttctaaaaaggcttctttttttttttcttgttttctggggttctttggatgtgtacctaataagttgctggtgaatttctgtgtttagtgttattagacaatccatgatagcttgatacttcagattatgaacgttatttttcatgaaaaaagaaaaaaactaaa

SEQ ID NO: 138037 - DNA, 2384 bp, Arabidopsis thaliana columbia
catatttcctacgaaggtctttgaagtacataatccaagcaaagaaaaaaaagaagtcaaattcaggtgggaaaataagattcaactacagggatgtgagtaacaaaatgacactaaaagctgaagtagtggaaaatttttcttgcccattttgcttgattccatgtggaggtcacgagggcttgcaacttcatttgaagtcatcacatgacgcctttaaatttgagttttatcgggcagagaaagatcacggaccggaagttgatgtctccgtgaaaagtgatacaataaaatttggggttctaaaggatgatgtaggaaatccccaattgagccctttgacgttttgctcgaaaaatcgtaaccaaagaagacaaagagatgatagcaataacgttaagaaacttaatgtactccttatggagttggatttagatgacttacctcgtggcacagaaaatgattctactcatgtgaatgatgataatgtctcatcgccaccaagagctcactcttccgagaagattagcgacattttaaccacgactcaactagcaatagctgaatcctctgaacctaaggtgcctcatgtgaatgatggtaatgtctcatcgccaccaagagctcactcttcggccgagaagaatgaatctactcatgtgaatgatgatgatgatgtctcatcaccacctagagctcactctttggagaagaatgaatctactcatgtgaatgaggataatatttcatcgccaccaaaagctcactcttcgaagaagaatgaatcgactcatatgaatgatgaagatgtctcatttccaccaagaactcgctcttcgaaggagacgagcgacattttaaccacaactcaaccagcaatagttgaaccttctgaacctaaggtgcgtcgtggtagtagaagaaaacagttatatgcaaagcggtacaaggctagagagactcaaccagcaatagctgagtcttctgaaccaaaggtgctgcatgtgaatgatgaaaatgtctcatcgccaccagaagctcactctttggagaaggctagcgacattttaaccacgactcaaccagcaatagctgagtcctctgaacctaaggtgcctcatgtgaatgatgaaaatgtatcatcgacaccaagagctcactcttcaaagaagaataaatctactcgtaagaatgttgataatgtcccatcgccaccaaaaactcgctcttcgaagaagactagcgacatattaactacgactcaaccaacaatagctgagtcttctgaacctaaggtgcgtcatgtgaatgatgataatgtctcatcgacaccaagagctcactcttcaaagaagaataaatctactcgtaagaatgatgataatattccatcgccaccaaaaactcgctcttcgaagaagactagcaacattttaactaggactcaaccagcaatagctgagtctgaacctaaggtgcctcatgtgaatgatgataaagtctcatcgacaccaagagctcactcttcaaagaagaataaatctactcataagaaagatgataatgcctcattgccaccaaaaactcgctcttcgaagaagactagcgacattttagctacgactcaaccagcaaaagctgagccttctgaacctaaggtgactcgtgttagtagaagaaaagagttacatgcagagcggtgcgaggctaaaagattggagcgtcttaagggtcgacagttctatcactcccaaacaatgcagccaatgacttttgaacaagtaatgtctaacgaggatagcgagaatgagactgatgattatgctttagatattagcgaacgcctgagacttgaacgtcttgtgggtgtgagcaaagaggaaaagcgatacatgtatctttggaacatatttgtacgaaaacaaagggtgatcgcggatggacatgttccttgggcatgtgaagagtttgcaaaacttcataaggaagagatgaagaattcttcatctttcgattggtggtggagaatgtttaggattaaactgtggaacaacggtctcatctgcgccaagaccttccacaaatgcactaccatcctcctcagtaactcggatgaagcaggacaattcacctctggcagtgctgctaatgccaacaatcaacaatctatggaagttgatgaataacagtggttagtcgccatggagatctcgagatctttttcttagtagtagggatcaacaaggctgagatctctatctcgtttattacatttctttctatttactgtgtcgtaacctttaagtttaccctcttactagtttgtgaatctgtgacattcagatcaataaggttaagcttgaaatttaaaatacttgagaagg

SEQ ID NO: 138038 - DNA, 1779 bp, Arabidopsis thaliana columbia
atgaattccgttcagcttccgacggcgcaatcctctctccgtagccacattcaccgtccatcaaaaccagtggtcggattcactcacttctcctcccgttctcggatcgcagtggcggttctgtcccgagatgaaacatctatgactccaccgcctccaaagcttcctttaccacgtcttaaggtctctccgaattcgttgcaataccctgccggttacctcggtgctgtaccagaacgtacgaacgaggctgagaacggaagcatcgcggaagctatggagtatttgacgaatatactgtccactaaggtttacgacatcgccattgagtcaccactccaattggctaagaagctatctaagagattaggtgttcgtatgtatcttaaaagagaagacttgcaacctgtattctcgtttaagcttcgtggagcttacaatatgatggtgaaacttccagcagatcaattggcaaaaggagttatctgctcttcagctggaaaccatgctcaaggagttgctttatctgctagtaaactcggctgcactgctgtgattgttatgcctgttacgactcctgagataaagtggcaagctgtagagaatttgggtgcaacggttgttcttttcggagattcgtatgatcaagcacaagcacatgctaagatacgagctgaagaagagggtctgacgtttatacctccttttgatcaccctgatgttattgctggacaagggactgttgggatggagatcactcgtcaggctaagggtccattgcatgctatatttgtgccagttggtggtggtggtttaatagctggtattgctgcttatgtgaagagggtttctcccgaggtgaagatcattggtgtagaaccagctgacgcaaatgcaatggctttgtcgctgcatcacggtgagagggtgatattggaccaggttgggggatttgcagatggtgtagcagttaaagaagttggtgaagagacttttcgtataagcagaaatctaatggatggtgttgttcttgtcactcgtgatgctatttgtgcatcaataaaggatatgtttgaggagaaacggaacatattggaaccagcaggggctcttgcactcgctggagctgaggcatactgtaaatattatggcctaaaggacgtgaatgtcgtagccataaccagtggcgctaacatgaactttgacaagctaaggattgtgacagaactcgccaatgtcggtaggcaacaggaagctgttcttgctactctcatgccggaaaaacctggaagctttaagcaattttgtgagctggttggaccaatgaacataagcgagttcaaatatagatgtagctcggaaaaggaggctgttgtactatacagtgtcggagttcacacagctggagagctcaaagcactacagaagagaatggaatcttctcaactcaaaactgtcaatctcactaccagtgacttagtgaaagatcacctgcgttacttgatgggaggaagatctactgttggagacgaggttctatgccgattcacctttcccgagagacctggtgctctaatgaacttcttggactctttcagtccacggtggaacatcacccttttccattaccgtggacagggtgagacgggcgcgaatgtgctggtcgggatccaagtccccgagcaagaaatggaggaatttaaaaaccgagctaaagctcttggatacgactacttcttagtaagtgatgacgactattttaagcttctgatgcactga

SEQ ID NO: 138039 - DNA, 1465 bp, Arabidopsis thaliana columbia
caccacttgtcttgttcttgaaacacacggtcgtggccatgtctgttctgcttccgatctatcctctccaatccttggccagaagcaagagattgtttccgattcgaaccagatcaaaaccggtttgtttagcactgaccaatgctcaaacaaacggtggtgaccaagaggagaaagtagtgattgttggcgccgggattggcggacttgccactgccgtttcactccacaggcttggaatccggtcggtggtgttggagcaggcagagtcgcttcgtactggtggaacatcgctgacgctattcaagaatgggtggcgcgttcttgatgccatctccgtcgggcctcaactccgaaagcagtttcttgaaatcgaagggatggtagtgaagaaggaagatggaagagagcttcgttctttcaaattcaaagacgaagatcaaagccaagaagttcgggcggtggagaggcgagtactcttggaaacacttgcaagccagcttcctccacaaaccattcggttttcctccaaactggaaagtatacaaagcaatgccaatggggacactctccttcaacttggagatggaacccggttgcttgcaaagattgttattggttgtgacggtatccggtctaaggttgcaacttggatggggttcagtgagccgaaatatgttggccattgcgcttaccgtggcctcgggttctatccaaatggacagccatttcagaaaaaggtgaactacatatacggtaaagggcttagagctggatatgtacctgtctctgcaacaaaagtctactggttcatctgtttcaacagcccatctctagggcccaaaattacggatccagcgatcctaaaaaaacaagccaaagaactggttagtacatggccagaagatctgcaaaacctcatcgatttaacacctgatgaaactatcagcagaactcctctagtagaccggtggctatggcctggcattgctcctccagcatcaaaaggacgagtggttctcgttagagatgcttggcacccaatgactccaaatcttggacaaggtgcttgttgcgccttggaagattcagtagttctggcaaataaacttgctagtgcaataaacggcgagaccgaatcaatagaagtggcaatggaatcatacgggagtgagagatggtctcgagcattcccgttgacagtacgtgcaaacctagttggcgcacttctgcaatgggagaatcctctagtgtgttccattagaaacaatattgtcataccaaagttactgaggcttggaccaatgcttgaacacacaaactttgagtgtgaacctctctttgtttctaaaagctgaatttcgtatatatagtgagatccattgaatagagagacttgaacaatgtataatcataggaacaatataaactctgtgattgaatgtaaaagaatcatacaatgtag

SEQ ID NO: 138040 - DNA, 1294 bp, Arabidopsis thaliana columbia
  unsure (1)..(1294): unsure at all n locations
gaaggggaaccggagagaccaaaaccctaatttcgccgacgagaaaaaccatgccggagcttccagaggtcgaggcggcgaggagagcaatagaagaaaattgtcttggaaagaagattaagcgagtcattatcgccgacgacaacaaagtgatccatggaatctcgccgtccgatttccagacctcaatcctcggaaaaaccatcatctctgctcgtagaaagggcaaaaacctctggctcgaattagattccccgccatttccttcttttcaattcggtatggctggtgctatttatatcaaaggcgttgcagttactaagtataagaggtctgctgtaaaggactcagaggagtggccatctaagtattcaaagttcttcgtcgagcttgatgatggtctggagctttcatttactgataagaggagatttgccaaagttcgacttctagcaaatcctacttctgtgagtccaatatcagagcttggtcctgatgcattgttggagcctatgacagttgatgaatttgcagaaagcttagctaaaaagaaaataaccataaaacctctcctacttgatcagggatatatttcaggtattgggaattggatcgctgatgaagtgctgtaccaagccagaatccacccgttgcagactgcttctagcctctccaaagagcaatgtgaagctttgcacacatccatcaaagaggtcattcaacatgcagttcaagtcaatgctgatagcaaagagtttcctgttgaatggttgtttcattttcggtgggggaaaaaagcagggaaagttaatggtaagctttcccaccatctatctataaatttgatgaagcagaatttggggttttgcaggtgatagaaaaagctgtggaagttgatgcagacagtagtcagtttcctagtaactggatttttcataatagggaaaagaagccaggaaaggcctttgttgatggtttgaatcccacatttcacactcaaactctttatctacctgcaaaagttcataaaactgttggatctgttgttctctcaacttccaactgcagttgttaatccccataataatggtttaaacgttatgagagtgaatcgtgatgtatctgatttatgtggtaggtaatgaatactgttttggttattgcagggaagaagattgatttcattactgctggtggaaggacaacagcttatgttccanaactgcagaaactttatgggaaagacccccagaaagcagccaaggttagaccggctaaacgaggggtgaaaccc

SEQ ID NO: 138041 - DNA, 2208 bp, Arabidopsis thaliana columbia
tgagtaatttagagaaaacaatcagcgatgatgaatccccaaagaaacaaattcgtaaggtttaatggaaatgatgatgagttttcgaccaaaactaatagaccatcagtatcttcagttatgaaaaccgttagacgaagcttcgaaaaggggtcagagaaaatcagaacctttaagcggcccttaagcgttcattcaaataagaataaagaaaataataagaagaagaagatactaagagtgatgaatccgaacgattcatatcttcaaagctggaacaagattttcttgcttctctctgttgtggctttagcctttgatcctctgtttttctatatcccctatgtgaagcccgagcgattttgtcttaatctagacaagaaactccagacaatcgcttgcgttttccgcactttcatcgacgctttctatgtggttcacatgctgtttcagtttcataccggtttcatcactccttcttctagtggtttcggcagaggagagcttaatgagaaacataaagatatcgctttaagatacctcggctcatactttctaatcgatcttctttcgattctccctattcctcaggtagttgttctagctattgttccaaggatgagacgacccgcgtcgctagtagcaaaagagctactgaaatgggtaatcttttgccaatatgttccgaggatagcgagaatctatccgcttttcaaggaagtaacaagaacttctggtttggtaactgaaactgcttgggctggtgctgctttaaacctattcctctacatgttagctagccacgtttttgggtctttttggtacttgatttcgatagaaaggaaagatagatgttggcgtgaggcgtgtgctaacatacaagattgcagtcatgaaaaactgtactgttcaccaacaggggaagacaataggttatttttaaacggttcttgtccgttgatcgatcccgaagaaatcacaaactcgacggttttcaactttggtatattcgctgatgcattgcagtctggagttgtggagtctagagatttccctaagaagtttttctactgtttctggtggggtctccgcaatcttagtgctttgggccaaaacttgaagacgagttcctttgaaggagagatcatttttgcaatagtcatttgtatttctggactagtcttgtttgctctcctcattggaaatatgcagaaatatttgcaatcaactactgtaagagttgaggaaatgagagtgaaaaggagagatgcagagcaatggatgtctcatcggatgttgccagacgatctgagaaaacgtatccgtaaatacgaacagtataaatggcaagaaaccaaaggagttgaggaagaagctcttctctctagtcttccaaaagatctcagaaaggacattaaacgccatctttgtctcaagttgctcaaaaaggtgccttggttccaagctatggatgatcggttactagatgctctatgtgctcgtctcaaaacggttctttatacagagaaaagttacattgtgcgtgaaggtgaagcagtggaggatatgttgtttataatgagaggaaatttaatcagcaccactacttatggtggcaaaactggtttcttcaattctgttgacttagttgctggtgatttctgtggagatcttctcacttgggcattagatcctctcagttcccagttccctatctctagtagaaccgttcaagcgttgacagaagtcgaaggctttgttctctcagctgatgatctcaagtttgtcgctactcagtatcgtcgcctccatagcaagcaactccgacacatgttcaggttttattcagtgcaatggcagacatgggcagcatgttttatacaagcagcatggaagagacattgtagaaggaagctctcaaaggctttacgtcaagaagaaggcggaaaactacataacactcttcagaacgatgattcaggaggcaataaacttaacttaggtgctgcgattaatgcgtcgaggtttgcttctcatgctctgaggaatctaagagcaaatgcagcagcccgaaattctagattcccacacatgttaactttgttgcctcagaaaccagccgatcctgagtttcctatggatgaaacctagttgtgtatataggccctgttcgtttgcctgtcgctggcgactgaaaccagcgacagc

SEQ ID NO: 138042 - DNA, 927 bp, Arabidopsis thaliana columbia
caattattcaagatcgagacaagtgaagagtcgacaagaacatatagagattcatccatatcttgcgtgagaaaagcaaaggctaataacagttgagagaagggtgtgtttgtatgggctgctctgtatcgaagaagaagaagaagaatgcaatgcgaccaccgggatatgaggatcccgagcttcttgcatccgtcacgccattcacggtagaagaagtggaggctttgtatgaactgttcaagaagctaagcagctcaattatcgatgatggtcttattcataaggaagaatttcagctggctttattcagaaataggaaccggaggaatctcttcgctgatcggatatttgatgtatttgatgtgaagcgaaatggagtgatcgagtttggtgaatttgtccggtccttaggtgtcttccatccaagcgcgccggtccatgaaaaagtcaaatttgctttcaagttgtacgatttacgacaaactggattcatcgagcgagaagaattgaaagagatggtagtagcgcttcttcacgaatccgaactagttctttccgaagatatgattgaagtaatggtggataaggctttcgtgcaagcagaccgcaaaaacgacggaaaaatcgatatagatgaatggaaagactttgtatccttgaatccatcgctcatcaagaacatgactttgccatatctaaaggacataaataggacgtttccaagtttcgtttcatcttgtgaagaggaagaaatggaattgcaaaacgtatcttcctaatataagccatgcaaggaaagataaatatacataaaacgaatatttttgtacaagatcttaaaagaggaagatagagatgtaagctaggatttggaaataaaccgatcttgataacgataaaaaaaaaaaaaaaaaaaaaaaaaaa

SEQ ID NO: 138043 - DNA, 1228 bp, Arabidopsis thaliana columbia
ataagaaaaaaaacacaaacatctatcaaatttacaaagttttaaaactaattaaaaaagagcaagatgcctgctatgttaacagatgtgtttagaggccatcccattcacctcccacactctcacatacctgacttcacatctctccgggagctcccggattcttacaagtggacccctaaagacgatctcctcttctccgctgctccttctcctccggccaccggtgaaaacatccctctcatcgacctcgaccacccggacgcgactaaccaaatcggtcatgcatgtagaacttggggtgccttccaaatctcaaaccacggcgtgcctttgggacttctccaagacattgagtttctcaccggtagtctcttcgggctacctgtccaacgcaagcttaagtctgctcggtcggagacaggtgtgtccggctacggcgtcgctcgtatcgcatctttcttcaataagcaaatgtggtccgaaggtttcaccatcactggctcgcctctcaacgatttccgtaaactttggccccaacatcacctcaactactgcgatatcgttgaagagtacgaggaacatatgaaaaagttggcatcgaaattgatgtggttagcactaaattcacttggggtcagcgaagaagacattgaatgggccagtctcagttcagatttaaactgggcccaagctgctctccagctaaatcactacccggtttgtcctgaaccggaccgagccatgggtctagcagctcataccgactccaccctcctaaccattctgtaccagaacaataccgccggtctacaagtatttcgcgatgatcttggttgggtcaccgtgccaccgtttcctggctcgctcgtggttaacgttggtgacctcttccacatcctatccaatggattgtttaaaagcgtgttgcaccgcgctcgggttaaccaaaccagagcccggttatctgtagcattcctttggggtccgcaatctgatatcaagatatcacctgtaccgaagctggttagtcccgttgaatcgcctctataccaatcggtgacatggaaagagtatcttcgaacaaaagcaactcacttcaacaaagctctttcaatgattagaaatcacagagaagaatgattagataataatagttgtgatctactagttagtttgattaataaattgttgtaaatgatttcagcaatatgatttgtttgtcctc

SEQ ID NO: 138044 - DNA, 978 bp, Arabidopsis thaliana columbia
atgcatagtttgaatgaaacagtaattcctgatgttgattacatgcagtctgatagagggcatatgcatgctgctgcctctgattccagtgatcgatcaaaggataagttggatcaaaagacccttcgtaggcttgctcaaaatcgtgaggcagcaagaaaaagcagattgaggaagaaggcgtatgttcagcagctggaagatagtcgattaaagctgactcaagttgagcaggagctgcaaagagcaagacagcagggagttttcatctcaagttcaggagaccaagctcattctactggtggcaatggtggggctttggcatttgatgcagaacactcacgatggcttgaagaaaagaacaggcaaatgaacgagctgagatctgccctgaatgctcatgcaggtgatactgagctccggataattgtggatggagtgatggctcactatgaggagcttttcaggattaagagcaatgcatctaagaatgatgtcttccacttgttatctggaatgtggaaaacaccagctgagcgatgtttcttgtggcttggcgggttcccgtcatccgaacttctcaagcttcttgcgaatcagctagagcccatgacagaacgacaggtaatgggcatcaatagcttgcagcagacgtcgcagcaggcagaagatgctttatctcaagggatggagagtttacagcaatccctagctgatactttatccagtggaactcttggttccagttcatcggataatgtcgcgagctacatgggtcagatggccatggcaatgggcaagttaggcaccctcgaaggattcatacgccaggctgataacttgaggctgcaaacactacaacagatgcttcgagtattaacaacacgtcagtcagctcgtgctcttcttgctatacacgattattcatctcgattacgtgctcttagttccttgtggcttgcccggccaagagagtga

SEQ ID NO: 138045 - DNA, 656 bp, Arabidopsis thaliana columbia
aagtaatcaatcaaaagatggaaggcaaaactgtgatctcaagtctgctcataatgagtcttgtcttagcacagattcaagtagaagcaaaaatctgctgtcctaccaaggatgatagatctgtgtattttgtatgcatgctttccgtgtcatcccaattttattgtctattaaagagtaaatgcaaaaatacatctcagacgatatgtcctccgggatatactaatgacattctcgaaaattctggtgatgctgtcaatgaatattgcaagctagggtgtgcatcctctgtgtgtggtgccttgaccactctccaaaactttgacgcaagtaaagtattgagtgaagcggttgaacaatgcaccaaggcatgttcttctgtctgcaccggaggatctaccgccgcagttaaaagtgcctaaacaagtatatttaaaagtgaagggtggtcatcattcagagtggcgtgactgttttcatggaataattgtcgtctatcgatgtatgttgtaaaaaaaaatgctagactatggtgctagtactgtttaataagttgtttccggtttgccaatgtgtcatgagagtttttgatcctagattgtatatcccttctacttgtctttctctaaataaataataatgtgtccttctcgact

SEQ ID NO: 138046 - DNA, 863 bp, Arabidopsis thaliana columbia
cgacaaatttgattcccacaaattatttgatatcttgaggaaatgaaattcttcatttttattctagcgttacaacaactctacgtacaaagtttcgcccaagatttcgatttcttctacttcgttttacagtggcctggagcgtattgtgattcaagacatagttgttgctatccacaaaccggtaaaccagctgcagattttggaattcacggtctttggcctaactacaaaaccggtggatggccgcaaaattgtaatcctgacagtcgatttgatgatttacgggtttctgatctgatgagcgatttacaaagagaatggccaacgttgtcgtgtccgagcaatgatggtatgaagttttggacacatgagtgggagaaacacggtacgtgcgctgagtccgagcttgaccaacacgattacttcgaagctggtctcaagctcaaacagaaagctaatctccttcatgcccttaccaatgctgggatcaaaccggatgataaattttatgaaatgaaagatattgagaatacgatcaaacaagtagttgggtttgctccgggcattgaatgtaacaaagattcgtcacataatagccaactctatcagatttatttatgtgttgacacttcggcctccaaattcatcaactgtcctgttatgccgcatggtcgatgcgactctcgagttcaatttcccaagttctaaattttatggctacattttttctatgtatttacattctacctattaatttttatttgtgtttcttgcaaaatttagttgtaataaacagtgtataattggacgatacccgtgatttgcatggtaaaaagatgataaaggttactaaaaaaaaa

SEQ ID NO: 138047 - DNA, 912 bp, Arabidopsis thaliana columbia
aaagaagagagagagcgagtgagagatgggaagaggcaaagtggaagtgaagagaattgagaacaagatcactagacaagtaaccttctccaaaagaaaaagtggtttgctcaagaaagcctacgaactctctgttctttgtgatgcagaggtttctctcataatcttctccaccggtggcaagctctacgagttcagcaatgtcggagttggcagaaccattgagaggtactatcgctgtaaagacaatcttttggacaatgatacgcttgaagatactcagggcttgcgtcaagaggtgacaaagctcaaatgcaaatacgaatctcttcttcgcactcataggaatttggttggggaagatcttgaagggatgagtataaaggaattgcagacgctggagagacagcttgaaggagctctttccgcaacccgaaaacaaaagacgcaggttatgatggaacaaatggaagagcttcggagaaaggagagggagctcggagatataaacaataagctaaagcttgagacagaagatcatgattttaaaggctttcaagacctactgcttaacccggtgctcaccgccggttgttccactgatttttccttgcaatcaactcatcaaaattatatatcggattgcaaccttggatatttttacagattgggtttcaacaacactatgagcaaggtgaaggatcttcggtgacaaagagtaatgcaagaagtgatgctgagaccaactttgtccaatgatgggtttcgttgtcttggtttggactcattgagtcacgacgaagcgtttaggtcatttactatcgggacatactctttttttttttttttctttttttttttcacaagacatactctgttctttaatttcaattatttgttagagttctcgtt

SEQ ID NO: 138048 - DNA, 1573 bp, Arabidopsis thaliana columbia
atggctctaaacaagctcctcagtttgactttccaactactcctttttctacttagtgtttcatcggaatctccatggatcgccgaagatacgtctcaaatccagacgaagctcctcgaattcgcgaagagtccggaggtcttcgattggatggtgaaaatcagaaggaaaatccacgagaatccggagcttggttacgaagaactcgagaccagtaaactcattaggtcggagctggaacttatcggaatcaagtataggtatcctgtagctatcaccggtgttatcggatatatcggcaccggagaaccgccattcgtcgccctgagagctgatatggatgctttgcctattcaggaaggtgttgagtgggagcacaagagcaaaatccctggtaaaatgcatgcttgcggacatgatggtcatgttactatgcttcttggggctgcaaagatacttcatgaacatcgccaccatttgcagggaactgtagtgcttatctttcaaccagctgaggaaggtttgagtggagcaaagaagatgagagaagaaggagcgttgaagaacgtcgaagctattttcgggatacatctttctgcccggattccctttgggaaagccgcttcacgtgcaggttcatttttggccggagctggagtcttcgaggctgtaatcactgggaaaggaggtcatgctgccatccctcaccatactatagatcctgttgttgcagcctcaagcatcgtcctcagtcttcaacaattggtttcacgtgaaactgaccctttggattcaaaggtggtcacagtttctaaggttaatggaggcaatgcttttaatgtcatccctgattcaatcaccataggaggaactcttcgagcctttaccggatttactcagcttcaacagagagtcaaagaggtgattaccaaacaagcagccgttcaccgatgcaatgcgtccgttaatctaacaccaaacggtagagaaccaatgccaccaacagtgaacaacaaggacttgtacaagcaattcaagaaggtggttagagatttgttgggtcaagaagcttttgtggaagcagcacctgtaatgggatccgaagacttctcatactttgcagaaacaatcccgggccatttctctctactgggaatgcaagatgagaccaacgggtatgcatcgtctcattcaccactctatagaatcaacgaggatgtgcttccgtacggtgctgcaatccatgcatcgatggcagtacagtacctcaaagagaaggcttctaaaggttctgtctcaggctttcatgaagaactctaaaccttggttgtagacaggttgttcatcggttattggttcagattcagaagcacaaacctaacactccattgaattaatcaagtgttatcgtacaagatccttgcaagtgttatagaatgatgaaaatgtatttaatagctaattttcaattggcaaattatcaacttttaatagtctgtgtaaaagtattgacagaaacttagaacacgaattatgatcattggtcttgttgtaatgtattggcaaaaatcat

SEQ ID NO: 138049 - DNA, 1381 bp, Arabidopsis thaliana columbia
gttaagagctaccagaaaaatcaaggtttaaggaaatttcagcaaatggccaacgatcagaagaatagtgagtcttttccagcgaaggaagatcataagaaggatgatgcggcagctccagcagaagtagaccataaggatgaattctcggcatcacagccacatccggtcgaaaacatagttttagttgggcgtacagggaacggcaaaagcgccacggggaacagcatcgtcagatcaaaggtgtttaagtcgaaaacaaaatcatcaggtgttacgatggaatgccatgcagttaaagcagtgacaccagaaggccctatactcaatgtgattgacactcctggtctatttgatttgtcggtatctgctgaatttatcggtaaagaaatagttaaatgcctaactctagcggatggagggctacacgctgtgctcttagttttatctgtaaggactcgaattagtcaagaggaagagatggtacttagtaccttgcaggttcttttcggtagtaagattgttgattaccttatcgttgttttcacggggggagatgtattggaagatgacggtatgacattggaggattacttgggtgataacatgccggacttcctaaagagagttctcatattgtgtggccaacgaatgattctgtttgataacaaaaccaaggatgatgagaaaaagacaaagcaagtccatgaacttctcaaacttatcgacttggtcagaaagcagaacaacaatattccgtataccgatgagatgtaccatatgataaaggaagaaaatgaaaggcacaagaaagaacaagaggagctagaatcaaaagggcattcagaagagcagctcgcagcattgatgaaggagttacagataatgaatgaacgaaacctcaaggcaatggcagagatgatggagaaaaatatgaaaatagctatggaggcgcaggagaagctctttgagcaaagagaaaaagctcaggagatgagctaccagcaaaaaatggaaatgcaggagaagttaaagcagatggaaggacgtatgcgtgctgaaatggaagcgcaaatgctcagccgtcagcagtgcagcattctctgatcattcactgtgcgctcttccaccctcacactttgccttcttaatgacaaatagagaaccattgcctagactttgtgtttctaacgcggaacattttctatgttcctcgtttgagcatgctcttggacttttggcctgttatgagtcagcttttgcttttctttcattttcatttatgttatttatctaaattgattaggccagtcgtagcctaatctttgtttgatttgctacgtatttttagtgtaataaatatgtgtgtaagtgttatgtg

SEQ ID NO: 138050 - DNA, 841 bp, Arabidopsis thaliana columbia
aaggaattgaagacaaaagcaaagaaaatgagcacagcaagattcattaagtgtgtgactgtcggagatggagcagtgggaaagacttgtatgctcatttcatataccagcaatacgtttcctacggattatgttccaacagttttcgacaacttcagcgcaaatgtggtggtcgacgggagtaccgtgaaccttggcctgtgggatactgccggtcaggaagattataataggcttaggcctttgagttacagaggagcagatgtcttcttattagcattttcccttataagcaaggccagttacgagaatattcacaaaaagtggcttccggagctgaaacattatgctcctggcatccccattgtgctcgtcggaacaaaattagatttgagggatgacaagcagttcttgaaggatcatccaggagcagcttctataacaactgctcagggagaagaattaaggaaaatgattggagctgttaggtacttagagtgcagctccaaaacccaacagaatgtgaaggcagtgtttgatacagcgataagggtagctttgaggccaccaaaggcaaagaaaaagataaaaccattgaagactaagagatcaagaatatgctttttcctataatatctgaacagatttcaataaataacaaacatttatatatacttgtattttgatatttttttgaatattttctacttgaaatagtggactttgcttcatcacgttattggcgagagtattgtcgaatcatgttaccattattcgggagaaatttgtaaaatagtagtaatttggcaagaaaattgaggattgatattttttccccata

SEQ ID NO: 138051 - DNA, 2316 bp, Arabidopsis thaliana columbia
cttggaatcattggtcaaaagagagaggctacaactttaaaaggccttcaataacgttggaccggctctaagaggacaaagggtagtcttatatcttcagtcttctacaagccaatggttgaagggttctcattgtcattgatgttcctccttgtttcacatttctttgtctcaggagtaatgtcgacaaactttactatagagaacaaatgcgattacactgtctggccgggattcctaaccatgactactgcggtttcgctccccaccaacggcttctccctcaagaaaggggagtcacgtgtcatcaatgtgccaccgtcatggtcaggtcgtttgtggggtagatcgttctgctccaccagctcaacagggaatttctcatgtgccacgggagactgcggctccggaaaaatcgagtgctccgattccggagcaaggcctcctacgacgctaattgattttacccttgacgctaccgacggtcaagacttctacgatgtaagcgtcgtggatggttacaaccttccgttggttgtggtcccacaacgtctagggagtggccggacatgtagcaacgttggttgtgtggttaacttgaacaagacttgtccgtcggagcttaaagtgatgggaagctctaacaaggaacatcccattgcttgcatgaacgcttgtcagaaattcgggttgccggagttctgctgctacggtgagtacggtaaacctgcaaaatgtcaaccgacgctttactctacgaatttcaagaacgagtgtccactcgcttatagctatgcttatgacaatgaaaacaacaccttcagatgctcaaactcacctaactatgtcatcaccttttgccccaacgacataagttcaatgtctcaaccatccaaggaaactaatggaggaacgaaacaaaagtcatcatggaagttaaaactcatagttggagtctcagcagctttgaccctgatgatcttaattgtggtcgtaataatagtgagaacaaagaatatgagaaatagtgagtggaatgatcagaacgttgaagcagttgcaatgttgaaacgatacagttatacaagagtcaagaagatgacaaactcatttgcgcatgttctcggtaaaggaggatttggaactgtctacaaaggaaagttagccgatagcggtcgggatgtcgcagttaagatcttgaaggtgtcagaggggaatggagaagagttcattaatgaagtagcaagcatgagtagaacatctcatgtcaatattgtttctctgcttggattctgttatgaaaagaacaagagagctataatctacgagttcatgccgaatgggtccctcgacaagtatatttctgcgaatatgtcaacaaagatggaatgggaaagattatacgacgttgcggtaggtatctctcgcggcctagagtatttacacaatcggtgtgtcacgaggattgtccatttcgacataaagccgcagaacatactgatggacgaaaatctttgtcctaagatttcagattttggtcttgctaaactctgcaaaaacaaggagagcatcatatcaatgctgcacatgagagggacctttggatacattgcccctgaaatgttttccaagaattttggagcagtttcgcataagtcagatgtttatagttatgggatggtagttcttgagatgattggagcaaagaatatagaaaaggttgaatattctgaatctaacaatggttcaatgtactttccagaatgggtctataaagattttgagaagggagaaatcacaaggatttttggaaatagtataactgaagaagaagagaaatttgcaaagaaattggtattggttgctctatggtgtattcagatgaatccatctgaccgtccaccaatgatcaaagtcactgaaatgttagaggggaatctagaggctcttcaagtaccacctaatcctctcttgttttcacccgaggaaacggttccagacactcttgaagatagtgatgacacttcaaccttctttaatccaagtcattttgaaagaggtactctcttagctagtgaagatgttttacaacatgggtcaaggtcctcctaaactaaagtcaacccgagagcggatctatttaaacttgtcaagatctttagctatttctcgattagtttttaataacttctgacttaatagtgtgtttctatgcttattagatgatgtttactgacgcaggcactcaatattgttggttaatgaagactattttctgttgtttttctcttggaaagagagaaacgttaatataaa

SEQ ID NO: 138052 - DNA, 1952 bp, Arabidopsis thaliana columbia
tcgagagcgaaggaagagagagagagagggagagatcaaaaaaatttgtgaaaaaagagatttattttagggttttgttgattttctttgttcattttgccgtcgtctctttctctttctcttgtgaagaaaaagaagaaaaatgaaacttctgggtttggtcttcttgctgtttaatctgtttatgttttcgttttctcggaaacttttaaccgagagtggtggtggtctccacgacgaagctgctctgttgaagttgaagagtagtttcttggatccaaatggagttctgtctagctgggtttccgacagctcatcaaaccattgttcttggtacggtgtctcttgcaactctgattcgagagtcgtttctttaattctcagaggctgtgatgagcttgaaggtagtggtgttcttcatctcccagatttgtcttcttgttcttcaagtaaaagaagacttggtggtgtaatctctcctgttgttggagatttgtctgaaattagggttttatctctgtcttttaatgatcttagaggtgagattccaaaggagatttgggggttggagaaattagagattcttgatcttaaaggtaacaactttatcggtggaattagggttgttgataatgttgttcttaggaaacttatgagttttgaggatgaagatgaaattggtccaagctcagctgatgatgattctcctggtaaatctggattgtatccgattgagatagcttctattgtgtcagcttcagtgattgtctttgtgcttcttgttcttgtgatcttgttcatctacacgaggaaatggaaacgaaactctcaggttcaggtagatgagatcaaggagattaaagtgtttgttgacattggtattcctctgacgtatgagatcattgttagagctactggttactttagtaactctaactgtatcggtcacggcggtttcggttcgacttataaagcagaggtgtctccaacgaatgtgtttgctgttaaaagactctctgttgggaggtttcaaggtgatcaacagtttcatgctgagatctctgctcttgagatggttaggcatccgaatcttgttatgttaatcggttaccatgcgagcgaaaccgagatgtttcttatttacaactacttatctggaggaaaccttcaagatttcattaaagagagatcgaaagctgctattgagtggaaggtacttcacaagattgctcttgatgtagcgcgtgctctctcctatcttcacgaacagtgttctcctaaagtcttgcatagagatatcaaaccgagtaacatactcttggacaacaactacaacgcttatctatctgatttcggactctcgaaactcttgggaacttcgcagtctcatgtcacaactggtgtggctggaacattcggatatgtagctccagagtacgcaatgacatgccgagtctcggagaaagcagatgtttacagctatgggatagtcctcttggagctgatatcggacaaacgagctctggatccttctttctcatcgcatgagaacgggttcaacattgtctcgtgggctcatatgatgttgagtcaaggcaaagcgaaagaagtcttcaccacaggactatgggagactggtcctccagacgatttggtcgaggttctacatttggcactcaaatgcaccgtcgatagcctctcgataaggccgacaatgaaacaagctgtaagactgctgaaacgaatccagccttctagattgtgatacaaagctagaagaaaggtgtttttagaggatttgtacagcagcaaacaagtgcctagccattagaatctttctcaagtctgttttttatattttcagtgctagggaggtttttcatatgcatcatcaaaatgttattctcagtctactctcttgaaaactgatataaatgatgctctgcggccgc

SEQ ID NO: 138053 - DNA, 1787 bp, Arabidopsis thaliana columbia
cacccacgcgtccggaaatgtacgaatagagagtgaagtgaacgacacataataaaaccaaagaatggagatatggttactcatattggcctctctctccggatctctccttttccatctcctcctccgccgccgtaactcctcctcccctccgttacctcctgaccctaacttcttacctttcctcggaaccctccagtggctccgggaaggcttaggtggcctcgaatcctatctccgctctgtccaccaccgtctaggccccatcgtcaccctccgcatcacttcccgccccgccatattcgttgccgatcgttccctaactcacgaggctctcgtcctgaacggcgggccgtctatgcggaccgtccaccacctgcctgtaattagcaagatagttgacgaacacaacatcagctccgggtcatacggagccacgtggcggcttctccgtcgaaacatcacctctgagattcttcacccctcgcgcgtgagatcttactcccacgctcgtcattgggttcttgagatcctctttgaacggttccgtaaccacggaggcgatgaaccgatcgtcctcatccaccatctccactatgcaatgtttgcgcttcttgtccttatgtgttttggagataagcttgatgagaagcaaatcaaacaagtggagttcattcagaggctccaactcctaagcttgtccagattcaacatcttcaacatctggcctaagttcaccaaactgattctacgaaagaggtggcaagaatttctccagattcggagacagcagcgggacattttgcttcccctgattcgtgcccggagaagatcattgaagagagaaaagagatcggaggaagaagacaagaaagactatgtgcaatcatatgttgatactctactcgatctagagcttccagaggaaaataggaagttgaacgaggaagatattatgaacttgtgctcggagtttctcacggccgggactgacacgacggccacggcgctgcaatggatcatggccaacctagtgaaatatccagaaatccaggagagattacacgaggagatcaagagcgtggttggaagaagcaaaggaggtggggaagaagatgtggagaagatgccgtatctaaaggcactggtgttagagggactccggagacaccctccaggacactttttactcccacacagtgtcacggaggacactgtgttaggaggatacaaagtaccgaagaacgggacgatcaacttcatggtggcggagatagggagggatccagtggagtgggaagaaccaatggcgtttaagccagagaggtttatgggagaagaagaagcggtggacctaaccggaagtagagggataaagatgatgccgttcggagcaggaagaaggatatgtccgggcataggtctagcaatgttgcatctggagtactacgtcgccaacatggtcagagagttccaatggaaagaggtggaaggtcatgaagttgacttgacggagaagcttgaattcactgtcgtcatgaagcatccgcttaaggctcttgctgttcctaggagatgtcactagtctacttcttcctcttttcttgggctttaatattcaaaatgtgtgaacttagtttggtggaattctcaataaactatgggataagtcataaaaaagagttattatgctgaccgtttgtactttgtattcaagtgtatgttggacaccttaaaataaaacagatatttatatagttcagatttaaaaaaaaaaaaaaaaaaaa

SEQ ID NO: 138054 - DNA, 862 bp, Arabidopsis thaliana columbia
cttatctataaaacattctaaagaaaaatgaagatgataatccaaattttcttcatcatctccctcatttcaaccatctcttttgcctctgttcaagacttttgtgtagctgatccaaagggtcctcaaagcccatcaggatactcttgcaagaaccctgaccaagtcaccgaaaatgactttgcatttaccggcctcggcaaagctggaaacacttccaacatcattaaagccgcagtgactccagcctttgctcctgcttacgcaggcatcaatggccttggcgtatctctggctcgtcttgacttagccggtggtggtgtcatccctctccacactcatcctggtgcttctgaggtccttgtagttattcaaggcaccatttgcgccgggtttatctcctctgctaacaaagtttacttaaagacacttaacagaggtgattctatggtgtttcctcaaggacttcttcattttcagctaaactctgggaaaggccctgccttagcctttgtcgcattcggaagctcctccccagggctccagattctaccatttgctctgtttgcaaacgatttgccttcagaacttgttgaagccacaacgttccttagcgatgcagaagttaagaagcttaagggtgtgcttggaggaactaattaagcttcacttagtttcattgttcattttttttcaaaaatgtggttgtgcgttttgttatttcgagttcctctagcattttgagtttgtttttctttatgagttgttattgttctcgaagttttcacttttatagtctctttggcttgaattgtaataactaataagcattacattgcagatttctaaaaaaaaaaaaaaa

SEQ ID NO: 138055 - DNA, 928 bp, Arabidopsis thaliana columbia
caagatcgtcaagagacagtaaacctaaaatggcgaactcagacaaaagattattcgagaaggtagctataataaccggaggagcaagagggataggagcggccacggcgagattgttcacagagaatggcgcgtatgtgatagtcgcggatatccttgataatgaaggcatccttgtggcggaatcgatcggtgggtgttacgttcattgtgacgtatcgaaggaggctgatgttgaggcggcagtggagctagcaatgagacgtaaaggtagactagatgtgatgttcaacaatgccgggatgtcgcttaacgaaggtagtatcatggggatggacgtggacatggttaacaaacttgtctcggttaatgtcaatggtgttttgcatggtatcaaacatgccgctaaggccatgatcaaagggggacgaggaggctcgataatatgcacatcgagctcatcagggctaatgggaggacttggaggacatgcgtatacgctctccaaaggaggcatcaacggggtggtgaggacaacggagtgcgagcttgggtctcacggcatccgtgtgaatagcatctctcctcatggagttcccactgacatcttggttaatgcgtaccgtaagttccttaacaatgacaaactcaacgtcgctgaggtcaccgacattattgctgagaaagggagtttgctgaccggaagagccggtactgtggaggacgtagctcaagcagctttgtttcttgcaagccaagaatcgtcggggttcattaccggacataacttggttgttgatggtggttacacatctgccactagtactatgagatttatctacaactagttttcgtttggtggtgtttccttttcaaagttgttctttgaaaaaagaaaaaaaaaaaaaaaaaaaaaaaaaaaaaaaaa

SEQ ID NO: 138056 - DNA, 1332 bp, Arabidopsis thaliana columbia
ggaacagaaatttcagtatcgatcttcttcttcttcttcttcgccaatttcaacactttcgaaatctgagaatcttctgtgtgaatcggaacgaaattaacggtgttacggaggctagggctgatgggcgcggcggggtccaaactcgagaaagctctcggcgaccagttcccggaaggagaacgatacttcggtttcgaaaatttcggcaacacttgttactgtaacagtgttttgcaggctctttatttttgtgctccctttcgtgaacaattgcttgaacattatgcaaataataaagctgatgctgaggagaatctcttgacctgcttggctgacttattttcgcagataagttcccagaagaagaaaacaggagttatcgctccgaagcgctttgtgcaaaggttgaagaaacagaatgagcttttccggagttatatgcatcaggatgcacatgagttcctgaattatttgctaaatgaacttgttgagatcttagagaaagagacacaagccacaaaagcagacaatgaaacttcatcatctcctgaaaagattgcaaatgtactgaaagctcccctggcaaatggtgttcataaagagccaattgttacttgggtgcacaagatttttcagggtatacttaccaacgagacaaggtgtctacggtgtgagacagtaacagcaagagatgaaactttcctagacctgagccttgatattgaacagaacagttcgataactagctgtttgaaaaacttcagctccacagagactctacatgcagaagacaagtttttctgtgacaaatgctgcagtttacaagaagcgcagaagagaatgaagattaagaaaccgccacacatcttagttatacatctgaaacggttcaaatacatggaacagttgggccgctacaagaagctatcgtacagagtcgtcttccctctggaactgaaactcagcaacacagtggatgaatatgtggacattgagtactctctctttgcagtcgtggttcatgtcggaagtggacctaaccacggtcattatgttagcctcgtgaaatcccataaccactggctcttctttgatgatgagagtgtcgaaataattgaagaatctgctgttcaaacattcttcggttcatcgcaagagtactcaagtaatactgatcatggctacatcttgttatacgagagcctcggaacaagatagagaaaaaagcttttagtcatttgacaagaacataacctctcctctcttactctctcttcgaagaacataaccatgtacagttttaatgacaagattactatttggttacat

SEQ ID NO: 138057 - DNA, 2136 bp, Arabidopsis thaliana columbia
gctacccagccagtatcaagagaggaaggtagagaggagtgagagagagctttgggttcgatttcatgtcgtagatctttcactctgggtttgcgttccacaaaatcctaattcgcggaactctggatttgatcggcgatggcggtaggcgatcagacggagcagaattacttgccgaagaagaagaaatccgaaacggaagatgataagaggaggaagaaaattgttcccgggagcttgttgaaagctgtggtgcgacctggaggaggtgattcgagccccgttgatggtgatcaggttatttatcactgcactgtacggacactggatggtgtagttgtggaatctacgaggtcagaatctggagggagaggtgtaccgatcagagatgtcttgggaaagagcaaaatgattcttggattgctcgaaggaattcccacgatgcacaagggtgaaattgcaatgttcaagatgaaacctgaaatgcactatgcagagattgattgtccagtctcagctccagaaaattttccaaaagatgatgagcttcattttgagattgagttgttggatttttctaaagccaagattgcaagtgatgatctgggggtcatcaagaagattctaaatgaaggtgagggctgggaatctcccagagaaccctatgaagtgaaagccagaatatctgctaaatccggtgatggacacgtgatcttctctcacacagaagaaccttatttcttcacatttggaaaatctgaggtgcctaaaggtcttgaaatcggaattggaaccatggctcggaaggagaaggcagtgatatatgttcgcaagcagtacttgactgaatctcctttgttgcatatagatcaagaccttgaggaagttcattttgaggttgaactggtacatttcattcaggtgcgggacatgcttggagatggacgtctcataaaacgtcgaattcgagatggaagaggcgagtttccaatggattgtcctctccaagatagtcgtttaagcgttcactacaagggcatgcttctcaatgaagagaagactgtcttctatgatagcaagattgacaataatgatcaaccgttggagttcagttcaggagaaggactggtccctgaagggtttgagatgtgtactcgtttgatgctacctggggagattgctcttgttacatgcccccctgattatgcatatgacaaatttccgagaccacctggcgtgtctgaaggtgcacatgttcagtgggagattgaactccttggtttcgaaacgccaagagactggactggcttgaacttccagagcatcatggacgaggcagataaaatcagaagcacgggtaataggcttttcaaagaaggaaaatttgagctcgcaaaagcaaagtacgaaaaggtgctccgggaatttaatcatgttaacccacaagatgaagatgaaggaaaaatatttggtgacacaaggaatatgttacatctgaatgttgcggcttgcttgcttaaaatgggagagtggaggaagtctatagagacatgcaataaggtcctagaagcaaagcctggtcatgtgaaaggtctataccgccgcggaatggcttacattgcaggtggagagtatgatgacgctagaaatgacttcaatatgatgatcaaagtggataaatcatcagaagctgatgcgaccgctgctctattgaaactgaagcagaaggaacaggaagcggagagcaaggctagaaaacagttcaaaggattattcgacaagagaccgggggagataaccgaagttggttcagaaataagagaggagtctaaaactatagaagaagtagatgagacaaaggataatgatgatgatgaaacactggaagaaggagctacgacagtgagcacggaaaggaagaggaaatggtcggagaaagcctggccgtttctgaagaacgtgatgctccaaatcggaatccagcttggtgttgttctgatagggattttgattttccagtttgtgagcgccaaatttacatgagagagatatgaatgaataaacaaaccaacggcactgtagactcagaaaatataaaactaatggattaaacgttaagcttaaaaaaaaaaaaaa

SEQ ID NO: 138058 - DNA, 418 bp, Arabidopsis thaliana columbia
caaaggaccacttcatccccagagaagatgatcggaggaaagattcctgaatcacgagtttctgcatcactaccatgttttcaggcgagtgctgaagggttaagtcgacggaagagcttagctgaagccggaaagagagatatcttctatggagaagatgacgtggcagacttgatgtttagagaagaggaagtggaacaagacacggtcatgagagcttatagaagtaacgaagctatgaaatctatccaagatacgagacgaagacaaagaaggttcttttgttttgaatgttttgactttctcaaactttttttctctagagatcgaaactaataaaccctaacaacaaacaatgtttcttgtatctctttatcttgtaaattctttcgattgaaattgatactatatggacgac

SEQ ID NO: 138059 - DNA, 1129 bp, Arabidopsis thaliana columbia
cttctaggcgttgttgttgttttgtctcattgttgctctgtttcttgaggttttataaatggatcctggtactttaatctcggtgatcaataggttgcttgaagctagagaaaaaccaggaaagattgttcagttgtctgaaacagagatcaaacagctctgtttcgtctctagagatatcttcttgagacaaccaaatctcttggaacttgaagctcctgttaaaatatgtggtgacattcatggacaatatccggatctcttgagactattcgaacatggcgaataccctcctaattcaaactactttcttggagattatgtcgatcgcggcaagcaaagcctcgaaacgatttgtcttttacttgcttacaagattaagttccctgaaaacttcttccttctcagaggaaaccatgaaagtgcatcaatcaatcgtatttacggcttctatgacgagtgtaaacgtagattcagtgtcaagatttggcgaatcttcactgattgcttcaactgtctccccgtcgctgcactcatcgatgagcgaattttttgtatgcatggtgggctctccccggagctgctaagcttgaggcagattagggatattcgtcgtccaacggatattcctgatcgtggtttactctgtgatctcttgtggtctgatcctgataaagatgttagaggttgggggcctaacgatcgcggagtttcttacacttttggatcagatatagtttctggatttcttaaaagactcgatcttgacctcatttgtagggctcaccaggttgttgaagatggattcgagttctttgcgaataagcagctcgtaacgatattctctgcgccgaattactgtggggaatttgacaatgcaggtgcgatgatgagtgtgtctgaggatttgacctgctcttttcagatcttaaaatctaatgacaagaaatcaaagttcagtttcggaagcagaggtggtgctaaaactagcttccttatcctaaagtgaaggtatgtattaatcacatcactttttaatttgtggatatactgtagcacaaaaaataaatatggtaaatgcatataatttgctctaaaaaaaaaaaaaaaaaaaccctgacgtagctcg

SEQ ID NO: 138060 - DNA, 737 bp, Arabidopsis thaliana columbia
  unsure (1)..(737): unsure at all n locations
tgattccccngggtggcnggatttgattggagaggttttttttttttttttttgaaacaananaaantgataacaaccggaaattgagcaacaaaatttcngacgttaagagaaatggcaacgtcttntgttctgtccacctttcgctgcggcggcaattangtngcaatantnttatntcctgcttcagcttcccctcacatgaaatacattgacgccatctgcgatcgttcccatgaccaagctttntgcgttaaaactttgactaccaatccccctacagctgctcccattggcctgcttccattgtcggaggctgtgatcaacttggccatatcccacgcggagaagacagcgattttcgtagatgagactgcgaagaaagatccaacggtgaaggttgcatttacagagtgccacaaggcntacttggccgtggcagctgatctcaagagtgcaaatgtgaagctcaaggcatcccccgacacggctaactacgacgtcagggcttccagtgacagcatgaggcgcgtgaatgaattggttgggaaaaacactgacaaggcttcgaccacgctcaaggaaatgacagtgcagatggagaaactacttgatcttgcagctggagccgccgatgccgttgatgacgacgatgagaacatgcgccttcgcgtctaatatcaagcttatcgataccgtcgacctcgaggggggcccgtacnccnnttntccnnnaa

SEQ ID NO: 138061 - DNA, 1952 bp, Arabidopsis thaliana landsberg
ccccaaagcataattatatataacaataaacaattagtaccaaaacacataaaaaatctataactgttatctcaaccaaaaattgtttattgttatgcgaggggttaaactcttggccgcgtgcctctacctggccgctgccgcaacggtggtagtccgagccgaagatccttacttccatcacgtatggaacgtgacctacggaaccgtgtctcctctcggtgttccacaacaagtcattctcatcaacggacaattccctggtcccaacgtcaactcaacctccaacaacaacgtcatcattaatgtcttcaacaacctcgacgaacctttcctcctcacatggtaattataacatttgtttcacggttcaccaaaatatatcattttcaatatgcatgcttataatatatgttttgtttttgcgttttaggaatgggatccaacacaggaagaactgttggcaagatgggactccaggaactatgtgtccgatcatgcccggcaccaactacacttaccatttccagcctaaggatcagatcggaagctatttctactaccccagcaccgcgatgcaccgttccgctggtggattcggtggtctccgtgtgaacagccgtctcctcatcccggtcccttatgctgacccagaagatgactacaccgtcttgatcggtgactggtacaccaagagccacacccagttgaagaaattccttgacagcggtcgtactcttggccgtccagatggtattctcatcaacggaaagtccgggaaaggcgatggatccgatgcacctctctttaccttgaaacctggaaagacctacagggttaggatctgtaacgtgggtctcaagacatctcttaactttaggattcagaatcacaagttgaagcttgttgagatggaaggatcgcacgttctccagaacgattatgactctctcgacgttcacgttggtcagtgttacggaaccatccttaccgctaatcaggaagctacagattactacatggttgcatccagtaggttcctcaagaagaaagtgagcactgttggtgtgatgagctacgaaggaagcaacgttcaggcttcaagcgatatccccaaggctcccgtcggctgggcttggtctctcaatcagttcagatccttcagatggaacttaaccgccagtgctgctagacctaacccccagggatcttaccattacggaaagatcaacatcacccgtaccatcaagctcgccaacaccaagaatgtggtgaatggaaaggtcaggtttggattcaacggtgtatcacacgttgacaccgagactcccttgaagctcgctgagtacttccgcatgtccgagaaggtcttcaaatacaacgtcatcaaggacgaaccagcagccaagatcacaacactaaccgtcgagcccaatgtcctcaacatcactttccgtacctttgtcgaagtcgtcttcgagaaccacgagaaaagcatgcaatccttccatttggacggttactccttcttcgctgtcgcgtaagccctttctcttttacccattaaaccaattggcaatgaatgaattgacctgcgtctcttatacaagatatgagatccctaacactttctctaaacgttttcacacagttccgagccaggaagatggacaccagagaagagaaacaactacaacttgctcgatgccgttagcagacacaccgtgcaggtataccccaaatcctggtcagccattctcttgacattcgacaatgccggtatgtggaacatcagatcagagaactgggagagaagatacttgggccagcaattgtacgtcagtgttctgtcccctgaaaaatcactaagagacgagtacaacatcccactcaacaccaacctttgcggcatcgtcaagggcttgccattacctacaccctacactatttaa

SEQ ID NO: 138062 - DNA, 2824 bp, Arabidopsis thaliana landsberg
aaaaaccactctttcgaaaggatgcgggttttgaaatactttcgagctccttcttctctccgtcatcgttcctctcccatggctcagtttcttcgacgcttctcttcctctcccatggcgaacgaagacgaattccaatctccggtggaaccatcacagcagcaatctcaggactgtgtttcggagtcttatctgatagggtttgttatcgcgaacatagtagggttaaagtactattccggccgaatcaacggtcgagagatggtgggtctggttcgagaacccttgaacgcatatgacaataatgcaatcagagtactcaacacgcgatctgagcaagtgggtcacatcgagcgtacagtagcagccgttctcgcgccgatgattgattctcacacgatcgtcgtcgagggtattgtacccaatactcgttctaactccaataggtacagaatcccttgtcaaattcatgtatttgcaaagttagaagcgtcctctactgtgaaatcgacgatttctagaggtgggttagtgttgatttcggagtcagatacatcgtttgggttatctgaggctgttgtggttaaggaacagatgggaaatggagataagaggagtgttgataagatttttaaacttgttgatgagaatgtgaagttaatggggaaattggtagcggctgagccacctagggaagtgataaagtctgaactttttgctcatcagaaggaaggattaggctggttactctatagagagaaatctggagaattgcctccgttttgggaggagaaagatggagaatttttgaatactttgacgaattaccgctcggataagcggcctgatcctttgcgtggaggggtgtttgctgatgatatggggttgggtaagacccttactttgctttccctgatagcttttgatagatatggcaatgcatccaccagtacgccaaccgaagagcctttggatggtgaaggagacaagattgaaaagaagggtaaaaagagaggaagaggcaagagcagtgaaagtgtaactcgaaagaagcttaaaactgatgatgttgttggcatgaatgtgtctcaaaagacaacgttgatcgtttgtccaccttctgtgatttcagcatggataacacagttagaggagcatactgtaccgggaatcttgaaggtgtatatgtatcatggtggcgaaaggacagacgatgttaatgagcttatgaagtatgacatagtgttgactacttacggcactttagctgttgaggaatcgtgggaagattctcctgtaaagaaaatggagtggctgagaataattcttgatgaggcacacaccattaagaatgcaaatgctcaacagagccgagtagtttgtaagttgaaggcttcccgcagatgggctgtcacaggaactcctattcagaatggttcatttgatttgtactctttgatggcctttctccggtttgagccattttcgattaagagttattggcaaagtttgatacaacgcccgcttggtcaagggaataaaaagggtctttcacgtctgcaggtaataataatacattacttacatgtatgcctgttttttgttttgctctttggtgaaaagttatttaatgacacgcttttcaggttttaatggcgacaatttcgttaagaagagcaaaagaaaagagtttgattggtttaccgcctaagactgttgaaacttgttatgttgagctttctccggaagaacgtcagttatatgatcacatggaaggagaagcgaaaggtgttgtgcagaatcttataaataatggaagcttgatgcgcaactactcaacagttttgagtataatcttacggcttagacagctttgcgatgacatgtctctatgccctccagaattaagatcttttaccacttctacatctgtcgaaggtaataataacaaaaccggtacatattcttacttctggttgcatagcttatatctttgtgcgtttgtgaaacagatgtgactgataagccagagctactgcaaaagctggttgcagcattgcaagatggcgaagattttgactgtccaatctgcatttcgccaccaacaaacatcatcatcactcgatgtgcccacatcttttgcagggcttgtatccttcaaactcttcaaagaagtaaaccattgtgccctctttgccgtggctcccttacccaatctgatctctacaatgctccgcctcctcctacggattcttccaataccgatggagaagacgctaaatcttcaaccaaatcctcaaaggtctcagctttactatccctgctcatggcatcgagacaagaaaaccccaacacaaagtctgttgtgttctctcaattcaggaagatgctgcttttactagagactccactaaaagctgcgggtttcaccatcttgcgcttggatggagcaatgactgtgaagaaacggacccaagtcattggagaatttgggaatccagagttaaccggacctgtggtgttgcttgcgagcctcaaggcctctggtactggcataaacctaactgcagcctcaagggtttacttgtttgacccgtggtggaaccctgcagttgaagaacaggccatggacaggattcataggatcgggcagaaacaagaggttaaaatgataaggatgattgcgagaaacagtatcgaagagagggtccttgagcttcagcagaagaagaagaatctagcaaacgaagcttttaaaagaaggcaaaagaaagatgaaagagaggttaacgttgaagacgtggttgctctcatgtctctctga

SEQ ID NO: 138063 - DNA, 4032 bp, Arabidopsis thaliana landsberg
agagatgtcgttgttgtgtctttgtggagcgtcaaagttgaaaaaaagcgacagcccaagcgcataaatcatccactgctccttcttctctggcacatacacgctcctcccactttcttcttctttctctcgacgaatgttcttcgatctttgcgctctctcaagtctgtggaatcattagtctcggtatgtaatttctttccgatatttagctaaatttgaacagatatggtttcgattgaaatttgtcaagcggaagtttgtttgaatttaattgtgtgtgttcttagtgcgatactgtggtagctgatgatgattatgatcaggtttaaatgtgaaggactcgctcgcgcccattgagatggaatttgaattgtattagtagacttttcaataaatttggttacatagttttggaaagaaagcattaaatgtgaatcactgcggaaaaaaagaaagaaacaacaaaacggtcattgttgaggtgatacagtataataaatatatagcgggattttgtcggatgaaattgaaagtaacatttacggaagattttgtttcctttttttgtacgttagttcaaatttcaaaacttctatcagttctttgtctgtttttttattaaagcctaatttcttccttcttctacggattctgcagagtactattattttggacaaaggaggagcaaaaaaaaaatggagggtagaggttggccatggaagagaaagtcttcggacaaagccacgactgagaaaccagttgttggaatcgagtcaactcctgtttgttctttgtcctacttggcttctcttgagaatcaggtgctttaatttaacaccaaacctctgttttatatagttttgtgataatctgtcagtttttgtgagatagaaattttcatttgaagtctttttttgtgtgtttgatttgtgtgtcaggagaagtgtaaaaacacaaactatgttcagataactatggattcatacacacatatgagtagaatggaggatcaggtcaaattgtttgaagttcaagttaaagatcttaaagaaaaactcactcttgctcactctgagatcaacactaaagaatctttgattcttcaacatgccaaagtcgctgaagaagctgtttcaggtaaaatgttatttcagcatttttgtttgtttgttttgagatgttttcttttgttgcggactatagtcttttgttctttttaggatgggaaaaggctgatgcagaaactttggcacttaaacgtcaacttgagtctgttacactcttaaagctcactgcagaggatcgagcatcgcatttggatgacgcgttgaaagagtgtacaaggcagataaggattgtgaaagaagagagtgataagaagctgcaggatgtgattcttgctaagaccagtcaatgggataagatcaaagccgagcttgaaggaaagatcgatgaattgagccagggactacaccgggcagcttctgacaatgcagcactcactagatcgttgcaagaacgatctgagatgatagtaaggattagtgaggagaggtctatagctgaagctgatgtggaaaagttgaagactaatcttcagttggctgagaaggagattagttcgctgaagtacgatgttcacgttgcttccaaagaagttgagatccgcaatgaagagaaaaacatgagtttgaagtcagcggaaatggcaaacaaacagcatctggaaggagtgaaaaagattgcaaaacttgaagcagagtgtcaaaggcttagaggacttctacggaagaagcttcctggtcctgctgctatggctcaaatgaagctagaagttgaaagcttagggcatgagttcacagaccctcgagcacagagaaacatgtctcaaaatcacaatgcacacatcgcaaaggcagaggtttctactgatcataagttggaagagtgcaaaagagagaatgtatatctcacaagacgtacattggaattggaggaggagaatcagacacttatagaaaatctcgctgcccgtaacaatgagcttcaggtttcaagaaatgtatgcgctaagactctcggaaaggttaagattcttgaagggcagatacatatgtttaacaatgacaagactgccccaaaatcaaatagcagaaatctctctgaaagtctatccagtggtcatgatcataattatccgcctagtgtcacctccgtatcagatgatggatttgatgaagaaggaagttcttctgagtgtggcccagcaacctcagcagattctcataaagtgagaaaggtaagcgttaatggttcctcaaagcctaggagttctagtagactggagttgatggatgacttcttggagattgaaaagttagcagctaatgatccagatggagctaactcagcttcaaaatcttccagcagtgtctgtaatagtaaatttgtggaaaaccagtcctctagtaagtccagtgagccagaggaggatgcaacaacacttgatcagctgttagtggttctccgctcaaaaatcaacaggatatttgaatctcaagagggcattagcattgagaaaatcgttgaagccgcaagattttcgatccaagagatgcaaggatcatcaaccaaacgaatgtcaagtcgtctttttgaagttactgatgaaactctagagaaacatgtggatatccaaaacagcgaaaaggagcagaagaacaccaatcaacaagatttggaagcagctgtttccaatattcaccacttcataaaatcaactacaaaggaagcaacacaacttcaggacatgaatgggaatggacaactgagggagagcttggaggatttctcttcatcggttagtagatatccaactggtgaatcaagcctttctgaccttgttctagaactctcccgcattttggttctagctagtaaagagacatatgttgcagagagaaacgagaaggttacattgctacaaaaagagattggagagtcagattgtgatccactgggagatacagaggatcaccgtgtagataacttgatcaatggtcatgagttgaatgattcatcatgcaagagcttgttgaaagaggttgaacagctaaagtttgagaaagagaacattgcagtagaattatcaagatgcttgcagaatcttgaaagtacaaaggcagggttggaagaaaaagagcagctcatatcgaagctgaaattgcagctcacttcttcaaaagatctccaaagcttggcagaaactcagcttaaatgcgttactgagtcatacaaatcgcttgaacttcatgccaaagatcttgaagctcaagtgaaaagcttggaagaagagacaaagagacttgaaatagctttcaccgcagaaaagcatggccatgaggagactctagctaaatgcagagaccttcaagaaaaaatgcaaaggtataaaaaccataacttactaaggtcttccactatgcatagtttgttttgctaatttgacttatactataggaatgacacttgcgaaaattgttcatcatccaaactccaacctaatcaggtacacttcttactgtctaactgatatcttcttgataagattagcttcttgcatccgttttgttacatctactatataatctgcaattttcttgtttccaggagaaagacatagtatctgcaacagagaagcttgcagcttgtcaagaaacaattcacttactcagccaacagttagaatccttgcagccacagagcaaccacattctcaaatctcaatcccctgagaagaagtttcaacagcacaaaacctcagaagtaacaacaaactctgcactagatgatcttccacatgctcatatcattcaaccatctcgttctgttaagcacacagtgaatccaacggtccacgctatcatgaagtctagctctgtttcttcgtcttctaaagaagataatgagaagcatacgcgaggattaggtcgtttcttctcctcgaaatcgaagaacagtgcacgctaa

SEQ ID NO: 138064 - DNA, 1055 bp, Arabidopsis thaliana landsberg
aaaacactctctataatggaatccaaaaccataaacgacgtcgtcgtatcagagtcaaatcacgagttagcatcttcgtcgccatcagaatttgagaagaaccagaaacattaccaagaaatcatcgcaactcttcctcacaaagatggctggagaccaaaagatccgttcgttgagtacggtggtcactggtggctacaacctcttcttgaaggtttacttcacgcccagaagttcttcaaggcacgtcccaatgatttcttcgtctgcagctacccaaaaaccggcacgacttggctcaaagccttaactttcgcaatcgcaaatcgctccaagttcgacgtttcaacaaaccctcttctaaacgtaatccacacgagtttgtgccttacatcgaaatcgacttcccgtttttcccaagcgttgatgttcttaaagacgaaggaaacacgcttttctcgactcatatcccttatgatctcttacctgaatcagttgtgaaatctggttgcaagattgtttacatatggagagacccaaaggacacgtttgtgtcgatgtggacttttgctcacaaggagagatcacaacaaggaccagtggttagcattgaggaagcttttgataagtactgtcaaggtttatcagcttacggtccttatcttgatcatgttttagggtattggaaagcttaccaagcaaacccggatcagattttgtttctcaagtatgagacaatgagagctgatccattgccttatgtgaagagattagctgagtttatgggttatgggttcacgaaggaggaagaggagggaaatgttgttgagaaagtagtgaagctttgtagctttgagactttgaagaatcttgaagctaacaaaggtgagaaagatagagaagatcgtcctgctgtttatgccaacagtgcgtatttcaggaaagggaaagttggggattggcagaattatctgactccggagatggtggctcgtattgatggtttgatggaagagaagtttaaaggaactggctttctttcttcaaaatcatga

SEQ ID NO: 138065 - DNA, 1598 bp, Arabidopsis thaliana landsberg
  unsure (1)..(1598): unsure at all n locations
ggagttctcaagctttttgtttactattttactcttttcactgaatatttctcctcttgtttcagctcatggctccaaccatgaagactttcttaagtgtctttcttaccgaatgaacgacaacaccgtcgaacccaaagtcatacacacttccaaagactcttcctttttttccatattggattcttcgatacaaaatccaagattctcggtttccgaaacacctaaaccggtctcaatcatcactcccgttaaagccagtgacgttcaaactgtgatcagatgcgcacagctgcatggaattcatgtaaggactcggagcgccggtcactgctacgaaggtctctcttacattgcgtacaacaaaccattcgctgtcatcgatttaaggaatcttcggtctatatcattagacgttgataaccggacaggttgggtccaaaccggagcaacggctggggaattgtattatgagattgggaaaaccaccaaatctcttgctttcccggccggtattcacccaaccgttggtgtaggcggacaatttagcggtggtggttatggcacattgctaaggaaatacggtttagctgcggataacataatcgatgcacttgtggttgacgcgagtgggaggattcttgaccgacaagcaatgggcgaggattacttttgggctattcgtggagggggcggatcaagcttcggtgttatactatcgtggaaggttaaattagtcgatgttccatccacaattaccgtgtttaaagtccagaaaaaatcgaagaaagaggccgttaggatcatcaagaaatggcaatatgttgcagataaggttcctgatgatcttttcattaggacaacattggagagatcaaacaagaacgcagtacacgctttgttcactggactatatattggtccggtgaacaatctattggcgttgatggaagaaaagtttccggaactaggtcttgagaaagaaggttgtgaagagatgagttggattgagtctgtactctggtttgctgatttccctagaggagaatctcttggtgttctcacgaatcgtgagcgtacattttatctttcaaaggcaaaatgattttgtccaagacccgatacccgagcttgcnattcaagagatatggaggcgattagaagcccccgaggctcggcttggaaagatcatattaactccatttggtgggaaaatgagtgaaatggcagagtacgaaacaccattcccacatcgaggagggaatctctatgagattcagtatgtggcttactggagagaagaggaagacaagaacaagacggagacagataaatatctgaaatgggtcgatagcgtttacgaatttatgactccatatgtttcgaaatctccaagaggagcttatgtcaatttcaaggatatggatttgggtatgtatcttggaaagaagaagacaaagtacgaggaaggaaagagttggggagtgaagtatttcaagaacaatttcgagagattggtgagagtgaagactagggttgatccaacagatttcttctgcgatgaacagagcattcctctggtgaacaaagttacctga

SEQ ID NO: 138066 - DNA, 2892 bp, Arabidopsis thaliana landsberg
atggctccacctggatcaattggagtggttgaccctggatgggagcatggtgttgcacaagacctacggaagaagaaggttaaatgcaattactgtggaaagattgttagtggagggatatacagattgaagcaacacttggctcgagtttcaggagaagttacttattgtgacaagtctccggaggaagtatgtatgaggatgaaggagaatctggtgcgttccaccaaaaagctgaggcagtctgaggataatagtggacagtcttgttccagtttccatcaatctaacaatgacgatgaagcggatgaggaagagcggcgctgctggtctataagaagtaagggaaagctaggcttgagtgatgggagtcttcttcggtcttcaggttatattgatcctggatgggaacatggtattgctcaggacgagaggaaaaagaaagtgaaatgtaattactgtaacaagattgtgagtggcggtattaaccgttttaaacagcacctggcgagaatacctggagaggtagcgccgtgtaaaactgctcccgaggaggtttatgttaagattaaagagaatatgaaatggcatcgagctgggaagaggcagaacagacctgatgatgaaatgggagctttaactttcagaacggtctctcaggatcctgaccaagaagaagacagagaagatcatgacttctatccaaccagccaagataggttgatgctgggaaatggaaggtttagtaaagacaaaagaaaaagctttgattcaacgaacatgagatctgtctctgaagcaaaaacaaagagagcgaggatgataccgtttcagtcaccttcttcgagcaagcaaaggaaactatacagtagctgttcaaacagagttgtatcacgaaaagacgtcacatcctccatttccaaattcttacaccatgtaggagttcccacagaagcagcaaattctctgtactttcaaaagatgattgaattgattggtatgtacggagagggtttcgttgtgccctcgagtcagctgttttctggtaggctcttacaggaagagatgtcaactatcaaaagctacttgagggagtacagatcttcttgggtggttacaggttgttccataatggcagatacttggaccaacacagagggcaagaaaatgatcagtttcttggtctcgtgccctcgtggtgtctacttccactcctcgattgatgccactgatatagtagaagatgctttaagccttttcaagtgtctagacaaactagttgacgacattggcgaggaaaatgtggtgcaggttattacacagaacactgctatctttagaagtgctggaaaattacttgaagagaagagaaagaatttgtattggactccttgtgcaatacattgcacagaactggttcttgaagacttctcaaagctagaatttgtctccgagtgcttagagaaagcccaaagaatcacaagattcatttacaatcaaacatggctgcttaatcttatgaagaacgaattcacacagggactagatcttcttagaccagcagtcatgcgccacgcttccgggttcaccactcttcaaagtcttatggaccacaaggccagtctcagaggtctgtttcaatctgacggctggattttgtcacagaccgccgccaagtctgaagagggaagagaagtggagaagatggtgttgagtgctgtgttttggaagaaggttcagtatgttttgaaatcggttgatccggtgatgcaggtgattcacatgatcaatgatggtggcgatagactatctatgccatatgcttacggttacatgtgctgtgcgaaaatggcgatcaagtctattcatagcgatgatgcaaggaaatacggaccgttttggcgggtgatagaataccgttggaacccattgtttcatcatcctctctatgtggctgcatatttcttcaacccggcatacaaatatcgtcctgattttatggcggtaggtatgattatcattcatttgaatcaatgactaaaagctttctgccattttccttacatttgctgtaaatgtgaatgaatctgcagcagtctgaggttgtgcgtggagttaacgaatgcattgttaggcttgagcctgataacacgcgtagaatcacagcattgatgcaggtgagacaaaaaacaaatcaccaagtcacacacattgttctcagaacctgaggttaaaccaactttttgttgaaatgttttcagattccggattatacttgtgcgaaagctgattttggaacggatatagccattggcacaagaacagagcttgatccatcggcgtggtggcaacagcatgggataagctgtttggaactccagcgagtggcggttcggatactgagccacacttgctcgtctgttgggtgtgagcctaagtggagcgtgtacgaccaagttaacagtcaatgccagagccaatttgggaaaaaatcaacgaaagatctaacatacgttcattacaacttacggctcagagaaaaacagctgaagcaacggctacattatgaggatgaaccaccaccaactcttaaccacgctttgctggatcggttgctccctgactggctcgtaacatccgagaaggaggaggtacttaacttacttaaagtgagaaacgctaaacgccattccagtgattttataaaaggctaataaatgtagtttattggtgaaggaggaggctttgcacggggaagacagagcagagaaggaagaccatgaagacgatgaggaagaggaggagaagttttacatggaatctggtaacgttgacggtgaaggtgaagacaaccttgatccttacgatgatgatcttagtgacgatgactag

SEQ ID NO: 138067 - DNA, 2382 bp, Arabidopsis thaliana landsberg
atgaattcttctcacactgccttcgttgctgcttccttcttcttcctcttactcgccgcaaccgcggttttggtttcagccgatttagcatcagacgaacaagcccttctcaactttgcagcatcagtcccacatccaccaaaactcaactggaacaagaacctctctctctgctcttcatggatcggcattacttgtgatgaatccaaccccaccagccgcgttgtagctgtccgtcttccaggagttggcctctacggctcaatccctcctgccacattaggcaaactagacgctctcaaagtccttagcctcagatccaactctctctttggaactttaccttctgatattctctcactcccttctcttgaatacctttatctccaacacaacaacttctccggcgaactcaccactaattctttgccgtcgatctccaagcagcttgttgtcttggacttgtcttataactctttatctggtaacattccttccggtctccggaacttgtctcagatcactgtattgtaccttcaaaacaactcttttgatggtcccattgattctcttgatctcccgagtgtaaaagttgtaaatttgagctataacaacttaagtggacccatccctgagcatctcaagaagtcaccggaatattctttcatcggaaactcattactatgtggtccacctctgaatgcatgttccggaggagccatctctccgtcttcaaatttgcctagaccgttgacagagaatctccatcctgtccggaggagacagagtaaagcttatataatcgccattgtagtcggatgctctgtggccgttcttttccttgggattgttttcttggtttgtctggtgaagaagacgaagaaagaagaaggaggcggtcaaggagtgcgaacgcagatggggggagtgaatagcaagaaaccgcaggatttcgggatcggagttcaagatccagagaagaacaagctcttcttcttcgaaagatgcaatcataatttcgatcttgaggatctcttgaaagcttctgctgaagttcttggtaaagggagtttcggaacggcctacaaggccgtgcttgaggacacaacagcagtggtggtgaaacgtttaagagaagtcgtggcgagcaagaaagagtttgaacagcaaatggagatagttgggaagattaaccagcattctaatttcgtaccactcctcgcttattactattcgaaagacgagaagctattggtctacaagtacatgacgaaaggaagcttgttcgggatcatgcacggtgagtcataaagagaccaaaccctaacttttttggtaatgtaaagcttgtgtgtgggtcacgaaaaattgttcctttttggattttttggacaggaaacagaggagacagaggagtcgactgggaaacgcggatgaagatcgcgacagggacttcaaaagcaatctcttaccttcactccttaaaattcgttcacggagacatcaaatcatcaaacatacttctcactgaagaccttgagccatgtctgtccgacacatctttagtcacactcttcaaccttccaactcacacaccgcgaaccattggctacaatgctcctgaagttattgagacgaggagagtcagtcaaagatcagacgtttatagctttggtgtggtgattctcgaaatgctaaccgggaagacacctttaactcagcctggtctcgaggatgagcgtgtcgtcattgatcttccgagatgggttcggtctgttgtgagagaagagtggactgcagaggttttcgatgtggagctcttgaagtttcagaacattgaagaggagatggttcagatgcttcagctagcgttggcctgtgttgcaaggaatccagaatcgaggccaaagatggaagaggtcgcgaggatgattgaagatgtgaggagattggatcagtctcagcagttacagcaaaacagaacatcctcagaggctacttccaatgtctctgaatgattcctcattccgaccaaaagtttctttgatcaattctacttctatcttattacttttgaatcccagttaaaaataatttctctttgcatcgtagtttagtgcttatgatcaaacgtaattgctttcactaatgaaaattgaaaaatcataaccactgctttaactacagaaacaaaaaaatattcgctttcactttaattataactttccaaagtaactagagtaagatatattctacacataaatttatgacaccaagacagaagaacgaacagacagatacacacaacaaaagtaaaaaagtgaacaaataaaacaatgaaaaataatttaaattctgtgttttttttaaccctcaaaacag

SEQ ID NO: 138068 - DNA, 4351 bp, Arabidopsis thaliana landsberg
tctttgtaatcctcactactaccttcaaatgtcaccttgggtttacctggttggttattctgaaactcaactgaaactctgttatccttcttcttgtgcattgatcctgacctgttcttatcgattgaagccggcttaaattcatctgcaagtacacaattatcaaacatcttattctatgtattccaatttaggtcgaattaacccaaaattaagaatggtaacataatcagaaactcacatcgcaaagtgcagaatttatgggaggagtcatctttggcagaggaaccaaggacaagatcataccattgatctgtcttcggggcagtactaggctcatctctggagtgattcgacatcttcgaagctcgatcaacgattgctcaaggtgaatccatcgatcaaggagacgaagatcaaatccacgagactttgcgaaacttgagatatctccgattctcaaattgcggaggacccagaactgacgcagctcacgtagggtttttcttttagggcagagaagacgaatccgagatcagaattttggatccggtacccgccgattcatgctttttaatcttcttaaccaattacgtacggacacgagttagtatgtctggttttgggttccacgtggatctgtttggtttgcggcagctattttattcccacgtgcgattactgatcaaatctcaagccaagcgttcccttttgtcgtcttgttctgatttaatattaaaccggaaatgaccgatcattcagccgctagtgtttggtttgtatattttgacgcattaatgggcttataattgggcttcttttttagactcgtgttgtcgctagcccaatggataatctttgacagtatcgttcaaccacagattatctttttcgcacgatgtgataaatacaaaattttcaaatcaagaagaaacttcaagatacaaaattattgcaatcagtagatttggcgtggatgatgcatctgtcatcgcaatcttgtcttcttcttcattgacaagttccatgtgtattgtgtagctccaggtgttgttctctaatcggctttatctctatccaaccatcttcacgactgtggtctaattgatttgttagtgttcttctatttcctggttcagattcttcactgctgtgtatagttcttctcattcaattacttgggttgtggtttaaatcaccaatttggtcatcttcttgtgtttttttctatcgttgacttcgagctttacatagtgagatcgagatgtcaggtttctccagtggaaatgttaattctagggttgtggatatactcagtggtgttgtgcctttgttgaagcttatctgtttaaccgtgattggtctacttcttgctcatcccaagactcaattagtcccaagagccacgtttaggctcttaagcaagcttgtgtttgctttgttcttaccttgtttgattttcactgagcttggagaaagcattactcttgataacattgttcaatggtggtttataccggtcaacgtgttactcagtgcggtcgttgggtccttgataggatacttggtagtcctcatatgcagaccacctcctgagtttaatagattcaccattgttatgactgcttttggaaatactgggaatcttttgttagctattgttagctcggtgtgtcacacgaagacgaacccttttggaccgaattgtaactcgagaggggtttcgtatgtatcgtttgcgcaatgggttgctgtgattcttgtttatactgttgtgtatcatatgatggagccgcctttggagtactatgaggtcgttgaggaagaaggggttgagatagaggagatcaatgtggagaatcatgatgctagtaggcctcttctagtggaagctgagtggccagggattgaggacaaagagacagaacattgcaagacaccttttattgctagagtcttcaacagcatatctagtttctctcagacttcttttcctgaagttgatctcgggggagaatatggaggagagagttccagccctaggtctattcaatgcttggctgagcctagagtaatgaggagaataagagttgtggctgaacagactccagtcaaacacatacttcaacctccaacaatcgcatctctattagcgatcattatcggatcagtgcctcagctgaaaagtgttgtctttgggtatgatgctccactttctttcatcacagatagtttgaatataatgggaagtgcaatggttccctctgtgatgcttgtacttggtggtatgctctctgaaggaccaaatgaatcaactcttgggttacgtactacgattggaataagtgttgcaagactcttggtgcttccgttagtgggaatagggattgtgatgtcagctgataaacttggtctcatttcctcagcagatccaatgttcaagtttgtgcttcttttgcagtattcgactccgagtgccattttacttggagccatcgcgagtctaagaggttacgctgttagagaagcctcggcacttctattctggcaacacatctttgcactgttgtctcttacgttctacattgtcatcttcttcaaactcaccgttgagactactgtccaaggtatgcaataaatctaaagttaaatgtcaactttgtttgtaaagaatgtgatgttatcaaatacattgaacttcaatggtgtgtgttggtgagtgttggtggagtattaccaattcaaagtttaagaagttttgtaccaaaagtggcatgaaccgtgcacttgcttgatcttatttcgtggcgtaaatcatcttttaaatagagcatcatcgtattcacatggttttagatgagatatgtatacacgtaacgtaacagtgacctttgttatagaattttaaacaaaagaaatcaaagatatggaccgtcataatatccaatggtggagaaaggctgctttagagagatgcgattggaatatgcgtggaacttacagaaaaacgtgttaatttcttggaatgtgaatcttttaattatagtttcagagaaaagataaatcattttggcttcgttgaagaatcaagatccgattttatggaaatgagtgaatggaagtaagtttttgctagatagtaaaaatcatgcctctcttctcaccatttagtcatatccaagtggcatggcctctgattatgttgggctcctgattggtaaaatatttaatgtattaaattcatatttcaatacttaaagataatcttttcaaaattcagaaatttccgtatctataaaatttagcctaacctttttaaaatggtctttacttctctaaaaagaaccgtcaaatacgaatacgattctaagttttttagtctttatagtcagtctctcacagattttgtgcattcaaatcacaaagcaagtcgcgtacaatgggttctgcattcgatccccttgtcacggccactgaggatctcgccgccgtcaactcggcgccgccactctcaaacctcacgcaagaagaactcaagaaaatcgccgcttataaagccgtcgaattcgtcgaatctggaatggttatcggtctcggcactggctccaccgcgaaacacgccgtggctcgtatcagcgagcttctccgagaaggaaaactcaaggatataatcggaatccctacttcaaccacaacgcatgagcaagcggtgtctctagggataccattatccgatctagattcgcatccggtggtggatctatcaatcgatggggccgacgaagtcgatccggctcttaatctggtgaaaggacgcggcggatcgttattgagagagaagatgattgaaggagcatctaagaagttcgttgtgattgttgatgaatcgaagcttgtcaagtatatcggaggaagcggactcgctgttccggtggaggttgttccgttctgctgcgatttcacaagggggaaactggaagagctatttagagattcgggatgtgttgcgaagctgaggatgaaaatcggatctaacggcgaagaggcggcgccggctgtgacggataataggaattatgtggtggatttgtatttggagagagatattggagatttagaggtggcgagtgaggcgatattgaggtttcctggagtagtggagcatgggatgtttctgggaatggcgactacgttgatcgtcgccggcaaatttggtgttaccgtcaaggataggtttggataaaagtgtcatttgaaaaccattagggattatggtttgattttgattttcgatggattctctctggttctgtaaaccctttcctcctaagtttaaaactttgacttattt

SEQ ID NO: 138069 - DNA, 1614 bp, Arabidopsis thaliana landsberg
  unsure (1)..(1614): unsure at all n locations
atcctctcctctccttcacgttgagatatttttgagttttctgtgttgaattttggggaatcgaagaaattgaatttcaaaaatcaatggcggaagaaattgaaaaatctgtgccgacagaggaatctctgatggagaagatctccgagaagattcaccatcacgattcgtcgtcatcgtctgaatccgagtacgagaaacctgattctccttcggctgtgaaggcgaagatctatcgtatgtttggcagagagaagcctgttcacaaggttctcggtggtggaaagcgtaagggttttatatattcagtgtctcgtcttttctttttctatcatttttttctctggtttgatcgatttggaacatgcgttgatgcttgatctgcaatgttagggtctagttacactcgtataagatcgcttggtgatgattacataattgcattttcttgaatcgatccattaagatttgggcatccaaaagaagacttgaactttagggataatgtttttgaatagggagagttctgaagttggttgattagattgaagacatttacgtttctctaattttgcaacttgtggaaattttgttacaccaatttttgtatgaatgcaataaattggctttattggtttattatgttattgacttctgagttctgagggattctgatttttctgnnnnnnnnnnnnnnnnnnnnnctgctgatgtgttcttgtggagggataaaaaactatcaggtgctgttcttggtgtcgcgactgctatttgggttctgttcgagctggttgagtatcatttgttgagtcttttgtgtcacatttcgatactcgctcttggaggcctctttttgtggtccaatgctcacacacttatcaacaagtaagattcaaacccttgatcatgttaaccccgccctagatgtttgttctttgtctggtttaaatggtcttaaaaccttcttttttcatttttgcaggacttcaccacaaattccagaaatccatgttcccgaggaggctttccttgtggttgcttcttctgtgagaaacgaactacaccaagctcctgttctcctacgaagcattgctttatgattggacctaaaaaaattcctgatggtatgctcattctttgttgctgacgtttgctgtgtttagttaaacagtttaggaaatgattaagtttgtatcggaaattagttacatttcaacctttctctgttgaaccgtgaatgtatcacttatacaaaacataatatcgtaagtatcttctagcaacagtgtgtcaagttacagtatgtcatagcccattaagacccttcaagtaaactcattgtcctgaatctgatgatgagatttgttatgtcaggttgttgtcggtctatggatcatctcggtggtgggcacttggttcaatttcctgactttggtgtacatttgccttgtggtgttacatacagtaccaatgttgtatgagaaacatgaggacaaggtagatccagtggcagagaagacgttgaaggagctgaagaaacattacatggtgtttgatgagaaggttctttctaagcttcctgttgcttcccttaaggcaaagttgggttaaaaa

SEQ ID NO: 138070 - DNA, 2578 bp, Arabidopsis thaliana landsberg
gaaatctagtaccgtcactttggtcaagctagatctgtttgacgaaaggtattggtgcaccggtcggttcggtaatcgtgggaagcaagaagttcattactaaagtacgttacctataaatcaaattgagacggttaaataacaatattttttttcaattccggttcaagtaattacttgttgaaatgcaggcaaggtggttaaggaaaacattagtcggaggaatgagacagatcggccccatctgcgccgccgcattggtggctctccatgaaaacgtcgccaagctcgaagatgtccataagaaagccagggttttggcaggtgattgataccggatttttggttttctgttatccggaatctcaaatttaatacgagagtggtaaccgattgatttccattttggttttcttcatcaccagaaggactgaaccggattgaacggttaagagtgaacgttgcagctgtggaaaccaacatcgtaagtgtttgaaatgaatgattggttggttaaggactgaaccggattgaacggttacgagtttttttttttgttcgtatataacaaactcgtatacgcagatatacgtagacataccagaagatccaaaatttggagcagaagaggcatgtaagagcttggaagatgtcggtgtgcttgtcataccccaagctacattcaggtacgcgtacatatgatatatatattacatttttatgatcatgtaataccacatagaataagataaaactggaatttaatttggatgtaattaatggtaacttggagtttatggtctcttaatacagaatcaggattgttctacaccaccaaatctcagacgtcgacgtggaatatgtactctcttgctttgaggtatgtagtttgctcacatctactgatatgtgctttgatattggtaatttctttgctacgctttattcattcattgattaattgctttcgatatatttcagaaaatatttcactcgtgaagagaagagaaggcgttattattttaagtaatttcactcgttggacatgtgtaaggttgtatttgaatcttcattcagaataaggttgtatttgaatcgattttcttggtttacaaatgaaaacctttaaccaagaagtagaaaactctttcatcaaattcacttatacatataaataaccaattataacccaataatttattctttataatccgattattcctcatgtgctaatagtttgtgtccggaatcacggattgaaaaataaaaagtaagaaaaatagtgacagataaaaaatcatacaaatatttgtctctttcttcagacgacccattggtctctgtctctctctcaagtctcatctatagagttacctttttatacactgtgtaaaacaataagtccctttctcctctttaatttctcttcctttttttgtgtcttaaatggaaaatatatgatttctgatgatcagtctcacgactctcatctctttctctttctctataaatgacctattatgatgtttatgcagctatatatatggacatttgtgtctgtatttttctatccatcttctcattctatagtagaaaagaggaaaaacacaaaagacaacagtagaaaaggagaaagaaagaaaaaatctcactttgatttcttctacttatatctctcatcttgcaaaaaagcaagaggtctcttcttattttgcaggttgttcctctttgcctcaccatatttgaacaacatcatcatcactgaatctatccttttttgtagcacctacctcaccactttgcagtacaaggaagtagccaagtcctaattctatctctctttttagttatttattatatatatcctttaaccagaaaaagttatttattataaataacttaaaacctaatctttgccctaaatcactcaactcgatctggagaaagaaccctaatttggaaacatatctaaaaagctatggatttgatctctcaaaaccacaacaacagaaaccctaataccagtctctcgacgcaaaccccttcttccttttcttctccaccttcctctagccgctacgagaaccagaaacgccgtgactggaacactttctgccaatacctcagaaaccaccatccaccgctctctctagcttcttgcagtggcgcacacgtcctcgattttctgcgttaccttgaccaattcggcaaaaccaaagtccaccaccaaaactgcgccttctttggcctcccaaatccaccggctccttgtccttgtcctctccgacaagcctggggctcactcgacgccctcattggtcgtctccgtgcagcctacgaggagaacggtggcgctcccgagactagcccttttggctcacggactcgacacgattactcctcacggagatgacgagatttccaggctaagtcccgtggcgctagctatgagaagaagaggaaaagggtcaacaacaagcaaataactcagtcccaaccacagtcccaaccgcctttaccacagcagccacagcaggagcaaggtcagtctatgatggctaattaccaccacggtgca

SEQ ID NO: 138071 - DNA, 2345 bp, Arabidopsis thaliana landsberg
ttttgccggagactacttacccttctctttcttcttcttcgaaacgggtttttaaagctcagctcttggtgacgccgtcgtgagagagagagattgaagtagaagaagaagaaattgaggttgagagatgtatgtagtgcctccgcctcagcgatctgattctggatccaatggtgatttaagggtttaccaaacttggaaaggcagcaatgtgagttttttttttctcttttttgttcttctttgagctatagatgcttcattactcttccttcccatttttttagtttttgctaagtctattaaatgggactttagattagctgctatgttttcaatttcaacctagttcaaaattggaactttattaagtctttaggagaatctagctattgcgtttttgtgaatcctaggttttggtgtcgttttcataggttgcttttgtggtgaataccctttggatcgttttaagctggacaaggcattttaactttatctaaatatagctcaatgatagattgagttactttggacagaaaggttttgtaatttgagattacacatatatatatagttgatacttgtgtataaggaggttttcaaaaaccttctctctgtgttgccttaagacatcagctagagaatctgaatacttcttcaatgattacttactctgagtactgattaagacatgtgttgtgtgatgtactgaattcatcgctggtgtattgttttcctggatgattcttgtttttggggaatactttgttctcgaaagtttctctaccgggctgtttattttcgcgttttattttgcagatattctttcttcagggaaggtttgtatttgggccagatgttagatcactggcgctgaccatttgtctcattgctgtccctgttacaattttctgcatctttgtcgcaaggaagctaattgatgacttctccgatagctggggagtctcaatagtagctgtcgccgtcgtgttcaccatttatgtatgtatagttctttctcgcattgcatagcagatggtctctataatattctgtagctgatgcttttattttgtattcccttatgattccggttctttcttcaggatttaattcttctgctgcttacatccggaagagatccaggtattatcccaagaaatgctcatcctccagagcctgaaacccttgatggaaacatggatgcaggggctggccagactccgcagctgcgattgcctcgcattaaggaagtacagcttaatggaatcacatttaaggtcaagtactgtgacacttgcatgctctataggccgcctcgctgctcgcattgctcaatttgcaacaactgcgtagaaaggtttgaccatcactgcccttgggtcggccaatgtattgggatggtaagtcaaaatccaactgatcccgtctttaagctatccacataaaccatagtttcctaaatatcatctcatattctgatggttgttgcagaggaactaccgattcttcttcatgttcgtcttctccacgacccttctatgtatatatgtgtttgccttctgctgggtctatataagaaagattatggaatcagagcacacaaccacttggaaggcaatgcttaaaactcctgcctccattgttctaataatatacacattcatatcaatgtggtttgttggtggcttaacagttttccatttatatctcatcagcacgaaccaggtatgttgcgaccatccaatccccaccctctcttaaggaatcacgggatctctgtaaccattgatttatctttgttcttgcagactacatacgagaatttccgatacagatatgatcggcgaagcaacccacataacaagggagtggttaataacttcaaagaaacatttttttccacaatccctccttcaaagaacgactttagagctatggtccagcgtgaacctccattacctcctagatctgtagcaggtggttttatgagtccaaacatgggtaaagccaatgatgagattgaaatgggaaggaaggctgtttgggcagacatgggtccagcaatgtcagatcatggtgacggtaaacatggtaacaatgagcggttacatgttaaggacggtgagttaggcgagctatctccagacattagggcaacagttgatgaacagagtgataggccaagtatgcacccgagacgctcaagctggggaaggaaaagcggaagctgggacatgtcaccagaagttatggccttagcagccagagtaggagaacaaaaccagaacggcggaggtagcagcagcggaagcggtttagtgacggagaaccggcctacataa

SEQ ID NO: 138072 - DNA, 2332 bp, Arabidopsis thaliana landsberg
agagacttgaaaaagttagcctgacattcttggttctgcttctggttttcttctgctggcttcttcaggtaagtgagtaacttctacgatcaactcttatgtagtgagtgtttttacttctttttgttctgagcctcttagtagtgaccgcagccaatatatttatttttgtaatttaaaaactcactattacaggcaaattagtaaagttggcgaatcaacgcccctgaaagatttctgttttagtttctggtagagctagtaatgttgtttgattcgtaatttctttcctttatgtgtgatactgtagatagattagatggatcaaatcgttaatgtggatgagtttcaagagctggctaaacaagccctccctaagatgtactatgatttctacaatggaggagcagaggatcaacacactctcaatgaaaatgtccaagctttccgtagaatcatgtaactagtccatatccattgcctttttggtaacactataaccttgttgtgatttcctcttttacatgtgcttgattttcaggtttaggccgagggttctcgctgatgtgagcaaaatagatatgtctaccaaaatattgggttaccctatctctgctccaatcatgattgctccagcaggaaatcataagttggctcatcctgaaggtttatctagtctatcttcataaattctgttaacggtatgcagttgttggattcagaagattagtttgattgtcttttatgttaggagaaaccgctactgcgaaagctgcagctgcgtgtaatactatcatggtactaaggggttgtttagtgtaatacatgttttgtacacttttttggttttaaggtgatgaatagagtttctttttaattgttctgtgaatttcagatagtatcatacatgtcttcatgcacttttgaggagattgcttccagttgtaacgctgttcggtttcttcaaatatatgtaagttacacagtctttaatttacacctgctttacttatccttaaattgtacttccttattgtaggatttaggcctcggttcttaattcgctctgatatcttttataggtgtacaagagacgggacataactgctcaggtggtgaaaagagctgagaaagctgggtttaaggccatagttctgactgttgatgttcctagacttggtagaagggaagctgatataaagaacaagtaacactctccattactctgagtttttgggaacttatatcttgcaggaataagcttccctatcttataaaatgtagtttatgaaatgaagtttcatttttattctatagaatgatatccccgcagctgaagaatttcgaaggtttattttcaaccgaagtccgacctgtaagtagagcttgaattaaggttcatgtaaaagtgaaaccttaccagttgttgacgtgataacttttttcagagtaaaggttcaggggtacaagccttcgcctctcgtgcatttgatgcttcatttagctggaaggtgaaatactgaaatcaatctttagtccttgattacttaacaaaaagttcccatgagccatgacaatgtgagggaaattcttataacattttcactgcaaaattttaggacattgaatggttaagatctattacagagttacctattcttgtcaaagggatactcacccgagaagacggtgtgattcttgtctcatactcatgatatatattgcccgtatcaaacaatcttgaaacttcaaggcatataagagacttttctcaatgcagctcttaaggctgttgaagctggtgtagatggaataattgtatctaaccatgggggtcgccagctcgactattcccctgctacaataactgttttagaagaggtaaaccaatcaaagcttgcttttaaacaagcttattcttctcaatgaacaaacaagtcttcttatggtactacactactacaggttgttcaagttgttagaggtaggattccggttttgcttgatggaggagtaagacgagggacagatgttttcaaagccctggcacttggagcacaagctgttcttgtaagctttcaatgctatctagcatacaattttcaggttgctctctgttggtattatgacactttctggttggctgatgcagatagggaggcctatagtctatgggcttgcagctaagggtgaagatggagtgaaaaaagtgattgatatgctgaaaaatgagtttgagattactatggccctttctggctgtccaaccattgatgacgtaaccagaaaccatgttaggacagagaatgagagaattaaatctatgctctga

SEQ ID NO: 138073 - DNA, 812 bp, Arabidopsis thaliana landsberg
tagataaaaccgccatggccaccggtttaggcttctttaagctctccttcctccttagcctcctctccggtggatcagacctattaggtcccgatgccgaatccggagtcgcccaaattgggaagttcccgccgtcgtgtaacagaatcgaatgcccgagctacgagctggttcactccggaaatggatacgaaattcgccggtacaacaacaccgtctgggtttccactgaaccgattccagatatctctctcgttgatgctaccagaaccgctttcttccagtaagtgcaaacttccagttttatcttttaaaatgaggcttttgttcggataaagattgaaaattttggtatcagattgtttgcatacattcaggggaagaacgagtatcatcagaagatagaaatgactgctccggttatctctcaagtctcaccaagcgacggtccattctgtgaatcttccttcactgtatcattctacgttcctaaaaagaaccagcctgatccagctccgtcggagaatctccacattcagaaatggaactctaggtacgtggccgtgagacaattcagtggattcgtgtctgatgatagcataggagaacaagcggcggcgctagactcgagcctcaaaggtacggcttgggctaatgcaatagcgaaaagcaaagaagacggtggtgttgggtcggattcagcttacacggtcgctcagtataactcacccttcgagttctccggtcgggtcaatgagatttggttaccgttcgagctcgatgtttaagctctgcttagtgaaccctttttc

SEQ ID NO: 138074 - DNA, 3684 bp, Arabidopsis thaliana landsberg
  unsure (1)..(3684): unsure at all n locations
taatctgagaggagaaagaagatgtttgcagcttcttgtctcgcatcgtgttgtgctgcttgtgcctgcgatgcttgccgtactgtggtttctgggatcagcagacgttctgctagaattgcttactgtggtctctttgcactttccttaatcgtttcatggattctccgtgaagttgctgctcctctcatggagaagctcccttgtaagtttttttgttattatacttctcgtgagattattttggcgtatgcaactaatcattgacattgtgtgcagggattaaccattttcacaagacacctgatcgtgaatggtttgagactgatgctgtgttgcgtgtcagcttagggaatttcttgtttttctctattctatcggttatgatgatcggtgtgaaaaatcagaaagaccctcgtgatggtatacaccatggtggttggatgatgaaaataatctgttggtgcattttagtcatctttatgttcttccttccaaatgaaatcatcagtttctatggtaagtttctgtttatcattgcaaagtgattagtgaatcgattaacttggaactaatgggaatcaattttacatcttgcagagtcgatgtcaaagtttggtgctggatttttcctgcttgttcaagttgtacttcttttggattttgttcatggatggaatgacacatgggttggctacgacgagcagttctggttagtaaatatatttgcaattaaatcatgtgacttcattatcccactactaatctaagtacttgacttttatatataggtatgctgctttgctcgttgtttctcttgtatgttacttggcaacattcgtcttctctgggtttctcttccactggtttactccatctggacatgattgtggactcaacaccttcttcattatcatgactttgatatttgtattcgtctttgccattgtagttttgcatcctactgtaagttttgactgaaaccttatatttctcttatctgagatcttatttgattcccaatttcaggctcactgaagtcaaattaacctattcttttgcaggtcggtggaagcattttaccagcatcggttatatctctgtactgcatgtacctctgttacagtggacttgcaagtgaaccccgggattacgagtgcaatggtctccacaatcactctaaagctgtttcaacaggcacaatgaccattggcttactcacaactgttctctcggttgtttattctgctgttcgtgctggttcttccactactcttctctcccctcctgattctcctcgcgcaggtatgtttctgacaaaaaaaaccttctcctatactttgcctccttatattgcaagataaggattcattcggaaactcgaatcaaacctgaattgaaacatatattctaaatccctatattgaaaccttgttgtgtgagtgtttgagagttgcttctaagtatcataacgtatttcctttcaatgaaaattttcagagaagcctctgcttccgatagacgggaaagcagaagagaaggaagagaaagagaataaaaaaccagtttcatactcatacgcattcttccacatcatcttctcccttgcgagcatgtactctgcaatgctcctaaccggctggtcaacttcagttggtgaaagtggtaagctggtggatgtcgggtggcattcagtgtgggtccgtgttgtgaccagctgggccactgctggtctcttcatctggtcccttgttgctcccattctcttccccgaccgtgagttctgagctaatgcatctacttgagattctgaataacttttcatgaatcttcaatttgtaaaaaaatattcgatctttctactataatagaacatcgtgtgcttaatcacgaatgacctttgttggcccttctgtaatatgaagatgatataaataaattcctttctcgtaattttcatctgtctcgacttctccacaattgcgttttgcccgattcgcgtttgtgttttgtttggtcaaaacggtggcgcaaggctggtatgaatgaattctgattaaattatcatatgttaaacgaaccgatcattgttatgattattatactggtaaggtagtaaaccggaaattaaaaaaattgcactggattgattaatgttttatccgggtaaattttagaaagaagggtgtgtcacgtgcgatgcacgtggagctcttgccgcgttttaaaacgctatgttgttgacagcgactgtttgataaagtcggcattgttgtacagtgattgaaaatcaaaaagctcttttaggtcactctctatttttcgctccctcgccggactttgccgacgccgccggttatatcttctagtctcattcgtcgacatgaagctcactgttaagactctcaagggtagccattttgagattagggttcttcccaccgacacggttagtccttctccttttccgcttccttggtccgtacctacgtgtaatactgtattaggaaatcagtagatttagatatcttctgaagatgagagatgctgctataccaatctgggttatgaaacatgtgacttgttgaacagctttctagaaatgctagatttagaattttgagtttttttttttccgatgaaatggatgggttgagtgagtgtatttgtctatgagttcttacatggttatatcctggaatttttctactttgctttgaagataatggcggtgaagaagaatattgaagattcacaaagcaaagacaactatccttgtgggcagcaattactgattcacaatggaaaggttttgaaagatgaaactaccttggtggagaacaaggttaccgaggagggttttcttgtcgtcatgcttagcaaggtacctatctggtttcttttatgatcctagatagtgcttagtgtgagtcactctaagcaacctggatttatatatccttcttagtcccattagatatagtggctgtgttttctatgactaatgatcgcaatagcagaaactcatattgataaaactttgtttttgttataagcaatacatatttctagtggaagcttagatgataagtgaataaataacaaattaagaaacgctacaagggaacctatgtgcttgtgctgacaacatctttgctttttttttttttgcaatggatagagcaaaactgcaagttcagctggtccctcttctactcaggtaagtttatttcttagtttctcatgtttgtgcacatcacttggtcagttcagtattcctcgttgaagaactttctttctatctcacagcctacttctaccacgacatctaccatatcttcaaccacggtaattttcttacattgtttgggaattgtgcagtccacattttgtttccttggttcatttaacacaagtttctatcaatcaaccagcttgcagctccgtcgacaacccagtctattgctgtgccggcttcaaattctactcccgttcaagaacaaccaacgtaaattttattcttgnnnnnnnnnnnnnnnnnnnnnnttttgtttttcagtaatcaagttctatattctctatgatctccacaccattgcagggcacaaagtgacacctatggtcaagctgcttcaactttagttagtggcagtagtattgagcaaatggttcaacaaataatgg

SEQ ID NO: 138075 - DNA, 2217 bp, Arabidopsis thaliana landsberg
aacaaaagaagcagaagctatctgaaataaaatctggggttgaggaagcagaagctttggtatgtgatcttgggtttgctctaatggaatatggaagtttcaccgttgtcctgtatgcggtcgatggttactttctatctaccttttgttctttccaggttaagaaaatggacctcgaggcaagaagccttccacccaatgttaaatccagtctccttgtcaaattaagggaatacaaatctgatcttaacaatttcaagacggaagtgaagagaatcacatctggaaacttaaacgctactgctcgagatgagttactagaagctggtatggctgacacattgacggtatgtagagactcaatcttgatcgtgttcttaaaacatattttgatctctctgactgatgatacaaatgggtgttaggcttcagctgatcaaagatcaagattgatgatgtcaacagaccatttaggccgaaccacagacagaatcaaggacagtaggagaacgatactggagacagaagagcttggtgtttcaatccttcaggatttgcacgggcagagacagtctctcttacgggcccatgaaacgcttcatggagtcgatgataacgtcggaaagagcaagaaaatattgacaacaatgactaggagaatgaatagaaacaaatggaccatcggtgcgataatcacagtccttgtcctcgccattatctttatcttgtacttcaaactcaccaggtgaagcctttttctcttcacctgcctgaccaatttctaactgaacaactttctattgctatggtcgcaattttgtttatgatagatctgagaatctaatattgatcttctatgctattttaacctgttctgtgtgaagctcttgttaatcttctgcttgatgttcttcaccaaacctatcaaaatctgtaaaagcaaatcaagaagatagttacatctaaattctagtgttgtagaaacttgaagttttagtagggtgggaaaaaaattggggcattccgagaattgaactcgggacctctcgcaccctaagcgagaatcataccactagaccaaacgcccattgatgatagctctgacaatacatatttatatttagaaaacattttgaaccattaattttgctattaaattgatgcaaatcaaacctaattaaagtttatcatctaacacagtatgaaaattcatagaccaaacatttttcccttgcatattcttcccacttgtaagaaaatgtgaccgagctttttaggtaaaattaggatattatactttacttactacaaacgaatattaataaaccagatttagtttgaatagactggaatattatgtttcgtttttataaccttaaatcaaatcctcacttacgcataggtaatgaaagttgaaagaaaaaaaaccctaactctgctttttacttggtttttgatttacataatattaaaccggtaagtttgatttggaattgaaaaataaaccaatttcgtacgtaaccttccatttagctccgaaggttctgattacatacagacatgaagatttctttgggtatataagcaaaacaagctcctctctttttcttcttcttcctcgttccgttgccttaccctcttccctcctccgcttccaaaatcagcgagagagggagacacatagagagacagagagattgctcctaatcagaagcaatctcaccattgaatcatctattttctaccaaaaggaagcttcttttgcttttcattttgccaagtttccgtctaaatctctctactttaaaactccggcggccaacgtttccaccgatcctccgacttctttccgagtttcatcttctaacaaaggaacgaagaagctctcttcaccgtttgagtaacgtgatccggtctacaaaggttttaaatcaaaatctcttgctcagaatttttcctcgttttttgtgatttctcttaagattttccgatgagagatctattacttgggacaacgattccgagctatttctcttggcttggactatttccacggttcttagtttggtttggcttcttaaaagcctcttttttttgttcttccagaaatcagtctgcgggagaaagtggaagaagactgaagatgaagagagctagagaagatgttcacactgacactcaaaagcgaaagcctgaagtttcgtctcgaggagaaac

SEQ ID NO: 138076 - DNA, 2751 bp, Arabidopsis thaliana landsberg
atgagcaggaaacttccgagtagtcggatcctcctcaacggcgtgtcgtcgccttccgcgtttttgtctcgaaatgaggagtgagtgttggctcgctccactaaatgactatttcatcgctcgatattttcgcgggtcaatcaaacggcatcgtttttatccgaggcgtacatgagaagacaagtagtgaggtctttacgtgacgtgtcaatatctagaccgcctatctcacgtgagtaaaataaataacctgttttagcgtagggtgagttgtaggagattacaccaatggcctgagagagtgaccaccacctaccccacgccgtctccgaaggcttcaccaaacaacaccacgaaatcaatcctctaatgtatttcttcaattcagtcttcttcttcttcaccaacccaatttcttttcttcaactctctcttctccccaaacccgacttctgatccgcatcgatttccatggcagccaacaccatttctctttccaacgtcgccgcctccaagaatctcaactcctttcaaagccgtgcctttattgctccaccaactatttttttccctgtggcttctgcaaagtctaaacctggggaactttctttatcttccacgactctttccaggtctcgtgtgcgcgccggtgctagccagctcatgaacgaaccgcttaacgatcaacgctccatctcttctcccactgtcgtcgaggttgatcttggtgaccggagttatccgatctatatcggcgccggcttgcttgatcactcagaacttcttcaaaggtttcatcttttgtcccataagaccatttcattttaatttagtttagctttttgagctttaattgtcgccaccatcaaacggtcgagttttgacttctctttaagcgatagtatcgatttagtaaggtgttgatgtcgttggagataactagtgagcttatttaggccaatggtttttgtttaaaaaaatttcagagcacatacaatactcaagttttttagagtttggtcttacataatttgttgataaatgtttaggcatgttcacggaaagagagtgcttgtggtcaccaatgatcgagttgctcctctctacctggacaagactatagatgctttaaccagaggaaatccaaacgtgacagtggaaagtgtaattttgcctgatggagagaaatacaaggacatggtacatgttatcttggattttgatttccctgtttataataaagaatcattagtaatcgtgagttattgagactcttttattctttctaggatactctcatgaaagtcttcgacaaggccattgagtctcgcctagatagacgatgtacatttgttgcccttggaggcggtgtgataggcgatatgtgtggatatgctgctgcatcgtacctacgtggtgtcaatttcatccaaattcctaccactgttatggcacaggtacatttttcacttcactgtaggaatttcttgtctaaaatcattaacatccagaaaaaaggttttttatttctcgctgcaattcatttaattgccctgcaggttgattcttctgtaggtggcaaaacaggcataaatcatcgtcttggaaagaatttgatcggtgcattttaccaaccacagtgtgtgctagtagacactgacacgttgaacacattgccagatagggagatggcatcaggcctagctgaagtgatcaagtacgggcttatcagggatgccgagttctttgaatggcaggagaagaacattgaggcattgctggcaaggtaattttacgttacaagtgtgcccaaaacaaaaacattgagatcatgagtctatccctgaaaaaacattgtgtgataatattcatcgcagggatccagctgcattagcttttgctataaagcgatcatgtgaaaacaaggcagacgttgtatcacaagatgagaaagaaagcggcttgcgagcaaccttaaatttgggtcatacctttggccatgtaagtagtccatgatggtctcttggacatttcttctcttcgggcctagatccactcatcacccatcacttaattttgcaggccatagaaactggctttggttatggagagtggctccatggagaagctgttgcagctggcacggtatctttctctatctgcgatattgctaaccatcttcttctctccaaattcgagatttgttcacattgttatatatactcaggtaatggcagtggacatgtcatatcgtcttggttggatcgatgaatcgattgttaagagagtgaacaagatcctagtacgggcgaaattgcctacaactccgccagagagcatgaccgtcagcatgttcaagtccataatggcggtgagtttttagtgaattccagatgtaaatggaaaaaagttggtaacttttgagcaacttttgagctaagaaaaattcattgaaatgtgtgtggtgatgcaggtggacaagaaagtggcagatggactgctgaggctgattcttctcaaaggcccgctgggaaactgcgtgttcactggagattatgatcgggaagcgttggatgccacgcttcgtgcattctccaaatcctgagcatttcatatttgagataattttggtgttgttttgttcacatacgcatatgtactcatatatactgaccttgtaactagctttgtggaatgtgataataatgagatattaaaagaagaaataccccgttattggacaccatatgc

SEQ ID NO: 138077 - DNA, 3556 bp, Arabidopsis thaliana landsberg
agaaagtcactaagattataatagtttgtagatttacttttaaatgaggaactttcttatgtgattccttacatataaagagagaaaataaactaacaatataattgtaatgaaaacatgctcaaattcatattataaaatgatttaatatatttcaaagttcaaacaatgtcaccttaaaccctttttcataacaaattcaccctaaaagctcaaccttatctataaaaacatgcatcaagtaaattacattacatctatctctctcatggaacccaagatgacgagagcactgattcttgtggctatatgtctaatgcttactctaaacaatgctgctgagactaaggtactttatccgagatctgaatctcttactcaatcttttggtggttaaattagttcttcaatgaatttagagttcatgcaaacagctaaactttgtatttttttttattatgatttgctagctaggttcacatagtgtatctaggtgagaaacaacacgatgatcctgactcagtcaccgagtctcatcatcagatgctttggtcaatcctcggaaggtaatagaatttacaactttgaccaaaaaccatttaaccaaaatgcgtaactctttttgctaatacatcacagtaaagaagctgcacatgactcaatggtgtatagttatccccatggcttctcagctttcgcagccaaactaaccaattcccaagtgaatcaactctcaggtacttacttataagacacaaatattgattaggatttagaatagttgtagtttgatttttttttaattgccatggctaaatgaaattattattttgttataaaaacagaattacctgaagttctccatgtcataccaaatagattctacgaattacagacaactaggacttgggattacttacaacacacttcaaaacatccaaagaatattctaaaccaaactaacatgggagaccaagtcattatcggcgttgttgactccggtaaaccgggattcttgcctcttaaatcgattttggtttttctaaagttacaaaattttgctaaactggtttggtttatacttttaaaacaggaatatggccagagtctgaatcattcaatgacaatggtcttggaccaataccaaaacgttggaaaggaagttgtgtgtcaaaacagagttttaacggctcaaccgtttgcaacagaaaattaattggcgccaaatacttcatcaatggatttcttggtgccgacgaaagcaactgggacacgacggagaatccagaatacatctctcctagagacttcgacggtcacgggacacacgtggctgcaacagctgctggctcatttgtcccggacacgagctacttaggacttgggagaggaaccgctagaggcggggccccacgggcacgcatagctatgtacaaggcttgttggcacttagttacaggagcaactacttgttcagctgcggatttgttaaaagcaatagatgaagctattcacgatggtgtcgacgttttgtcgatctccaacggcttctcggttcctctgtttccggaagtggacactcaagacggtgtggcggttggagcgtttcatgcagttgccaagggaattcccgtcgtttgtgccggtggcaacgctggtccctcttctcagactattagcaacacggctccttggatcattaccgttgctgcaaccactcaagatcggtcttttcccacatttattacacttggcaacaatgtcacagttgtggtaattaagctttgcaatagttcaaaaaaggattaagattacttctttcacaatctttgtataacgtttttaagttttagggtcaagcattgtatcaaggtccagatattgatttcaccgagctggtttaccctgaaggttcaggagcaagcaacgagacattttatgggtaattgttttatctctcatcttctctctggttaaacatttcaagagtctttcccgaatgagtctaactccaatcttatacaactttcagagtctgtgaagatcttgccaagaacccagctcatataatagaagaaaagatcgtcttatgtttcacaaaatcgacgagttacagtaccatgattcaggctgcatcagatgtagttaaacttgatggctacggcgtgatcgttgcaagaaatccgggccatcagcttagtccatgcttcggtttcccctgccttgctgtcgattacgaactaggaacagatatactcttctacatacgttccaataggtatattacagtcatacatattttcatcaacttgtaaccattacctagttattgattctgtatatcatatggttggttttgtagatcacctgtcgcaaggattcaacctacaagaacgttggttggacttcccgtggccacaaaggttgcgactttctcatcgagaggacctagttccatttctcctgcaattctcaaggtaaattctgacctagctgtttgattctttgtttctgttaaaccctaaaactcaactagattctttaaatcctgaactcaaaaccataacctatacgagattcttagaaaataagcatggactttatctcttactatgtggacaatctaacaataagttcatggcttcttgctatattagttagatttaaggttttctatgctctcactataaatagggtataaatgtggtcttcagtttaatgtagttacttttgactgaagtttcatctagtttcttttgattaaattacactgattgctttctcggatacagcctgatattgcagcacctggagtaaacatactcgcagcgacttctccaaatgatacattctatgacaaaggatttgctatgaaatcaggaacgtcgatgtcagctcctgttgttgcaggaattgtagcactcctcaagtctgtgcaccctcattggtcgcctgctgccattagatccgccattgttactacagcatggagaacagatccgtccggtgaacccatttttgcagcggaccaaaccgtaaattagctgatccatttgactactgaggaggcgttgtgaattcagagaaagcagcaaaccccggtcttgtttacgatatgggagttaaagattacatcctctacttgtgttcagttggttacacagattcatctattactggactcgtcagcaagaagacagtatgtgcaaaccctaaaccttcagttcttgatctcaatttgccttcaatcacaatcccaaaccttgcaaaagaagttactatcactagaacggttaccaacgttggaccagtagggtcagtttataagcctgtgattgaggctccaatgggtgttaacgtgaccgtgacaccaagcacattagtgttcaatgcttataccaggaagctctcgtttaaggttcgtgtcttaacgaaccatatagtgaacactggatactactttggtagcttgacttggaccgactctgttcataatgtggttattcctgtgtctgtgagaactcagatcatgcagcgttattatgatgaaaactga

SEQ ID NO: 138078 - DNA, 4345 bp, Arabidopsis thaliana landsberg
tgactgatgcaagtgaatgacgttgaaggtctccaaatcaagaaagatgggaaatgggttcctgttaaacccctcccaaatgctttcattgtcaatattggagacgtcttagaggtaaagtttaatcaaatacatagggttgtagatcattgtaatttcatcatgacgtttgtttgggcttaatgtagatcataactaatgggacataccgaagcatagagcatcgcggagttgtgaattcagagaaagagaggctctctattgcaacgtttcacaatgtgggaatgtataaagaagttggtcctgcaaaaagcctagttgaaagacaaaaggttgcaagattcaaaaggctgaccatgaaagagtataacgatggtttgttctctcgtactctcgacggaaaagcttatctagatgctttgagaatctaaagagagcaatgccttgtcgcccactactctgtttctctgttttcttgatttatgcaataaaacaatctctataatcttatcttcattgtctctctatttgcttcatttcgttaaagacaaaaatctcctgtagagaatgcttctacgtattgctacaataagacaataagtttgttcttagcaaaaaaaaggacaataagtttgtcaaagtttcttgacacgttcgttgttgctcaaagatatacctaataatatgatcacatgattcacatactctgttatcttagaagtctatggtttgtcgcaaaatccaattttaattttcgactcctaaatttagtaacttttgtgttgttagcgtgcgctgtgagaaaagacttgctcacgtacaagatattttagataagttaagaaacctcaaacgtaagacatacattgcacttaacgtattaccaacctcttgctcaatcttgtggataacagcaacagtaacgaatgtcgattttattcttaaacatgtatttccctaaaaatggacaaacaacaataacatagaataaaaattatggttaattagcttccacaattttttaaaaagaaacaatctgttgacaaaaaaaggaattaatttatagatttgcttgggatcaattagctcgcatgtggattttcatatatatacaataccatatgaagccaaatatattataaagaaagaaatcttttttagattttgagctctggaatggagaaaagtatcaatggatcatgcagactcatcaagagactcgtgattatactttcttgtctttcatattcctttgttcgatcagactttacagagagaacaaatatcaattatgtatcagctgtgggagatcccgggatgagaaacgataacttaagggtggctatagaagcttggaaccaatgcaacgaggtcggtgaagaagctacaaacatgggaagccctcgaatggcagattgcttcgatatcgataactctagctttcccggtaaaatcataatgttgttatgttcttacttctctgttttaggccttaattccgcatttacgctaacatatagaaaaacaaacttcatacttatttcaaaacattttcttaaagttgttaccttccgggacaggcaaacgaaacagagacattaaacctcaaactgaaactgatttattgtgttcatgggacttttttagtgaagataatccacaaagtcgacgaaagagacaacaggcttggggtaggaaatggaacctacggaggaataagcgctggagacaacgcagatatctacgcagcgcaaaaggaggtatacttaggaaacaaatgtcaagttgtggacaagccaaatccatggcagttttggatgataatgctaaagaacggtaatacggatactttagccgcaatttgtcccgaaaacgggaaaaaggcgaaaccatttcctcctacggggaggtttccatgttttgggaaaggatgtatgaacatgccatcgatgcatcatgagtacacaagcttggttgataacgaagaaggacatatgagtgggagtttttatgggacttgggacttggataacgaccaaaaagatccggttggtaataattcgtattataaggtgaaatgggagaagaagattgggggaaatgagagttgggtttttcatcatttgttgaagacttcttctaagtatccatggttgatgctttatctacgcgctgatgcttctcgaggtttctctggtggttatcattacgacactagagggatgatgaagatggtaagtttctaatccgcattttagcaaccaaaaccggttttactctgtttctgaaacgcaaacgcagaaaataaccattttcagcgatttgggactaacatactctgttttcaatgatctttcatgacgcacaagacgctaaaatcgccagattttaaagtaaaattcaagctagagattattaaaggaggcggttcagggagccaattttacctaatggacatgggaagttgctggaaaaacgacggaagagactgcgacggcgacgtcacaaccgacgttacaaggtacagcgaaatgataatcaacccgggggcaaccgccgtttgcacccgcaaccgcctaggcgcttgtccgccagagcatacttttccaaacgggactaaagttcacaggacggacaaggagaagttccctttcgaagcgtatcactattactgcgttccgggaaacgcgcgttttgcggaatctccgtacgaggtttgtgatccgtacagtaatccacaaccgcaggagattctgcagatcttgcctcatccagtgtgggaacagtttgggtatccgacaaagaaaggacaaggttggattggagatccaagaacttgggaacttgatgtcggaaaactctctcagtcactcttcttttaccaggtattttttgtagtcctcctttatatatatatatatctgcatttacattatcacgaaaagagtattaaaatttcgaacatgttaaaaaatgcaggatccagggacgaaaccggtggagagacattggtcgtcgatagatttaggaactgaaatatatatgagtaagaatcaaattgctgaatggactgtaactgatttcgacattgttataccaaatgccgatatttaagtggaataataagattctgttataagctgctaaaccaaaccatctcgaaagcctaaaacacaattgaaattcttctataaaccgacgggttttgataatataaatccaaaacaaaatcgagttttaggtaaccgaataaattcgttttattttaatgttataaattttcttaattaatatgaaaccaaatctagactaaataatataaaccatagtttcatcaaattaaaataaaattataaacatttttcattttctgtaaaatcgaaatcaaaacgaatttgttaaccagctaactgcagattttatccaaagaaaaaaaaaatggtagtcaagaccagtcaatagatcaaataattatgattggctaatttagtttagtttcgtggtcgcgaggcagtagattgtttgctgatcgtccctatagagtatagactgaaaccaccggaagacgacggtacgaaccgttaattaacagccgtcaaaagacgtgacgaaaaattcctcagcgtttcttttcagtttcctttaagctctcgattgtgtttgtttaggtaacgagaaaaaagcgagacaaacgaaaaaggttttactttttttttcttcatctgtgtgtattttcattttctgggttttaagggtttcgcttgcaaagtcgagagctttttatctgggtgtgttataatggcgggtgattgtgcgattgacaccgagaaatactctctgctggaggattttaatgtcgatgttgaagtcgaaaacaaagcatttgagactttctcactttgtttttgggtttatctcttagattccaccacatacccttctgcaattatcagacaggtgagttctcagaaatgtccatctgttgccttctgtgttataatcgctttcatatatccatgtcttgtgagattaacttgttttgcgaattgggggaaaaggttcaaactttgtgtcgcttctttgattttttttttttagtataaccattgttgatttatgagttttaaactgaaacaaccagcttctgattaaatagtggctttcttctcaggttcactcagacatgagtgttagtgcacctttccttgtgctagatgaaaacaagaagatgatgcttttgccattgactctccttcacaaggaagctcctgatcctgtagacacttcttcctggacacaagttcctagcgtttctacaaaatccaagtttcctcttgaaaaatga

SEQ ID NO: 138079 - DNA, 3971 bp, Arabidopsis thaliana landsberg
gaaggagcaaagtagaggatttaacaatggcgtctctttctctcagttctgctcatttctcttcaacttcttcttcatctcgctcctctatatccacttcatcgctttctccgtcgtcaacttctctccctctcttacaatcaccgatccgccgccgttaccgctccctccgccgccgtctctccttctccgtcattccccgtcggacttctcgctccttctccacttccaattctcaggtacttcttcttacttaccttgttctcttcaaattactgatccaatccgtttcctcaaatgtgcttaattttacacaattcatgaccaattcggaatctgtagatggagaattactgtaatgtgttttgtatccgtttgtgaattgtgattgtatagattaggtgttcgataaatgagccgttgaaggtgatgatttcgggtgcaccggcttcaggaaaaggcactcaatgtgagctcattgttcacaaggtaatattatccactcttctctatcgggttcttgttttgagctcattgttcacaaggtaatttttttatactctttcatgatctcttttctggttgtcttatgggttctgactcatggtagattctctcttgagtgcggtgaagaatggatatgcatttaaaattatctagtatactgaacaatgcatataaaacgtttgctgtgactcataaaatcttatttgccatccaaaggttgctgaattttccttgatctttggactgttcattaaattattgcaataatcacagtttctagtacgtttgatgtaaggaagactatctatgttgccattgtttgtatgtcttgatttatatcaagtttctctttcttggtcatgcagtttggtttggtgcacatatcaacaggggatctattgagagcagaggtgtcatctgggacagatattggaaagagagcaaaagagttcatgaactcgggtagtttggttcctgatgagattgttatagcggtactgattttacttacctgtttcatgcattattttataatattactctgatatctactacctttctagatggtggctggaagattatcacgtgaagatgctaaagagcatggatggcttcttgatggatttccacggagttttgcccaggcacaaagtctggacaaactgaacgtgaaacctgacatttttatcttactagatgtacgtgcaaattactcttattgcgtttgttatccatttcagcaataggtgttgaaaccaattttcactatcagtggctatgtttctttgcttatatgtcattcttaatgacaggttcctgatgaaattctgatcgatagatgtgttggtcgaaggttggatccagtgactggaaaaatttatcatatcaaaaattaccctcctgaatcagatgaaattaaagcaagactggttacacgcccggatgatacagaggagaaggtgaccttttggacctattatttgcttttgaattttttaactaccgtcaattgtaatctcacaagtttacttcgttgaaggtaaaagcacggctgcaaatatacaaacaaaattctgaagcgattatttcagcatactcagatgttatggtcaaggtactaggcaatttttttttggtttcccttaacctttggttcttaaagtattgcaatgccatctttgatatttgtggtttggtatcatctcattcgaacacagattgatgcaaacaggccaaaagaagtggttttcgagaagacccagactctactgtctcagatacagttaaagagaatgataaagactggcaagtagtcacacatttatatatatatgtatattttcatggtgccgttcttgatagcagggtcagtgttttccagttcaagatgagtttccccaatctttgtaatcttaacttttatcttgttctattctaggttatttagaaaataccttgttcagtaatttgtctctttgcttccataggaaataccatcttttggttgttattagaattttgattctggtattctaaacaataatcttggttaaactttatggacacatgtaacatagaaagggagattcaggaactcccctagtgtgtttgaagattttattgtcaatcattatgttttaggactaaatttttccttttacttcttgtttaactttgatttgatgaccactgtatgcatgcgacgctaattctgaaacaggtccttgcagataaagcatctcctgttcaggtccttgaataatacttttctttgaagctatcaagtagctggaagtaaattgggagatattcttatctttgtcatgtaacatttctttcaggataaatggagaggaataccgacgagattgaataacattccacattcgagggatatcagggcttatttttatgaagatgtgctgcaagccacaattagatctatcaaggatggtaacacccgtcttcgggtgaggctaatccacacaatctatttgcaatgtcgcatgttatgtcatctttattttgcaattcctaaagcagctgcttgacgggactgatactgttacaaatgaataggtggacattaatatccctgagctaaatccggaaatggtcagttattcatttcactaactgttttatacgatttctaaagcttcataagttgtaccaaaaagcaagctattgtgataaataggatgtttaccggataggaaccttgatggaacttgttcgagctttagctttatcattcgctgacgatggaaaaagagtgaaggtatacatggtttggaagacttaagtgatgtcacatgaatacagtttcacaaatcttgttcattcagcttttttcctcttccaggtttgtgttcagggatcaatgggggaaggtgcactcgctgggatgccattgcagttggcaggcactcgaaagattttagaatatatggactggggtgatgatgaaactttgggaactttcgtcaagcttggtgcaattggtaaatatccaaaaccaaatacttttcaaagatgtattgacaaaaccatgtttaacactagaaatactcagatacctcttgactttggtgtcttctggctttagtaactagagaatctctcaacttacaaaaactgcaccatcaacagaatattgttgtgtcaataatcaaacttgtgatgcataataaagttggatacattgaattacacattattctgctctttgattatgtgtttgcaatgacaggtggtaaagaagttgatgaagaagatgacatgttcatcttagtggctccacaaaatgccgttggaaactgtattatagatgtgaggagctaggaatgcttgaattcgttattcatttgaacttatcgacctcattttatagaatataccggattcgtttgttaggatctacaagcgatgactactgctgctgggaaaaggccagttgtacttatcaatcctcgcctcaaggtacattttctgcttgcacttttttatatagagacaatgggtaacaatgtgatctatattgtgagttacatgtttcatataccttattatttcaggacttgcccgcttcgagtggcataatgcaagtaagcacacaaagtgattctttacccatccaataagaagattatgttgcttataatttccttggtgtctcagacaatgggcagggagcaaaggctggaatatgctttgacgtttgacaactgctatgtattccggcttctctattatttgggaacacaatacccgattatgggcgctctaaggtacagttgttgggttatgaagtagagaaacaactatcaatgtcaattcattctgaatgtttgacctgaatttggtcaggatgtcttatcccccccggtatgagctttataagagagtgaacgaggaaaatggaaaggagaaatatgtcttgctagcaacgtacgctgagaggc

SEQ ID NO: 138080 - DNA, 4223 bp, Arabidopsis thaliana landsberg
  unsure (1)..(4223): unsure at all n locations
atgatggcgagaccgaggaatcatcgtccttcagctcggaaatcctcccgttcaacgctagtattcgccgtattgatcatgtccactttcgtgattttgattcttctcgcctttggaattctctcggtgcccagcaacaatgccggctcctccaaagccaatgatctcacttccattgtccgaaaaacacttcagaggtaagataccatcccatgccaatgttgaatttcaatttagtgcgcttcaagatcgggttaacttttccgtttttccgtagaggtgacgaggatgattcaaaaaacgagcgttgggttgaaataatctcttgggaacccagagcttctatctaccacaatttcttggtgagcctatgcctatccatatacagatttgtttttttacttcctccattggtaaatctgttttggctcccatattcatcttctctatctgtattttcaatgtatacttgcacgtttccttaagagatataatcattgtaaggaatgtcttagaaagcaaatttgaagattgtgaattaggatagggaagtgtttagtgatgatttgatttgctcttggttcgcttactttccccggttagctgctactgacggaatggttttattacccggtttctggatagacaaaggaggaatgcaagtatctaatagagctagctaaaccgcatatggagaaatcaactgttgtcgacgagaagactggaaagagcacagatagcaggttttatacttttcactcaatgcaacctcttctagtattattaagtgaatcctcagaagctttattctcctttactgatcaaccccacatcctagggtgcgaacgagctcagggacatttcttgcaagagggcgtgacaaaactatccgtgaaattgagaaaaggatatcagattttacattcataccagttggtatgatctgcttttctgttttgtttaataatttgacaatttcttgatcccgtttctccctagatttcttaggcagacctatcattatcctgactggttctgttgatgctacaacatgcagagcatggggaaggtcttcaagttctgcactatgagattgggcaaaagtatgagcctcattatgactacttcatggatgagtataacactaggaatgggggacagcggatagccacagttctcatgtacctgtacgtaactgaccaaacaactttgggcttgcattagctgtttctatgttcttcctataacggttcttagggactttgcagatcagatgttgaggaggggggtgaaacagtgtttcctgcagccaagggaaactatagcgcagtgccatggtggaatgagttgtcagagtgtgggaaaggagggttgtctgtgaaacccaagatgggagatgcattgcttttctggagcatgacgcctgatgcgatgctagacccatctagtcttcatggtgagtagatgagtttgcagacatagaaaatgatgaatgagaggaaagcatactgcttgtgtatagttggtttcgagactaaattcgtggaatcccatcactaatttggtccaattgggcaggtgggtgtgctgttataaaagggaataagtggtcgtccacaaagtggttgcgtgtacacgagtacaaggtttgagggatgattgaggtaagtttaagattccagcttcttcaagtaagtgatgtgtgtgcgtgagagacacgtaaaatgagtcacactacctgccttaaaaaataatatatattagttgttgtaaatggatggaaaagtagaatgtagaatgtaaaatgtaaaaagaagaagactctgatctgatcttcgtacagggaaaggtgaggaggtgagcctgagactgagagagagtgggtcaccaagttttgaggacagcggtgggaaatgaggagcaatagagaagcaagcttgtagaggtaagttaggggatgatacattgtaggctttgtgattcgtttgatatatacatacatatactgtatgtttaatggattaagaaaagcgcattggattgatgagaagttgggtggtgtttctgtttcacatatagtataatgttaacacaaaacttgtttgtataataaagagaagtaaaggttttttttttttgtttttgattaaattggaagccaaaaaagtcagaagaagggcgcaaaagtcttacccactcatcgttttctttaaataatcaaatccactcgtcgtcgtaagatattttcctttcgaatattaagaaaaatgagacgcgtgattattaattaataaagaaactttcggtcagcggagagaaggttcctttgcctttggtctctttttctaatcgattgattatatcttcaaataaaaaggagaaaagaaaggttccttgtttttccagacaaagaaaacacaaattcattccctcctcctcttcatctcttttgcagatatggatggttattattctctgtctcccatctctgtcctccaccggattaaagattccttccatttcgccgtctctgcccttctcgccaacctcttctccgctctcttcaccttcttcttcgctttaggttccttcttttcttcacattcatcttcattaatcaatctctgtgatccctgaggaattttccttgtttctgcaattacgatatgaatatgatttgacttctttgttgatttgattcagtggggactttgctgggagcattgacaggggctttgatcggccaagaaacagagagcggtttcatcagaggagccgccgttggtgctatctcaggcgccgtcttctccatcgaagtctttgaatcttccctcctcctttggcaatccgatgagtctggaattggatgccttctctacttggtaacaatcttcatcatcatcaccaccagattttcttttattttcttatgctcaaatgcttttcctatcttatctttatatatatagattgatgtcattgctagccttttgagcgggaggcttgttcgtgagcgtatcggtcctgcaatgctaagtgccgtccagagtcaggtacaactaccatttcttttctttgatgcatcattcattatccttctcaacttttgtattaataataaacagatgggagctgtggagtcccagttccaagatcatacagacatctttgacactgccatttcaaagggtctcactgggactctctcaacaggatccctaaggtccgaatcacagacacctctccggagattgtctcttgctctgtctgccttcaggtttgtctcacttcccctctgcttttgaacatcatcttccgcggaacgtagattagaagaaaccattatatattgttgcaaaaggttgagagaggttctagatgtttccattaggtgacaagtggttgaaagacaaaattaattaaaattgaggtgacgaaacaggactttcaggtgggagagacagttagaagtttgccgcactgccatcatatgttccacctaccatgcatcgacaaatggcttcgcaggcatgcttcttgtcccttgtgcagnnnnnnnnnnnnnnnnnnnnnnnnnnncttcttttcttctttcttctcttctttgtacatgaggtataggcatacacacacacacatatacacacactagtagtcttccttgatttttttagattacacgttacacagattttgatgcaccaatcattgtaacttcactcatctcttggagatcctgtttatttatgatacttattcttggcttcatcattcaaaaaggacaggctgcacttcccaattttagaaagtttgggatcggttttgcatagactaaatcccaaatgaaaaagcatatatacatacatatccttgtcgtcgaaaacaatgctctactcttaagaactaagaagagagataatacattttacatgaactagtccgagtacaaaaatatttggcatgagatccaacatgtcaatagcttcagttttatattatacatttcttataccaggaagagtgaacccaaaaagacaaaaaaacataaagaaagaaaaaaaaaacatatctttggttggataaatataactacaagatggatggagcctggttttaaagtttcttaggtaaagtgataccaccaccacggatagaaacagaaggggttttaagagaggaggctctgctgagcagattggtgtccaggaagaggacgaccacag

SEQ ID NO: 138081 - DNA, 2755 bp, Arabidopsis thaliana landsberg
ctttgatgggattcagcttgttttctcaaatgttagttttttcttcatttgttatgcagcaagtattaaaaaggtgaagactttatcatcctctcaggtccgtttctattctatcatgccctttgataaaatcaaatataaaatcaaataaattgcttttgattttctctgtgaatgattcgtactactacttgtcagtctcaacattctgaatttagaatttaatacctcatttctctttgcgtttctgtcctcctgtaatcgtgtctttgcgtaacctgatttgattcctctgttcgagttttaaagtttccatgtgtcggcaactcgttatgcattttttggaactccatatttaatcgttgcatctctctgtgtctgtatatatggtaaatctcaatctcggatgtactcttgttgctccaattacttagctttttagttctcaaggaacttattaacttgtcaagatccagccaagatggatcactggatgattctgtatgccttgttctgaaagttaactaaacaaactgactcaattcttgtcactaacatgtttattgaccccaccattcttatcctaatcatcaaaatgtttggttctcagcggcttggatgctaactgcaaactaatgggggatcttgtcaagagacagttttgattgttgatgtacatcaaagcaatcatgaacagacacaggcttctctcagcggcaacagatgaatgcaataaaaaacttggtcaagcttgctcttcttctttatctccagtccataactttctgaatgtccagccagaacaccggaaaactcctttcataaggtcacaatctccagattcacctggtcagctatggccaaagaatagttctcagagcaccttctctcggtcttccaccttttgcacaaacctctacttgtcatcatcttcaacctctgagactcagaaacatctaggaaacagtcttcctttcctccctgatccctcctcttacacccactcagcttctggtgtggagtctgcaagatctccatctattttcactgaggatttgggcaatcaatgtgatggaggcaactccgggtcgcttctcaaagacttccttaatctttctggagatgcttgttccgatggcgattttcatgattttggctgttcgaatgacagctattgcttatcagatcaaatggaattacagttcctgtctgatgaacttgagctggctatcacagaccgcgctgaaactcccaggcttgatgtaagttaatctcagtcttgtacagctcttatgagtttgcatcagttactttgcatggctatgacaaacattgacttatactttcactgcttatgactttcggtctttgctgttgatacatagagtgtgaaacgtcatttgctcctttaacacttagtttctgtttgattcaggagatctatgaaacgccattggcgtcaaatccagtgacgagattgagtccaagccaaagctgtgttcctggagcaatgtctgtagacgtagtttcatctcacccttctccgggatcagcagccaatcaaaagtcgagaatgagatggactcctgagctccacgagtcttttgtaaaggcggtgatcaaacttgaagggcctgaaagtgagttttagctttttgagatacgagtaggcacttataaagtagaactctagagctactcttgtgtttgccattggttagatatcctttgtttcttctcatctttctgctgataacgcttaacccggtttttgcattaaacatgtagaggccactccaaaggctgttaagaagctcatgaatgttgagggcttgacgatctatcatgtaaaaagccacttgcaggtactaaatcagtttgagtgtgataaatttataagtacatgataccaaattagctgaatatctctgaaattcacgaatgtgcagaagtatagactagccaagtatatgccagagaaaaaagaaggtaaagcctccaacttgttattgtgatttcacagattctctgtttctgcatgatcatcagccatgattttgatctatctgacagttcctttattatttttcgtttattccccagagaaaaggactgataactcagaagaaaagaaactggctttgagtaagagtgaagctgacgagaagaagaaagggtaaagcattgtgtttctctaattccatgttcaatccgcagacatttttcaacattatccctaaaatgactctctttttccatggacagggccatacaattaactgaagcactgcgtatgcagatggaagttcagaagcaattgcatgaacagctggaggtaaaaccgattacacttaacttggggaaaagaaatattgaagatttgctactataaccagtcccataattgatcaatgtgcaggtgcaacgggtgcttcagctacgaattgaagagcatgctaaatacttggaaaagatgttggaagaacaacgcaaaacaggaaggtggatttcttcttcttcgcagacagtgttatcacctagtgatgactctataccagattctcaaaacatgtccaaaaccaaagcatcttcgcctcagccgccattacctgcagagaacaaagcgtcggaaaccgaagacgataaatgtgaaagccctcagaaacgtcgcaggcttgagaacatagctgaatctgaagatcctaagaggtagtaagattcttcaagtatgtaaatatggtccgttttgtgtaat

SEQ ID NO: 138082 - DNA, 4582 bp, Arabidopsis thaliana landsberg
ttgatccactcagctgtcatactagttcttcgtttctaatttttttaactgtgaagactttttccaacatgtcatggtccaaatagattgcgcgcgatgttatagctgttttttacaagttcttgtgtgataccaaatagtttacatgattactcttatctatcttttaacttcaggagaatatctttgagtggcaattcgccatccgaggtcctggtgatactgaattcgagggcgggatttatcatgggagaattcagttgcctgcagattatccattcaaacctccttcattcatgttattgaccgtaaggatcttactcttatttcatatataaaaacacacagatgttgcaagttccataagagagtatgtatctaaagaatctctgtacttttgtttcagcctaacgggcgctttgaaactaacaccaagatttgcttgagcatttcaaactaccaccctgagcattggcaaccttcatggagtggtaaagtcatggatctcaagagaccttatctcttgacttttatgttgtttcctaaaagactactcagacacttgtaatttacatgaggttgaactatatcagctcttttgtattatgattgagctttgtttcttttcagttcggactgctttggtggctctcattgcatttatgcccacaagtcccaatggagcactgggctcagtagattatccaaaggatgagagacgtacactagccattaaatcacgtgagacaccacccaagtatggctctcctgaacggcaaaaaattattgatgaggtatagttccccactagaatacccttgggtgttgaaccactatgcataatatcctgatgaaaatatatgaatttagctagatgcttgctgaacctgtagagtatgtgccataccattgcattgcatcattataaaccataggactagctggtggtcaaaacgggatcgcaatatattatatattaggcttgcatatctctagcggttatgatttaatgtttgctctaagagtatctgctttgttttaactgcaatcacagctgttattattctctccatacagtaaaatttgctgctcaagtcctaacacaccattttactgattattgtcgtttttaaaaagtagtcagttgcacaaatataaaaaaaaagacaatagtagtgttaacaatctccttttggtctaaactctcgtccctttcttcatgatttttgttatgactttagtttcatacctctgattcatcttcaattttggaaaaaacttttagtaaccatgaccttttaacaagcgcagattcatcagtacatccttagcaaagcaaccgtggttccaaaacctcttcctctggaatgtagccaagcaccttccatcgtatcagaagctcactcccaagttgagccacaggaagcgataactgtagtagaagagcggtccatcgctacaacagacaccatagttgatgatcaaatcatagaagagacagctgaagcagtcaatacagcagctagtgtggttcccgctgcagcacctttaccagcggttgaagttgcggtcaaagcttctgtaagtggtgagcaaaggatggccagaagagcggctcagaagccagtcgatgacagactcttcacgtgggcggcggttgggctcacaatcgctatcatggttcttcttctgaagaagttcataaaatcaaatggttacagtactgggtttatggatgatcagtcttgaactctgatgaaagtcaatgctgcgtttaagaaatggggttgtgttgtttaatattttataaatataattaaagtgcataatggcgtaaataatttctgtgtgacattgtcttgcaacttagttgatagattggattatagcttgtgaccaagttaacaatatgtattttggaattgaacactgacgaccgttttatcaatacattgatgctttgttaatagaattgttgattacctccactatgttcataactatttcccgttttgagtacatgatgtctaaaatgtatccaaatttttaaatcaatagatttcatggtcaagtttaacaatttgatcatatatgtatgtatatgaacacacatgtagtgagtcgtgtggtttatatatttgtgtgtattttcattataaattacagaaacatattagttttggggtatcttctgcacacattagtttggtgtgatctcatcttgtaccttatttttttacttttcagtttagaaaaggttatcaactttgacctttgactgccatataacgttaaaaagagaaaaagttaccgaaggttcaaatttaataaatgaagttgatcgtaatgaaaataatatttttttaaaaaataagggatggtggcaaaagaagctaagttaaaagtctatcagtccttattgctcagggatcctcaggtactaaaactagcaaacactgcttttgcgtgtctttgaagtcagatttttaacagctattgtttcatctgcctattactataaaataaaaaaacactttgatttatgggaacgtgactgctttttccactattataaccttgactcgtttttaatgaaaagaagcatacatatttggatactcacttttgcccatttataacaccagagagagagatatagggatagggcgagagagagttatactaaagaaacttgaaggagaggaggttctgagtgagatagaagaagaaagagagagatgggtaagagtagtaacatagtttttgatcggattaaagaagaacggcagatgttgagctttttcaagatttttcagagggcagatctatcctctgactgcatggtaacgttgttcttgatatctttgtttgaaaagtgggaatctttttcttctttttgttgaatgggtttcaagtctacggcttattcatcttttggttctctttgttttaaagattgcaactgtttttcctctgaatcttttacgttctctgtctttgaaacgttgaatctgttgtttccctggtgttttaagggtctcagcttctcgagggttgaatctttaggttctgtgtgttttaaaagttagatcttgtaaaaaaaaaaaaaaaagttagatcttgttagcttttggctgtctttgtttaatgaaaggttgaatctgttaaatctctgaatatttacgttctctgactttgaaacgttgaatctgttgtttctctgctctcaagactcttaacagtttaatctttgagttctctgtgttttaaaagttaaatcttataatctttgtttaaatggtagagtcttttggttgtctttgtttaataaaaggttaatctcttaatttttacgttctatatgtttgaaacgttgaatctgttctttctctgggtttttatgggtctcaacggttgaatgttaggttctctgtatttgaaaagttagatctttcagctttggctagaaggtagaatcttttggttgtctttgtttaataaaagtttaaattctgaatcttcacgttctctgtctttgaaacgttgaatctgttgtttctctggtgtttttaacactcttcattgtttgttccaaccagagagcgcttccttacagcttcataagcaaagtctctgagaaagacttctcttacaagatggttataagagcgcaatggggaaagacatgggatgtagaagtctccaagaacccgacatactactacattgagacgcgtggatgggatctgtttgtgagtgacaatgctttaggacaaaacgagttcattaccttcactcacagaggaaatatggtctttcatgtcaacatctacgagcagaatggcttagagatgcgtaaacctcgaaaattccagacgatgggtccttctagtaagcttttgtgcttttaatgctttctttaaaacagagaatatgaagttgaagaagactaattattttactcttgatgattgatgaaaacaggtgggatcaagaaagaagaaggagagaacagcctcatagatgtgaagaaggaagaggaaagtgatgaatctccgggacgagctgagttcctagttagaaagaagaagactgaggattccaaatcatcaaagaagaagatgacgagaaacaaagtgaagaagaagagcaagagcaagagcaagcaagtgctggatggtgttccagagttcaaaatcaccataaggaaatcatacctcaagttcctggtaagattcaaaccataagacagaaccaaaacaagaacacatctctgtatattggtgataatgattttctggtttttatgtatcaggcaataccaaaacattttgtggatgatcatatcccgaataagtctaagattttcacgattcgtcacccgaatggtggttcatggaaggtgctttgcttggtgagggagattcggacaatcttctcaggtggatactcgaaattggcaagagagttccctttgatggttggtgacaaatgcacctttaagcttatcaaacccttcgagtttgtccttcttacctccaagaagaacagagagaagatggatcagtgcatgatcgattga

SEQ ID NO: 138083 - DNA, 6026 bp, Arabidopsis thaliana landsberg
  unsure (1)..(6026): unsure at all n locations
atgcatcataatcctgggttttgagttttaacagaactgagtgttgttttgtaggacactgaaaacttgaacacaccaaatctacatggacgaagcagagagctttgtcccgtttcagggtataaagaaagatgtcaaagggagactcaactgctacaagcaagattggatcagtggtctcagagctggatttaggtatattcatttttcaggaaatgttgatgcttgagctttgatagtaacttaatttatgcaaaaatattataggattctggcaccaacaacttacatattctttgcatccgctattccggtgattacatttggagaacagttggaaagagatactggtatatgaataactctttttgttccctcattcaaataatctgtctttgattattgtgagagtaacagaaaacttgtgtgttttgtttcttttgcaacaagatgggaagattaccgctgttcaaaccttagtttcgactgcattatgtggagtgatacattccattattggtggacaaccattgttgattcttggtgttgcagagcctactgttataatgtacaccttcatgttcaattttgctaaaagtagaacggatttgggctctaatctctttctagcgtggaccggatggtaaactcaagtttttctctttgcatagctcagttcctttcaaaagcttttaaagtctcaaaaatttatgagaggggcattgtcctttttgtttttcatggatgatttctttttaagggtttgcttgtggacggggctgttgttgttcttgttagctgtattaggcgcttgcaccttcatcaatcgattcactcgacttgctggggaactgtttggtattctaatagccatgcttttcatgcaagaagccattagagtaagtaaaagagctttctttatcaattacattcacaacttatactagcatttgcaccaaaggcattcctttatgttgaaactctacttttcagggcattgtggatgagtttggtgtccccggaagaacaaatccaagatcagctgagtttcaacctgcttgggtgtttgcaaatggaatgttcggtttggttttgtcttctggacttctctatactggactaaaaagccgaaaagcaaggtcttggagatttggtgctggtaaggaaccttgatatctattcaaacagtgaatcaaaaaccaaaaaaatctgtctaaaagtcatttacttctccaagcaaaaacctcaggaacatcggtatccttgtcattgcagaatggttacgtgggtttatagcagattatggtgttccagtaatggtggtagtgtggacttgtatatcatacataccttggaaaagtgttcctcaagggataccaagacgtcttgttagtcctaatccatggtctcctggtgcatatcagaattggactgtcattaaggcactaatcacttcctctacacttattattctctttactattaatgcttcatgttgatattcatgaaagtgcatgatgaataaactgcaggagatggtggatgtacctgtgctttacattcttttagcggttgttccagcgtcaatgattgcggttctttactactttgaccatagtgtagcctcgcagctcgcacagcaggaagatttcaatctgagaaagcctcctgcttaccattatgatctgtttcttctaggtttcttggtaagagatgaagtgtatgtttttcttgactgatttattgacttgaccagttacgaaatatgaaaggttggaactcttcttttgtagacaatcctttgcggtctcatcggaattcctccatccaatggtgtcatccctcagtctccaatgcacacaaaaagcttggcaacactgaatcaccaggtttgattacatattgtagtgtgttttatgtaggccttcaattgtatttctcaaaaggcatttaaaaactggttgatgtgcagttacttcgaaacaaactcgtggcagctgcgcgtaaatgcatcagaaacaatgcaacaattggagaagtctatggaagcatggaagaagcttaccaacaaatgcagagccctctgatacaccaagagccttctcgggtatgttggtatcatctatatattagtttataatttgacctttttaactcatccctgatcaagcacggtgcaatatcagattcaaggactcaagcagtcacatattcaaaaggcttcaaacgccgatgcactggtcgatgaaacagtgttcgatatagagacggaagtggagaatattctgccagtagaagtaaaagaacaaagagtaagcaactttcttcaagctatgatggtggctggatgtgttgcagcaatgcctttgatcaaaagaatcccaagctcggttctttggggttacttcgcttacatggcaatcgaaagcctcccagggaatcaattctgggaaaggatcgtgcttctcttcactgccccaagtagaagattcaagtaaaaaacaaacctttcttcatcaatctgaaaatcttgttgttggtgtattctcatggtctctgtgaactttggtctctttttttgtgcagagttcttgaggataatcatgctgtgtttattgaaacggttccgtttaagacaatggcgatgtttactctgtttcaaaccgcttacttactggtctgctttggcatcacgtgggttccggtggccggagttttgttcccgttgatgataatgtttcttgttccagttaggcaatatgtgttgcctaatttcttcaaaggagctcatcttcaagacttggatgctgcagagtatgaagaagcacctgctatcttatcattcaatctcaaaccggtaattaattctcttcttcttctcttcaaaagcttaaggctttatcgagaacataccggtaatatactggtttcttcgtggttgtgtgcaggaaggggaagtgagccgtgcgacgtcgtttgcggatagtggagaagtgatggacggaatgtttacgaggagcagaggagagataaggaaagtgagcagcttgaagctaggcggtggaggaagtggatcgacggtaggttcgccggcgggaggaggagtggagttgatgagaagagtggtgagttttcagaatccaagggtgtcggagaaagtgtacattcggagcttaagtgatttcagaggaggtggagagattagtccacgatcgtccgctggaagagctccgttcagtccacgatccgccacgggtggtggaggaggagaacagagactttctaatttaggaaagtctgtttagtaaacagtatagtgtagtctctctctctctattcatatttgttctaaccaaccaatcctatatagccaagttattccatttgcctgtcattatgagatttaagaaatgaaaagaagattatctctcggagaatttgtttatttcaggaaaatttgaaatgattttgatctccaagtacaaaaaaatggacaaaaaaaattattagagtcctagttagtagtccaagagtacaaaacaaagcaatacaaaaaagttaaaacgacatcgttttcattgtaaataactgacatcgtttcgttgttatataaaacaacgtcgtttcctatagcaacaagatgctcagactctgcttcagctggccttcgtcgtctctgcctgggctctgaaactgcatttggctgatcttggatcttcatgaattatgtacttgaaagatcatcgaaattcaatataaaacgggtaaagcttctcaattttacaataaacacaacttttcagctattgaaacagtgactaagctgtttttcttttgagctatatttctttgttagtgctaagtaatagtaaacaacaatttactatgatcttgcttctgggtctccttatatccattaaagactgatcctttctgcaccaattcagtttaatctttcttcttttagcttaaatgtctctggttagttatgtctgaagtatacaacaccggttccaaagttcgttgaccattgtttgagttcttcttttattaggattgtgagaataagaatcggattatgctaactctaattcgtaatctgcgttttactttaggttactcaatgaagcaattcatgtcagtggtgagattcaaatttggtttcacttcagtcagaatgagggattggtcggtgggagtctccattatggttcttacattgatcttcatcatccgttatgaacaatctgatcacactcacactgtggatgattctagtatagaaggagagagtgttcatgaacccgcaaagaagccacattttatgactttggaagatcttgattatctattttcaaacaagagcttttttggagaagaagaagtgtccaatggaatgcttgtatggtctcgaatgcgtccatttcttgaaaggccagatgctttgccagaaactgctcaagggatagaagaagctacattggcaatgaaaggtttggttttagaaatcaatagagagaagagagcttattcttctggtatggtctctaaggaaattagaagaatctgtccggattttgtcactgcatttgataaggatttgtctggtttaagtcatgtacttcttgagcttccttgtggtttaattgaagattcttcaataactttggttggtattcctgatgaacattctagtagcttccagattcagctcgttggctcgggattatcaggagaaactcgtcggccaataatcttgcgttacaatgtgaacttttctaaaccatcgatagtgcaaaatacatggacagagaagctaggttggggaaacgaagannnnnnnnnnnnnnnnnnnncattgaaaaatcatttaggtaacagaactcacatatcttttctcttgtatgtcatctcgatggattgttgaaaagtctcttggcaaccattgtagttgatgaacttcctctctgcaacaaacagaccggtagaatcatttcggaaaagagttccaacgatgatgcaactatggaactttctctttcaaatgctaattttccatttctcaaagggagtcccttcactgccgcattgtggtttggcttagaaggttttcatatgacgataaatgggcggcacgagacttcatttgcttacagggaggtaaaggatgactataccatgttagttttgaggttgttgctttgtttaaaactgacatatctaattttcagaagctcgagccatggttagtcagtgcagtcaaagtctcaggtggtttgaaaatgttatctgtcttagccacaagactgcccattcccgatgaccatgcatctttaatcatagaagagaaacttaaagctccatctctttccgggacaagaatagaactattggtgggtgttttctccactggaaataattttaagcggcgtatggcattgagaagatcttggatgcaatacgaggcagtaagatctggcaaagtagctgttcgatttctcattggccttgtaagtacctctgcaagctaacattcctccttggatttatacatatcttagcattaacttggcgtttcttttactcagcacacaaatgaaaaagtcaatttagagatgtggagagaatctaaggcatatggagacattcagtttatgccatttgttgattactatggtttacttagcttgaaaacagttgcgctttgcattctcggggtaagctactagtagtttacacaaacatagaaactatgagatatcacttcttgccttgtcttggttaatccctctctgatggatgtttctccatgttgatacagaccaaagtcatcccagcaaaatacataatgaagacggatgatgatgcgtttgtacggattgatgagctcctatcaagtctagaagaaagaccgtctagtgcccttctgtacggtttgatctcatttgattcatcaccggaccgtgaacaaaacagcaaatggtttatccctaaagaggtaaaacttctcaatatgtctcacgcct

SEQ ID NO: 138084 - DNA, 4348 bp, Arabidopsis thaliana landsberg
ctcagatctattctgttcttgatagctttcaacattccttaaaatatgaatgaaatgagctcattgtgcatcattgtgatttgaccagtgagcaatgggagcgattgctggagaagagctgaagaaaatggagaagacacaggtgcatgttgcccgggaagagaagatattggttctggtgagactgagacctctgaacgagaaagagatcttggctaatgaagctgcggactgggaatgcatcaacgacaccaccgtattgtacagaaacacgttgcgtgagggctcaacttttccttctgcatactcatttggtaagaatcgcaataatggtgttttgagttcaaatttcttctatgtgcttaaatcaacttcaattattggtttctttgaactgttctatcctcttctataaatttaaatctacctggccttgtccctgtatatttcacacttgtacaccgcatccatgagttgatttagatacccatttctcttttgacattttggtgacagatagagtgtaccgaggtgaatgcccaaccagacaagtttacgaagatggccccaaggaagttgctctctcggtggtcaaaggaattaactgtaagtttcctttaatgttgtaatgacgtagacatcaatggcgtggatagccaagtgattcaatacttattgtttcccagctagtattttcgcgtatggtcagacgagcagtggaaagacatacaccatgtctggtataactgagtttgctgtggctgacatatttgattatatatttaaggtactgccaaaaattaaggctgattttctcgcatactactttgatatgtattcctcttttcactaattggactggacactgcagcatgaagatagggcatttgttgtgaaattttcggctatagagatctacaatgaggccatccgcgatcttctcagcccagatagtacaccactgaggctacgagatgaccctgaggtgaaagatttttttttctctccttactgcgagttctttttgttaataatgttgtgtgactctcttctcgtgtttttcttcttcttccatttagaaaggggccgtcgttgaaaaagccacagaggaaacgctgagagactggaaccatttgaaggaacttatctcagtttgggaaggtaataatctcaaatagtcaacctattttctgttactacaacgagctgatagttatggagcttgctcaggatttgcaactcaggttattctgtataaaatgttgtcttagaaatatctctcatcatgtttctttacttcttgattttcttattgcagcacagcggaagattggtgaaacttcactaaatgagagaagttcaagatctcatcaaattatcaaactagtaaagctcttttctatcactggatctaaggcacaaagattttcctttctttttttgctcagtgccttatctaaattgttaacattgtgtagacagttgaaagctctgctcgtgagttcttaggcaaggaaaactcaaccactctcatggcgagtgtggtatgtactcatctgctttatcttcttttgggtgttaaggttataagctttgccaatcatcttgtttgtactcattgtttcttatgtacagaattttattgatttggcggggagcgagcgtgcatcgcaggccttatcagctggtgcaagacttaaggagggttgtcatatcaatcgaagcttgctgactctaggaacagtgatacgcaaactcaggtgtggaagtgatactttggctgacactaaaaccatactatttttagcattttgacaaaacaaaattgggactttacaagcatctatatttgtctttctgaaacttaatgtgcattaatataaagactgtcaacatgatgtagcaacggaagacaaggacacatcaactatagagactccaaactcacacgcattcttcagccgtgcttggggggcaatgccagaaccgccatagtctgcacgctgagtccagcgaggagtcatgtggagcagactagaaacactctcttgtttgcttgctgtgccaaggaagtcaccacgaaagcacagatcaatgttgttatgtcagacaaggctttggtgaagcaactacagcgtgagctagccaggctcgagagcgagctgagaaacccagcacctgcaacctcaagctgcgattgtggggtgacactgagaaagaaagatcttcagatacaaaaggtttgtgcttttgggaaaacccagaagttgtttcaacagatcttttggcatgagttggttgatttttgtttagttggatttattctgatcaagctttgatgtcgtgcagatggagaagcagcttgcagaaatgacaaaacagcgggatattgctcaatctcggcttgaagattttatgaagatggtggaacacgatgcgtcttcgaaggtatctcagttcaatgacagtttatccaataatcttttatatttcgatagcagttttagctaaccatttgtttgtttgtttttttccttaaaaggctggaactccgcatttccgtaaccgtaccaacaagtgggaggatggttcagtgtcagagatatcaggcgtggttgatccagacaggaccagtttcatatcagatgggacgtcaacgcctctgtcgactgcaagagctcatgttaggtctcactctgatgatgatctggaggaggaaatgtcgcccaggcattcaggagatcaatcagaagaatactgcaaagaggtacaatgcattgagatggaagaatcgaccagagacattaataacgacagtgaagaaaggacagacgcagaaacacttttgggacacaatgcagaggcaaacggtgaaacaggtagtgctcaacacaggatcccgtcaagtgttagaagtgtcaggaggaggaagagttggagccgtggagataccatgacaggcacaagcactcctcctgatgccctggagacagactaccgtggaagaccggagggtcatggatttgcgtttcctgatttggagtttggttctggtgggaaattgttgaggaacgattcaatgacttctcgtggaagtgattcaactgaggctcacagcattggaacaccgttggtgggagaagagggaggtatcaccagcatacggtcatttgttgaagggctgaaggagatggtaaaaaccgttaaaaacactctcgatatatatatcttttgctacaaaaggtgcaacttcttatgtggagctttgtattcaggtttcggatccggagaattcagggaaaatgaggaaggacattggtgtggatgctatggaggaagaggtgtctgggacaatgacaaactggtcggaggaattcgagagacagagagaacaaattctggggctgtggcagacatgtcatgtctcgttggtgcatagaacgtacttcttcttgctcttcacgggagatcaagcggattcgatatacatcggagtagagctaagaagactctcctttatgaaagaaagtttctctcaaggaaaccatgcctttgaaagaggacagacactcacaatagcttcaaggtaagtacttttagcgtttgcatttgtatccgcagcaaacaactaatgttttgttaactgcttttccggttttgctgtagcctgaaggcgcttcatagggagagacggatgctaagcaagcttgtcgggaagaggtttactggagaggaaaggaagagactttaccagaagtttgggattgctgtgaactcgaaacgtcggcggttgcagctagcgaaccagctctggagtaaacccaatgacataactcatgcggttgaaagcgcagccgttgtagcgaaactggttaggtttgtggagcaaggtagagctatgaaggagatgtttggtctgagcttcacgcctccgctaccgacaacgcggagatcactaaactggaggaaaagcatggccacactgttctaattttaatagtcaaccacgttcatataatggtttcaaggtttgtacgtgtaaatcttctaggcttctagctaatgggtgtttgatgaaaaagattcttagatgttaccgcagccgaagagaaccttttctgtttcttttgcgttgatgggtttttaatattggaaacagacattatctgattctgatgttcgtttttcttaactggcaagtcgtctgggtaatatgatattgatccttgtcctatttaagcgcaacgaaacatctcttgaaatgagtgacactggtccaacaatgttgcttacgggttggaactactgttctcaagcacaaggagcccaaaagaatgatcgtttctaa

SEQ ID NO: 138085 - DNA, 5697 bp, Arabidopsis thaliana landsberg
  unsure (1)..(5697): unsure at all n locations
agattgacaaattgaattaaagatcttgaatacatatggcttctgtgggaacattaccagcttcttctatggctacaaaacaaagcaatgcttctatatgcgctgaaaaattacctgaagggattaatgagatgaagataaaagatgataaggttgaagaactcagattcaatattgagatttagtctcttatttaatttggactttatgttgttaataatgtgttttttcttcttgctgtttggtggtttcttgtaggaaatggaagcagctgtggttgatgggaatggaactgaaacaggtcacattattgttacaactattggtggtaaaaatggtcagcctaaacaggttagcttgtttaacatttttgtttttgaggaatttccattatttctatgttaataggaagttgatagaaagatcattcgcatacatgagtggcacaccatatctcgcacaacttgtggtttctgtgatgtgtaacgtgtgataaagtctcttatagctctttctttttgtcctttcagaccataagttatatggcagagcgcatcgttggacaaggttcttttggaatcgtttttcaggtgatgtttcgattaactaccctgaataattgattttactaagtagccggtgcattgactcaatgtagataattttgttacttgtatatatgcaggccaagtgtttagaaacgggtgaaactgttgcaatcaagaaagttttgcaagacaagagatacaagaatcgggagctgcagacaatgcgtcttcttgatcaccctaatgttgtatccctcaagcattgttttttctcaacgactgaaaaagatgagctctatctcaatctggtccttgaatacgttcctgagactgtctatcgcgtctcaaagcactatagtcgggcaaaccagaggatgcccatgatatatgttaaactctatacttatcaggtagttattattcagcccaccagaacatctgttctcatcttttgaaatacaatgagttaatcaacattgtttccatgatttcttccttctgttgtgggtgcagatttgcagagctttggcttatattcatggtggagtaggagtctgccacagagacataaaaccacagaatcttctggttcgtatccttagttgattttattcataacattttattggtctacatgcttctgcttgatcaatcttgtgcttctcgtaggttaatcctcatacgcatcaggtcaaactatgcgattttggtagcgcaaaagttctggtatagcatttgtaaagagacatgttgatttgttttcatattgaaaagtttgcactttttatggtgctatgcaatgttaactagtcctaactattttagctttgcccctctgtaacaggttaaaggcgagccaaacatctcatacatctgctcccgttactatcgagcacctgaacttatatttggagctacagaatatacaacaacaattgacatatggtctgcaggctgtgttcttgctgaattgcttctgggacaggtaatatgactgtccaaactttcctccatttatcttttacaaatgatttgatttaccgaatgatgtctaaagttatatattaccaatctttggcttgtccaacttttggttagcctctatttccaggtgagagtggagttgaccagctagttgagataataaaggtacttcaatttggttaaacaaacacacataatcctagccattgctatattgaacatagagtggatcattgattatatggaatgaagaggctccatttcctgctattgattgccatcattttgtttactgtgtgtgttacaggttcttggaacaccaacacgggaggaaatcaaatgcatgaatccaaactacacagaattcaaattcccgcaaatcaaggctcatccttggcacaaagtaagcaaacacatcatcagtctttccttaacattgatctccatatattcttacgattgaaaaatctgttgttggttcttaagatattccataagcgtacacctccagaagctgtagaccttgtctcaagacttctccagtattctccaaacctcagatcaaccgctgtaagtcaatgaagtgattaccataataacattatgtttgatatatctggttggttgattcaaacttacttgttattgtagatggaggcgatagttcacccgttcttcgatgagctacgtgatcccaatacacgtcttcataatggtcgtgccttgcctcctatcttcaactttacccctcaaggtctgtctcctccaaatatacttttgtttgtttcccannnnnnnnnnnnnnnnnngactaaaagtgtgtgcttcttgttaaatatgtagagctaaaaggagcaagtttagagttgttgtccaagcttatacctgaccacgcccgaaaacaatgttccttcctcgctctctaaatctcttcctctctctctatatatatgtgtgtgtgtgtgtatgtacacatgcatataatatgcttatcgtttctaagtaatggagatagcttctcaggattatcattagctttcatctttcatgtatctttgttgtttattgtcttatcacaacctttgtactttattacatacaatgattagtgtaatgtatgtgacggtctttgactcgccggtcgctacagttatgttggatactaaattataaaataaacttctcgctcgtcacgtgtcattgcatgcatccaaagctcatgcttcaaagcttagccaaacttatttttaaaaaagcctatgttctgtgtaaaagtgtcatttacgagagtttcttgtttaagtttaaccaatttcacttcctcaaacgaaatacggtaattggtaatatcctctaaacatgaattatcattgactataaaaattagtttcgcaaattgcctctaagcaccacaagtgtcacgtaacgtgtcatttattcatgtttattgatttagtaaattaaaaacattgtagtttaattattgaagtagtacaaagaatagggactaaattgcaatactctgaatttgtttttttcttttttagaatcatccgactttttgtttcacggtttcctcctccagtaaactgacgacgatacaagctctctcaccaacggcgacagtatctttgccggcggcgggagcgcttctgcttaatctgtagctcaaactaaaaattctctgggtattactcatggtgatttggaataacgatgatgatgattttttggagattgataactttcaatcttctccacggtcatctccaatacatgcaatgcagtgtagggtcgaaaatctagctggtgtagccgtggtaagtgatccaatccaacagtcataagtttatgcctaagcagaatcattgcttatgtgaatttttgttttgtttcagacaactagttctttgagctctcctactgagacaactgatttagttcagatgggcttctcagacgaggtttttgctacattgtttgacatgggatttcctgttgagatgatttctagagcgatcaaggaaactggtgaggcttttttctcttgtttgtattcctttctggatatatatgatccgtaacttgataccaataattaaccaggaccaaatgtagaaacttcggttataattgatactatctccaaatactcagtgagtttctaatactttgatctcttgggttgcttgtcatttacatgtgcttctgtcatcacagtattcatatcctctcctttgtttatttgtgaagaccgactgtgaagctggttcttccaagtccaaggctattgatcatttccttgctatgggatttgatgaagaaaaagttgtcaaagccattcaagaacatggtacttacagatttctctcctccttaagtaagaagtaacactttatcactttgctgatatttgctttataaatcgcaggagaagacaatatggaagcaattgcaaatgcattgctctcttgtccagtaagcgatgttacgaaaatatactgtctcttgacattaaaaaaatagtacttaaagttcgttgatggtttgtaggaggctaagaaactgccagcagcagtagaggaagaagatggcattgactggtcatcaagtgatgatgataccaattacaccgatatgttaaactcagatgatgaggtataactctttcatgttggtgataacatatttaagcatcccaggtttgaattgtaaatgtatctcactgctattttgtatatgtatctaattttatgcgttcttaatctattttaaatcatgacagaaagatccaaactcaaatgaaaatggcagcaaaatacggtctttggtgaagatgggtttctcagagcttgaagcttctttagctgtcgagagatgtggtaactttattttaaacgattgccattgtcattaaattttagttccgttttgttcaggtttcttctagacaacgtcgtataaattgcttggtttagcctctgatttagtggtgtaggccttagatgtgtttgctgagcattttgattgtatttcactaatcgaaagttgtcattagttctgtcttagcttctggttctgtgatgtacgccttagatatgtttgtagagaatgtgatcgtatttcacaaaatgataaaagttgtcagtacttgataaaattgtatgttcactagttcctttttattcaggtttcttctagaggaagtggcataagccaaattgcttagttttagtgtaatgtgatagtcaaattgtggctttagcctctggttctgtgatttaggcttgaaatgtgtttgctgagcattgtgattgtatttcactaaatgatacagttgtcagatgttaatatatatctcttacttactctaagtatgttgctgccttatccagactcatatgattgtaatttcaggagaaaatgtggatattgcagagctcacagacttcctttgtgctgctcaaatggctagggaatttagtgagttttacactgaacctgaagaacaaaaggtactgttaaaaccttttttataatctatcttttgtaagttaattcctttgggaactgattattttgggaaatttggtgtatgcagcctagacataatattaagaaaaggcggtttgagtcaaaaggagagccaagatcatctgttgatgacgagccgattcgtctaccaaatccaatgataggatttggggttccaaacgagcccggactcattacacatagatcgcttccagagttagcccgagggccaccttttttctactatgagaatgtcgccctcacacctaaaggcgtttgggagactatttccaggcacttgttcgagatcccacctgagtttgtggactcaaaatatttctgtgttgcagcgaggaagaaaggctacatccacaatctccccatcaacaacagatttcagattcagcctccaccaaaatacaccatccatgatgcatttcctttgagtaagagatggtggccagaatgggataaaaggaccaagcttaattgcattttgacttgtacaggtagtgctcagttgactaacaggattcgtgtagcccttgagccttacaatgaagaaccagaaccgcctaagcatgtacaaagatatgtgattgaccagtgcaaaaaatggaatttggtttgg

SEQ ID NO: 138086 - DNA, 1519 bp, Arabidopsis thaliana landsberg
caggagaactacaaagaggaaaccaagatggttttgttttgttagactctaccccttttccgattcacatggtaaggacattgaggtagagaataatactaaaaagcaatgggagatgggagttccagtagatccaacagctcaaacagcactagtgagaaaccagagtggctgcaacagtacaatctcgttggtaagattggtgaaggcacttatggtcttgttttcttggctagaaccaagactccgcctaaaagacctattgctatcaagaagtttaagcagtccaaagatggagatggagtttccccgactgctatccgcgagatcatgttgcttagagagatttcccatgagaacgtcgtgaagcttgtgaatgtccacatcaattttgcagacatgtctctgtatcttgcctttgattatgccgagtacgatctctatgaaatcatcaggcaccacagagacaaagtcggccattcgttaaacacatacacagttaagtctttgctctggcagcttctcaacggattgaactatcttcacagtaattggattatacacagagatttgaaaccgtcgaatatcttggttatgggtgatgcagaagagcacggaatagtgaaaatagctgatttcgggctcgcaaggatatatcaagctccgttgaaaccactatcggataacggagttgtggtcacaatctggtaccgagcaccagagctgcttcttggttcgaagcactacacgagcgctgttgatatgtgggcagttgggtgtatattcgcggagttactaactcttaaaccgttgtttcaaggagcagaagcgaaatcgtctcaaaaccctttccagttagatcaacttgacaagatattcaagatcttaggccacccgacgatggataaatggcaacactagttaacttccgcactggcaaaatgatgttcaacacattcaagctcacaaatacgacagtgtgggtctccacaacgtggttcacctgaatcagaaaagtcctgcgtatgatctgttatccaaaatgctggaatatgatcctctaaagcggatcacggcttcacaagcactagaacacgagtatttccgaatggatcctctcccaggacggaacgcatttgtagccagccaaccgatggagaagaatgtgaattacccaactcgtccagtagatacaaacaccgatttcgaaggcacgacaagcatcaatccgcctcaagcagtagcagcaggaaacgtagcagggaacatggcaggagctcatggaatgggcagtagatcgatgccaagaccaatggttgcacataacatgcagaggatgcagcaatctcaaggcatgatggcttataatttcccggcacaggcagggcttaacccgagtgttccgctgcagcagcagcgcgggatggctcaaccgcaccagcagcaacagctaagaaggaaagatcccggaatgggtatgtcaggttacgcacctcctaacaaatccagacgcctctaa

SEQ ID NO: 138087 - DNA, 3979 bp, Arabidopsis thaliana landsberg
  unsure (1)..(3979): unsure at all n locations
gtctctctgagcaccagaatctagggtttcttcacagtgaatcttttttttttttttttgcttcctcctcaataatcgccttctcgtaagttaatcactctccctctcgtcacttctgctccctatgttaaaaagatcattcatttctgcttttctagggtttttttttgggatttcaaagactacattgttcttctttgttctacttacactctgtatcttttctctttatcactctgcctctcttttgggtttctctgtttttttctttaaagggaggaccatttacatggtcatgtatttctatctgcgtggagatatttcgtaggctttaaagttttgtgcttgtttgtttatatgttctttactttaaagttctactctgttagtactctgtctgcggaattagattactggtagggatgtaaaaaaccttgaggaaaatggtagagattctgattagaagctatatatcatttgcttattccatagtggattgatttagcttgtttaaattccagttctttttgtgatagtccctttcttatttcattggtgataaatttgtctttaggtacttgtgtgaaagctcccttctttgtggagaaatggcaactgagaatcctattaggatatctggaagcaatgaaagatggtctaattctaggaaggtttctgttcctaatcgaagtggcagtgcgccaccgaacatggaggggtcttttctagctgtggataatctattgtcacgacagggcggctcagtttacaataacttgatgctaccgcgttacgggtttgaggagcccgtgaccactcatccttcttctaaacatagccttaaccgcataccttctccaccgatttattaccctactgagtatcagttcatagacaatcgtgtaggtagatttagaagtaaccagggattgaataaagttaattctcccattcatttgtcccaaggcaaactttctactcataaggaagtttctgaggatgaaagctcccaacagttatctgttaatagtgtttcaaataggacagatggattggacattcgtctttcacctggttctcaaagtttggccgatttcaggcaggttaggctttgctttctttcccctctctggttgtgagtagtgaaatgtcattgcttagccctataagaattgattttttttttttttggtggcaggatgatacttcttctgggcagacccctcaacatagtcggtctaactcttcaaatggtgacgtgaacacagcagatgagagtggtaacttctcagagttgtcagatgatgtcgtggttaaagataatgctgcttcaacggcaagagcttccattggcaatgagaagagtcctgatgaatcgactatcatctccaaaatgaagagtactaacatatccggacctggaacggataaataccctggagaaccaaggtatggacagccagaaaggcagccgcatcaacagcaaaataatgcaacttggattcaaggtggcagcaatatgggttctcatggtgtaaacgatgcagttatcggggccggacagtttcattatggacaaccttacaagttctcgggtgatggtcagcccgtacttcagtcttccggttttacaccgcctatgctttacactgctacccaaacggcttatatgacttcaccagctcatgtctataacatgcagtctcctgctgtttattctcctcagtatggttatggaccatacaccaacatgatccctcagtttatgcctggatacccttcccatggttctgttcctgttgttgtcagtccagatttcattcctcagttatctgggccaagtgcaggaagtgtggtccatggaggtgaaatgcagtatgcggagaagctctatgttccaccaggacaaccttcttttccagatcctatgtatatgcagtactgtcaacagtcatttgggcagatggaaccactggctcctaggaaccacaccaatgctcccgagtctcagaaagatgatccaaagttccttcgacaaattagagggccaagtaactctaatatggcaagaccgggaatgggtgttaattactatggaatccagccaaatatgggcattatggtgcagtatctgcctacacatctcggccctcctctttcaccaggtcatgttccttatgtcgaggcatatcctggatggcagccacaagggagcttagaaggtgccaatggccctcgattgtgcaattttcttgaagagctgaaatctgggaaaggtaggaggtttgatctatctgacatcacaggacacattgttgaattcaggcaagtttttatcttttctttcagaagtctcgtctcgtcttaggtttcttcccaattatatgataacaaacttgagtaaaatcttgtttcctttcagtgcggatcaacatgggagccgatttattcagcaaaagcttgagaattgtaaaccagaagaaaaagcagctgtctttagggaaattcttcctcatgcttgcaaactcatgacagatgtctttggaaattatgtcattcagaaggtacaagctgtagctttctaaatcacttcaacacatcgctagatgtgtcagtttactcatttgttgttctggttatgttctagttttttgaacatggtacaaccaagcagagaaaagaactcgctgaacaagtaacaggccacgttttggctctttctctacaaatgtacggctgcagggttatccaaaaggtgctcagtttaaagacattgttttgatccgattacttattattagtggtaagggttttacagacaaaggtgtttgacttttctgagcgtgtctctatcttgtttctgtgatatggatacaggcgttagaggtggttgaattggagcagcaagctcgaatggtgaaagagcttgatgggtctgtcatgaaatgcgttcatgaccagaacggtaatcatgtgatccagaagtgtatagagcgtcttcctcaggattggatacagttcatcatttcctcattctacggaaaagttttagctctttcaacacacccttatggatgccgtgtaatccaggttctcgatataatacatctcaccctataggttcttgatcataggatccaagttccaattttttttgtcaactgttaacgatacttatattctacttctttcgaatcgcatcagagggtactggagcatattgatgatatagaaacccaacggatcattatggaggaaatcatggattcagtctgtactctagcacaagatcaatacggaaattatgttatccaggtaagattctgaagcttaattgacgtttctgcttcatgaaaatggacacactgataaagattaatcctgtttccggctgtagcatatcatacaacatggtaaacctcatgaacggtcagaaattatcaataagcttgctggacagattgtgaagatgagtcagcaaaagtttgcttctaatgttgttgaaaagtgcctaacatttggcggtccagaggaacgtcaggttctagtgaatgagatgcttggttatactgatgaaaacgagcctcttcaggtctgcaatctaactccctcatgtctttctgcaatgtctcgaaaaaagtcccactaaagttggaacaatttgcaggcgatgatgaaggacccatttgggaactatgtagtgcagaaggttcttgaaacatgtgatgatcaaagtcttgcactcattctttctcgcatcaaagtacacttgaatgccttgaagagatacacatatggnnnnnnnnnnnnnnnnnnnnnnnnnnnnnnnnnnnnnnnnggaggtaaacatttcttctctctgtacaacatcacagttcatgatcatgatcatgaatcactcttcttctttctgcagagagaagaatcggacctcgtcatctcttgccgcgaacaccactccataaccatctctgagtaa

SEQ ID NO: 138088 - DNA, 2110 bp, Arabidopsis thaliana landsberg
aggaagggtgacgtggcacaatttccctgcgacgcacccaacctccgtctctctctctctcagatcggcggccatctccgtcgagtaattgaaatctctctcagccgttggattcgaattccgccgcatcttcatatacctcgtttcaatcctgcggaaccctagttgctctggtgagtccctggtgaacccccggattttagaatcatctattgtatttactttaattccgttccattgatgatttctgcgttagattttgaggtctctgccttcacctctatgtattataatggctctgattcgaagttcacattctgtttgtttatatgcagaattgtggtttgctactgtgatacgttcttcagtggtagattaggaagcaccaccaatggagattgtgtaagacatattcattacagctctcttttaaggattatggggtctgtttgctgtgtggctgcaaaggacagaaatgttcccggtggagctattgataattcagtgtgttcaccatcgtggagttttcgacgggacaacaggaggcgtgtagctgatgagattaaagattcatctaatcataatgttgggagtagaggtattgacatcgataagttgtcgttaggcttagagagaggacctccgtcatctgaaactgggggtttagctactcttggctctcagaaatccgcagactcagagatgggcacagcttcgatggttacagctcctttagcgggtacaagtttggcgattcgatctccttcaggtatgttcgttcaaacatgttcgttcaaacactttttttgtggggaaagtgtagaactttcagtttcattgtttgggaatatactgctgagtcgattttagttccttcgtggatgttcttttccagtctactcaatccagtcaaaggggtaacaacatttatttggtaggattagatcgagagacattccattttttggtagagatcatttcagctttatttttttactgtaatgaaggatttttttcctgtctctcatgcatctattttctctgggcagatgtatacttggcaagacctgttcgtgttgaggtgagatcattactttctccaatttgagtctcttttcgtcccttcagggtctcttagccctctcatcttttaattcttcaggtgaagaatatagttgactcatcagatattgtttcatcagttttaccaaatccgtcaagttccacctcggtctctgatcttccttcagctcacacacattcacttcctcccagatcaactccgtctagacgtgctcgaggttcacctgggcagcagttgtttaggcaggtttctgatagtcaaactttgggattgaaatctcccaataattactcaacatctgaaggaaggtcgtcctttgtgctttcgacctgtagtaatgacactgccactgggtcccattttgcttcttctgaaggtggctggtccataaacgccttttgtgagctcgtggctcagtctcaaagggagagatggtcttttgataatgagcacttaggttccggacgacgaagactaagtgggtgtagtagtagcagattctcatgctccccttctgttgatcagcagacttgtgggcgttgctcaaagcttttaactgaaaggtctccagttgccaggtttgaccttccaattcctgctgttctagcgtgcggccatgtttaccatgcggcatgcttagagacaatgacaaatgaaacagagaagtatgatcctacgtgtcccatatgcacagagacacaggttactaaattatcgaggaaagctctaaaagccgaggcagaattgaaggcaacgagttacaaaaggtgtaagaaccgtgtggtagatagttatgtccgcagtgaatgtgaggatcttatgttccagaatctagggaaacgagaaggaaaaggtctgaagatggatcctagttgcagtaccaagagctcgtctaataagtcattcttgaaatggcactttgcttctatcagctccaagtggaataaaccctcgtccaaagactctgcattgaagaagggattctggtctagacatcgaaataaccggtcttcttcaagcatagag

SEQ ID NO: 138089 - DNA, 3074 bp, Arabidopsis thaliana landsberg
ctcggggaatctctacgaagggtcgtttcttctacccaaactcagtattcgttcgcgggattcgaccatagaaatgaatctgatcatggatctaaacatgaaaagagtaatgttacacgagcttgtgagtatttttgaagaagaaggagctcaagtaatgagtgctaatcttcagaacttgaatgataggaccacttacacaatcatagcccaggtaccacatccacacgcatatgtttgtataatacacacgtatatgcatgtgtcatgtctttcgtataaagttttattacatatatttgcaggctatcattagtcggattggcattgatccatcaaggatagaagagagagtacggaaaatcatctatggatatatatattttgaagcatgaaatcccaaatgataagtctacgctaacgctagtgtgttttttcacacatgtgttagttctttaaatatgagatgagtaattgcttttgagttcgattatgataaatatgttgaccgtcaacataagaaaccttaaaacgttgtcgtttcgtttttattcatcccggtttaattcagtttggcttggcgtgattttagattggtccagatttgcaaaattttaaccaccgagtaagacagtgggatgtaaatgtcaataaaatacactattggggtaaatgtgaaaagaaaaaaatagtaagaggctatatttgaaaatctaaatatcgcacaaattgcaacccttattttagatttaggaattttgaaacccttgtcgaagagaaaagaggcaaaatctcagtataaagtttctcaaacacttgtggtaagagagcaaaatcgtgagagatggatctgattcaatcctacgaagaagaagacgaagccgttgcttcctcgccggaatcttcaccgcctcgtatgttaaaggcgaaatcatcggcgccggaggtagacgatacggcactagctctcacggtggctaacgtgaatcaatcgaaatcgaagccgattgacccgactcaacacgtcgtcttttataaccctacccatgatcagctgtgggctccgatgttcggccccgcgcatccgtatgcgaaagacgggatcgctcaagggatgcggaatcataagctaggttctgtggaagatgcttcgattggatcgtttgggtttgaagagcagtaccatacgtttcataagtgcggttacgcggcggatccgtctgggatgaactacgtcggcgatgttgaggcgtttaagaagaacgatggtctttcggtttttaatattcctcagagtgagcagaagcggaggaagattgagaggagcaaagaggagagggaaggggaagagaaaaaggaagagattgagccggaagctgagaatccggagacggaagcttggcttaggaagaataggaagagtccgtggtcgaggaagaaggaggtggttcagggagagttgacggaggagcagaagaagtatgcggaggatcatgccaagaagaaggaggagaagggacaacaaggtgaaaccaaaggagagcattatgcggataagagtaccttccatggcaaagaggagaaagattatcaaggaaggtcttggattgaggctcctaaagatgctaaggcgaacaatgatcattgctacattccaaaacgtttggttcatacatggagtgggcacacgaaaggtgtttccgctattaggttcttcccaaagcaaggacatttgcttctctctgcaggtatggattgtaaggttaagatttgggatgtgtataactctggtaaatgtatgaggacttacatgggtcacgccaaagctgtgagggatatttgcttctccaatgatgggtctaaattcttgactgctgggtatgataagaacattaagtattgggacacggaaactggccaagttatatcgactttctccactgggaagattccgtatgtggttaagctgaatccggatgatgacaagcagaacattttgttggctggtatgagtgataagaagattgtgcagtgggatattaatacgggggaggttacgcaagagtatgatcagcacttgggggcagttaatactatcacatttgtggacaataacagaagatttgtcacgtcgagcgatgataagtctctccgtgtttgggaatttgggatctcttgtggttatcaagtatatcagtgagcctgatatgcattctatgccttccatttctgttcacccgaatggaaactggcttgctgcacagagtttggataaccagattctgatctacagtacccgagaaaggtttcagctgaataaaaagaagaggtttgcagggcacattgttgccggttatgcatgccaagttaacttctcgccagatggacggtttgtaatgtcaggagatggtgagggtaagtgctggttttgggactggaagagctgcaaagtgtttaggactcttaaatgtcacaatggagtatgcattggagccgagtggcatcctctggaacagagtaaagtcgcaacttgtggttgggacggcttgattaagtactggtatgtaaccttcttccagactattttgtttatttgtttctcttgtcatgatgtgtggtgtgtgcctttacttaacagctgcataatagttattattggtatatataattgtagcaaagctaaagttgtcatctgagtatccttgcatgtaacatgtgtcttaattcttttggaatcagatatcgtatattcctagtgtatgagtaatactttgagttcacatctgtggagtgatttggaaagaaagtttgactttgattctaatggtttttattcataaagaagttgcgcaattgtaaaatctttgaaaattaccagtccatgtaaccatgtcgtaatctcatggctaatgtttgattgtgatgttttgttgcacatttgcagggactaagacaagcagaggcatttcggagaaagagagagtagaaggcacagaaatcacggcctagcctgggctatacggaatgctgcatctttgggatacaaagcccctttgagttttgctttccgctgt

SEQ ID NO: 138090 - DNA, 854 bp, Arabidopsis thaliana landsberg
ccacaaatctctctttctctcaaactctctcaacaacaacaatggcgtctcttcaacaaactctattctctcttcaatccaaactcccaccatcctccttccaaatcgccagatctctcccactccgaaaaaccttcccaatccgaatcaacaacggtggaaacgccgccggagcaagaatgtcagccaccgcagcatcaagctacgcgatggcattagcagacgtcgcgaaaagaaacgacacaatggaattaacagtcacagacatcgagaagctcgaacaagtcttctcagatccacaagtactaaacttcttcgcgaatccaacaatcaccgtcgagaagaaacgtcaagtcatcgacgacatagtgaaatcgtcgtctcttcaatctcacacatctaacttcctcaacgtcctcgtcgacgcgaatcggatcaatatcgtgacggagatcgttaaggagtttgagttggtttacaataagctaacggatacacaattggcggaggttaggtcggtggtgaaattggaagcgccgcaattagctcagattgcgaaacaggttcagaagttaaccggagctaagaatgttcgggttaagacggttattgatgcgagtcttgtggctggttttacgattcggtatggtgaatccggttcgaagcttattgatatgagtgtgaagaaacagcttgaagatattgcttctcagcttgaacttggtgagattcaattagctacttgagatttgggaaaaattgtataagagaaaaatttgagaatctttttttttttgtgcaagtttaattttttttctcctcatcttctttctctattaatcaatcatataata

SEQ ID NO: 138091 - DNA, 2643 bp, Arabidopsis thaliana landsberg
gtggagtgatgttgaaagaaccctcacagacacgtcattgggaagactaaatctctttttagcacgttacacctttgagatcgcgtttattccatatggagagagagcaaccatacgagacatggagaggcaccattaccgccggcgcaactgcttccaaatattgacaaacaaatttgaatctggatcttctctattcgtgaacaaggagatagaagctacgatgaatgcatggaagcttggtttgctttaatataaacactaaaggggagtagaactttcttgaaaaattgtatgcaaattatttaccgaatgttaaaagcttttttcgaataaattttacattttcttaataataataataaaaaaggattgttgattatcttaatcacaaacaatttattttagctgaattagacaattgttagtaaaatgattagagtgtcacatattaatgttgttagtgtttcatgtcatcctagtgatccaataattaggccattctatagctcgtaacgttaaaataaaaggcccattatctgaatatacagaagcccattatcaatagatacattaaaagatactgattaatccagagggtttatatctacgccgtctccattgattatttctccgtctcttgaaaaatccgactgacactgacctcaaaactctcctctcactttcgtcgtgaagaagccaaatctcgaatcgaatcagcaccacacatttccatggataattcagctccagattcgttatccagatcggaaaccgccgtcacatacgactcaccatatccactctacgccatggctttctcttctctccgctcatcctccggtcacagaatcgccgtcggaagcttcctcgaagattacaacaaccgcatcgacattctctctttcgattccgattcaatgaccgttaagcctctcccgaatctctccttcgagcatccttatcctccaacaaagctaatgttcagtcctccttctctccgtcgtccttcctccggagatctcctcgcttcctccggcgatttcctccgtctttgggaaattaacgaagattcatcaaccgtcgagccaatctcggttctcaacaacagcaaaacgagcgagttttgtgcgccgttgacttccttcgattggaacgatgtagagccgaaacgtctcggaacttgtagtattgatacgacgtgtacgatttgggatattgagaagtctgttgttgagactcagcttatagctcatgataaagaggttcatgacattgcttggggagaagctagggttttcgcatcagtctctgctgatggatccgttaggatctttgatttacgtgataaggaacattctacaatcatttacgagagtcctcagcctgatacgcctttgttaagacttgcttggaacaaacaagatcttagatatatggctacgattttgatggattctaataaggttgtgattctcgatattcgttcgccgactatgcctgttgctgagcttgaaagacatcaggctagtgtgaatgctatagcttgggcgcctcagagctgtaaacatatttgttctggtggtgatgatacacaggctcttatttgggagcttcctactgttgctggacccaatgggattgatccgatgtcggtttattcggctggttcggagattaatcagttgcagtggtcttcttcgcagcctgattggattggtattgcttttgctaacaaaatgcagctccttagagtttgaggtgagagtttctctttcgatacataattctcatttgctaggcctagattctaatgaggaagcattgattattggtttagattgtggtgcattacagatagtcttctaggtttggtaactaaacgttttttcgattcttgataacaaagccactagagatttgacactaactcgttttagatttacctgaatcaatatctctgttaaaatcaattactttgttatgcatacataaatcacagtttagtagtcatatatattggctcttattagcgacaggtctcacacttgctgtaatggctgatagtgtagtagtcatatgttggctttcatctaagttgatgtatcatatgatgaatagttgtacactcgtcaggttctaatttttacccataattcttcagtctatttttttttgagacaatctattcttaatttaacgaagccactagctacgtatacaaatattgttaatttaacgaagtatctgagaattgtttactgctgactctgctgtatgccctcagaaacatatagaagtggaattggaaacttcatgctggtttgaacatctttgtatgtgtgcttcaggtttttgtaactcatttagacaacagcattgcatatatacacgcacatatgcaacctagaaaatcaaataacctttccttataattactatccatttcacttgatgtcaggtgcagatgtgaagtgatcaataaggattttagcatagacccgtataatcgtcatgtgcgtaagtaggtttggtttgcgctccctctcgcttttaggtccgcaatgactctgtatctatctgattgtaactaaaactgaattcatttgatgaaccaaatgatactattatcttatgttgtgt

SEQ ID NO: 138092 - DNA, 3284 bp, Arabidopsis thaliana landsberg
tctggggatatgcttgttgggtcaatatccgtgtcgtacatagaatccatgttctgagggcggctcggctttaaatgaaggctttgaatttgatctgcgccgccgaggataagcattacgtgaaagtcaccggtactcctcatggctgggatgttttattctacattttccagtttattcgtgttgttcttctctcaactgtgaatgtgttgattggaactggctggtccttcttgaagccattcttacaagagaaagagaagaatgtgttgatggttgttgttccacttcaggttctcgctaacattgcttccattgtgattggagagactggaccttttataaaagattgggttacttggaatcagatattcttgcttgtagatatagtttgctgttgtgcgatcttattccctattgtgtggtcgatacgttcgctaagagagacttcgaaaaccgatgggaaagcggctaggaacttggcgaaattgactctgtttagacaattctacattgttgtcatcgggtatttgtactttacgaggattgtagtgtttgcgctgaagacaatcgcagcttataagtatcggtgggtgagcaatgcagctgaggagattgcaagtctggcgttttacttgttgatgttctatatgtccaggcctgtggagaagaatgagtatttcgttatagatgaagaagaagaagaagccgccgagctggccttgaaggaggatgattttgaactctgaagcagatcaaggaatttcatcgactgtataagctgtgaggacatttgctttttcttatcttcttttatttgatttttgattttctgtacttcagatgtagtttacttgcaaaagggattaactgtgtatttttctcttatatcataaaagctggtttgtcctaagactaatctgctagtaagaagaggatcagagcctctgctgtttgacccgactccctagttttatattaagactataagccaatgaacttgtgtttattcttcaatttcctctgttgccattgtttttgattcatactcgaggcttcttcaggtgtatatggcttgtattagtagtaccaagttgatgatctcttttgttctagggatcaaacaggagagagttgatatctacttcctcagctgaaatagacaaatttgtggtggttccactggacttgaaatattggaattcggtttcagggtcaatccagtccatagtgacaaagcagtcgatcccataatcacagcaagagagcacacacagatctttattgtatgtaattggtcgagtcatgaattaccttgcatctctatgagcctttagtatggtattggttgagtcataccttgcatctctattgagcctttatatatagtcttgctagacattatcattagcattaaccataatgcttaatttgccaacatatgatcttagaggatacatacttctacatacaagacatgaattaagccatacaaagaatcttaaataacaaaaaaaatctatttgattagtcccgtttctcgtagcaaaacttccacggctcgtctcccagagaccaaagctccatcaaatgtagcagaagtcatgtaatcaccgctcaagtaaagacccgacccgacccgaggactcttgaccaaatcagtgggtggacattggttaggctgagcgaattggatccggtatgttttcaaatgtttccatgacataaccggagactcaccaaaccaaccagagagttctctaagaacttctgctgctaaatcatcatcggttctatcctcaaacaatccgatcaatgataccgaaaccagagcctttcccggtggcgcgtatgtccgagcaacgtttgtagcgaagaacatgttgttgattataccggaatttgacccgttgagaaatagaaccgggtcttgtaccggtatttggttcggttcagctgtgaagtaaagacaaatagtgctccgagctggttttgttataaccgggtctctgatcccatcgagaagcttattcacttccggttgctcgacggcgattatgacacctagctctgccttcataacgctgccgtcttggagcctcacgctaggtggatccgaacccgatccatttggatactcaatagaagcgacccttgtgttcaacaagacggacttagcgggtaacttcgctgccaactggttcgagatttctccgattcccatggctggaagtgtgttttctccgagagcaagacaccggaaaacgaaatcgaagagcttcgaggtcgtctcgaggtctctgtcgaagaaaattccgccgaagaatggtcggaagaaccgatcaagaatcgtttcggagaaaccgatcttacggaggagatcaatggtgggaacttcatcggcggcagtcaatatctcttcgtctgacttgattagaaccctagctctcgtcaaagcgataagccctttgtcaacgacggatccgatcggattcgcgagagatgccaccgaatcccaaaaatgtcggagaggatcagcgacggtgtgaaatttaccgccgtaaaacaccttagctccggcgtagaatctctgcagatccagtgcttcataatctagaagctttttagcttcggggtacgcggtgatgaaaatctgaaatcctctgtcgagaaagaagccgtcgacgatatctgtacggacgcgtccgccgacgccatcggaagcttcgaggagtaggaaagggattcgtttggaggtgagctggtttgcggcggctaaaccagcgagtccagcgccgatgatgatgacgccagtttgattcttccgaatgtacggatcttccgtggaagattgagctccggaaaagcgttgatatcggtgatttgcatggccgcggcggcgagggaagaaatgagaagtagatgaggttgggagagagatcgccacgggcattttaaaagtttggataaggtttttctcattcctttactttattttccccgggaaaattatttgtctagaaaaaataatatatatatattcaaataattatgtaaaagattcgaataagtcttgttttcttgattcttttccttattaatctgaacaaaaacaaattatgaagaccagagtcctagtcccagagaggaccgttgtcctagagacggatacagcccaagagacgaccttagtcctgcggaagatgaagaccaatgaagagtaggaagactggtgattgcttataggccgtctattttggcttataatgattttaaataagtgt

SEQ ID NO: 138093 - DNA, 878 bp, Arabidopsis thaliana landsberg
ctccgatactcttttcatcaatgccgatagcgaaaccgatcaaccaaaacactactgttccatatccaccacaacattacagtaaaccgcctctagtcataatcctaaccgtgatcctcctcgtcgtctttttcatcggttttttcgctctctatttctgtaaatgtttctaccacactctcaccgaagcttggaaccaccattaccacaacggattgcccgaaaatcaaatccaagcacaacaagaacccgttcaaccaccggttaaccctggtctagagccacacatcatccaatcctaccctttgtttccattctcatccgtcaaagatctcagggaagacaaatacggtctcgaatgcgcgatttgtctacttgaattcgaagaagaacacatcctcctacgactcttgacaacttgttaccatgtttttcatcaagaatgcatcgatcaatggcttgaatctaacaaaacatgccctgtatgtcgtcggaatttagatccaaacgcgccagaaaacatcaaagagttgatcatcgaagtcatacaagaaaacgcacatgaaaatcgcgatcaggaacaaacgtcaacatcaaacgaggttatgttgtcgagacaaagtagtggtaacaacgagagaaagattgagacgttaccggataaattctcgagatcgaaaacgacaggtcattcaattgtgaggaataaaccggaggaagaagatcggtatactttgaggttaccggatcatgttaagattaaggttacgagaagacacaacaataatcaaacagagagttgtatttcatttggtgagcttgttagaaacagagaaggccggtttggtgaagtttctggtcaatcacttgtaccggaa

SEQ ID NO: 138094 - DNA, 1119 bp, Arabidopsis thaliana landsberg
tagtattataaaaacggcttgttcgtattctcttctctcgctcaacacatgaagctcaagtgatccaccgtggttagcaaaaggacggttcacatcatgactatattcgcgagagatctcatctataggatcgaaacgaaggttttgttgccgctcttccttgtccatttgttaccttatgtaacatgccagcaagagtcagaatccgtagaccgcaatagaaaaaccaatttcccaacggaaacggtaatcgcaatcattgtgcttgcaatatttatctcattaagcatggtcgcttgtttcttgcacaaaacattctatagagcagaggttgaggcggcaagccaagaagtgtttcacagtagagcgaggcgtgggctcgagaaggaactcgttgagtcctttccaattttcctctattcggaggttaaagggctcaagataggcaaaggcggagtagaatgtgcaatttgtctaagcgagtttgtggataaagaaacactacgttggatgcctccttgtagccacacttccagtgctaattgcatcgatgtgcgctctcttcttggtccacatgtccggtttgtcgtgcaaatctgtctctcaaacaccggtgagagttatccatatctgaacatggatgttgaaacgggaggtgttcaaaaactccccaatgagagaagcttgacaggtaatagtgtaacaactagatcgagatctacagggttattgtcgagctggcgtatggctgagatattcgtccctagatctcattcgaccggacattcattggttcaacaactaggtgaaaatctagaccggttcacattgcaattaccagaggaggtacaaagacaattagttagcttgaatctgataaggagaagccacatagtcttacctcaagccgtgagttcgaggcagggctacaggagcggtttctctcatggacgacaaacacttcggcgggccatatctatgtctctaagtttctctttacaagctgcttctgttcgttccacagttggcagagacgatctagtgctagagacttcccaagctaaggacaaagatttatgtgaacagtcgttccaacacctcatgccagagaaggtctaa

SEQ ID NO: 138095 - DNA, 903 bp, Arabidopsis thaliana landsberg
aatcgcttcatcttcttcttcttcaacaaatcgagtcctttttctgataactcatttcgatttcagaaactcgccaagaactggatactctggcggaatcagagattaagaaccgagacgtggttctgaaactgtatgaagccctgagatctcgcgacgtcaaatctgtgcaccagatcttaaccccagatctggagtattggttccacggtcctccgccgcaccagtttttgatgcgcgtactcaccggaggtgtctctccgtcttcttcctccttcgaattcgtacctctctccgtcgtttccttcggatctaccgtaatcgcggaaggctgcgacgccgcgacatcgatttcttggatccacgcttggactgtagcgaatgggataatcacacaggtgagggagtactctaacacttctctcaccgtcacacggatcggtaacgttgttgctggacgacgctccgctgagattgcgcctccgtcgcattgttcctccgtgtgggaaagccaattctcgggtcgggctggtaaacccgtacccggtttggttctggcgatttgaaagagtttggtaaagtaagtaacagccacgtcaggagaataactaaataaaggctgcttacgtgtctgtgtgtggttggtttgtttgttgtatgggttaaaaaggattttgttgctgttttaaacgcggtgtgggcttctggggctacggtcgcgtttggctgtcgctagtttttttttttttttaagttgtttgtctgaaaattcgtgtgggtttgtgttttttagtgggagcaagtatggggaaacccaaatcgacttgttgtcccgttgcgtttgatgtaacgtttgcttatgttataattgaaataaaaaagtgcttttgggatcttttgatg

SEQ ID NO: 138096 - DNA, 1540 bp, Arabidopsis thaliana landsberg
  unsure (1)..(1540): unsure at all n locations
cttacttcagtactaactctacactgaatcaactcctctgatgtctcgatcaaaatctagaggctacattccccacggaattaacgaactctttatttctgaaaactctttgatgtttacccagaataagcaaacgtgacaaatcatcttttgtttatttagcttaactattactggggtttcttcaatttaaacgtaattgaagtttatccagaagaagtactgatgaattatcttgttaattcagcctaattagttaccgggttttcttcgatttagactgttttagctggttgaatcgtcactttatagatcattagccaatttaagctattaaagttttaaactttttcttctgattcgttgaacgtcattgtccaattcagaccactttactgatttgatcagagagaattgtctttcttcaaagtaattttctacactgatctcattgattacgtcactctctctattgatgtttctttctctataatattggccttaggtttctttgttaacctctccattgaagatatgggggaactaaacggagtcatcattccgactatagacttggaagaggtttctgataagattctgaatcagaaaatccgtgaagccagtgagagatggggatgtttcagggtgataaaccatggagtttcattgtctttgatggctgagatgaagaagactgttattgatctctttcaacgtccatacgaggtgaaagtgcgtaacaccgatgtgctcctagggagtggttacagagctccaaacgaaatcaatccttactatgaagcattaggtctctatgacatggcttctcctcatgctgtcaataccttttgtgaccnnnnnnnnnnnnnnnnnnntcaaaggttaacttctttttctttggtctaaaatgatggaacattgattttatgtcttgatggagtttgagggttgcagggagattatggtgaagtatgcgaaggctatcaatggacttgcaacggatttagcgaggaaattagcagagagttacgggctggttgagaccgactttttcaaagaatggccgagccagtttcggattaacaaatatcattttaaacccgaaacagtcgggaaactcggtgtgcaactacacacggattcagggttcttgacgattcttcaagatgatgaaaatgttggtggacttgaagctatggacaattcttcaggaacctttttccccatagacccgttgccaaacacgcttgctatcaacctcggggacatggctacgatatggagcaacggaagattgtgcaatgtgaagcatagagtgcaatgcaaagaagcaacaatgaggtattccatcgcctcgttcttattaggaccaatggatacagatttggaacctccaagtgagtttgtggatgcagaacatccgcgactatacaagcctattagtcacgaaggggtacgaaatattagaatgactaaaaaattgcatgatggagaagctctcaagcttataacccatgcaggactagataaatgacctaaa

SEQ ID NO: 138097 - DNA, 763 bp, Arabidopsis thaliana landsberg
gaaacctctgttttgaatttctctctgaggcaattcgtcgaacaacatggggtccaaacaaccatacctaaacggcgcgtactacggaccatcaattccaccaccgcctaaggctcaccgcagctataactcacctggattcggatgctgttgcttcagctgcctcggaagctgtctacgttgctgcggttgctgcatcttaagcctgatctgcaacatcctcatagctgtagccgtaatcctcggagtcgccgctcttatcctctggctcatcttccgtccaaacgccgtcaaattctacgtcgccgacgctaatctgaaccgattcagcttcgatccaaacaacaacctccattacagtctcgatctcaatttcacaatccgtaaccctaatcaacgagtcggagtctactacgatgagttctcggtttgtggctattacggagatcagagattcggatctgcgaacgtttcgtcgttttatcaagggcataagaatacgacggtgattttaaccaaaattgaaggacagaatctggtggtgctcggcgacggagcgagaacagatctaaaagatgatgagaaatctgggatttatcggattgatgcgaaattgaggctaagtgttaggtttaagttttggtttataaagtcgtggaagcttaaaccaaagattaagtgtgatgatcttaagattcctcttggttcctctaattctacaggagggtttaagtttcaaccggtgcagtgtgactttgactta

SEQ ID NO: 138098 - DNA, 2005 bp, Arabidopsis thaliana landsberg
caaaagtgctcgagagagagaccttgaagaagaaagaagaaggtaaaccctaaattcccaatcttcccacataacttctgctcaaatccttagggtttcaagttgtttcatttccctcgtccgttaaattagaatccttttcgtgtatgttgcatcgtattctcagagcaaatcgtctttattgtgaattgggttttattcagattcgtgctttagatgaaatttcaatagtttttgcattaaaggttgaatttttcatttgcagagacgagtttgatatctaaaggaatcatttttgacggatttaggatctaagtaaaccctagattgaccgaatatgagtactcaagcgacgggtccttcttcaacatcagggaggagaagcaattctactgtacggcgaggaccaccaccttctaagaaaccagtacaatcagagaatggaagtgttaatgggaacacctcaaaacccaattcacctcctcctcaacctcaatctcaagctccttctaatggagagagaacagtgaagaagcttaggttatcgaaagctcttactattcctgaaggaactactgttttcgatgcttgtcgaagaatggctgctaggcgtgttgatgcttgtttgttgactgattcaagtgcgcttctttccgggattgttactgataaagatgtagctacaagagtgattgctgaagggttgagaccggatcaaactttggtctctaaggttatgactaggaatcctatttttgttacttctgattcgttggcgcttgaggctcttcagaagatggttcaagggaagtttagacacttgcctgttgtggagaatggtgaagtcattgctttgttggatattacaaagtgtttgtatgatgctatttctaggatggagaaagctgcagagcaaggtagtgctttagctgctgcagtggaaggtgtggagaagcaatggggaagcggatattctgcaccgtatgctttcattgaaaccttgagggagagaatgtttaaacccgccttgtcaacgattattacagacaattcgaaggttgcacttgtagcaccatcagatcctgtttcagttgctgcgaaaaggatgagggatttgcgggttaactctgtaatcatttccacggggaacaaaatcagtggaatcttgacttcaaaggacattctgatgcgagtggtggcacaaaatttatctcctgaattgactcttgtcgagaaggtaatgacaccgaatcctgaatgtgcatcgctagagacaacgattctggatgcgttgcatacaatgcatgatggaaagtttctacatcttccaattatagataaagatggatcagctgcagcttgtgtagacgttcttcagattactcacgcagctatttcaatggtggagaacagttctggagctgtaaatgatatggcaaacacgatgatgcagaaattttgggattcagctcttgcgttagagccacctgatgattctgacactcaaagtgaaatgtcggcaatgatgcatcattcagatatagggaagctcagttcttacccatctctaggactagggaattcgttttcgttcaaatttgaagaccttaagggccgtgtacatcggtttacttctggagctgaaaacctcgaagagctgatgggtattgtgatgcaaagaattggcagcgacaataacaatgtggaacaacggcctcagattatatatgaggacgatgaaggtgataaggttttgattacatcggatagcgatttggttggtgctgttactcttgctaggtctacaggacaaaaggttttgaggctgcatctggacttcactgagtcaacaaggagcttgagctcagaaaccacccaactcaagaaaggtgattctcgagacagaggaagcggatgggtttcatggcgtggtggtgtggtggttacaggagctgttgtcctaacaagcatagccatagttgtttacttgaagcgttcaaagaac

SEQ ID NO: 138099 - DNA, 1449 bp, Arabidopsis thaliana landsberg
caccgtttcatacgaaactctttacgaggagtctctctttacttttctctctctctcaaagaaagaaagaaaagcctcttttaattttctccggccagaggtatttaatagcttccgttttctttttctcttcttatggctgtgatttaatttactccttgggtctctctcgatccctccgatgatgttctgtcgttttgcggtttttgtggtcgtgatcagaaatttctggtcgcgtttgaatttgtttttcttttctttggcgataattatcgaattgcaatcgaattgatctgtttcgtcgtttgaaatctcctgatgaatcgaatgtttatgcgttgatccgatgattgagaacctctagaactgtttccgataagttaatagtttcaatttattttatcaataaattaaaaaaatttgtctctttcttgtttcagaatgtagactgagaatgtttatgcgttgattgagaatgtagttttcagtgggattatgttcgtgctcgaataccgtacaatatagactgatttgagctcgtccttgttctgtttccttgatctttgtttaacatttgggttgtatctattcgaatgtaatggattatggattctttggctttcatattcatctgtgttattgtgttgtgtgaattaacactcgtttctattgatttcagtgtgtgggatgcacaaggaaagagggaaaatgccggtttctagcaacagaaatagagtatcgccatacccgcttcgctcttgcaggaacaagaaacaaaaagaagtcgagacgtcttcgtcacctgttgagttagagagtgttagtgaatgggaggatgtgaggtgtgtgatttgtatggagcctcctcacaatgctgtcctcttgcaatgctcttctttctccaaaggatgtcgtgcttacatgtgtgatacaagcgctcgtcactccaattgtttcaagcagtaccgcagaagcaacagctcaagccgttgtagtggcaagactctacattgtccctactgcagaggagaggttcaggggactatgaagtcgacttgtgctcggagattcatgaatgctagaccgaggtgttgtactgtggacaagtgcgatttctcagggacctatgcgcagctgaaaaatcacttgaaaactgagcatcctggttttacaccgccaaagttagacccttgggagcaacacatgtgggagcagttggagagagaggcggagtacattgaaatgctcaacgctcgtcagagatgggatgcagaacagagattgttggcgacttctctccatcagcttccatatcgtcatcccatgattgatctcaactttgatgcgttggtgcataatctgtttcttggtgcgtccatggagagccgtgcaagcaccgacaattacccggctcacataccccgtctggagttccatgcccccatgtat

SEQ ID NO: 138100 - DNA, 1444 bp, Arabidopsis thaliana landsberg
atcaaatatttggccagtctaaatagaattagaggagaataaagtaaaataaaacaacaggtttgaccaattaattaaaaaaggggcgagccaacttgtcgtatatcattcgtacagtggccatttactaagtgtgtgaccctatatatataaatcatatccttcatgcaaagtcacctgaacatttcatatataagaagatatacaagcctaccaaacataacaaaacatatttaaaacaccagcaagtttatattgcaaagcgtttcatcatgatcatgaagatatctatggctatgtgcaaacaaccattgcctccttcgccgactttagacttccctccagcgagatttggtcccaatatgctaactctaaacccatacggtccaaaggacaaagttgtggtcatcatgggtgctaccgggacaggcaagtcacgactctccgtggatatagccacacgttttcgggctgagatcataaactcagacaagatacaagtccaccaaggtctagacattgtaaccaacaagatcacgagcgaggagagctgcggggtaccgcaccatctcctcggcgtcttgccgcctgaagccgacttaaccgccgcgaattactgtcacatggcgaatctctccattgaatccgtcctaaaccgtggaaagcttccaatcatcgttggaggttccaactcttacgtggaggctctagtggatgacaaagaaaacaagttcaggtcgagatacgactgttgttttctatgggtggacgtggcacttcccgttttgcacgggttcgtgtctgagagagttgacaagatggtggagagtggaatggttgaggaagtcagagaatttttcgacttttcgaactctgattactcaagagggatcaagaaagcaatcggatttccggagtttgacaggtttttcaggaacgagcagttcttgaatgtggaagacagagaagaactgttaagtaaagtgttggaagaaataaagaggaatacatttgagttagcttgtaggcagagagaaaagatcgaacggttgagaaaagtgaagaagtggtctattcagagagtggatgcgactccagtctttacaaagcgaaggtccaagatggatgctaacgtggcctgggagaggctcgtggctggaccaagcacagatactgtgtcgcggtttctgctggacattgccagccgacgaccgctcgtggaagcttcaacagcggttgcggccgccatggaacgcgagttgtcgcggtgtctagtggcgtgatcagttgtaaccacgtaaaagataagggtggattctgaagaaatgtggttaatttacgccaatggtacttattggtgatggtgacggggcaatgatccgatcaaaatatacgaggctacgatgagtggtggaaaaatataaaaaaaataagctacaaaaat

SEQ ID NO: 138101 - DNA, 1112 bp, Arabidopsis thaliana landsberg
atgaaactcgccaaactaattccaaaacgtttcttcatcagatccaaagatcgttccactgtctctaagtcccccacggctttttccttcggatccgcttcctcatcttccggccaagactgtaaaaactccggtggtgatggcggtggcggttccgttaccccgactagcattctcccggaggttccttctccttattcctacgtcgagattctccaagcgtttaagttgatagacagagacaacgacggagctgtctctagacacgatcttgagtcgttacttagccggctaggtcctgatcctttgacggaggaggagatcaacgttatgcttaaagaggtggactgcgacggcgacggtacgatccgtcttgaagagcttgcgagtcgtgtagtctctttagatccggctcgtgactcgactgagctgaaggagactttcgagttctttgacgcggatcgtaacggtttgatctcggctgatgagcttctacgagttttctcgaccattggagatgaacggtgcacgttagatgattgtaagcgtatgatagcagatgttgatgaggacggtgatggttttgtgtgcttcactgagttctcacgaatgatggatctccagcgttgatcttcccttttcttttttttcaaagttttttttttcttgtttttgctatgcctatgaagctctttttgcccttgttctagggttacgagtatcttttgttttcttgggaattagtgttttttttaagctgaataagctgtagtgctaacgaagaaaagatgaaattttgagtatgaagtaattaataataaagattctgatataatccattcttaaattaaataaattgcataaagatgcatttagatttgagaatttactcagtttgcagctttttcagtcaaaattcatttataccattaatgctaggacatgtgaggcacaataatttttccattaaattgtgaaagaaaaacaatggtctaatttgtcagattcctcaaaaggcatgttcttaatttcattgctcctttgaatatataagattcttgtaccattttctattttcttatattctactgccatttttgcaaaatgttagt

SEQ ID NO: 138102 - DNA, 1365 bp, Arabidopsis thaliana landsberg
gttttgttcgtcaaatataatcaattttaaatttcttctcttctcttcaaacgaatcgcctttttcgataatctctttgcatcgatttcatcatggctactcaaacggatctcgctcagcccaagcttgatatggtaaattacgtaaatctctctcaatttcttatcgtttttcgtctcaaatcttgattttacgtttctgtgattgtaattttggaggatttttggttcaattttgttcacatgtctctacctatcgcattcatggatctgtagttcaattctttcagatcgtattcgaagtgcatgttaatgttttgtttatgtagaagattagattaatgaattgaaaacaaataatattttgtgggctaattaatttgcatgttataattattgaattgtcagaccaaggaggagaaagagaggttgaagtatttgcaattcgtgcaagctgctgctgtggaagctatgcttcgctttgctcttatttacgctaaggcaaaggacaagtctggtccttttgaaaacttggtgttgaatctgttgaaggagctgtcaagactgtcgttggtcctgtctacgagaaataccacgacgtccctgtcgaggtccttaaatacatggaccagaaggtacaattttgactctttccctatctttggatcttgctgaaagtgcctttgttgatgaacaatgaatgaatctgtgttgttgattgtatatctacttcatcgaacatatgtgattaaaaaagtacagttaaagttgtgatgatttcatatcatctctttggtagaaggttcaggtaaacgggtcaatgtcattatgttctgtagagtccctctttttgaagctgacaagtttgttttgcgttgttgcaggttgatatgtctgtgactgagcttgaccgtcgtgtcccaccagtcgtcaagcaagtgtctgcccaagccatctccgctgctcagatagcacccattgtggcacgtgcgttggcctctgaggttcgacgtgctggtgttgttgaaaccgcttctggaatggctaaatccgtctactccaagtacgagcctgctgctaaggagttgtatgcaaactatgagccaaaagcagagcagtgtgccgtttcagcttggaagaagcttaaccagcttcctctattcccaaggctggctcaagttgctgtaccaacagctgctttctgctctgagaagtacaatgatactgtggttaaggctgcagagaaagggtacagagtcacatcgtacatgccattggttccaacagagaggatctcaaaaatcttcgctgaggagaaagctgagaccgagcctttggagttccatccacttgattgatatgggtg

SEQ ID NO: 138103 - DNA, 2526 bp, Arabidopsis thaliana landsberg; identical to SEQ ID NO: 8274

SEQ ID NO: 138104 - DNA, 1674 bp, Arabidopsis thaliana landsberg
aaccgaatccgaacgggtatccgaaaaaaagaactgaatccgaacgggtacccgaattcacgtagaagatgtaaaaataatattagacatttattctagaaagggaatagaataaatgggcctcaatccgggtcggttaatttaattaggaaacgggtcattaaaacccgacccgctcaggctaatctctcatatcctagttttagggttcctcccggcaacgaacgcagagaaatttgaaaagatgaatccattgacgcaggtgaagaatctacagaagataaacgctagggaatcagatttaggaatatctgatgaagcttcatggcacgctaagtacaaaaactctgcatatgtctacgtcggaggcataccgttcgatctcaccgaaggtgatcttctcgccgtcttctctcagtaagtgttgtgtttcgtttctaaagtttcaatttttttaatgggtttataggtttaatgtctttttattttgtggaattgcagatatggtgaaattgttgatgtcaatcttattcgagacaagggaacgggtaaatctaaaggttttgcttttcttgcttatgaagatcagagaagtaccattcttgctgttggttagtgaaactgactcttgtacatgtgaaatttacttttttttaggtgttaggatttgtaattgggttctgtttttggtgattgtagataatctgaatggagctcttgtgttgggacggaccattaaggtggaccattgtggggcatacaaaaagcacgaagaggaggatgaagagacgcgacgccagaatagagaggctcgtggtgtatgcagagcttttcagagaggagagtgtactcgtggtgattcttgcaaattttcccacgatgaaaaagtaagtaagcgtcattttgtactttattcttttcaacagacgattttgatgaatgcttgatagaagttaaccctttttttttttggacagagagctgcaaatactggttggggtcatgaagaggatagaagttccaagtgggatcatgataataatagagagggtcgtggtgtttgcagagcttttcagagaggagagtgtactcgtggtgattcttgtaaattttcacatgatgagaaagtatgtaagcgagtaatcgattctttcgagagatgattttgaataaatacttgatagaagtttttaacatactgtttatctcatttattttcttgaacccttttcttatggacagagagctgcaaatactggttggggtcatgaagaggatagaagttccaagtgggatcatgataatggtgctaaaaagggtggtacaagttttggccatcgaggagatttcaaacctgatgcggaagagaaaagttacagaggaaggggtgatggagatgcctcgtatggccgccctaaagagagagaaagagtggatagggaggatatggggccaaggtcaagagatgcttatgatatgaaggaacaaaagagatcaggacggtatgataatgcgcattctagaaggcacaatgatgaaattgattatataagggaggacaagggatccagaacacaagattgggagaaaaggaaggcagaatctagaagagatcgtaacgaccgggaggaaaaagatagggattcattaagaagggaagatcgccgtcgttaa

SEQ ID NO: 138105 - DNA, 725 bp, Arabidopsis thaliana landsberg
ggcaataatggcatcgttcaagtctttcgcagccgttctcagtgtcctttttcttgccatgactgctatagaaacggtagttcaagcccaagaatgtggcaacgatctagcaaatgtgcaggtatgcgccgccatggtgctgcccggttcaggcagaccaaattcagagtgttgcgccgcacttcaatctactaatagagattgtctatgcaacgctctccgtgcagccacctctcttccttcgctttgtaaccttcctcctgtggattgtggtacggatttatttacttttaaccaagaagtttgatatttggctcgttatcccaagatgaggatgaataaaacaaatctcaatatatatttagttttagttaccaacattttagacttggcctaatatatggccaaaccaaaaagacttggcctaagattccaagtagattaagtaggataaaacctcatatatcagctctagctaactcggctaatgtagtaatgtgtttatttaatgatatatagacctctatttcatatctgtttctgaggtttttttgtttttttgtttgttttgtttttgggttgtgcaggtataaatgcttagttaagctacgagtcaattccaagatgatcaaggaaaacgggaaaataaagaataatgagaaatattccagtcttatgttttttcttctaacttctgctttactataataaagttctagtagttt

SEQ ID NO: 138106 - DNA, 1583 bp, Arabidopsis thaliana landsberg
acttatgaagtgagtaaaccagaaaatcgaagcaataacggcaatggctacttcttctactcagcttctactgtcttcttcttctttgtttcactctcaaattaccaaaaagccattccttctcccggcggaacaagatcggcgtttggagaccggagaagtctctctcgttatcatgtcgtccttcagcctcggtttcagctgcttcttccgccgtcgacgtcaatgaatctgtgacttcagagaaaccaaccaaaacgcttccgtttcgaatcggtcatggtttcgatctacatcgtttagagccagggtatcctctgatcatcggtgggattgatattcctcatgatagaggctgcgaagctcactccgatggtaaacatttcttgaaattcgatttggttaattcgtcttcttgtagattttagggttttgatttgagtttgatgttggaatttgtgtaggcgatgtgttacttcattgtgtagtggatgcaattttgggagcactaggccttccagatataggtcagattttccctgactctgatcctaaatggaaaggagctgcttcttctgtattcatcaaagaagctgtaagatttcgacgcttaccttgatgttcaattttgtgtgtatgttccagtattagctactccttctttaagcctgattttgtgtgtggtactttatagaatggttcagaattcaagctagatccataagttgatgggatttactcagcttaataatactcttgagtaaattattttcatctataggaagtagaagaaatatggaaatcagatcttatccctgaactgttgtcatcactcaacgatgctatctataagcttatcactcttgtatacatgatttttgtcttgaaaagccttggcataactcaattttctgttgaattttaggttcctgcatctttgtattgttagatttcaacacatatgattgatgataagtagcggtactcaaggttgaagctataaagtttctttcttgtcctgtcttttaagttatgggttcacatttggcgtaatgtgtttgttaagttcaccatgattgactgtgaatgttgattgcgtggaagctaatctgaatcacttgtaatgatgttatatagatataacagaagaaatgttagattctcgtcggtatgaagaatgattcaataaacttgagacgaggtttatttgactttgtgtttcaggtgagactcatggacgaggcagggtatgagataggaaacctagacgcgacgttgattctccagagaccaaagattagtccacacaaagagacaatccgatccaatctgtccaagcttcttggagcagatccttctgtagtgaacttgaaagccaaaacacatgagaaagttgatagcctcggagaaaacagaagcatagcagctcacactgttattctcctcatgaagaaatagaagtcaaaattgattttagctctttatcatattccttaaagtgtctcatcttttaagaaaaacatacttttgattgtaaagtgtaatcatcctttaaaggttaattaatcgaatcgtttcgtaga

SEQ ID NO: 138107 - DNA, 2966 bp, Arabidopsis thaliana landsberg
cagttggagtttcatccactagatcctaccctatgttttttggaacttttggatggcgaggtggttgttctcaatcacgaaagtgggaaaattttccgttacatcccatctaatggatctcaaagtaccatcttgggactttgttggctcaagatatatccatctatggtaggattacaatttttcgggtaccaatgtttctttcagttatgttagttgtttatctcaaagtgttgttctatttccaggttatagctggctcagccaatggctcattgaagctgtacgacatccaaaaagcgtcatccacggttactactagcagtcattccacttctggttctgtcacttttgatgagtttgaccaattaacgtcggttcatgctaattcgacggaccaactatttcttgctagcggatactcgaaggatgttgctttgtatgacattggtaggggaacacgcctacaggtttttgctaatatgcatcaagagcatattaacgtggtgaaattttcgaaccattccccgtttctttttgcgacttcttctttcgataaagatgttaagctttgggatttgagacaagagccatcccgaccatgctacaccgcttctagtacgaaaggaaatgtaatggtttgcttttctccagatgatcgttatcttctagcatcagccgtagacaacgaggtactctaatggaccatttagttttacttatgaagctttttgcatcagattagccttttggatatatttggcgttgttctattgatttttaacaacccattgaccattttcccaggtgaggcagcttttgacagtagatggaaggcttcatctgaactttgagatagtcccaagagtaagctcgatgaactatactcgatcatactacatgaatggtaatgactacatcataagtggaagctgcgatgagaatgtgatccgtgtttgttgtgctcaaactggaagacgacttagggatgtaactctagaggtagattgtttcttctaaactataaaacatggaaacaatcgtataatgtataaccgtatgaatgtgactttacttatgtgatttgctttggctttgcagggaaacggctcggacttttccatgatgtatgttcagtctctacgcggtgaccccttcagggtaagttgacaaactttaccaatcaaatttccattgataagaaagttttatggcattttcaaaacttgtgtattgctaatctcttgcaggatttcaatatgagtgtattggctgcgtacgcacggtcaagctcactttctgaaatagtcaaggtagcgttattaaaaaaacagtgcttctgttgtatcagataaagttcccaattcttagtactgttgatgacaaaaatgttactgcaggtgaatttgttagcgtcaagagattctacagcagaagaatctcatggtctccgttcctacccttcaagtagcatgggaggctgatgataaaaccaaaagagaggcttcacaaaaaaaaacaagtgactcatgtattgttgtatttattgtactaatagaatacgatgaatattaaaaaatgaaaatgttatttttcggtgataaataaaaaaatagtttaggtcgaacgacgaattttgactatataagcaaaacttccgaggaaaaggataacacaaaacctctcgtcttctcaaatccactctcatacacagtcacaacaatggctctttcttctggaatcttctctactacttttctctgcgtcgatacggcgccgttgcgcagctcaatgttgtctccatcttcgctccgtttgtcccctaatcatccgactaacctgcgcatggttcgagctgtaacttccgcggcggcggctttctccgacccgacaaccacgaccaagactcgggagccacgtggcatcatgaagcctcgtccagtgtcccaggccacgcaagatgcccaatgctgacactgaaatccctcgcacacaagctctgaagcgtatttgggcttacatcaaagaacatgaccttcaggtacttctttctctctttttttactctctctgaaatgctttatgtgctctaatttggttttggttgtggaaattttttaagtctcttgtggtgatttctcattagggtaagttttttggtgtttcagagtagttgtggtttttggtagacaaaagtaaagtgggttgtttgaattgcttatgggtttagatggagagcttctaagaaatggataaggttgtcttgtggtgtcttgttatgcacagttgaatcttgtggagtttctttactgtttagtttagactgaaacaggttcttgtgattagtcgtcatgttacttaccgtatttgtttctttcatgtttgttataataaacttttgaaggattcaacggattgtgagattgaatttggggttttgaacttcttttgatatgactggttaattgcttcaaattattttatcattgttgtgatgataaactttagtggatatgttttggtaatgacttttgatgttctttgatcattgtacttgaccaatgtattacctatgcatttggcattatactagtccctgtgtaatgactctttgtgctgtgtaatggaaacaaatgtagacatgtccatactggggtttgaccttaagacgttagtttgtacttttttctcatgttgtaatctactcttacttgttctgtatagattcttaagtgttcattgtgctaaaatttcaacaaaagaaacatcttttatgacaatagtaatgtatatcttttatctatctgtgtggaatttgtgggctaactgaataatgtttcttctcccaggacccacaaaacaagagagaaatactgtgtgatgagaagctgaagaagatattcgaaggaagagatcgggttgggttcctagagattgcaaagctcatcggtcctcacttcctctga

SEQ ID NO: 138108 - DNA, 6168 bp, Arabidopsis thaliana landsberg
  unsure (1)..(6168): unsure at all n locations
atggcgattgaacgattggatcatcatcatcacgcgtttatatcatcaaatcggaagatattatcgccggaattcttctcttatccaccgtgctcatcatctcaaccgaaggtgctcaacgtcgacgagtttggtgatgttaatcggagaggactgtgaacaaaatcgacgtcttgtgtgaaaccatggtccaatctagaagtgtcaaatggtcatctgaccatgggctaagcccagtccacaacattatggacagtccatggtcggcccgtaatgaaaacgggctatatggtctaaagaccaattttgtccatgggtttaatgggctagcccacacggtttatggttggcccatcaattttttcaacacatcaattttcttctcttctctctctctcggcaacgacgctctctctcccggcgacaaagctctctctcggcgacgaccaagctcgacctctctctcaactcctactccggttagttctactagcttgtgggtttgtccaaatttcaattgttagtgtttctgaaagaatcttagctttttggatatgaggagagctagctagcaaatgggcacttttcagattttgtttatggttcgccatttcgaatttcattatgaattgaagcacatcaatatgtagagaccctttgtgttgtaagctaattttgtttttgcttgaatctaatttgtttttaggctccagctgagcttgagaagagaaagcacaagctcaaacgtctcccaattcctttttcatggtaatgtaaatttgaaacctttctccttcttttgaaccctttaggaacaaagttcaagtatatacgtgaatctcctgttcgtgcaatgaaaagagaaggtgttaacttaagaaactgcattttgggaataataaacaaagtgtgtaatgtgtataccttaagagcaaatgtgatgtctgcttcatctactctaaggctcattctctttagtttatcgtctcgagcatgactgagttttagaatccccagtgccaataaaaaaaattgatatttcaatcaaatgtctattttataatacataaaccatacacaaacatgagcgttactcttataggagtagataagtacctgatcatttagcactgtacacatgttagtgaactcagtaattccagctgtagttatcatcgaagatttacagatttccaagtatagcttatttaactgcatcaaagtgtgaagacagagatgaatattatgtacaatgtcttaaattataacttcatgagttgtgtttgtgtattgctcattcaatgaagatttacctctacaatggttctatcctctttgcttactcgaaaagcctttgcagcttttgaataatctccttcctttgcaatgaataatctccttcttttgaaccctttaggaacttttcttattgattattatcgtatatgcttgagctttaaaaaaggtcacgtgtattgaaaggttttaaaaacatagttcatggagtaagaaccatttgtcttattgattattatcgtatatgcttgagcttgatgttctttaaagtaaaatccttaaaggtcatctgaattaatactcctttttatatgattcgagaaagaatttagtcaagttcatgctttatttgtttatcactgctaaacgtgtgtatgtctttatttgtttcagaaatatggaattggatactcaaaacttgtttgatgaagacaactttaatcttgaggatcaagaaatggaccatgaagatccagaaatggatcagatactacctcatgaaactgcttcttcagggacagctggtttaatagctgaattgattacattgtggaaatgttgtttaaggttattgaagatggtcacttctggtttccaatttcgagatgttggagtagtattgaaatgggtttctctgtcaaatcattttccctgtagccattgtagtcagtcctagagccattgtagtctcttttctttacttgtaggagcatatagagagtcttagatgcatgtttgagttgtcactgttgattacttgatttcgtgttgatgttatggtgttataaatagagtgttttaacttttaacgagataggtgtcgaatctttctttaaccttgctgtttagattgaaaagttaggagattgttacgattgtgtgagtggccatgtattgtatagccttggtgatagttgaatttttccttgttcagtcatagagacctgttgcaatataccagattgaaaactattatgtgaaaattttgatttgtgtacaaatacttgtgactcttaaaatgaaactaacattgtacaaaatatcacaatgaaagaatcacagaacaaggtctctcaacattttgataatctattatacatgcacattgtggtttctgtttagcaaacataaacgaatttcagagatatagaacgcaacaatgcaagcccttgcttcaaccgtattctttaaactccgttcatgttctaagctttttttgacaaaacacatcctcacactaataccgaagcaaatctagtaaaacataacaatcattgtaatgtgagtcagcacttgtgattggtcttgaagtataacaaatgttcttgaagtattaacacattttgctttttaatttatcattcaactttaccttaattaatttatgataagactttgaaaaacaataattatctctagattctacaatctcatccaatatttttgacccaaaatcatatctatctttgaaaagacaaattaaaatataccccacatgaagtcacttatcatcatatcagaccttatactttatacaaataatcactttagtccttaaattaaaaaccgatttaaccacaaaaacaagtttaagccaaaacaagacaaaaaaaaataaaaaataaacaaaatttgtcgtttttataaaccagaaaagctgcccaacttcttctcctctcgaaccctaacgagccgggtcatctcaaaaatttctccgacattgcattcctccgtcgccttcagattcttctccagcgttccttaatctcttcttctccggtcgattccaccttcttcatccccaaaaccgaagtccttataccgtaattttatcaagttttttaccgaaccgatttcttgccgtaaccaacccggtcacaaacctgcaaaccaaaaaaggttcgttctctgttctttcgataattcaaaaactctgaaatttacgattttgctgcactgggttttagaatttcgcttttctttgacgggtttgattcaatatgatccgatttttatctaatcaacgaaaagttaacatctttgttacgaaagttgtgagcttttttatgaaagctgatgaattcttcttctaagtttgatctcgtaaatgtttaattgaaggatctagggttttgtaggatggattcagatttggaacctgtagctctaacaccacagaaacaagacagtgcgtggaaacactgtgaagtttacaaatatggagatcgagttcagatgagatgtctttactgtcgaaagatgtttaaaggaggtggtattacaagggttaaggaacatcttgctggcaagaaaggacaaggcactatctgtgatcaagttcctgatgaggttcgtcttttcttgcagcagtgtattgatggtacggtgagacgtcagaggaagagacgtaaatcaagtcctgaaccattgcctatagcttatttccctccttgtgaagttgagactcaggttgctgcttcttctgatgtgaataacgggtttaaatcgccgagttcggatgtcgtagtgggtcaaagtactgggaggacgaagcagaggacttataggagtagaaagaataatgcttttgagaggaatgatttggctaatgttgaggttgatcgagatatggacaatttgattcctgtggctattagtagcgtgaagaacattgtgcatcctacttcgaaagagcgggagaaaacagttcatatggctatgggacggtttctgtttgatattggagctgatttcgatgcggcgaattctgtcaatgttcaaccgtttatcgatgcgattgtttctggaggatttggtgtttctattcctacacatgaagacctcagaggttggattttgaagagttgtgtacaggaagtgaagaaagagattgatgagtgcaacactctatggaagagaacaggatgttctgttttagttcaggaactgaactccaacgaaggacctttgatccttaagtttttggtttactgtcctgagaaagtagtgtttctgaaatcagttgatgcatcagagatattagattctgaggataagttgtatgagttacttaaggaggtagttgaagagataggtgatactaatgttgttcaagttattaccaaatgtgaagatcattacgcagctgctgggaaaaagttgatggatgtgtatccttctctatactgggttccttgtgctgcacattgcatagacaagatgcttgaagagtttgggaagatggattggataagagagattatcgaacaagctcgaactgttacaagaattatttacaatcacagtggtgttttgaatctgatgaggaaattcacttttggcaatgatattgtgcaaccagtctgtaccagttccgctacaaattttacaacaatgggaagaattgctgatctaaaaccttatttgcaagcaatggttacatcatccgagtggaatgattgttcgtattcgaaggaagcaggtggattagcaatgactgagactatcaatgatgaggacttctggaaggcattaacattggcgaaccatataactgctccgattttgcgtgttttgaggatagtttgttctgaaaggaagcctgcaatggggtatgtctatgcagcaatgtatcgagcaaaagaagcaattaagacaaatctggctcacaggcaggagtacatagtgtactggaaaattatagataggtggtggttgcagcaacctccgtatgctgctggtttctatttgaacccanagttcttgtatagcatcgacgaagaaatgcgtagtgagatccatttagcggttgttgattgcatagagaaattagtccctgatgtcaacattcaagatattgtcattaaggacataaactcatacaagaatgctgttgggattttcggaaggaacttagctatcagagctcgtgacacaatgcttccaggtacgccatttataattgaatctcaaaaagatttcatatgttcaagtgttttgtaagtagttaaaacatgtttgattcctgtagctgaatggtggtctacatatggagaaagctgcttgaacctgtcacgttttgcgatacgtattctgagtcagacatgcagctcatctattggctcagtgagaaacctgacatcaatctcgcaaatatatgaatcaaagaactctattgagcgacaacggctcaacgatcttgtatttgttcagtacaacatgcgcctcagacgaatgtaagttggaatcttttgatcttcttgattactatactgtcttttgttcaaaacagaacttaaaaggattctctgtctgtttcctctagtggcagcgaaagcagcggagatgacacggtagacccgttatcacacagcaacatggaagttcttgaagactgggtttcgagaaaccaagtttgtatagaaggaaatggaagctcagactggaagtcactcgagttcattaagaggtcagaagaagtagctgttgttatcgacgaaacagaagacttggggtcaggtaaaagctttgcagaacctagtttttgtgaatatcttgacaaacatgagagaagttgtttaaaaggtgttttgaatgaaatgcgtaacaggtttcgatgatgctgagatattcaaaggggaaaaggaagcgagttacgaaggcggttattcggagaatctgttcacttgaacttgcaccttttcctgtaatcatcatagggtttgattttgtgattctttcttagggtttgatttgtattattaatagaagtctttaccaactttaagttgtatcccagaaactaatagttactcttcttcttcttcttcctcttcttcttctttactcagtaatgagaacaaaaaccatttt

SEQ ID NO: 138109 - DNA, 1839 bp, Arabidopsis thaliana landsberg
atgaaaaggtaggttccataaaagatgtcacgtggctcccatgcgagatggaaaatcatgtggatcttcttctgtgcaactgcaactagttaagtagatcatcatggtaccagtaccaccaccacttcactatctacaactgtatctctctattaattcattcctctccctattataaagagagagagagagagagagagtgtatcataatgtgtgtggaagtaagaaagagaggcacatgcgagctaatattaagatagatggagaaactcatgtgagcacatgtgctttccttttctcttttccttttttacggagcttttgtggctcccatctcctctgctcccatgcacctgtcgcaggtgattcctctcctcccttcttctaacgtgcgagagagagagagtatgtgggattagctctttaatttgtgattagtaatataccattcttaactagatttaagtcaagctgagctcaagtttgaaacttgaaatgttaattatgtaacctaatatgataatcaaatcaatatataagttacaagttaagattgattgttttcttaatctcacattctaaggtccatgcatcatcttatatcttcaacacatttttaaaaaaatcgcctgatccaaaaaaaatatggattatataagagaatggtcaagctaactctaatacatattttcattcatttttggtttgaaatctggatgaagagcatgtattgcatttgtcgtatgcatgcataattaagttgtaagatacaaataactagcttatctttatggtgaaatattgattcaaacacatcattaatgtttccgaaaagaatacaaaacaaagacccacaagtcaaagtctgggttaagttttaaacacatgtcgataactctattattactaaactaagcatgttacaaatttgttaatgacacgcatattttcaattatgtattaaacttttgtgatgtatagtgttttaaaagacaaataaagatacaatctatctatctgtcaggacctcagggagatccacttgagtatagtgacgtctccactaaaccacacaacatagcgcgtgacaatcacgatccaaaatctctcttaataaataaaccaacaaaacaaacactccaacacataattcgaaacactcaagaacaaaaaaagaaaagaaaatcacaactggacccagctttgatggcataccggcattacccaatttccaaaattatagccaaaccccaaacctaaatcgcacaaccaaaacatagtactaaactaaagtcttaaccaaacgcactaagattcagctcataatcaaatcattaaaggcaaacaagagtaaaccaaagtaaaacgaaccggaatgactttaaccggtcctacttcaatctactaattcacatcactcatataaatacacacaggtctctttactccttttcttccaacacatcttctctccctccgtcaatggagaaaaccctagccacttcccataccaaacgctcttctcctccgtctccatcctccgccgtgaacacaagctccactggtttcaaccgcagaaccagacagagattgtccgatgcaacggcgagtgtaagcgagaccgacgtagaagatgaagatgaagatgaagaaggagtggaggagaagatcgaggcgcttcagacaatagttcccggaggaacggaacttggtgtcgacgcgctgttcgaagagacagctagttacattttggctctgcaatgtcagatcaatgccattaaagttcttactaggtttcttgagcgttgtgagaaaaaagatatgaagtttggaggttga

SEQ ID NO: 138110 - DNA, 773 bp, Arabidopsis thaliana landsberg
gtcacacactcttcacctaaacagcatcaatggcgacttctctctccgtttctagattcatgtcctcctccgccaccgttatctccgtcgctaagccgttactttcccccaccgtatccttcaccgcgccgctctccttcacacgctctctcgctcctaatctctctctcaaattccgcaaccgccgcaccaattccgcctccgccaccaccagatccttcgctacgacacccgtcaccgcctccatttccgtcggagacaagctcccagactccactctctcctacctcgatccatccaccggagacgtcaaaacagtaaccgtctcatccctaaccgccgggaagaaaacaatcctattcgccgttcccggcgcattcacaccaacatgctcacaaaaacacgtccctggattcgtatccaaagccggagaactcagatctaaaggcatcgatgtaatcgcatgtatctccgtcaacgacgcgttcgtgatggaagcgtggaggaaagatcttggaattaacgatgaggtaatgttgctatccgatggaaatggcgaattcacagggaagcttggtgttgaattggatttgagggataagcctgtgggacttggagttaggtcaaggagatatgcgattttggctgatgatggtgttgtgaaagttctgaatcttgaagaaggaggtgcttttactaatagtagtgctgaggatatgcttaaagctctctgattcttatgattttctcatcaatttcgtcttcttctctgt

SEQ ID NO: 138111 - DNA, 1321 bp, Arabidopsis thaliana landsberg
aaagagatctctttctaccatactagcggaccccttaggatactactactgagtctaatgcgttcctttcatttaagacgagaaattgaaatcttttttttttttttgatagtaaaattttattcaaattaatcattttgactaacggtttttacgtaaattataagcaaaaaagcagtaggaacgagaatgaagagtgcagtagcaataaatgcaagaatatttacttccataatttaatcgtttattattattattttttttttctttggaatatctcgggatttaatcccatagagatgagaaatctttcgcttgtaaacttactcagatgaattagattgcgatgatatcgaatgaaagaaatatcatgaataacaatatcggagctataaaatcgattcatcgtcaagaatttaatagtataacataggaagatcttttatccacaccgaatacataatgagattcccgatccaataaaaaaaaaagttctttatgattctttttcccggctttcctttctaaaacctagtagtttactttccttgtacaatcatctgatgaagtatcataaaaaacttcgattctttacaaaaagagtttctaaagaaccttaaataaacaatagaaatcaatatagagaaaacaagtacgaagttcaatttgaaataaaaaaattgaaagggtttatcatctttttggaaaacaaagaaagggaatgtgacaaagacgagtcccggtaaaaaaacgaaaatattcaaaaaaaattaacgagttaatttttcttacgagttttttattcgacatcgactctaatctttaaaaagagcctattcattagggaagacacattttatctttattaaaaaaaaacctctttccttggttgaattcgaactatttaaaattccttgacttcatagaaagaaaagtatatataggtactcttggcaaatgtattatacgcgatcctattccattttcctacacgaaattatgggagagcggttgacaaaaagcggaaaccccatacagtatctctttcttgaagtgttgaatgctctcaataattcatttacatatgtttctctaccctagttaaaataatcgaccctttcttttgctttatgaaaaaagaaaaatcaaataaaaagataaatgaaaccattttcatccccttgctcggaaacaaaaaggggagttgatgtattgaatccgccgggactgacggggctcgaacccgcagcttccgccttgacagggcggtgctctgaccaattgaactacaatcccatggaaataaagcgggtagcttaca

SEQ ID NO: 138112 - DNA, 2160 bp, Arabidopsis thaliana landsberg
atcacatcctgaaattcaactaactgagattatgtggagtttggagaatcaccttggacagttttttctttacttcagggtagcaggtggagttacaggcgctcatgtataatcgtttcagagccgtcaacttgtctagacctggaacatcattcaatttcacgcagatcgtgagattgaggtcgtgcaagatggtcagctctgaaaggtcggatatactctccagcgaaaagcagtttgccaggtttagctgctttagttgacatggaagagggggaagacatgtgagctcctggcagtcatgcaatgaaagttctatgagatttgacaacccctttagactgcacggaagactgtgaaaacgattattccccaggttcagtatcattagagatgaaagcttctcaagaacatctgggattttgcccgatagtcccaagttgcgagcacactctaccgctgagttatatcccttcccccatcaagaaatagaactgactaatcctaagtcaaagggtcgagaaactcaaggccactattcttgaacaacttggattggagccgggctttcctttcgcactttatacgggtatgaaatgaaaataatggaaaaagttggattcaattgtcaactactcctatcggaaataggattgactacggattcgagccatagcacatggtttcataaaaccgtacgattctcccgatctaaatcaagccggttttacatgaagaagatttgactcggcatgttctattcgatacgggtaggagaaacggtattcttttcttaaacttaaaaaaatagagaaataagaaccaagtcaagatgatacggattaatcctttattcttgcgccaaagatcttcctatttccaaaggaactggagttacatctcttttccatttccattcaagagttcttatgtgtttccacgcccctttaagaccccgaaaaatcgacaaattcccttttcttaggaccacatgcgagataacgaaaaaaaaaaagagagaatggtaaccccacgattaactattttatttatgaatttcatagtaatagaaatacatgtcctaccgaaacagaatttgtaacttgctatcctatcatcttgcctagcaggcaaagatttcactccgcgaaaaagatgattcattcggatcaacatgaaagcccaactacattgccagaatttatatattggaaagaggtttacctccgtgcttctatggtacaatcctcttcccgcggagcctcctttcttctcggtccgcagagacaaaatgtaggactggtgccaacagttaatcacggaagaaaggactcactgcgccaagatcactaactaatctaatagaatagaaaatcctaatataatagaaaagaaaagaactgtcttttctgtatacttatgtatactttccccggttccgttgctactgcgggctttacgcaattgatcggatcatctagatatcccttcaacacaacataggtcgtcgaaaggatctcggagacccgccaaagcacgaaagccagaatctttctgtcaataaattcctattcgaagagtgcataaccgcatggataagctcacactaacccgtcaatttgggatccaattcgggattttccttgagggatattggtaaggaattggaatgtaataatatcgattcataatggattcatatcgatacagaagaaaaggttctctatcgattcaacaagtgctgtacttatgggaaagcgatagagaaagagaaaaaaaaaaacgaagatttcacatagtgatttttttttttttttttgatcaaaaataaatctgattgaatttatttcgtaccccttcgctcaatgagaaaatgggtcagattctataggatcaaacttatgggacttaagaatgatggaagggaataaaatcaaaaaagaaatcaaataaagaaaagagagagaaaataaagaaaaaataagtaaatcaaaatgaagtagaagaacccagattccaaatgaacaaattcaaacttgaaaaagtctctttctgattctcgaagaatgaggggcaaagagattgattgagaaagatctcttgttcttattataagatcgtgtgattggacccgcagatgtttggtaaaaagaataatct

SEQ ID NO: 138113 - DNA, 302 bp, Arabidopsis thaliana landsberg; identical to SEQ ID NO: 136326

SEQ ID NO: 138114 - DNA, 595 bp, Arabidopsis thaliana landsberg
ttcaaaagtaaaacaagacaaacaaaaaatacacttaaccatttatttttctctcatgaagaataatactcaacctcaatcatctttcaagaaactttgccggaaactatcaccaaagagggaagattcagccggagagatacaacaacataacagtagcaatggtgaggacaagaacagagagttagaggctgttttttcttacatggatgcaaacagagacggtagaatctcaccagaagagcttcaaaagagtttcatgacattgggagaacaattgtctgatgaagaagccgtagctgctgttagattgtctgatacggacggagatgggatgttggattttgaggaattttctcagttaatcaaagtagatgacgaagaagagaagaagatggagctcaagggagcgtttagactgtatattgcagaaggtgaagattgtattacaccaagaagcttgaagatgatgctaaagaagctaggagaatcaagaaccactgatgattgtagagttatgattagtgcttttgatctcaatgctgatggagttttaagctttgatgagtttgctcttatgatgcgctaagcctcc

SEQ ID NO: 138115 - DNA, 1764 bp, Arabidopsis thaliana landsberg; identical to SEQ ID NO: 7009

SEQ ID NO: 138116 - DNA, 1750 bp, Arabidopsis thaliana landsberg
gaaaaagattcacttctccggcgagcaatttcaagtttctcggtaatggcgatgtcttctggaactctcaggatctctgcgaccttagtatctccttatcatcatcaccaccgtaatcgcctctcattaccttcttcttcttccaaggtccgattttcttataattcttactctacgattcaaatgttctcttcgctgcaatttgggatctggagctcgtgaaattcgccaccaaattaggagaacttagattactagcttcgatctttcgtttttatgtctgtgtggtttaggaagaatctgaaatgcgtcttttattggaacaatttcacaatttctctctagctctagatttgcttgttcatcgcgagctcctgaaagtttatcattccagtttctgtgtttttacttaggcacttggaaatgaaggattttagtaacaaaacttaagtatatttgtttttaggaaagccaacgaatccatctccatgaccatcctccttttttgtagttttgatattttctttatcttgtagctcatattaagtctttatagtatggaagtggtgtctttgattactgagagcgagactggaccggtcttctgttagatatatgcggatgtttgtggtgctatgacctgatgtgttgcaattttgttacaaaaccatttcattaagtttaagatgagctttgatgttacagttgcttctttacctatagatgatcaaagagagtgaatatgttcttaagcttgtagctcatattaagtctttttaacaatggtggtggtgccttggattacgtagactagaccggtcttctgttagatatatgcagatgtttgtggtgtttatgacctgatgttttgctactttgttagaaaacatatacgtttaggtcagctttgatgttatagttgctttacctatagatgtacgataacaattactgagttctcaaaatgcaactagtctgaaattacagtccctttttgcgggtgatggatgtaaatttgcaggttgatttcacgggattcataagcaatggcgtaaacagtttggaaactcagaaatgtactcctggactggcgatcagccgcgaaaacacacgaggtcaggtgaaggttcttgcaaggaacaccggagactatgaactatcaccaagcccagcagagcaagagatagagagctttctctataatgccatcaacatgggtttctttgacaggttaaacttggcttggaagataatattcccatctcacgcatcaagaagaagctccaacgcaagaattgcaaagcagcggctcaagatgatcctcttctccgacaggtgtgatgttagtgacgaagctaaaagaaaaatcgtcaacaacattatccatgcactgtcggatttcgtagagatagaatcagaggaaaaagttcagctaaatgtttccacggacggtgaccttgggaccatttactcggtcacggtgcctgttagaagggtgaaaccagagtaccaagacgtggacgaggctggaaccataaccaacgtggaatacaaagatacccgtgatggttctgtcgatgtcaggttcgatttttatgttccagagtgatgaaaaggcacagtcttagatttatttgctggatagtatcttgtctgttatgttgatgttcttcaagtttagtctggagggaacaaagacagtttcttgacactccccatgtatatatatatatgcaacttctcttttctt

SEQ ID NO: 138117 - DNA, 1644 bp, Arabidopsis thaliana landsberg
gatgatattcaggataaagcttcattaattcttcagttctcacttaagtgggaagaaatcgacgacaggtttggttttctaaagcaacgagccatggagaaggaggtctctgtccggaatcagattctggagctggagaagaaggaagagcgactgaggcttgttgaagaaagagagaggaagattgaggcatccttcagtacattgcaggagaaaggaaatgaatctgatctgatactgttaatggaagcgaatgtgatgagattggttcttcaaatgcagtttgaacaagtggtggttgctcagctcaacgcccaagagaactttcttggttcgctccatgattcgatgatgaagaagcatgaagagctaatgacagagcttgaagcaaggaaaaatgaggttgctttgatttctaagacgatcgatgccaagacttgtgatttagacatgaaagtcaaagactttgatcttaagcaaacaacagagtctgagagaatgagaaaagagactgagctgatggaaacatctcttaagcaacttgaagccagggagaatgagcttaggttgcttaatgagaccatccaagggaaatcgatggagctggagaagaaagaagtcaactttcaactgaaacatgaagcagcagccagagagactgaagtgaagaacaagtttcttgagttaaaggaaaagaaacttgaagaaagggagcaacatttggagttgaaacagagaaaaaaagaaaaaccagcaataagagcagagactcgtaagagatctaggcttgaatatgagtctccattgtcggcagagaagggtagatatgctgagactctgattcgccctggaaaaaagcaagtgcagaaaagagaggctcatgaaattatctacattgatgaagatgagccattcaactgtcctgatccagactttcacgattttaacaacacaatgagctctttcgctgtaggtcaagtatgggctctatatgatcctgtagatgatatgcctagatactatgctgagatcaggaaagtattgcaacctcagctgagtttacgggtgacatggctcgaatcattacagaccacagaggaaccaattcctgcttgtgggagattcgaacatggaaaatcagagaccagtagccacttgatgttttctcatgagatgtatcacaccatacgaggccaatatgtcactataaacccgagaaaaggcgagacgtgggcacttttcggagattggaccaagacttggaagagtcacagtgagcaacaaaagactccttacagttacgactttgtggaagtcgtgactgaatttgacagtgatcgaggcattggagtggcttatctagggagagtggaaggattcacatcagtgtatgaacgtgctgcgcaaaatggtcttgtcgaaatcatgatatcatgtgatgaaatgcttaggttttctcatagagttccatctttcaaaatgactggagatgagaaagaaggagtcccagctggctcttttgagctagaccctgctgctgttcctcgagtttatcttaaagatgctaaggtcaaagaagaaaagatggagcccatagtcctggtctcagttaagtgcaagtctgatgtgttcactatactttat

SEQ ID NO: 138118 - DNA, 1093 bp, Arabidopsis thaliana landsberg
gagaattaccaatttctcatccaatttcatggatcttccataatacagtatccattttagtattattggtgagaagagtgatgatgcaaacctggttcaaaacacaaccgatcgtagaaaacatagacgcaaatggagtcgagctgaagatgccattcttattagtgcttggttaaatactagcaaggatccaattgtcgataatgaacataaagcatgcgctttttggaagagaattggtgcatattttaacaatagcgcttcacttgcaaatctgccaaagcgagagccgagtcactgcaagcaaagatggagtaaacttaacgacaaagtctgcaaatttgttggatgttatgatcaagctttgaatcaaagaagtagtggtcaatctgaagatgatgttttccaagttgcataccaagtctacacgaacaattacaagagtaattttacacttgagcatgcatggagggagctccgacacagtaaaaaatggtgtagtttgtacccctttgaaaattctaagggtggtggaagctcaaagagaacaaagttgaataatggagatcgtgtatattcttcaagctctaatccggagagtgtgcctatagctctagatgaagaggagcaagtcatggatcttcctcttggtgtgaagtcatcgaagcagaaagagaagaaagttgctactattataacgattgaagaaagggaggccgattctggatcaagacttgagaacttgtgggtactagatgaagaggagcaagttatggatcgtcctcttggtgtgaagtcattagagcaaaaagagaataaagttgctcctaaaccaacgattgaagaaagggaggcggccgattctcgatcaagacttgagaacttgtgggcactaaaggagaaagaagaaagggaggcagattcccgatcaagacttgagaacttgtgggcactgaaggagaaagatatagaagagcaaaagaaactaacaaggatggaagtccttaaaagtcttcttggaagaacaactgatcaactttctgaaaaagaagacattttgaagaacaagctcattgatgagatgctctaatct

SEQ ID NO: 138119 - DNA, 855 bp, Arabidopsis thaliana landsberg; identical to SEQ ID NO: 28596

SEQ ID NO: 138120 - DNA, 1161 bp, Arabidopsis thaliana landsberg
ctcttcagcgatgaagtaattgcgcaccgggtgaatcagcttggaatcgatattacttctgatttctccggtgactcggaggaaactcctatttttgtcggcgtagccactggtgcttgcctcttcttggccgatctcgttaggcgaattgacttgccaatagctatagatttcattagagctgagtcttacggctctggtactgtatccagtggagttcccagagtatcatttgacttaaagcttgacatcacgaacaagcacgttgtcttggtaatctccatctctttatgcgtgatggatctggatttgggtaatatgtgttttgcatcagttttgattcagtttctttagcaattgagttttagtattcatttgaatttcatgaagtttgagtctttacagcttaaaattgatgtgttggtttctgagttttaacgtttgaagaacacttgtgatatgcaaaaatgtgatgaatatattagaaaggagaccacactgaatcactgatgcttcacattctcatttgataatgtcttggtaattattttactgttaagcattcgaaatttcactactttttatattcactagttatgtgttttcttaaaggtcgaggacattgtggatactggcaatacacttagctgcctgattgagcacatgaaagcaaaaaaggcgtcatctgtttcggtttgcactctcctcgacaagccatcgagaagaaaggttcattataagctggttggaaaggggaaattctacagtggttttgaagtaagctgtttcttgtttctctctgttcaatatatgtattatcattatacgtctgtctaaggcctttggaatgtttaagccaccttaaccagagtatacagctatttatagaataggtgagaccatgacattatgctttccgttcttatttgccctgttatgccttttcttagctaaaccatggtaaacaaaagtatttgttggtgttaggaactagcctgaattaagaatatatatttcatggctttgtgttgaacatgagttgtatcttctgaatatgtgcagtgtccagatgaatttgtcgtgggctatggcatggattttgcagaacaataccgcaacctatcttacattggcgtattgaagcctgaatattacatgtga

SEQ ID NO: 138121 - DNA, 1192 bp, Arabidopsis thaliana landsberg
aacacctcttcgacaacatcaggagtacgttgtttccttcttttttgttatatttgatatgtgtgtgtttgggactatctatgttctaagttggtgacattttctgattgcagagtttacatcagagaatcatggaatgtctgccaatgttataactaaagcgtttttagctacggaagaagattttctttctcttgtccggcggcagtggcagattaaaccacagattgcttctgttggagcttgttgtctggtagggatcatatgtagtggattgttgtatattgcaaacgctggagattctcgggttgtgctaggaagactggaaaaagcgtttaaaattgtcaaggccgttcagttatcgtctgagcataatgcaagtcttgaatctgtgagagaggagttgcgctcgttgcatccaaatgatcctcagattgtggtcttgaagcacaaagtttggcgtgtcaaaggtattatacaggtaaaaatactttcacggtaatgcgagttgctgacttctagactcttttcttgcaagtagcttgactgtgaaagatacaactaagtaagccctatgcatgtataagaagaggatttttcgctagatataacccgtggctggttcttgaaggtttcacggtcgattggtgatgcatacttaaagaaagcagaattcaaccgggaaccattgttggcaaagttcagggtccctgaggttttccataagcccatccttagagcagagccggcaattacagtacacaaaatccatccagaagatcagtttcttatatttgcatcagacggcttgtgggagcacttgtccaatcaagaagctgttgacattgtgaacacatgcccgcgcaatgtaagattgccacttgctctttcttactctctctcgttttatgtgcaaatagatagaaagattgattgagaacatgtgggtatgcaggggattgcaaggaagctcataaaaacagctctaagagaggcagcaaagaagagagagatgagatattcggatctaaaaaagatcgatagaggagtgcggagacattttcatgatgatataacagtcatagttgtgtttcttgattcacatctcgtcagtcgcagtacctcacgcagacctctcctctccatctcaggtggtggtgatttagctggaccttctacttgactctactct

SEQ ID NO: 138122 - DNA, 1054 bp, Arabidopsis thaliana landsberg
tggtctcaccaatcaccttgattgcccacttgaagacatcgattccaccaatggtgagggagattgggtcgccaggtttcaagaccttgagcctcctcccttggatatgttccctgctttgccttctgacctcacctcttgtcccaagggcgccgctcgtgtgcggattcccaacaacatgattcctgctttggtcagttcttgttttcttatcacttacttgatagagttttaccctattagatagagtatatcatctatttaaactgaatttgtcttgcttattagcatcattcatgtagaggtgcattgattgtgttcctgattcctgaattttaatccatctgctttctttggttctgtgggtgcagaagcagtcctgttcttctgaagccttgtccggcattaatagcactccccaccaatcttcagctcctcctgatatcaaagtttcatatctatttcagtctctaactccagtgtcagttctcgagaacagttatggttctctctccacccaaaactccggatctcagagattggctttccctgtgaaaggcatgagaagcaagcgcagacgccccacaacagtgagacttagctaccttttcccctttgaacccagaaagtcaactccgggtgaatcagtaaccgagggttactattcttctgagcaacatgccaagaagaagcgcaagattcatctgatcacccacaccgagtcttccactttggagtcaagtaagtcggatgggatagtccggatatgcactcattgtgagacaatcacgaccccacagtggaggcaaggacccagtggacccaagaccctctgcaacgcttgcggagtccggttcaaatctggtcgcctagttccagaataccggccagcctcaagcccgaccttcatcccatctgtgcattcaaactcacacaggaagatcattgagatgagaaagaaggacgacgagtttgataccagcatgattcgcagtgatatccagaaggtaaagcaggggaggaagaaaatggtataaaagtaggggttagtgac

SEQ ID NO: 138123 - DNA, 5631 bp, Arabidopsis thaliana landsberg
  unsure (1)..(5631): unsure at all n locations
cgggggagctatacaaggcgattcgtctgataaaggattcgtgctctcgccaccaagactctgccctaattcaccgtgttcagggaactatctgcgtgaaggttgctgctgtctacgaggatctcgctacgaaacagaagtatctccgaaatgcaatcgaatctgctagaaaagctgtggagctgtctcctaactcgattgagtttgggcatttttatgccaacttgctttatgaggctgctaacgaagggaagagagagtacgaggaggttgtgcaagagtgccaccgtgctctctccatcgaatatccgattgatcctgctagagagagtcttcaggatgagactcagctgaagatattgacacctgaggctcgtattgctcatttccaggatgagctcaggtcactgatacagaagtctaacatttattcattgtccacttggatgcagaccttgggaaatggtgaagagaaatttaggttgatccctcttaggagaatggccgaggatcctattgagagtaacttgattcagtccaggaggcctaatgagattaaaaaatctaccaagactaatgaagagaggaggaaggagattgaagtgagggtagctgcgcataggttgttgcagcagaagtcagagtcttccccgtcggagaatgtagaagctgttaacaacaagggatcagattcagcattagccgcggggccaagaagcggggagagaagaaagcatgggaatgcaaggaaaaatggctccacagcggatagaagggatcgggttaggtcatactgggattatttgagcaaagaaatgaagaaagaattcctaagagttaagtttagtgatcttaagagtcactttagtggttcaaaggatgggctagcatatgagattgttagcgaggcactgtccttttgtgaggccaataagacttggaggttctgggcttgctgccggtgtagtcaaaacttcatagagtctgaggctcatatgcatcatattgtgcaggcgcacatgggtaacgtcttacctaagatgcaaatggttttgccacaaattgtcgacactgagaggattgatatgctttttaagtccccatggaaaccattggatctctctgctacactgaaattgcttcgaagtcagcagaaaatacaaaattctgagtttgatgaatttcactctggagataatatggatggtggtgacgattgcttcaaggatgcatggaatgatactacaccagatggagatacttgcaacggttggaatgagaatgaatctgaagaggaggttaagctatcgatcgcgtttcctcctcctgatggatggcctatatctgatgatcctgaacgtgcaaagctccttgaaaaaatccgtgcagcctttgagcaactgatcagacacaaatatttagctgccagccatcatgataaggtgatacaatttacgctggatgaactccagaatctaccctcggtttcgcaattcttaaatcgtggcttgaacaagtcacccttatgcatctgctttttgggagcttcccatctcagcaaaatcctcaaattcctgcaggacttatctcaggcctgtggattgagtcgatattctgaacaaagtaacccccacgatgagattaattttggtgacctgggtcgtgaagtcacagaggagattcttcttgatagtgaagattcatgtcttcttatggatgaaaaattgcttggcactgagtgcatccaagaaaaatatatgggctcagcatttaataatgtaactatagcaagttctggagatattgctaatggaaatgatgtgtcttctggtgcggatggatttctttcatggatcttcacaggaccctctagcgaggaacaagttgtgtcatggatgcgcacaaaggaggataaaactaatcaaggactggagatcatgcagcatcttgagaaggagttctatcacttgcagaacctctgcgagagaaaatgcgagctcttgagctatgagggagcactgcagactgtcgaagatctttgtgttgaagaaggcgggaagagggagacttcagcagaatttacccatgaaagctatgaaactgtgctgaggaaacgaagagaagagctaaatgagagtgaccatgagttgttgtttatcagtagcaggtttgagttagatgctataacaaatgttttgaaagatgccgaaactcttaaccacaatcaatttggatatgaagaatcatatggctgcactagttctcagcttcgtgatctggaatctggtgaagctgatgaatgggggataaaggattccttacatgaggctgacagtttcatagagattgcgattcagaaacaaaaagagcagttgtctgcagaggtaagcttttctatctttacgcaacaccactgcaataatcaattaatgcctttctgattttaaaataatctgtacatgtgctatcacagcttagcagaatcgatgcacaaatgatgcgaaatgtcactgggatgcagcaattagagctaaagcttggaccagtttcctccaacgattatcagatagtattgttacctttggtgaagtcctacatgcgggtaagtatctaactcttttgaccttgttactttttcttccattgtgttgctgtgttctttcaggttctaattggcatttccatcttaatctccccatttccctctctctctctctctctcttctctcntctctctccctctctctctctctccaggcacatttggaggcgttggcagagaaagatgccactgagaagtctgatgctgcaagagaagccttactttttgagctagctcttgattctaagaaggaggctcgaggaagaaatgataattcaaaaaacacgctggaaaagtcgaaggacaagaaaaagattaaagacactaggaaagtgaagaatttgaaggttcgaactaatctgttgtctactttttaggtatttcttgtctatatttgtaactagctctaatgttttgttataggctactattggaaacgaccatcgcttcaatggtgactcaattgaacacaggtgaagatctgccttgttcataatttttacttaagcgggtgtaacctggaaaatctttgtttctgaaaatgttggtggtttataatatgtcgttgatttacctgctaatttcttgttccagcccccttccggttgcacctgtcggcgatcattcagaggctgacattgtttctgaagctgttgaagctttaaaagaagaggaagaggaatataaacgccaaatagagctagaggaggaggagagaaaacttgaaaaaaccctagagtatcagagaagaattgaggatgaagctaaggagaagcacatggcagaacaacaaaagaaatacagctcttcagttcccatgaatgttgcaaagacagtgtataatgggtgcacagataatgaagttgattatttagttttacaaggacaagaaaaatccataaatcaggtaacaatagagtgacaaggtggtggagttatgttttttcaatcatcgcttgaaattaatttctggggttctttgctttaccaggagaaaaggaatggacgacttgatgacctggaaggagccagtgtgaatacaaatggagttttcccgtcaacaaatcattctgcgatatctgatactgcaaaggtgcagaatgtaaaatcccaaaaaggttagcattggtttcgaatatgaaaatatgtgtctactgacctttctgaggcacttatattgttttttcttttttttttgttgtagtagtgcctaacggcacagctatgcaagctggtattttccaatctgatcaacgaactgggaggagaactagacgccaaaaagcttcaaacaagttagctgatggaaaatatccggtcacacctcctgagaccgaaaatagtaaatctcagttgtcaggcaccaacggcgagagacattctgaaactctacgtagcaatggtggtaagactttatttttccaattattgtcctagatccttctctttgtctcgttgtttttaaagcattgatagtttgaattgtagatgatatgatatggatctatctgtcggaacttggaactaatgaaatagtttagatctctacaacaagtgtatcttgatttttgcgttctgtcaacgaggaatgacagtatttgcattaatttcaacactatttttttctaatattattgatctagcattcaatattgtatcctggtgatgtagatgcgggaccaaagacattaagacaattacaagctgaagacgatgaagaagaaagatttcaagctgaccttaaaagggcaaaacttcaaagccttggtaggttttcaaccatccttgtttacatatcatgtctgacaggcatttgtataaagcatggttactgtatacatataccacttccctccatctctgtacacattctttaatctatttcttgtagacatatacatatatcttttttttttctcatgctttgcttatgccaacagctgctaccttctcttttagaattttctgtgataatattggggtgacaaaggcccttgatatgaagcatctgacatcagcacattttgtttgaacccagatgtgtaccgaggtcgtagaaatatgacatcatgtttgaggacatctctggaagacaacaatgattgggttttatctgatgtcacaaaggaatctcagagttcgcccggagttgccatatttggcacaggtcttcagaatgaagttggcgaatacaattgctttttaaatgttatcatacaggtaatcttcacttctcataaactgtttagttttttgggtatcaatgtctataatttccagcttaaaagttttccgtttttttatttattttgattttggtatgattttagtctctgtggaatctggggatgtttcgggctgagttcttgcggagttcaacactagagcaccatcactttggagatccttgtgttgtctgctcattgtatgcgatttttacagctttaagtactgcttcgagtgaaacacgaaaagaacctgttgctccttcatctctcaggattgctttaagtaacttgtatcctgatagcagtttcttccaagaggtaaagaatcaatctctggttttacagtttaagctttttgttttcataaaggagcctaaacttgggcgtcatatggtggacaggctcagatgaacgatgcttcagaagtattggccgtaatcttcgactgccttcatcgctcatttgctcaaagttcaagcgtgtctgacacagaatctgctgagagcaacagtacgggctcatgggactgtgccaatcgctcatgtattgcccattctctgtttggaatggatgtttctgagcaattgaattgctacagctgtgggctggagtccaggcatttgaagtacacttcctttttccataacatcaacgctagtgccctacgcaccatgaaggtatcatatgagtgttcattagacgtgcgttttcgcatatattattagattattcactttggttttgtccctctttacgcctaataggttacatgcgctgaaaattcattcacgaacttctaat

SEQ ID NO: 138124 - DNA, 2033 bp, Arabidopsis thaliana landsberg
tttgaaactgaatatcttatttccacgtagattgtatattagtttaatttgattgttatatttgtaaatgtctactaaacaggaattggatggtgaggaggcaaggcttgtggattatttcgatgtcatctcacgaacaagcaccggaggtttgatagtggcgatgttgaccgcacaagaccaaagcggtggccatagccgcaacagcaaccgccctttgtttgaggccaaagaaatcgtccctttttatctcaaacactcacccaaaatctttccacagccacggtactgttcttaactgtttccgtttaatctgattcagagtcttatttcagagaattataaaatgtgcagagggatattctgtggttggggtgaaaccatagtgagacttgtaggaggacccaagttcaacggtaaatacctgtcatgacttagtgaaggtttcttgggcgacacaaaattaactcaatctttgacaaacgttgtcataccttgcttcgacatcaagaaactccaaccagttatcttctcttcttaccaggtaacaccaaaatctatctgtctacgtgaatattcgtgcaactgtatcataaggtatatacattgatccaatctcataaatacataggcggtgaataatcaagctatgaacgcaaaactatcagacatatgtataagtacatctgcggcaccaacttttttcccggctcatcgattcaccaatgaagacagtgaaggaattaaacatgaattcaacctcattgatggtgcatcgctgccaataacccggttaactcaaaactcaaaaacctaaatctcaaaaccctaacttgtccgtaattattgacgtttctttttttcagacgttatgtgccattgcggaagtgacaaaacagataataaagaagaatcctgtaatgggagatataagcccattagattttacgaggtttctggtgatatcgataggtacaggttccataaggaatcaagagaagtacaatgcgaaaatggcatcgaaatggggattgatgtgttgggtctttgaaagtggatcaactccaattcttgattgttacagtgaagctattcatgacatggttgattaccaaagctctgtcgtctttcaagctcttcgttccgagaagaattatttacgtatcgatgtgagtttcttccttgattagggtttgatctgtcacatttcgatttcatattaattggtaactgtaattgcagactataactcttttggttttggttaactaattacttatatcccacgctaatgatagaaacttgatggttatcgaaactcgatccgaactttattgtttttttactttgaattgttcaacattccgattttaggtcataagaactcatgtcttatcttataaacaaatgctaaaaaagatttcttgtaaagattggtctatatatggtacttttcttgtacgaaacaataagcacaagtaacaaataaagtattattgtcagtgaagggtcaattttattgaccaaaaatataaaataatttactgacattttaaatgtttttttcctattacaggatgattcgttgaagggtgacttaggttcagtggacatatcaacagaaaagaacatggaaggtcttgttgaagttggtgaagctttattaaagaaaagagtctctcgtgtcaatctcgaaagcggccattatcaacctatttccgaaaatgtgactaatgaagaagctctcaaaaggtttaataatacttgtatctaaagcagaaaatattcttacttaagcatacaataatagtggatttaatcagtaaaatactgcctaattattacaggtttgcaaaagttctgtcagaagaaaggaagctcagagaatcaagatctcctaaactcaagatatgattttttacttgtcctaaaaataatgtaaaacttgtttgtatctgtttgtgtgactagtaagtaactgttcgcatctgcttgtgagcaaaacaatatttgaataagaatatgattcttac

SEQ ID NO: 138125 - DNA, 3379 bp, Arabidopsis thaliana landsberg
atctcccttcttcttccttcactcttctctccccaatcgctaaaggtactgtttcttctcttcctcagttccccctctccctctcactcccgcaatcttcattcgtttgaattcgatttgtctggagaaattttcaggatcagagagtgttgtttatgaagcgattctcgatggccgaagagtagcagcgaagaagcctatcttgtctacttccgatgaccttgacaagttccacaggaatttgcagctctcatggtctctctttcattttccatttccattttaaatttcgtaccattttcaaaatgttgtttttttcttactttgctgtggattggtgaagcaatctcaatcatcctggtgtggctaagttactagcagcacatgcgaagcctccaaattacatgtttttctttgagttctacgagtctgggactttagctgagaagttgcacgtcgaggagtggtctccgagtattgatcaagtgttactgatcacgcttcacttgggtatgtgactctacttgtctcaaaggaaccttcttttttgccattcgtgtgtgactctgacgatttcttcttcttgtcataaacttttcaatggttactaatttgaatatctgattctatctgtttcgtttttttcagcaaaggcattgcaatatcttcacaacaacgggattgttcatagggatgtgaaaccagcaaatgttcttgtaattctcttcttccattctctagattctctatcttgttatgtgcttatttcatataggataggtacttcttctgtttctttatgaaatttgtttgtgatgcttaagtgagcttttgttgttgcagcttgacgagaagcttttcccatatctggctgactttggtttagctgaatacaagaagaatttgcgcgaagttaatctgcagaattggagatcgtctgggaagccaactggtggattccacaaaaagaatatggtcggaacacttatttacatggcccctgaaatactgaggaaagacatgtatactgagaaagcagatatttatagctttgggattttgatcaagtaagaattatctttgagtagaaattgtaaagttttttcttcgtattttcttacattcaacttttctttagatcttatatttcgtttggagtatatttagctttcttcctaaaagatccctgtggttatgaattttttttccatcttacattgcagtgagcttttaactggagttgttccatatactgatcttcgtgcagaagctcaggttaaaattttctttcctcatttcgcattttgacattattatctctgggagaagcctttatatacgatatactgtattttcatatattcaggctcctgaattgcattcatttgccgttcaatgatattgctatatcttggcatgcccaattcttacgatttctgtgataaatatatatgattttatggacatatagcagtttatatgaatgcattcttgttcttttcattcatgacacatagtttttccctttgcatatcttgatggcaggctcacactgttttagagatgaattacacagaacagcaacttacagttgccattgtgtcttctggtctgcgaccagctcttgctgaaattggattgcaccttccaaagagtttgctatctctgatacaaaactgctgggaatctgatccttctaaacgaccttcttcggacaatgtggttttggaactagaatcaatttgggaacaagtgagaggaaaacagcaaggtcatctccttgagaaaacttctaattcccagagtgatacggatggggcggacatcattaaaaattcaggggattacagggacaccgttaattggtttagtcaaggggagtgtttatataagaaatcgtctgtttccactgtctttgatgtgaaattatggtctagttcaacagatgaaccttcaagatatgtcccagtaatttcttgtgggtcttttgcaacatgtggaagaagagaatccatggaagatacacacttcatcataccgcacatgtgtaatgaggaaagcatccacttatttgccatcttcgatggtcatagaggtataccaactgccaattttatccaggacgcattaaactccaaattcttacttgtgccctctctctttttactccaaattctttagcaatccatcaaataggatataaaatagcatcttgaatgacatgcaggcgctgcagctgctgaattttctgctcaagttttgccaggactagttcaaagcttatgttccacaaggttaatgctcagttcaatcttttcatattctcagcatggtttgttcgaaaaacccattggcatgtttcattttcagcgctggcgaggcattgtcacaagcatttgttaggacagatttagctttcagacaagaactggattcccatcgtcagtcaaaaagggtgaatcagaaagactggcatcctggttgtactgctatagcctctctcctagtagagaataagcttttcgttgcgaatgttggtgactccagggcaattttatgccgcgccggtcacccttttgctctaagtaaggtgagatgagactaccataccgaaagtgagctaagtttgtattctattggtgccctcttttccatctccccgcataaatcaacttcgccattggtactcaggcacatcttgcaacttgtattgatgaaagaaatcgtgtgattggagaaggtggacgtattgaatggttggttgacacatggagagttgctcctgctggacttcaggtttggtcgttatgtacttgatagacttccttaaaatgatatcaaagtaatagctgagattagaggaaaatccaaaatgatgttggtccattttttgaaaatcctgctttgtaacaggttactcggtcaataggtgatgatgacctgaagccagctgtaacagcagaaccagagattagtgagacaattctatcagctgacgatgagttcttggtaaattgtatcttactttcgtgtcatatatatgcaactttgattgtttattagacggttgagaataataataggttgaatgtggtaggtaatggcaagcgacgggctctgggatgttatgaacgatgaagaagttattggtataatcagggatactgtaaaagaaccttcaatgtgttcaaagagattagcaactgaagctgcagcacgtggtagtggtgacaacatcacagtcattgtagtcttcctgcggccagtgtctacagccgaaaggatctactagtagtatccaattcttgcacattattattcaacattcaacttctttacatataaattaattcatgtgtgttatcaaaatgaaccttat

SEQ ID NO: 138126 - DNA, 784 bp, Arabidopsis thaliana landsberg
tgcttacccagctgctcgcaagaggacttgtaagaactctcttcattgttttaaaaaaacattctctgaagatgcgtttcattttctcgatctagatttgcttttgtgttttaatattcattctccatgatcgtgcttgagtctgatatgcatttggaccaatttgtatattcgttctctaacagaagaagcttatctatgtagctcgattgacatgtctattagttttgtttattatagcttgaaatgtttaaactttatcagttctttaatgtctttgcttcaattgattggttggaatttgagggattatctatgttcatttctgtctctgagctcaattcttgtctctttggttaacagacaactggagtgtgaaggccatcaggaggaagactactggtaccggaaggatgaggtatctccgtaatgttcctcgtcggttcaagactggattcagagaaggtaatgtatcttagtcttaagtttgttttctcttccagtcgaaatgtggttttgatggcacatttcttgtctttacataggtactgaagccaagccaaggagcaaggcatcagcttcatcagcttaaagagccagttcgagtagtctctcaggaaggactaaagcttagcattttttgcattcaactagttgaagattacttttcatgtggatctcatacattatgttatgtgggttttgtttcttttgttattcacttataaagttttgaacttggtttaaatatcatcttacatttgcaaccttaacaagccttctt

SEQ ID NO: 138127 - DNA, 1173 bp, Arabidopsis thaliana landsberg
caacaacggtcatttgcgaatttcgaacaactctttcaataaaagcaacaaaaagatcgaaactttacagtcgtaggaaggaaaaaaatggtgagaaagcgaagagttgtagtggggatcacaccagatccatgtgagacaaagaagaaaacgaaaagcaagcgaagaaagagacttagtaaggaggaggaagaagaagaagagggaacacctctcagaggtatattttgtctcaaaacacgacaagatatgaagattttcgaagagaaagaggattgctttatcctcgatttcgatcccaacgattcatttgatgcacgaaagctctccgatagccctgcatctgaatgtgacgacgacgtggcgattgtccatgagaaaggccaggtttggttattaggattcttgggtcctctgttttgtctgaaaattttgaggcttttcacatctttttagcacaattagtgatttagggtttatgtctctgttttcgaatatttaggtggcttgtagggattttccacatccaaggcatctctgcttgaaattcccctttgaatcaagtcaacactcatcacattgtaatcaggtaataatctatttggatgttgaaaaaacttggtcctttttttagttgtttgggtttgagatttggtgtaatgtaacaacagagtcttatgattgagttaatgtttactgtgtaggggtactgctatgtctgcgatgtggttgcgccttgagcatattgcacggctagtgatgctacaccgcactgtgaggcattagagaacagtaaatggaagcctatactcaagttgtaccggaaccttcctgctgctggccttcgtgtgaccaccaagaagtgaagacttctgtcatgtggtgctgtgattgatgaataagagtaatgttgtgctctatttccctcatcttcagctgtatatttcgtttactgaagaaactttttttttttgtaaaatcggttattgagtttgatatataaatgactttagatctcactcttcgtatgactgatagtcacagactattgaccatcactagattggagattacaagttgtggaaaaaaaaaaaacagtttgacacaccaagatttacaaagtgagatagaatctaacgaacttgaacttaaaagtcatcgagattagaagag

SEQ ID NO: 138128 - DNA, 876 bp, Arabidopsis thaliana landsberg
agttctacggcggtggtcctttcattgtttcatctgatggttttttcatcgcctgcgcctgtggtgacgtcattaacatcgttgattctacggattcatcagtgaaatccacgattgaaggcgagtcggatacgctcactgctttagctcttagtcctgatgataagctccttttctctgctggacatagtagacaaatccgagtttgggatttggaaaccttgaaatgcattcgctcttggaaggtatatatatattgtactaactgatattgaattaggtttctcttttttaaaaaatttgatttctaaatatgattattgttgtccttgtggtgttttagtctataatttgtgcttaatgatgagcagggacacgaaggacctgtgatgggaatggcttgccacgcatctggaggattgctagctactgctggagctgataggaaagttcttgtttgggatgttgatggtggtttctgcactcattatttcagaggccataaaggggttgtgtcaagtatcctcttccatcctgattcaaacaaaaacattgtatgtaacaattccgtctatgggtcaaattatctgggagtagtatttgtgttataaagggatagagtttctcgattataaagagatatgttattcttgtaaagctatattccacttttgtttgatgataagagtgtgttcttgatggtgtggtgtagcttatctcgggaagtgatgatgcaaccgttcgtgtctgggatcttaatgcaaagaatactgagaagaaatgtcttgccattatggagaagcacttttcagctgtgacttcaattgctctatcagaggatggattgactttattcagtgctggaagagataaagt

SEQ ID NO: 138129 - DNA, 4784 bp, Arabidopsis thaliana landsberg
agtactggaatacaggcaaaataattactattaggtctaatgtagttattagatctaataagtataagttccttgtgtcagaattgagaaattctatggctcgaatctttagtattctcttatttattacctgtgtctactatttaggcagaataccatcacccatttttactaagaaacttaaaggaacctcagaaacgggtgggactaaacaggaccaagaggtatccaccgaagaagctccttttccttctcttttttcggaagaaggggaagatctggacaaaatcgatgaaatggaagaaatccgagtgaatggaaaagacaaaattaataaggatgatgaattccacgttcgaacatactataactataaaactgtttctgaaaatctatatggaaataaagaaaattcgaatttagaatttttcaaaataaaaaaaaaagaggatcattttttatggtttgaaaaaccatttgtaactctagttttcgattataaaagatggaatcgaccaaaccgatatataaaaaatgataaaattgaaaatattgtaagaaatgaaatgtcacaatattttttttatacatgccaaagtgatggaaaagaacgaatatcttttacatatccccccaacctttccaccttttttgaaatgatccaaaaaaggataccttcatttacaaaagaaaaaaaaacctttgaccaagtttctacttattggagtttgatccatgaagaaaaaagggaaaacttaaaaaaagaatttttaaatagaattgaagctttagataaggaatggtctgttgaaaatatactggaaaaaacgactcgcttttgttataacgaagctaaaaaagaatatttacctaaaatttatgatccttttttgcatggaatctctcggggaagaatcaaaaaattacctccattccaaatcataaccgaaacctatagaaaaaacaatttaggaggatcctggataaacaagattcatggtctacttctgaagattaattataaaaaatttgagcaaacaatagaaaaatttaatagaaaatctttgtcaatagagaaaaaactttcttttttttcagaaccccaacaagaagaaaaaattaattcagaagaagaaatcaaaactttcaaatttttatttgatattgttagaactgatagcaacgatcaaacgcttataaaaaattttatggatttccctgaaatcaataaaaaagttcctcgatggtcatacaaattaataagtgagttggaagaattggaaggcgaaaatgaagaaaatgtaccaatggagcctggaattcgttcaagaaaagcaaaacgtgtagtggtttttactgataaagagccacatggcgagatttatactaatctcaaagataatcaaaattctgatcaaaacgatgaaatggctttgatccgttattcgcaacaatctgattttcgtcgagagataattaaaggatccatgcgttcccaaaggcgtaaaactgttatttgggaattttttcaagcaaaagtacattccccccttttttttgatagaatagataaacttttttttttttcgtttgatatatgggggctaaaaaaaaaaattattaaaaatttcatttggaaaaaaaaaattgataaaaaagaagaagaacaatcaaaaagagaagaaacaagacggatagaaattgcagaaacttgggatagcttcctatttgctcaaataataagaggttctctcttagtaactcaatcaattcttagaaaatatattatattacctttattgataataattaaaaacagtgtccgtatgttattatttcaatttcccgagtggtcccaggatttaaaggattggaaacgtgaaatgcatgttaaatgtacttataatggggttcaactatccgaaacagaatttccaagaaactggttaacggatggtattcagataaaaatcctatttcctttttatcttaaaccttggcataaatctaaatttcaagcatctcagaaggctcgactaaaaaaaacaaaagacaaaggagaaaaaaatgatttttgtttcttaacagtttggggaatggaaaccgaactaccgtttggttctgcccaaagaaagccttctttttttgaacctatttctaaagaattaaaaaaaagaatcaaaaaattaaaaaaaaagtcttttgtggttttaaagattttcaaagaaagagcacccattttcctaaaagtcgcaaaagaaactaaaaactggattctcaaaaactttatttttataaaaggaatttcaaaacgaaatctaattccattatttggcccgagagaaatatatgaattaaatgaacctaaaaaagattcaataataagtaatcagatgattcatgaactatctgttcaaaataaatccttggagtggacaaattcttcacttagcgaaaaaaaaatcaaaaatttgattgatagaaaaaagacaatcagaaatcaaatagaagaaatttcaaaagaaaaacaaaacttaactaatagttgtaccaaactgcgttatgattctaaaataattgagtcatcaaaaaaaatttggcagacattcaaaagaaaaaatacccgattaattcgtaaatccatttttttttttaaattttgcatcgaacaaatgtctatagctatttttctaggtatcattaatattccaagaattactacacaacttttttttgaatcaacaaaaaaaattcttgataaatatatttacaagaatgaagaaaatggagaaaaaaaaaaaaatactctttattttatttcgactataaaaaatttaatatccaataaaaaaaaaatgagttatgacctatgctctttatcacaagcatatgtattttacaaattatcacaaattaaagttagtaacttttgtaaattaaaggctgttcttgaatataacatatgcataacatccttttttgttaagaataaaataaaggttttttttcaagaacacggaatctttcattatgaattgaaaaataaaacctttttgaattccgaagtaaatcaatggaaaaactggttacgaagtcagtatcaatacaatttaccccagatttcatgggctagattagtaacccaaaattggaaacataaaataaataaagattctctagttctaaacccaagtttaaccaaagaggattcatatgaaaaaaagaaatttgataattataaaaaacaaaaattttttgaggccgactcattattaaatccaaaacataatgtaaaaaaagattctatatataatcttttttgctataaatctattcattctacagaaaaaaattttgacatgtctataggcattgccctagataattgtttagtctcttcttttctagaaaaatataatattcggggtatgggggaaattcggcatagaaaatatttggattggagaattcttaacttttggtttacaaaaaaagtaactattgagccttgggttgatactaagagtaaaaaaaaatatattaatactaaagttcagaattatcaaaaaattgataaaataacgcagacggatcttgctaataaaaaaagaaacttttttgattggatgggaatgaatgaagaaatactaaatcagcgtataacaaattttgaattttttttctttccggaatttttcttattttctagtacatataaaatgaaaccatgggtcataccaatcaaattacttcttttaaattttaatgaaaacataaatgttaataaaaagatcattcgaaagaaaaaaggttttataccatcaaatgaaaaagaatcccttcgattttataatctgaataaagaagaaaaagaatcggccggtcaagtagaacttgaatcagataaagaaacaaaaagaaatcccgaagcagctcgattaaaccaagaaaaaaatattgaagaaaattttgcagaatcaacaataaaaaaacgtaaaaataaaaaacaatacaaaagtaatacagaagcggaacttgatttatttctgacaagatattcgcgttttcaattgcgatggaattgtttttttaatcaaaaaattctcaataatgtaaaagtatactgtctcttggttagactaaacaatccaaacgaaatagcggtatcttctattgaaagaggagagatgagcctagacattctaatgattgagaaaaatttcacttttgcaaaattaatgaaaaaaggaatattgattattgaacctgtgcgtttgtctgtacaaaacgatggacaacttattatatatagaaccataggtatttcattggttcataaaaataaacacaaaataagtaaaagatacaaaaaaaaaagctatattaataaaaaattttttgaaaaatccattacaaaatatcaaaacaaaactgtaaataaaaaaaaaaataattatgatttctttgtccctgaaaaaattctatcccctaaacgacgtagagaatttcgaattctaatttgtttcaacttaaaaaaaaaaaatgctagggatacaaattcaagatttgataagaatattcaaaacttgaccaccgttttgcataaaaagaaagatcttgatcttgataaggataaaaataacttaattaatttaaaatcctttctttggcccaattttaaattagaagatttagcttgtatgaatcgctattggtttaatactactaacggaaatcatttcagtatgataagaatacgcatgtatacgcgatttccaattcct

SEQ ID NO: 138130 - DNA, 3287 bp, Arabidopsis thaliana landsberg
  unsure (1)..(3287): unsure at all n locations
aaaaaactatcataagtgttgttcgtttggtagtcacaggatgcctgcgactgcgactgaaagttgatcgtttgacagtcgcaagatcctgcaactaatcgcgcgatcaatcgctgcggcttgcgactgaattttttgatcgcatgaaaaaagagcgacgcggctttttaaatggcgattaatcgcagcgattggtaaacgaacaacatcctgcgattttaaaatcgcaatcgcaatcgcagccacagccacagccgctagcgattatgaaacgaacagtgccaaagtaaaaaagaaagaagagagctctctcaccagttagcatgacagaatgtagccgtcacaaactgataccatgccggaaaattgtgatacaaatacaaagatttgatcccacgaacctaaatcgaataaacaatataaaacgtatgataagataagcacgtcacaattcaaagagatgggattacacgaataacgttttacagtgtagatgattgatatctaaagacaagctttcatacctgaaagaagtgatcagcaagatatatgcccagattgataagtatgatccaaaatatgccatttgctcgcttttgtggttttcgattgtcttttgctttatccaattcaaattgtggcgtaatatctgcaaaacttacaatgatttcgttgaagatgaagaagatgttgctaagaatctaatacaatcacttggaatgtttcattagatcgaaaaaaagaaagaaaaaacgataagtctcaccggattggctgaatctgcaagttatttgagatctagagactgtgagaggacgaaactgcagggggggttgagttgagttagttggcgacgaagctgcacgtcggcgatgtaaaggcgggaatctgaaacgaagagatgattgtggaagagagagacggtgaaggtgaagaagctgagacattgagatttgagagagagtcagagtacacaaaattaatttcgattcagttttggtctaattcggtaaaatagataaacaaccgaaaaataaatcgagatataaacaaaccggtggtaatcgttcatttagtagtaaaagcaaaccggaggatagacccggtggtaataaggaaaccctaggcggtggaagtgagttgaagagttaacattgttgcggccgctaagaattgatccggcgagaatggcgagcagcaatgagtacgaggaaggtccaggggagagggagagtgggtacgacccgaatatggtgccggattcggtgaaatcgttcgtgtcacacatgtacagacacataagggacaagaacgtgtacgagatccaccagatgtgtgagacatcgttccagagcatatcggagcgtctgttcaaggacacgccgtggccaagtgtggaagcgattgctccttacgtagacaacgaccatgtgttctgtcttctgtaccgtgagatgtggtttcgacatttgtatgcgaggttgtctccgacgttgaagcagaggattgattcttatgacaactattgcagcctctttcaggtctgttgtggaattcttctacttcttcttccttgttagatagagatgttgttgattttgatttcttttgtgtatgtattggctgggaataaatacaagtaagtagaccttcttccgtttgttctttctaggttgtgttgcacggcgtagtgaatatgcagttgccgaaccagtggttgtgggatatggtggatgagtttgtctaccagttccaaagtttctgtcaattcagagcaaagctcaagaacaaaacagaggaggagattgcattgctcagacagcacgataaggcctggaatgtctatggcgtgctcaacttcttgcaagcacttgtggagaagtcttgtatcatccagatccttgagcatgacaaggatggccttgagttcactgagactgatggctacgatttcagcggtggcagcaacgtcttgaaggtcctcggttacttcagcatggtcggtctcttgcgtgttcactgcctcctcggtgactaccacactgctctcaaatggttgcagcccattgacatcactcagccaggtgtttacaccagtgtcattggttgccatatcgctactatctaccactatggatttgccacccttatgttgcggaggtatgtcgatgctgttcgtgagttcaacaagattctcctctacattttcaagactaagcagtaccatcaaaagtcacctcagtacgagcaattactcaagaagaatgagcagatgtacgctttgcttgctctctccctctccctctgccctcaaactaaactcgttgacgagtctgtcaactctcagctgcgagacaagtatggtgaaaagatgatgaggatgctgaggtctgacgacgaggcctttggtatttatgatgagctcttctcttacgcatgccccaagtttatcaccccttccgcaccaccaactttcgaggaacctcttgtcaattacaatcaggatgcatacaggcttcagctgaagatgttcctttacgaggtaaagcagcagcagctcttgtcgggagtgcggactttcctgaaagtctactcctccatttctcttgctaagctcgcaaactacatggaagttgatgagcccactctaaggtcagggactaactatgggcattcttataactattattaccaaatctacttctctctttttctttgacatgtacggggttttaatttgcaggaccatattgttaacatacaagcacaagacccattcagttgattccgatggtaggatcatctccaatgcagacattgatttcttcatcaacaacgtatgttctttcttctctctctgtctttctgatatcgatactctggtgcttttacaacgtttgtaacaactctaaacctggtgacactgcaggacatgatctacgttgtcgaatcaaaacccgcaaaacgttatggtgatttcttcttgcggcagattgccaaggtatgttgtataaactgaaactaagactcgtgcacatcaactcttgttttgatttttgggtctttttctttttttcctccnnnnnnnnnnnnnnnnnnngatcaacgacatggatcgtgtcaagctggaatgacgacttttctgtgttatacctaatcatcaatgcccaatctgatatgatgctttctcttataaaccatatgtttacttaaagccaaacacttttttgagtagctgtcttcatgtggtcaaatgataaccataaatcatctttcttatggattat

SEQ ID NO: 138131 - DNA, 1549 bp, Arabidopsis thaliana landsberg
tctagcacggtagctatattcatacgtctgtttaataaatagcatgccgaagaagaagtaatatatgggtgtatgtaagaaacccctttaaatatatgcaaataccgatcgtcagattttttgtatcatgcatatagaatgatgttcatgatcttatagaagctataaattgtaaaatgatacatatcctgtatatgatggtaattaataatgtattacccatgaacgtgcatgaataattctatacacacattacacatacgtggaaatgatacagattttgatcttatatgtgttatgcatagatatgccaagagcattgcaagcaccagacagagaacacccgtacggaactccaggccataagaattacggacttagtgttcttcaacagcatgtctccttcttcgatatcgatgataatggcatcatttacccttgggagacctactctggtatgtctatatagtatatatagatatttcaacttcaaatttttcgttagtattatatgtacaaaaagttgatcccaaccggtgattaggactgcgaatgcttggtttcaatatcattgggtcgcttataatagccgctgttatcaacctgacccttagctatgccactcttccggtaacacctctcctcctctgctgacatatatcgcaaaactttgattgattctactctagactcggaaattatcatatccaaatccgttgtccattttgttagtgttctacttgattatatgcaggggtggttaccttcacctttcttccctatatacatacacaacatacacaagtcaaagcatggaagtgattcaaaaacatatgacaatgaaggaaggtgagtgaccatattatcttgaaaaaaacggttgactgatagaaaatatgatgactgatgcatatggtataacttccgtatgcttttcaggtttatgccggtgaatcttgagttgatatttagcaaatatgcgaaaaccttgccagacaagttgagtcttggagaactatgggagatgacagaaggaaaccgtgacgcttgggacatttttggatggtacaatcacagcattagccttcctttttcttaccctttcattagtttattgaatgcatgtgttaaactaaagtattagtcaatgttgttgtagttataatgtttggatctacatgtatgtattaggatcgcaggcaaaatagagtggggactgttgtacttgctagcaagggatgaagaagggtttttgtcaaaagaagctattaggcggtgtttcgatggaagcttgttcgagtactgtgccaaaatctacgctggtatcagtgaagacaagacagcatactactaaaagtatcctttatgttaagtaattgatcgagccattttaagctaataatcgatcaatgtgaagcttgtgcctatacggtaaatgaaggttcgggtagtagtatggacttttggtctaagagatctatgtttgtttttgtttttccagttctgtatggttatactataagttgcagctctaaagaaaagcttctgt

SEQ ID NO: 138132 - DNA, 1148 bp, Arabidopsis thaliana landsberg
tatttgaaactctagaaatagctctatctggagtcttccttttttttgctccatattgttctgttgagagtaacaccatgtgataattaaaagattggttttttttaatgctaatgtctgatttaagcgccagatgtgtttgagtcgcagactcacttggttactagttgaagttatgctgacgttctctgttttatgtagatttggttgccatagcagagaggatgagcactgttaagcacaagattctggttttgtctggcaaaggtggagttggtaagagtactttctcagctcagctctcgtttgcccttgcgggcatggatcatcaagtaggtctgatggacattgatatatgcggtccaagcatcccaaaaatgttaggacttgaagggcaagagattcaccagagtaaccttggatggtctccggtttatgtggaagacaaccttggtgtcatgtccataggtttcatgctccctaactctgatgaagctgtgatctggagagggccacgcaagaatggtctcatcaagcagttcttaaaagacgtctactggggagagattgattaccttgttgttgatgccccaccaggaacctcagatgaacacatctccatcgtccagtaccttctacccacggggatcgacggtgccatcattgtcacgacaccgcaggaagtctccttgattgatgtcagaaaagaagtgagcttttgcaagaaagttggagtcccggtgctaggagtagtagagaacatgagtggtttatctcaaccgttgaaggatgtcaagttcatgaagctggcgacagagacaggctcctccattaacgtgactgaagacgtaatcgcttgcttaagataaaagcgcaccagagcttctcgacatcgtggcttgtagcgaagtgtttgacagcagcggaggcggtgcagaaagaatgtgtcgggaaatgggagtaccgtttcttgggaaagttcctatggatccacaactttgcaaagcagctgaacaaggtaagtcatgctttgaggataacaagtgtttaataagcgcacctgcgcttaaaagcatcatacagaaagtcgttccttcaacagtgatgaccgagtgaagaataagaagaagaagaagaaacttatgtaa

SEQ ID NO: 138133 - DNA, 1676 bp, Arabidopsis thaliana landsberg; identical to SEQ ID NO: 3472

SEQ ID NO: 138134 - DNA, 4970 bp, Arabidopsis thaliana landsberg
gaaagtttcttgttacaaaaatgagagctattcaaactcatgtgataaccttctgcatgttagtcatcatcgtaacatcatcaacaagagcccaaaagagtcctcatgtgcctaacaaccatgaactttctatcgccatcgaagaaatggagaaagcaaattacttctcttttgtgatgctcatcaacatgttaccatccgtaaatcctcgattcttagccaatgtcacattcttgatgccaaaggacaaaaccctttctacatcaaacattattaatcaacaagattcggttaccgagttcttgcttcgccactcaatcccttcttctcttcttttcgagcaccttaatctcatccccaatggctccattgttccttcctctttaccacattacaccctcgagatctccaatggtggaagatcaaactactttctcaataacgtcaagattataagccgcaacatatgtagcttaggctctatcaaatgtcatggaatcgacggtatactacaatctccaagtactgtcgacgacgattctcctcgaaataatcacacattacccttcatttcttgccctagcagtcacaacaatagtgaccaaaatagtcataacaatagtgatcaaaatagttctcgtcctgctgatcatactcttaccgctcctcctccagtcagcagtccgattagccagccaaaatcagattctcctagcatccatgacgtgaaaatgctgacttcgatcgttattcctttgtttggattattagcgagtttgatcggcatgtgaagtataatactgcacataccacatataacacttagttacgttgtgtcattgtgtgtaatagtactctcttgttatagtttatatttactatatacatgtaaaagaaaaaaaacgatgaaccttattgtaacaatcagttaaattatgagtttagtttttaaatttcctttataatatttctttagagactttcctccaaaattatttgtctgacaaccctttcattgtactcggcctggttagatataaataataaacttatgcttacaagttttacatgatactatctattatggtatatattaataaaacaatattatatttaaaaataaatcacacaaattatacactaaaaaaatttgaactttataaaatgataacttatttttctaaaatgaaattataacttttgttaaaaacaagaaacaaaattatttaaaacgtctatcaaatgagtcgggtattcgggtcaagtatccagacaattgggtaaaaccgacccaagatctaaagtcttttgttttcctttcctttcgcagagaaaccctactaaaacctttggcaactttctctgcctccatttctatggattcgaatttcttgttcatcaagccaatttcgtcctcttaaatcctctttacaccaatttttaaaatccccttaaaatcggtaagaaccctagtctattctctcttcatttctcattccctttcgaggagacaaatggctcagaaaattgcgattggtgtgatctcagccctagctgcctccgcttctctcgcgccgtcgaaattcgctgctgcagatggacctttcactttctctggcttctccacttctccgtctgcttcgattcctcagcagcaaggttctactccgccggcgtcggaatctgggaaagaaccgtctgttgctggcgaagaatctgatgctcctcctcggattcggaacaataatccgagaacaacttcagctgggtttgatccggaagcgttggagcgaggagcaaaggccttgaaagggatcaacaactcagctcatgccaaaaaggtcttaagaactaacccaattctgttatttatagaagctatacatagatacttccgactagagattctcaagtagataagagttgtgtatggtgtagccaatggaagataagttcgagctattaagttttctctagtagtattctgggatggatgtcaatttttttttcctgtgtttatcagtcatgcttggcctcacgattgatgatttggtttctgataggtatttgaaagtattaagactcgagaagagacgaggcaggctgagtttaccgctaaggcgcaggagtttaaagctatgcaatcccaagctgaagctgtgagtttaaagctatctatctttgtgttttagttacttatatcgtataggtgttctttcgtagaacctaccagaatcaactttgcagcgacattgtaactatatccgttgctgttacatttttgttgcatcattcattattttactttgaagattcttgttttgtaaagttatgttcctgacattttccatttcgcaggagaggcaaagggtgatatatgaggaacagaagaaacttgctcagcaccaagcacaaacaaaatcacagatggcccgctatgaagatgagttagcaagaaaaaggatgcaggcatgcgattctacatatactttttatttatttatttaacattgggaaattttattctctccaacaacttatgctgtgtatcttgttacaggctgagaatgaagcccagaggacaagaaaccaagaacttgtgaaaatgcaagaagaatcagcaattaggcgggaagtagctcgacgagctactgaggaagagattcaagcccagagacgacagacagagagggagaaagctgagattgaacgtgagacaatcagggtcaaagctatggcagaagctgaagggagagctcgtgaatcaaagctttctgaggatgtcaacaggagaatgcttgttgatcgtgcaaatgcagaaagagagaaatgggtttctgccatcaatactaccttcgatcatattggaggtcagacattagtgataaacagtatctctctatcgttttttttcattcattgtagaagctttcctgtggcagtttaccctggtagtaattagagtctagaagtatttataataggcatgtgactctcttaaatacttctatgactacacttttaaataaatgattgactctttacccgttttcctaggggggttgcgtaccattctaacagatcaaaataagctaattgttgctgttggaggtctaaccgctcttgcagctgggatctacacaacgaggtaaagactaaaaatggttgagaaaaagtgccactcatgagttcttgtcgttaaaggttgaggaactcagtcatcttatagattgcttgttgcagagaaggtgccaaggttatctggagctacgtagatagaatattaggacaaccttctctaattagagaatcatcgagaggaaagtacccttggtctggttctgcttctcgtgtcttgtccacattgcggggtggtggtaaggagtctacttccaaaactggaaaagggtttggtgatgttatcttgcgccctgctcttgaaaagagaatcgaacagctagctaatgcaactgccaacacaaaagcccaccaagcacctttccgaaatatacttttctacggtccaccaggaacagggaagacaatggctgcccgagagctggctcgaagatctgtatgtattccctacatttctgatgcttacagttattatatcatgtatgaagagtaatgcatttttcagatcaagatcttagttctaggttatacatgggcattaaaattgtagagtctcaggcttgttacttcaataatcacttacgtactttgatctgttaccattcagggtctagattatgcattgatgacgggtggagatgttgctccacttggagctcaggctgtaacaaagatacaccaactgtttgactggtccaaaaaatctaagagaggcttgttgctcttcatcgatgaagccgatgcatttctgtgcgagtaagtcgcaaatcagatgctgatgataattaaacttaactccggcgtttgagttattaatgtgttgatttgattgcaaatttgacaggcggaacaaaacatacatgagcgaagcccaaaggagtgcactaaatgccctcctcttccgtacgggtgaccagtccaaagacatagtcctagcgcttgccacaaacagacctggtgatctagactcagcagtggctgaccgtatcgatgagactcttgaattccccttgcctggagaagaagagcgcttcaagcttctaaacctctacctagagaagtacatatctaagacgaatctaaaaaagccgggtttgctccaaagccttttcaaaaaagagcagcagacaattgagataaaaggcgttactgaggatctcctgaaagaagctgccgccaaaacaaaagggttttcgggtagagaaatcgcgaaattgatggcaagcgttcaagctgctgtgtatggaagcgcaaactgcttattggacgcaaaccttttcagagaggtcattgattacaaagtcgcagagcatcaacagagaaaaaaactagctggaaccgatgcaggtaacaagaagaaatgatatcataaaaacttatcatcaacacaggtatctgcaggtgtagatttgaacaagacttaaagactcaaaaccctgagcattattctcaaatgggtttaggcaggaaaagctttcttatttccaaattgtttctccctgtgattctaaaggtgagatatctatgactgcttcagaatcttcttcttttttttcctttcttagccattaccatcttgagttgatcttgtcatatcactccttggaaaacgaggcaataccagtctttttgtgcgacatttcccagttctgaccatcatagcttttgacctcgatgtgagccagtgtccccgacttgacacacttaactgtgacagcgactccatcagggttagacctcgggatataaaacgatgtgatcccacaaaccttgcagaaggtatgtttggccgtgtgagtcccaaaagtgtaagtagtaatgaagtcctttga

SEQ ID NO: 138135 - DNA, 2143 bp, Arabidopsis thaliana landsberg
gcttttcactgccattaagctcttcttagctgtttccttagtgattctcggctttgagattgttgcttattttagaggatggcattactttcaaagccctagtcttcacatccccactagcacacttgagatccagagcctgtttcatcttgtgtatgttggttggttaacccttagagctgattatattgctcctcccatcaaagctctctccaagttttgtattgtgctgttccttatacagtcagtagatcgtttggtactttgcttgggttgtttttggatcaagtataagaaaattaagccgagatttgatgaggaacctttccgtaatgatgatgctgagggatctggatctgagtatccaatggttcttgttcagattccaatgtgcaatgagagagaggtatgctcattcaactttggtatatccaagaaagtattcatctttctcctgctttatataacctttttggtatcagtgtaatgagctttagtcttcttcttgttcaggtgtatgaacaatctatatctgccgtgtgtcaacttgactggccgaaagatcgaatactggttcaggttctcgatgattcgaacgatgaaagcatccaacagttaattaaagctgaggttgccaaatggagccaaaagggagtcaacataatctacaggcatcgcttggttagaactggatataaagctggtaacctcaaatcggcaatgagctgtgattacgttgaagcatacgagtatgtcgcaatctttgatgccgatttccagcctactccggatttccttaaactaacagttccacatttcaaggttggtattaacattggtttcaattttctatcattgaaaagtggagagagagattgctaacatgttaaaaatgtgatttaatcttcaggataacccagagttaggtctagttcaagctagatggacatttgtgaacaaagacgagaacttgttgacccgtcttcagaacatcaatctgtgttttcactttgaggtggagcagcaagtgaacggcgtgttcttgaacttctttggtttcaatggaacagctggagtatggagaatcaaagcccttgaggaatctggtggttggcttgaaaggactactgtggaggatatggacatagcagtccgcgctcatcttcatggatggaagttcatatatcttaatgacgtcaaggtactactttttatcgattgtttctaaaaaaagccttatttagtaacaaaatgaattaaactggatagaaacaaatctataggtcctttgcgaagttcctgagtcctacgaggcatataagaagcagcaacaccgttggcattcgggaccaatgcagctatttcgctggtgtttgcgatcaatcttgacctttaaggtatataaaagctatggttttgcaatcatttgatcattccaatgattttaatggctcttttggttttcccgtagattgcaatgtggaagaaagcaaatatgatactactattcttccttttaaggaaactcatacttcctttctactccttcacattgttctgcataatccttccaatcaccatgtttgttccagaagctgagcttcctatttgggtcatctgctatgtaccagttttcatgtctttcctcaacattcttcctgctccaaagtctttccctttcttagtcccttaccttcttttcgaaaacacaatgtctgtcaccaagttcaacgccatgatctccgggctgtttcagtttggatcggcttacgagtgggttgtgacgaagaaaaccgggagatcatcggagtccgatttgctagcgtttgctgaaaaggaagagaagttgcataggagaaactcggagtcaggtttggagcttctgagcaaacttaaggagcaagagacaaatcttgtagggcaagaaaccgtgaagaagagccttggagggctaatgaggccgaagaacaagaagaagacgaacatggtgttcaagaaagagctcgggcttgcgttcttgctgctaaccgcagctgcaaggagctttctatcggcgcacggtcttcacttctactttttgttgtttcagggactgtctttcttggttgtagaattggatttgatcggagaacagatcagctag

SEQ ID NO: 138136 - DNA, 1232 bp, Arabidopsis thaliana landsberg
catttgatctaaaacttggaagaaacattggaaactcttcctctgtttttggtgatacagagcaagtgattagtcttagtaagtggaaagatagtgctttagctaaaccagaaggttcaagaagctcgagttcaaagagaacaagagggaatggtgttggaaccaaccagatgccgatttgtcttgttgatgcatgtgattctgattttagtaattgtagagagtatcataagagacataaagtttgtgatgttcattcaaaaactcctgtggttactattaatggtcataaacagaggttttgtcaacaatgcagcaggtaagattgtgtgttaatggtttaagcttcttgttgggttggtgaagatgttaacatttgtgtctaattaggtttcatgctttggaggagtttgatgaagggaagagaagttgtaggaaacgtcttgatggacataatcgaagacgacggaagccgcagcctgaacatatcggtcgtcctgccaacttctttacgggttttcaaggtttctgttttaagaaaagttagttagtttcttgaatccaatagaccgttccttgttgatgaagaagcattgttttatgttttcaggtagcaaattgctagagttttctggtggttcacatgtgtttccaactacatctgtgttgaacccgagctggggaaatagtcttgtaagcgttgctgtagccgccaatggttcgagttatgggcagagccagagctatgttgttggttcttctcctgcaaagacagggataatgtttccaatctcttcttctccaaacagtaccagaagcatagcaaaacaattccctttcttgcaagaagaagaaagctcgagaaccgcatcgttgtgtgagagaatgacgagttgcatccatgactctgattgtgctctctctcttctgtcatcctcctcgtcgtcagtccctcatttgcttcaaccaccactttctttgtcccaagaagcagttgagacagttttttacgggtcgggattgtttgagaatgcgagtgcagtctctgatggatcggttatatccggtaacgaggctatccgtcttccgcagacgttcccgtttcattgggagtagtagaagaagaagtaggtagatagatagaatcagaaagatctatttgtgtctcttctcttctccctcatttttcaatgttctttatcatcatcattgttcttgtgaaatgttgaatg

SEQ ID NO: 138137 - DNA, 968 bp, Arabidopsis thaliana landsberg
tgagtacaaacgcataagtttcgaacaaggagtgttgtctcgattcgaccatcctctgtttccacgtcttcatggtgttatatccaccgataaagttatcggttacgcgattgattactgtcctggaagagatctcaactctttaaggaaaaaacagtcggaagaaatgttttccgatgagatcattagattttacgcggcggagcttgtgattgcacttgagtatttgcataatcaaggaattgtgtacagagatttgaagcctgataatgtgatgattcaagagaatggtcatctgatgcttgttgattttgatctttcgacgaatctacctcctagaactccacaatcttctttttcgtcgtcaccgagactttcgacggcgacgaagaaagaaaggtctatcttcgcattttccggtttatgtaactccggaatctccccggacgactcggtttcgagatcctccgagtcggagttttcaggagagaagtcgaactcgtttgttggaacagaggaatatgttgcgccggaggtaatcaccggaagtggccatgacttcgccgtggattggtggtcgttgggagtggttttgtatgagatgttgtacggagcgacgccgtttagggggtccaaccgtaaagagacttttttaaagatattaactgaaccgccgagtttggtcggagaaacgacatcgttaagagacttggtaagaaaactgttggagaaagatcctagccgtaggattaatgttgaaggaatcaagggacatgatttctttaaagggttggattgggatttggtgcttaaggtatcacgaccaccgtatattccggcgccggaaaattatgagatttcgaaaatcgacgtggagaaattcgtccatgaaatatttactaaatgtgaacataatggtaattttattgtcttttagtttaaatttattttaaaaatttgtagaatta

SEQ ID NO: 138138 - DNA, 869 bp, Arabidopsis thaliana landsberg; identical to SEQ ID NO: 15546

SEQ ID NO: 138139 - DNA, 916 bp, Arabidopsis thaliana landsberg
ctttcaaggcaaatcatcagggtaacaatttcttgatctttctttttagcgaatttccagtttttggtcaatcatggcaaacccttggtggacgaaccagagtggtttagcgggcatggtggaccattcggtctcctcaggccatcaccaaaaccatcaccaccaaagtcttcttaccaaaggagatcttggaatagccatgaatcagagccaagacaacgaccaagacgaagaagatgatcctagagaaggagccgttgaggtggtcaaccgtagaccaagaggtagaccaccaggatccaaaaacaaacccaaagctccaatctttgtgacaagagacagccccaacgcactccgtagccatgtcttggagatctccgacggcagtgacgtcgccgacacaatcgctcacttctcaagacgcaggcaacgcggcgtttgcgttctcagcgggacaggctcagtcgctaacgtcaccctccgccaagccgccgcaccaggaggtgtggtctctctccaaggcaggtttgaaatcttatctttaaccggtgctttcctccctggaccttccccacccgggtcaaccggtttaacggtttacttagccggggtccagggtcaggtcgttggaggtagcgttgtaggcccactcttagccatagggtcggtcatggtgattgctgctactttctctaacgctacttatgagagattgcccatggaagaagaggaagacggtggcggctcaagacagattcacggaggcggtgactcaccgcccagaatcggtagtaacctgcctgatctatcagggatggccgggccaggctacaatatgccgccgcatctgattccaaatggggctggtcagctagggcacgaaccatatacatgggtccacgcaagaccaccttac

SEQ ID NO: 138140 - DNA, 504 bp, Arabidopsis thaliana landsberg; identical to SEQ ID NO: 33723

SEQ ID NO: 138141 - DNA, 3246 bp, Arabidopsis thaliana landsberg; identical to SEQ ID NO: 6499
  unsure (1)..(3246): unsure at all n locations

SEQ ID NO: 138142 - DNA, 1455 bp, Arabidopsis thaliana landsberg
atgtttcggatcaaggaccctaaggctagtcttgacttttactcacgtgtgctggggatgtcgtaagttttttccaaatcttgaatcatctgctttctgaattcctcatggaagcatactggttcttctgttattaagggttatgggctcttatattttacgttatgccagattgctgaagaggctggatttctctgagatgaaatttagtttgtacttcctgggctacgaggtagaactttgacccttacttagttatactattcactaagctagaggtgattctagtaaaacaaaaagtatggaactttgcgagcaatctattgatattttaagtggagttaaattgttattttttgaaatattgatttccttgttgtggaccactcagatgaatagatatgtttctcttgggtgcttaatcctactgattttagtggagagttgaaaaagctgggtttgattctttattatggtacaggatactacaacagctccaaccgatccaacagagagaacggtttggacatttggtcaaccggcaacaattgaattgactcagtaagaaacaaatactaatcccttactttctctctttcctttcttggattgaacatttcttacatatgaattttacttgcagcaactggggtacagagagtgatcctgagtttaaaggttatcacaatgggaactctgagcctcgtggatttggtaacctcctcctaaaaatatctctatcttattatctctctacattcagaagtaactgaatagagtttcggtaggttatgttttaggggagctttaaatatggtggctagaatgtatagcatcgatatgaaccagttaataagcctaaaaattgaagcttgagtaatggcaagtctaatattattacacatgtaaaaaagaaactatgttgttgtcacagggcacattggggttaccgttgatgatgtgcacaaggcatgcgagagatttgaagaattgggagtagagtttgccaagaaaccaaacgatggtactactattaccagctgagtccaataaacatttgaaattttcttttttcttttgcaactctgtttggggagtctatatttaatcctttatttgatgaaaaccttgcaggaaagatgaagaatatagccttcattaaggatcctgatggctactggatcgagatctttgatctcaagactatcggaactactaccgtaaacgcagcttgatctcaagactatcggaactactaccgtaaacgcagcttgatctcaagactatcgggactactaccggaaacgcagcttgaggaagtagcgattgcgctatttgtgttcttttgctcattccacccgagtgtgtgcatacagttaaagaattttcatgtttcatcgaataatcggaacaagatggtcgttgtttatcaatgtggtctgtttcttgacatat

SEQ ID NO: 138143 - DNA, 2450 bp, Arabidopsis thaliana landsberg
atgaagcttcttcttctcctcctcctcctccttctcctccacatttctcattccttcaccgtcgctaaaccaatcaccgagctccacgctcttctctcactcaaatcctccttcaccatcgacgaacactcacctctcctgacctcatggaacctttcaacaactctctgttcatggaccggtgtcacgtgcgacgtctctctccgtcacgtgacctctctcgacctctctggtcttaacctctccggaactctctcctccgacgtagctcatttacctctgctacagaatctatcactcgctgctaatcagatctcaggtcctattccgccgcaaatctccaatctctatgagcttcgtcacctcaatctctccaataatgtcttcaacggttcatttcccgatgaactctcctctggattggtgaatctccgggttcttgacttatacaacaacaatttaaccggagatttaccggtttcactcactaatctcactcaggtccgtcatcttcacctcggtgggaattacttctccggcaaaatcccggagacgtgcggaacctggcctgttctcgaatacttagcggtttccggtaacgagctaacttgtaaaatccctccggagatcggaaacctaacgactcttcgtgaactttacatcggatattacaacgcttttgaaaatggtcttccaccggagattggaaatttatcagagcttgttcggttcgacgctgctaattgtggtttaaccggagagattccaccggagattgggaagcttcagaagctagatacgttgtttcttcaagtaaacgcatttacagggacaataactcaagagctgggattgatttcaagcttgaaatcgatggatctgtctaacaatatgtttaccggcgagattccgacgagtttttcacagctgaagaacttaacgcttttgaatctcttcaggaataagctctacggtgctatacctgagttcatcggtgaaatgccggagcttgaagtgttgcagctttgggagaacaatttcactggtagtattcctcagaaattgggggaaaatggtagattagtgattcttgatctctcttcgaacaaactcaccggaactctgccgccgaatatgtgttctggtaaccggttaatgacgttaatcactcttggcaacttcttgtttggttaataccggattcgcttggtaaatgtgagtctctgacccggatccggatgggtgagaatttccttaacgggtcgattccaaaggagctcttcgggttacctaaattatctcaagtggagctccaagacaattaccttaccggagagttgccaataagcggaggaggagtctctggtgaccttggtcagattagtctttctaataaccagctctctggttcattacctgcagctattggaaacttgtccggtgttcaaaaactacttcttgatggtaacaagttctctggttcgattcctcccgagattgggaggcttcagcagctatctaagttggattttagccacaatctgttctccggtcggatcgcaccggagatcagtcgttgtaagctgctaacgtttgttgatcttagccgtaatgagctctcaggtgatattcctaatgaactcacaggtatgaagatcttgaattacttgaatctttcaagaaaccatctcgttggttccatacctgtgacgatagcatcaatgcagagtttgacatcggttgatttctcttacaacaatctctccggtttagttcccagcactggacagtttagttacttcaattacacatcgtttgtgggtaactctcatctttgtggtccgtatttgggtccttgcggcaaaggaactcaccagtctcatgtcaaacctttatctgctactacgaaactgttactcgtccttggattgctcttttgttcgatggtgtttgctatagtggccataatcaaagctcggtccttgcgaaatgcgagtgaagccaaggcatggagattgactgctttccagaggctagacttcacttgtgacgatgtcttggactctctcaaggaagacaacatcatcggtaaaggcggtgctgggattgtctacaaaggcactatgcctaaaggcgacctagtcgcggtcaaacgattggctacaatgtcccatggatcttcccacgatcacgggttcaacgccgagattcagacgctaggtagaatcagacacagacacatcgtgagactgctcggtttttgctccaaccacgaaacgaatctccttgtgtacgagtacatgcctaatggtagccttggagaggttcttcatggaaagaaaggaggtcatttacattggaacacacgttataagatagctcttgaagcagccaagggtctttgctatctccaccatgattgttccccgttgatcgtccatatagatgtt

SEQ ID NO: 138144 - DNA, 1766 bp, Arabidopsis thaliana landsberg; identical to SEQ ID NO: 27854

SEQ ID NO: 138145 - DNA, 1517 bp, Arabidopsis thaliana landsberg
aatccagctcttgaaagtattatgatatttgtcctgtcactgactgttaatgaagtattttggctgtgagattatttattttctattgtaaatctgtaacaacaactgcttggaactacatatcttgatgagttctgctttaaggcttggattaataagggaattaccataccagtatttttaaattcactcaagaagtttccaaattactcgttttactcggggaaaaaaatggtaaagctaagttacttaagaaacgacgccgttgacttctatcgacgttacagcatcggttctcccgtcttcttcttcccgagtaagtaattctttagctgcggcgtttaccaaaaaaccttaaaacgtcaacgaaaaatatccgatcgccggcgttctggtctatcattgtttgctttccttgaagatcccgaaacccaaaaaatgtcacaaggatggttttcgatgggcgggagtagcaccgtagatcagcagcagcaatcgggttcgtctctgcttgcggattggaattcttacgcagcctctagagatttcgaggaaagcggcggaagcttcggctttgatatcgaatccgccgttagatctgccaatgacactgtttcgggcaccttcagtgtgtaagtaggttgcaattagtcatctcataatgtttattccgtgactgaatctaagaagatgaggtttattagtggtagtgagaagtgggtgttagtgaatctgagctattgagatttactttgttgattgtgagatttgatagtttgggaaatgcatttatgagttttgcataccaatggatttagagttagtgaataagtctattgagttatttatatttgtagttgttttcaggaatcttcttttgtttctctgataaaattcttgttcttctgttgtttttgcaatgtacctgaatttgatgactacagggtttcaaaaggagttagagatattccagggagcttgcagtcagcaacaagtagtatgccttcaggaaaagcgctcatgtatttcggtttacttctcgcaagtggtgttttcttcatcttcattgccttcacaatgtttcttccagtcatggtgcttatgccacagaaatttgccatttgtttcacccttggatgtggattcatcattggatccttcttcgcacttcgtggccctaaaaatcagctcgcacacatgtcttcgatggaggtatgttacactgttctattgtgtgtctgtcatgccttaaatccaagagtgatttccttcctctcttttgaatatcttgtctacttctccagaggcttccttcaaccaagggtttcatggataccatggttggtaccatataggtatcaatggttctccacagctacattctctcggtgctcttctcagtgttacaggtactaaacatttcatcttccaattcttagaatattccctttaattatgagtttaagtttttcaaaatgagatattgctatgagcaagtggaaaacaatattggacct

SEQ ID NO: 138146 - DNA, 1681 bp, Arabidopsis thaliana landsberg
attctggtttctttcaaatcaataataatttggtttaactctttcttaaccggtttctaatctaattttccggttaacagtgaaccaggggctggctacactagccttctttggagttggagtgaacttggtgctcttcctaactcgcgttttgcagcagaacaacgcagacgcagctaacaacgttagcaaatggacagggactgtttatatcttctcattggttggagcgtttctcagcgattcgtattggggtcgttacaagacttgtgctatcttccaagtcatttttgtcattgtaagtaatagcaactatcaaaatgtgattcatcttttttaagttggaacgttttaagctcataagaacgcttttttggatgtgaaaacgcagggactttcatcgctatcgctatcatcatacatgttcttgattagaccaagaggttgtggggacgaagtcacgccttgtggttcacattccatgatggagatcacaatgttctacttctcgatctacttgatcgcattgggatatggcggttaccaaccaaacattgcaacgcttggagcggatcagttcgatgaggagcatcctaaagaagggtactcgaagattgcgtttttcagctacttttaccttgctttaaacctcggatcgctcttttcgaacaccatcttggggtattttgaggatgagggaatgtgggcactcgggttttgggcatccactggctctgctatcattggtttgattcttttccttgttggaacaccgagataccgatatttcaagcccacggggaatcctctttcgaggttttgccaagttttggtcgctgcaacgaagaaatcatcggtggaggcaccattaagagggagagaggagatgtatgacggagacagcgaagggaaaaatgcttcagttaacacagggagaaggatagtgcataccgatgaattcaagtaagtcaccaaaaattgcagtttcaccatatacttcaatgccatgaagtgttctaacatgttccttttggaatttcaggttcttggacaaagcagcgtacatcacagctagagatctagatgacaagaaacaagactcagtgaacccatggaggctctgtccagtgacacaagtcgagggagtcaagtgtattcttagactgatgccaatttggctctgcactataatctactcagtcgtcttcactcaaatggcctctctctttgtggagcaaggcgctgcaatgaatacctctgtctcagatttcaaaatccccccggcaagtatgtccagcttcgacatccttagcgtcgctttgttcatattcctgtaccgcagagttctcgagccagtagccaacagattcaaaaagaatggatcaaaaggaatcaccgagcttcacaggatgggaatcggacttgtgattgctgtcatagctatgattgcagccgggattgtggaatgctataggcttaagtatgcagacaagagttgtactcactgtgatggctcaagctccttaagcatcttctggcaggtaatgaacacagaccttaaaactcactttggtcctaaaatcaacaacttacagaagaaacttccgagtattgacactcttctactctttgcaggctccacaatactcactcatcggggcatcagaagtgttcatgtacg

SEQ ID NO: 138147 - DNA, 1939 bp, Arabidopsis thaliana landsberg; identical to SEQ ID NO: 27867

SEQ ID NO: 138148 - DNA, 3199 bp, Arabidopsis thaliana landsberg
  unsure (1)..(3199): unsure at all n locations
acttttttatttcgtttctcagtctttccttcatatttattatataactttctagtaatttctcaagaattgtcatctaatctggtagctgacatgattagttttctgaatccggtcttcattactttaaaatttcagaaacataatttgccatttacatacaacttccatatgtatatggtacggacgatggaagatgagtttcatggcattgttggaattannnnnnnnnnnnnnnnnnnnnnnnnnnnnnnnnnnnctctttattcaactgttttcagaagatttcgtaagggagttacagaatgggactgatgaatgtttcttgatgaatcaacagctggccactttgggtttacgctatagtatgcatctgcataaatgttcatggtaacttatcggttcaataaatacaaactacattccatttctatctccacattaaagctttgtctttactaattcagtgatttccttgcaggcctgaatatgtacttttggatatcattcgttcctgccattgtaagtaaaagcaagattaagtaaaaagcttgaaattcataaggcagtactaacactcagagcatgtgtttgtatctgttttgttgtctaagcttgtcatgttggttggaaccaaacttgagcatgttgtctccaagcttgctctcgaggttaaggagcagcagacaggcacatctaatggggctcaagtcaaaccacgtgatgggctcttctggtttgggaaaccagaaattctgctacggttgatacaatttatcatttttcaggtaagcaaaaagacttttcctttctcaattcttcaagccatgatattactctattcacacagatgatccttatatatttcctgctaatgcagaatgcatttgaaatggcaacattcatctggttcttggtaaggccaccttataaaatgcatcaatacttaaatcagctatgcaaagtttttcagtttttgagaagatcatcaatttcatgtatcagtggggaatcaaggaaagatcttgcttcatgaagaaccatgtgatgatatcaagccggctaatttctgggtgcgtttcaaatacacaacaattcgcagcaacacactgtctcttaagattttttttttctttctggtgaatgcagggttctcgttcagttctggtgtagttatggcactgtgcctctcaatgtaatcgttactcaggttcgtcaaaacctttcatatatctacaattccacaatcttaagcctatccaagtctgtgactaaacatcgttcataaaaactctatggtttcacctgaatctgaacagatgggatctcggcataagaaagctgtgatagcagagagcgtaagagactcacttcacagttggtgcaagagagtgaaagagaggtctaagcacacgagatcagtgtgttcccttgacacagcaacaatagacgagagagacgagatgacagtggggacattgtctaggagctcatcgatgacttcactgaatcagattaccataaactccatagaccaagcagagtctatattcggagcagcagcttcatccagcagtcctcaagatggatacacgtcgagggtggaagaatatctgtctgaaacatacaataacatcggttcgataccgcctttaaacgatgagattgagattgagattgaaggtgaagaagataatggagggagaggaagtgggagtgatgagaataacggtgatgctggagaaacacttcttgagttgtttaggaggacttgatcttgtttctgcttttagaagcttggttcagttgtaattacttgacatccatacaagaataacaattaacaaagtaaatcttttgttggtccagtaaaaaaaagtattcaatgatcaaagtacatcttttgttggttcagaggtaaatttaaaatataatagcatggattggaacgagatattatggcattaggaaactttttgattatggcagtataaacaaagaccacaaattatggcagctatacatatattgatttcaaaacagagataaagacttgtcacctgtcatttgattatttatgaatttacctctgcagcattttccttcttctgtgcagtcacgcctaccgatggatttgattaatttcctgtcgattattactaagttgtatttctagtaaatacaacttaaaagtagttttgtactcggtcttaaaactagttttgtacatagtttttgagtaagatactttgttttttttgggacaaagagtaagttagtaatatcaaattttatcatagtgattgttaatttatgtcaactacgaaattaagaagttatcaaatctgatttgagttatgataacaatgtcattgatagactcggtcaattatggcattaagaaaatctaaggatttaagtaaccaggtatcaattattaccgccgttggtattgacttttaaataagacttgccagttgtcacacacatgtcataaacaattgattttttcttcttcttttcattcaaatgataaaattaaacttgcactatacagtttctatagaatcatccatcactagatctggtctggcgatcccccaaaagatcaagtcaaaaatgaataacagagaaatgaaacatggtaaaaaaaaagacgagaagatgccggttttagtgatgccaggtttcatagccggagcaacatttctggttatttggatcatacgacgtgagttccttttatcttacttttggtgtaacatagatttctctgcttctgtttatcttttgatgtaatccatatataggctatagaaagggctccaccaaaactaactcgccgccaccatccgcgcttccaaaggctcgagaatgtggtcctgtggcgtccactaaacctaacttaacacctgcgccgccgctaggtcagccacggctatacgctcaagaatctcaacagtacagtcttgtggcgtccaatgaacctgacttgacacctgcgctgctaggcccgccaccgctatacgctcaacagtctcaacagtttagtactattgtggtgtccagtgaaaccgacataccccagcttctggttcaatgttgtccgccagatggagaccgtggattaacaaatcaatactatgcgggacaagagttcgacttaggaggacacgacaaggacagcgattccgattaa

SEQ ID NO: 138149 - DNA, 1367 bp, Arabidopsis thaliana landsberg
aaagactcaaaaaagtctgcgtggatctccagccgttttcagacacttacccacaaaatattcctctcggcgatgatccctttctgctgaatttttggtcctttgtcgctcgactgttttcttcgtctactatttgttccttttggatattcttcggacttttcgttgatttgattttcaagaggtaagttaataaaccgtgttccccgattctcctattaaagaggtttgtgatgtttttgatttctaggttttttgttgtttgaattttctcgtttgaaatctctaatctctacaaatcttccgtgattgagttttgattagtaaaatgattcgtgatttgattttgatttctctgtttttattatctctggttggtttggtttgatcaagtctctgatgctagggttcgatatcgtttctgcatttcgtaagaagaaacctttggcttaaatctcagtgttttatttggctatgaagcagagagagtttgaacaaggaaggattgaactatggaagatgcatcagagactagctactggtgtcacatgtgctcccgatcggtgattccattgattcaagacgaaatcatcaaatgcaatttctgtcaaagtggttttgttgaagaaatggataataatgatgaccatcaggctgctgattctctctggactcctatcttgatggagatgatgaacaacaatcacgaccaacattctaccaatcaggaagactcagaatctattcttgaagatgaagacgaagacgaagatgatggtgatgatggtgatcagaacaatgatggagaaattgatataactcatcaacttgaagagattaggaggataaggactagacattcaactgctattgttaatctgcttcaggggattcgagctggattattgatcgaatccgagaacaacgaggataatcccgataatagcgagcttgtcgtcttgatcaactcatttaaccaaaggatcagggttcatcaagattctgtagacaccacttctgttccttctggatctttgggtgactatttcattggacctggattcgagacgttgcttcagcgtttggctgagaatgatctgaacaacaggtatgggacacctccagctacaaaagaagcggttgaggcattggcgatggtgaaaatcgaagatagtttgttgcagtgtagtgtgtgtttggatgattttgagattggaatggaggctaaagagatgccgtgtaagcataagtttcatagtgactgcttgttgccatggcttgagcttcatagctcatgccctgtttgcagatatctgcttcctacaggagatgatgatgagccaaagactgatgcagaaacatcgaga

SEQ ID NO: 138150 - DNA, 2450 bp, Arabidopsis thaliana landsberg
ggtgacggtgacggcgatggtgaatttatagttgtacacggagctggaactcatcaaggacaaagaaggcaaagctactcatctacttaagttctgctccaaagctgaaatacggagattcagatcctttgttcccatggtatcgtactatcgttcctattctctctttgattgctttgctaattctcattgagtttatgtgcttcttgattagaagttgtttgatcaatttttctggaaagtggtagaattcgtcgttaccaatccaagtgattagaagttgtttgatcaattgtgactgaatctgaatctggtctagcataatatgatcaattgtgactgaatctgaatctcttagacatctttttttcttattttcttcttctcaaaaaatcttgtgctttcatcttagaatcaactacagacgctttaataatctgagggaatcttccgtgccaatatggagagatcatcatcatcatcatcatcatcatcatcaacatcatcatcatcatcattatcatcatcatcatcatcgtcatcgtcatcgtcatcatcatcgtcatgtgatcaggtaatattgactggatcagcaaattcgccgacgaattagagtggaacctcagagggaattttttttttacgatttgtctaatctgattcgaaattttgtctcgtggtgatgccgatgaaatagaagatgtgtacctttcatatcattcactctggttttatgggatcagaagaaattagcgagagtaaaatctgtggacctgcaccatgtaacttgattatggcactcagtccgagtaaggttctgacacatgttatctcattctatgtttacatgcttgttcatcttcaggtttggaatcttggtttaccttacccaacttttacattggccattgacgataagccctatctaaataccgtctctgatgatcactctgttaaggtctaattctgttcacttctctgttatataatgcatgtctacttgtaactcttatactgtgtcgtaggttaacctatttgtttgcctaatggtatcatctgatcaggtcaaaaatgttgattggatcagcaaactccctgacgatgtattgctcataatattatcgagactttccacagaagaagccataaggacgagtgttgtgtcgaagcgatgggaacatgtgtggagtcaaatgtctcatctcgtcttggacatgcggaagaagattatcaattccaacaacacgcctgatggttcgaatccagttgctacattgattactcaggtccctccttatcagtcaatttcttttctcttattagtttttatctgcttattcatatcttaaataaatcactttctgctttgtaaaaggttataaacaatcatcgtggacatctagagagctgcgtgatcatgcatgtcccatatcaaggtggaaatggaatgctcaattcttggattcgattactgagttgcatgaaacgcacgaaagttctcacacttagaaccattatgatacttgggatcgaaagttcaaaacttttaacttttctcccgactccttgtcccatccaagtcttatgtcactctcgctacattcatactttctcgaaagctcacatcccttgagaaactgctcgaatctttggaccctcaaactattatcaatcttcgctcccgagattggagtatttaacagggtactcgcatcttgcccttgtctcgaggtgcttgtactaggcatctgctgcttcaaaaaaagtagggttcctttgaagattgagaacaaaacattaaagctcttgcaagtgtcttctcttgaacacattttttttttctaaaaatttctgatttttaatataaatgaaaggtttacaatagatggattacatatgccttagcagacacctacaactgggttgacgccattgaagtgtcaacaactagtctagacattctcgccatcatagatatctgctgtcggagagatgacctttccctccagtccccccaattccaatttaatagaaacttttgggttctagggccttacgtgcctcacatcagctacaacatatcagaggtacatataatgtatatatattgttacacgtttcaaataatgtatttgaatacactggaaaaagatatcagaggaattaaggtatttgattgttttgatgttgagtaggaaaagagcattgggaatgaagaatttgtgaacaccatatatgatgagttgttgagaccgtttgcaattttgtatgtagccttgtcggtgagtgtagatttaatgaatctgacaaaagttgagaggttacgacaagtcttaggtttatggactcgtaaaatactggagctcgagattatatttaagaaatgtacgtacattcgttcttcttagttgaagactatgactaccgagtcttaatttgctggtatgtgc

SEQ ID NO: 138151 - DNA, 1689 bp, Arabidopsis thaliana landsberg
tacaggggatggtggttctatggctaacggcgatgttgccgcaagtaaaaccatcaccgtgtgtagcaacagccggaaccaactgcagttccgcgacatcttctcaattggctctcttgtataccgcattcgcattaatatcgattggatcaggaggaatcaggccatgttctttagcctttggtgctgatcaattggacaacaaagagaatcctaagaacgagagagttcttgagagtttctttggttggtactacgcttcttcatcagttgctgtcttgatcgctttcaccgtcattgtttacattcaagatcatctaggatggaaaatcgggtttggaatacccgcgattctcatgctgctcgcgggtttcttgtttgttttcgcgtctcctctctacgttaagcgcgatgtgagcaagagtctgttcactggtttagctcaagtggttgctgcagcttacgtgaagagaaacttaactttgccggatcatcatgactccagagattgttattaccgtttgaaagattctgaactcaaagctccaagtgacaaattgaggtaaagtgaaatcagtttcacatatatagttcttggttagtttttttatttattgatactttcttgcaattgcttaggtttttaaacaaagcttgtgccataagtaaccgcgatgaagaccttggttctgatggtttggccttaaaccagtggaggctatgcacaacggaccaagttgagaaactcaaggcgttggtcaaggtgataccggtatggtccacggggataatgatgtcgataaacgttagccagaactcttttcagttgcttcaagctaaatcaatggacagacgtttaagcagcaattcgaccttccaaatcccagctggatcgtttggtatgttcacaatcatagccttaatctcatgggttgttctgtacgaccgcgcaattctccctttagcttcaaagatccgaggcagaccagttagagtcaatgtcaagattcgaatgggattagggctattcatatcattcttagcaatggcggtttccgcaactgttgaacattacagaaggaaaaccgcgataagccaaggactcgcaaacgatgccaactcaacagtgagcatctcagcaatgtggcttgtaccacagtatgtactacacggtttagcagaggccttgaccgggataggacagaccgagtttttctataccgagtttcctaaaagcatgtcgagtatcgcagcttcggtgttcggactaggaatggcagtggctaatatcttggctagtgtgatcctaaatgcggtaaagaatagctcaaagcagggcaatgtgagctggattgaagataacatcaacaagggtcactatgactattactattgggttttagcgatcttgagcttcgttaatgtcatctactacgttgtgtgtagctggtcctatggtcctacggtggatcaggtgaggaatgataaggttaatggtatgagaaaagaagaagaggaagttattaaattaaactaagaccaattggttgatcataattaaatggtgtacgtgtgttataaaattctatatatttgtatgtaattagattattatatcatggatttggattttcttaggatgtagaggttgatgttaattaatgggtcgtgtgtttatttaattattac

SEQ ID NO: 138152 - DNA, 2410 bp, Arabidopsis thaliana landsberg
gcgttactgtgtgaaaaattcttcttcttcttcttctcagcgattgaatcgaaccaagagcgaaaatgagaaatttcagtgtcttcgagagattctctaaagcttttaaagatcatccttctctcaccaggattctcgtcgtctccacgatcaggtcttcatcttcttcaaaaacgattctcgtagctctctgtttttttcttgtttctctgttgttgaaacctttcaattctctacctggaaacgtacgaacaacaaattctccagggaaaaatatctgttgagtagattctttaggttgtatcatttacgcaacacttgcttttgttgaattctgaatctcccagtttatttcaggaagaacgcgtttcatattcttaacgaatctgattcgatgaaactcaatcatctggattttgcaaatttcgttttactgtttttgcttatatgtcctggatcttagagtcctggatctctgattatttgattgtattgttgtgatctgtgttgactgatgtgagattctgtgtattgttatagtggtggtggactaatagcgtattctgaggcaaacgcatcatatggagcaaatggtggtgctgttgttgaaactggaaccaagaagaagaaggtggtgctgctcggaactggatgggctggaactagtttcttgaagaatttgaacaattctcaatatgaggttcagattatatcgcctcggaactactttgctttcactcctttactacctagtgttacttgtggaactgttgaagctcgtagtgttgttgagcctattcgaaacattggaagaaaggtaattctgctgtaaatatggctaactctaaatggaaattttggttgaaaaaatagctaatgcacattcgttttcctgccttgacaaatagaagaatgttgatacttcttacttggaggcagaatgtttcaaaattgatccagctagcaagaaggtttactgccgatccaaacaaggccttagttcaaatggaaagaaagaattttctgttgactatgactaccttgtaattgctactggagctcagtctaacacctttaacatacccggagtggaggagaactgtcattttctgaaagtatgttctcttggctcttaattccttttcctgctctacttggtatgcattgatagtttacagctgaaaagcatgtgaaagtagagtgatcatttgtaggatgttaactttctgtggctttaattggtttcattatgtgcttataggaggttgaagatgctcagagaatccgtaaaactgtaattgattcctttgagaaggcaagtctaccagaactaagcgatgaagagagaaagagaatcctgcattttgtggttgttggtggtgggccaacaggtgttgagtttgccgctgagctacatgattttgttactgaggatctagtcagtctctatcctagagccaagggttcagtgcgaatcacgcttctggaggccgcagaccacatcctgaccatgtgaaatttctttactctaaaattcttgatcaatcgtctccctataatttttggtcagacgattagaagtttcaggtttccataaaaacctcgttactaattcatggaaagcttttctttcacaggtttgacaagagaatcactgagtttgccgaagaaaagtttagcagagatggaattgatgtgaaacttggctcgatggtaactaaagtgaatgagaaagatatatctgctaaaaccaaagcaggagaggtttcctcgattccttatggaatgattgtctggtcacctggtattggaactcgtcctgtgataaaagattttatgaaacaaattggtcaggtaaagtaatgcgctttagatttaaaactcactctttacaattttcaacatctcctagcaaacaagtttcaacaactcgctctaagaaattgtctttgtaatttcagggtaatagacgagctctggcaactgatgaatggcttcgcgtagaaggaactgataatatatatgcccttggtgattgcgcaaccattaaccagcgcaaagtcatggtaatttgacgcttctattgcttcccaaactctggaataatgtttttggattataaaacaaaattattagtggtttcttgttgcaggaagatgtttctgctatttttagcaaagcagacaaagacaagtctgggacactgactctcaaagagttccaagaagcaatggatgacatttgtgttagataccctcaagtggagctctacttgaagagtaaacgtatgcgtggcattgcagatcttcttaaagaagccgaaactgatgatgtatctaagaataacattgaactgaagatcgaagagttcaaatcggctctatctcaggttgactcacaagtgaagttt

SEQ ID NO: 138153 - DNA, 2605 bp, Arabidopsis thaliana landsberg
atggatttgggaaaactgatccagctgtctgcgctgctgtgcccatttcttctatcattacactttagaatcgctggggcctccgcccacatctactcttcccagcccttccacgatgtcggtaattctctcctcctctacggtggcagcgagggcatcttcgcctcttcccgatctttaatcaggtatattctatggattacattttcaactcttttgatgctctctactctactctactcatcctccctcctcactgcaggtttgagaacatcactctctggaggacaattaccggtaagggccaccgcagcaatgggttagttcaagcagtgatctttgaagcctccgatcgtaacaatatcggtggttcagcttacggaggccaaagatctatttgctgcactccagatctggccaagcttcaaggctgtaagcagggtgagatcattaggattccttctccacatgaccctcaatggcctatcctcttacctgtccgctttaaaggaaaacgctcgtctgctaagatggcagacactgagattcttatcaccaagactggaatctataatctcttattcatatcttgtgatccacaacttaagggcctcaaaatgaccggaaagactgtttggaaaaatcccgacggctatcttcctggtaggatggctccactcgtgaatttctatgtctatatgtctctcgcttatttgttgctcagtgccgtctggttcttccagtatttgaggttccggatggatatattgccacttcaacattgcattactgccgtcattcttctaggattgcttgagatgatcttttggtacttggattatgctaattttaatcacacggggatgaggcctttagcccttactacatgggttgttaccattggtgccttgagaaagactgtttcccgcattctcattctctgtgtttccatgggatttggggttgtcaaatctactcttggtggtctcacttctaaagtcctccttgttggagttacttacttcatagcttctgagatccttgatattgctgagcacgttggcatcattgacgatatgtccggaagatcaaaactttttcttgtccttcctgacgccttcctcgatgcatttctcatattgtggatatttacctctctttcgaaaacactggaacagttacaggtatctctttctttctaaatatagccatcagactctgtaagttgtaagggttttgaggcaagattcatcagaccagctataaaattctttattactgcagatgaaaaggacctcggtgaagctggaaatttaccgcaagttctcaaatgcactcgctgtgatggttgttgcctctgttgcgtggatagtgtatgaggtaccatcctgtcaagcctgatttgatgctgatttagtaaactcaaatcttacctctaggaaacaaactgctcaactaaaactggctttgtttcaagctaggaaaaaagaagctccttctttcttggaatatacccagcttgcttgcctgatgatttgtccccgtgcaggtgtatttcaaagcaacagatccattcaatgaacgatggcagactgcttggactataactgccttctgggatgttatcgcattcttgttgctatgtattatttgctatctctggaccccctcgcagaactcccaaaggtatgttacatcaacttaaaaggttttgatacctctcgggcataccaacaaataagcatggttttgtggaaacggtttcagctgagcatgttgtgggaagtcttggctacatgctagtggttcttatgtagtggtccaattttggtgttcctgggtgtgatagggatgctaatatgaaactaatgatggacagatatgcatattcgggagacgtggatgaagaaaacgaggaagctcaatctctgacaggggggaagcaagatggtgatattagcttagttaagcaagagaagaatgcggagtcggacagggaagaagatgttgaagaagataaaagagagtgaggagagtcagtatagaaacgacgtggcatctgtgtttgatcaagagttgacgaaaatataaatatcagcaagaggtcagctatatagcacaaagcaacgacgtaatacatttatatgatgtaactaaaggatagtaactgtgtgtctgtatttgtttgtttttttaatatcagatccaacattttttgagtcatctctaacccttgtctgagtgtgagatttgcctaaaattgctgtaaattacattattgatatttttattggtggttaaaattgtgaaacattaatttgtcaataatactagagtccagacacggaaacagggtctctctctcttgttgtgtataatttcaacaccgctattacagaagaagagtgaaaagggagagggagcttcctgctttcacttactatgcctcctcctccttctagttctagagcaggtctcaacggcgatccgattgctgctcagaaccagcagccgtattaccggagctactcatcgtcgtcgtcggcgtcgctgaagggatgctgctgctgcttgttcttgctgttcgcgttcctggcgctgctgg

SEQ ID NO: 138154 - DNA, 2230 bp, Arabidopsis thaliana landsberg
atggtataacactacctgttttgagcaatagattcagttttccatttatatatgagcaatcaacttgagccacctttctttgttctatgaatttttttagctctagatgcagccaccaaagggaaccggtacatcaactcttgcctcaggtactttcataacggtctcgttattactctacgtaatcgcatagtccagtgagtcaatgtccaaatatgttgcttattagtttaagacagagatatctcacactttgtttcatctgaagttttaataagattcctgagcttgacctctaactttcaagatgcgtttctcctgcgtctttttgcttccggtatgatttcttttttggttcaacatgtagattaaacgaggaaattaaaggcgttgagaatttggcggctcggttgtatccttatatgtgtgtcaacctgtttgtgtctgaatgttgaacacagacacacatgtctgctcaaagctttcattatcgtattttagacagaaatttgttctagaatccttaataaatcaatctgcagaaagcacctgaggaaaaacgtggatgttcttgacacggctgtaaacaagcttctccggcctccatgagaagtcgtcagtttttcacagacttggatcacttttttattttttctttcagactttggattacgtatttctcgtacataaagattttgattataaaactgatgttaaatttcaacattacatattttctagggtttctggtttaagaaaaacaaaacactctgttttttaaactgttttcggtaaaccgactcgaaaagggattatttgtaatttattattgtttgtataaataggatgccaaaaaattctaaacttacgtttcgctccctctctaagtccctctcgctctttggttcttcttctcccgcaagattgaatctttggtttctttggattggtttcgtaagtgttcgcaccgaatcatcaaccatttcaccgctgggtatgttttctacactcgctcaaaagttttgatagtatgaactgaattatgggttttggagaattagttgtttaattgtaaaatagaaaactttatgattctgcttccattgattttagctggtgggtttgtcaaaatttcaatcttttctttgatttgatgattaatatttcattgaaatcatcgttgtttcaggttagtaggagtttgctggttattaagactttagtctgaatccaggcctggctcttggggtttgctctgttgctagtgcacagggtccaaccctgtctgaatcatggcgattttcaccaaacctgagagtgcattgaagcgtacagatggtaacattgcaaattcttacctttttgactcatgctttgatgtatgaatgttgcgtgtttgccgagcttatcaatgttgggcagagacaagatgctctcatggtgctttctgatctttttacctgctaacgagaaagttgagcaggcttgtagtcagcggatgctctggaggaggaggcccttgatgtcgatgactttgaagcagataaaaagcctgaagacttgcagccaagtgttgtatatcagcaacgactgctagaggaaaggaaaatttatgaaaatgagcaacaagtgaaatttattcttacagtagttttgcatctctatatattggttctgagtttaggcgaaaaaggtccttatagtctcttctattttgtttagcgtgaggttgagcgtcttaagagtgacctgaaggagaagaaaaggttggccagaatgttggataataaggtaagttggcttgtgaagttgtgtctactgtatcttcatatgtagcaatcacttcttgcaatttttattgtctagtaactcaaagcgaaattttgtttccaggaaatattcagggtgattcgtcttcgacaacctgagtttgagaggctaagaagcgagaggagcatattggtcaaataattcgagccaggaaacaagaaagcggtattaagaggaaacagatatatcatttgaaatctgatgaggaaaggataaaaaagcttcaggaagaagaggaggctcataggcgtgaaggtaagcccttgacttccatagaaaaacaatttggtcatttttgcttattaggcctcagtgaagaataatttagtcatgattttcccaagatttgaacatgtgtaagactcgttttcagctatataaacccttttgcattgaataa

SEQ ID NO: 138155 - DNA, 1408 bp, Arabidopsis thaliana landsberg
atggtggcttttgcaacagagaagaagcaagatctgaatctattgtctaaaatcgcctccggtgacggtcacggcgagaattcctcttatttcgatggttggaaagcttatgaagaaaacccatttcacccaattgatagacctgacggagttattcaaatgggtctcgctgaaaatcaggtatcattcaaaaataaaaatccaaccttttttttttttggtctaacctaaaaaacctaacttttttttttcttttctgaattgtgtagctttgtggagatttgatgcgtaaatgggttttaaaacatccagaagcttcgatttgtacatcagaaggtgtgaatcaattcagtgacattgccatttttcaagattatcatggcttgcctgaattcagacaagtaagttatattgttgcctgaactcagacaatttcatcacttttggcttgatttggtttcaaagattctaactttattagtttaattccttcaggctgtagcgaaatttatggagaagactagaaataacaaagttaagtttgatcctgaccggattgttatgagcggcggcgcaaccggagcacacgagacggttgctttctgtttagctaatcccggcgatggtttcttagttccaaccccttattatccagggtatgttcaaagatcatcactgaatcacattagaatttggtttagtttggtttgggttctaaatttgatttggtttggtttcaggtttgatagagatttgagatggagaaccggagtgaatcttgtaccggttacttgtcatagctctaatgggttcaagattacggtggaagccttggaagctgcttacgaaaacgcgagaaaatcgaatattccggttaagggtttacttgtaaccaatccttcaaacccgcttggtacgacgttagaccgggaatgtttgaagtctcttgttaacttcactaatgacaaagggattcatcttattgctgatgagatttatgctgctactacttttggtcaatccgagttcataagtgttgcggaagtaatcgaggagatcgaagattgtaaccgcgatttgatacatattgtgtatagtctatctaaagatatgggtctgcctggtttaagagttggtatagtatactcttacaatgacagggtggttcagatcgcaaggaaaatgtcgagtttcggtcttgtttcgtcacaaacgcagcatttgatcgctaaaatgttatccgatgaagagtttgtagacgagtttatccgcgagagcaaattgcggttagctgcaaggcacgctgagataaccaccggtttagatggtttagggattggttggttaaaggccaaagccggtttgttcttgtggatggatttaagaaatcttttgaagacagcaacgt

SEQ ID NO: 138156 - DNA, 1003 bp, Arabidopsis thaliana landsberg
cggtgtactctcggcgcgattttctcgtcgattattgatacaattcgtttcaaaactcagaagagacttttcgtttttttctttgcagccgaagccgggtagcgacgggtcatatccggtagataaagcaaaggctgtgagtggagataagcttctcagaagcattatgcaggataacaaaattgaactctacgctgcttacgtgagttatgttgatttctctctctttaattacgaaatttaacttcagattttctcaatcttaatacattgattgatttgatgtttgaactagtttctggaataatttagtagacaatgaaaatatttagttctagattttgatgtgaggagatggtttgttgaaggcttatgtaaactttggattttggtcaatttgtgatgattaggggaaagtgatgaactgtggtggtggaggaagctgtggaacttgcattgtggaggcaagtgacttcatacaatgttaattagattctgattatgaatttgtgagctatgattgttctagcattcatggatatcaatggaggaaaatagatttgtgtttggtcttcttatgatgaccagtaactcaaagcaaaaaaatacacatttggtcttcttgtgtgcagatactcgatggcagagatcttctgaatgagagaacagatacagaaaaccggtacctgaaaaaggctagttatttgatcactcctctctatattattgttagattcacaagtttctcattgctagtgtttggaatgggtatgtgcactaacaagatgaatgaaatgttgagcattgtttctggttaaatgtgaatatatgttttgttgtctgatatggttactaagtaacttttcttagatatgcaaattttggataaaataagagccttggctgtttaaatcttaagggttttgttactattgtgcagaagccggaatcttggagactcgcatgtcaaacaatagtagggaacaaagaaaactcaggaaag

SEQ ID NO: 138157 - DNA, 4759 bp, Arabidopsis thaliana landsberg
  unsure (1)..(4759): unsure at all n locations
gcttcgatccttaatggagatgtgcatcctaatcccaggtagctctttaaaacatggtggcgccagctcaaagcaggtagaggacagttcgttcttttaacttacaatggttattaaaaacgtaggttattaaaaacgtatgttttatttgaccagtatcaaaaagtcaatttgaaatgagattatgtttatgagatattcttgttaagcacattcagtttttttttttttttttggggtctcatagcgatccatgcatatttaatcgaatatatcctgtgatgtatgtagggtggaatttcacttgcgtcatggaaatgctctgaagaattttttgcagaacagataaagagcagagacccactgaagattgggtgggtctgatgattcctttacttgatggtgtttttaaaatgttgacaagaatttgttacaaagccaatgtgcatatggtggaaaatgcaggtttccaaatgtttgggcattaaggttggtgaggggtctattacaatggtaccctgtgagatcctctgtcttttctcccttaaaccttatatagcatagttgtgagaaattggaattggcgtgttgacacgtatagattatattgtgggagtgcaggaggacagagtaaccgtagatgaggctctgcagcacccttatttccagccccctcccagctcctaagagtagagaagaagagtaagtcattttatcatctagtaactaaactcctttctacattttaactaactatgagtttacttagaagatcgaaaatgacatattgacaaacaatagtatgtaatgtttgaatataaaataatatcagagttcacacaaacggaaattataataagtcaaactctagtatgtaatgtttgaatataaaataatatgagctacagtggattatgtaggaacaaggttaaaacgagcaagggaagattctgaacttgcagagacatctaagggaagcaggtagccatccaatccaaggttgtgaacgattttataaatagcctcttgtcttttccttgtaaataaagttacctcaagatgncttcttctttcttttttttttttcttttttcttattaggataataggattataaattatttcacattttgtaactaatttgttgtccataattgttgtaaataaagtcctcaaattcggttggtaaataaataagcgtggtagaaaatacgagttgttttttcttcttaacggaagatgatatcggttgtgaaagatgttgaaattttggtatctttatttatcgttgtagttagtattaacaacgttgccgcggaatcttcaacctgtttgagtatttacaaatatggtggagctccggcagttttccgatctcccaattgccctctctggaatctccagaatcgccgatccttctcctcccccgccagtcgttgccatacggcggcgattcaagggcggaggaaataccaggaggatcgtcttctctgtgcccttgatcttcgcattccctttcccggtatgcatcgttgccttgggatcgccaaagagaatcaactgtttttttttttattccccaagataagatgattcgcaggcaagaagactggaacaccaaaggatgttttggttggaatcgcagctgtctttgacggccacagtggttcagaagccagtgagatggcttcacaacttttgttggattattttgctctccacatttactttctcctggacgcaacattttctaaggagctcactggaaagctaccaaattcactcatgcatctatacgacctcgattcccaaaggtagtcctcgtgacacagaatgttgttcttctcacgagatatgattttgcaaccctgtcccactcacttttttacacaggttccaagattcattgccgctcaattttcacttggatattctgaaagaagccttgctcagagctatctacgacattgatgcaacatttactaaggtgtagtgcatggccttctactctatcatttggaccgttgttttttcagtagcgtgattagactctgttgtttaatgcaggaagcatctactcgaaagttggattcaggttcaacggccacaattgcacttatcgcagatggtcaactactggttgctagcatcggtgattctaaggcacttttgtgttctgaaagatatgagactcctgaagaggctaaaggttcccgcagcatccctttttagactataaccaaccttgtgaagccactaagagtataggggaatgaatgaacgttttgttcttttggtgtttgcttattgcagctactttaatagagttgtacagagagcgtaagcgcaatcaagactcttccccatcaaggttctctgatttaaagctggaacatcgcactggactcatgcgttttattgccaaagaattgacaaaggaccatcacccagatagagaggatgaaatgctccgagtgaaagctgcaggaggttatgtcaccaagtgggccggtgtgccaagggtgaatggtcagctggctgtctcccgttcgattggtgaccttacttatagaaggttggcactgctggttgtatcctagaatctctctggaacacgattctagctggtttacactatgagaagttgaaatgtgagttttgatatctctttcagttacggtgtcatctctgcacctgaggtgatggactggcagcctctagtggctaatgacagctacttggtagtgtcatctgatggtatctttgagaagttagaggtgcaagatgcatgcgatcgcctgtgggaagtaaagaatcaaactagctttggagcaggagtgccttcatattgctcaatatctttggcagactgcttggttaatactgcctttgagaagggaagtatggataatatggctgcagtcgtggttcctctaaaatccaatctagattgggagagctaaccaaaagagcaatctgtgggtccttcgggattcaagatgaagaatacatatgcactgccatgtgagtttctctcatcacaacccaacttattccgtatgggatgaagagtgatctttcatttctaaatatatctgtttttcaacagatggaacttttaatccattgcaattgaagcagactcaaccactttcaaccatgtttaacgagttattggtatgttcccaccaagacattaccatacagatgtgtgaaactaactcgagaagcttgcactaatgcccaaggaaagtgtacaagtactttataataaaatgagtcaaccttggtattgtaggttgaagaagaaaacagcagctattataaacttaatggtacctttgcatcatatgggtgacttacttactggtagcctcttccgagtcattattctctggtaagtgaagtgactgactagtatcacctcgttgcaatcttgtttaatgttttatctttttctttctggttctgtatactgcactaacattcaatcacaactcataccttgtaggtgcaactaatttttcaacaaggaccaatttttgtgtattctgttttttaccatctaattcgttagtttttggtctagccataattgttttgtttgtaaattgaaaattggaacataagtataagaacaattataataattcaaagtacaagtgggtgtgtatatgtggacgaaaaatgtgaagaaagttgttgaaatggtttttaattggcacaatcatttgtggcaaaatccaaccaatgatgtgaaaaataaatcaaatccaatggaaatgggctgtagaaatgagtgcatcattaacgttgtttctcctcttcagaggccggcccactgaataatcttaattccaggtgtcaagatcggagccgtctgattatattatttaattgcgggacgtatcgggaaggttcttctcttggccgcctctctcggagtctattacttcttcttcttcttcttcttcaaggaggaatcgggatcgtcctcacatctcattcgcattttgctgaagacttctcaccggcgttgacaaaaaaaaaacgaatccggaagatgtggaatcagaagcatgatttggagtcggctcagacgcctctctacccgatgatgtcggagagcccggagctccgatggtctttcatccgcaaggtctattccatcatctccatccagctgctcgttacaatcgccgtcgctgccaccgtcgttaaggttcattctatttctgtattcttcaccaccaccaccgccggcttcgctctctacatacttcttatattgactccattgatcggtacggtactccttggattctatctctccatcagctccggctctttgatctgctttctcgtttttgtgtgtgtgcagttatgtgtcctttgtattactatcaccagaagcaccctgtgaactatctgttactcgggattttcaccgtcgctcttgcctttgcggttggcttgacctgcgcctttacaagcggtatgtatgatccagttgaacgatactgttctctccttattctttccctaacgtgttttgtttgattacagggaaggtgattctggaatctgtgattttgaccgctgttgtggtcatatccctcactctatacactttctgggcggccaaaagaggccatgacttcaacttcctcggacctttcttgttaggagctgtcattgtcctcatggtgttttccttcatccaggtatcaatatcgctcacaaggcttcaatgttctct

SEQ ID NO: 138158 - DNA, 1621 bp, Arabidopsis thaliana landsberg
tttcaggcgagagagatgagcgcgacggagctgccgacgaaggaggcacacatacttaaaggccacgagggggcggttttagcggcgaggtttaacggtgacggaaactacgctctcacctgtggcaaggatcgaactatccgcctctggaacccgcaccgtggaatcttaatcaagacctacaaatctcatggccgcgaagtccgcgacgttcatgttacttcgtatgaaatcagctctttctcatctcatgttttttcttttgaactattcgtgattttgattcaatttgtgcagtttaagtttaagtttagatagtccaaatttattggattctggttctgtgtgttgattgttgttgctttcagcttaaattgagtacataagagaacgaatctcacattcccgagctttttgttgtttcaatgatttttgttgcttgcttgcagctataaacgatcgaattagacacgagatttcaaattttaggagtttgtgttacattaatgtcaagctaattgcagttttctgtggtggaggctgatatgatgaatgtgtttttttgtttattcatgtttcaatgatttttgtatcacagagacaatgcctaattttgctcatgtggtggtgatcggcaagtttactactgggatgtttcaactggacgtgtaatccgtaaattccgtggtcatgatggagaggtaaatgtctcaaaaacgaggaatctggattgcttagggtttagtttccttaggtatattgatgatctcttgttttttaatgacaatgatcttaccaggtcaatgcagtgaagttcaatgattcgtcgtctgtggttgtatcagctgggttcgatcgttcgctacgtgtatgggactgcagatctcacagtgttgagccagtacaggttttactcctttcatgttttgctgtttcaaaatcctgggaatatgtaataagttaagaactaaatcaaagtggattttttgttctttgatttttttgttttccagatcattgatacatttttggatacagtcatgtctgttgttttaacaaagactgagattattggtggtagtgtcgatggaacagttcgcacatttgacatgcgtatcggtaggtatgtgtaactcattacaagagataaaatttggtaatgtttctttcttctgggattgattgggaatttctgttttaattgaaatcagggagatgtcagataacctaggccaaccggttaactgtatatcgatatcaaatgatggaaactgcgttttagctggttgcttggattctactctgcgtctacttgacaggtaaaagaaactaaaccaaattgtatcttctaactaaactaaatttccctttgcagatttgtcttaattcttatgaatatctttaaaactacaggaccacaggagagctactccaagtctataaaggtcatatttccaaggttagtcattagtttgaaagataatgaaaccataatcccatatagctgcttgattatatcttagttacaacatttagtgtatgactaatgactggttttatcgtatgtaaaaaacagtcatttaaaacggattgttgcctcacgaattcggatgcacatgtg

SEQ ID NO: 138159 - DNA, 3886 bp, Arabidopsis thaliana landsberg
gatcctactaaatcgtctttgaaagctcttctggtcaccagctcttatgatgttatagggagagtttggaaatggtgtcacaaaaaattgaccgcgctgtgaagaaataccgtgaggctgctatgattgaaattgaaatgctgcaacagcttggtaaacatgtcaaagggggcgatcggtatgtactgcctgttgactttttcttcatgcatcactaatctgatgaagtcaagcatagttttccaagattcttttttgcaaaggttaaatcattgtattccttgcagttgtgtacaaattcggaactggtttgactatcgtaaccatatctgtattgtaagtatttagtcaattttgtgatgtctatgattttccccggtttgggaaatagttggggttgaattttgtggatgaacttaaaatggttgctacaggtatttgagaagcttggatcgagtttatacgattttcttcggaaaaacaattatcgctcctttcccattgatcttgtccgtgagattggctggcaactcttggaatgtgtagcatgtgtgtagtctttgcagtcttttcattctacatgctcgtgcatttttatctgagttttgcttgtcactgagatggttacatcattagtttttgaatttcagctcttttcatttcttatggcaattttcttgtctatttttgttttgcagttatgcatgacttgcgcatgattcatacggaccttaaaccagaaaatattctgttagtctcctcagactatgtgaagattcccgagtacaaggtatatctcgaatgcaactgtgtgtgaccttaatgtggccaactatttaagtgctgaaggaatttggttgtgtttcctgatgcaggggtcccgattacaaagggatgtatgctataaaagagtgcctaaatcaagtgcaataaaggtgattgattttggtagcacaacttatgagcgccaggaccaaacctacattgtatcaaccagacattatagggcaccagaagtcattttaggtgagtagctcttgttataaaaactcattaaaatttttagatatcacaaacttatggagaaacattgccttgtgtgcaggtcttggctggagttatccgtgtgatgtttggagcgttggatgtatcatagtggagttgtgcacggtgtgtgtctgaagtagttgattgttaatgaatgtttgggagtcttttattgaaagatttgagatttgtagggtgaagcattgttccaaacacatgaaaacctggagcatctagcgatgatggagcgtgttcttgggccgtttcctcaacaaatgctgaagaaagtggagtgagttgaataaaacacacggtctgaattctgaagtgattgtatatattgttgggtgtttaactggatttatttttgggttgtttggtaaagccggcactcagagaaatatgtgagaagaggtcgtttggattggccagatggggcaacctcaagagatagcctgaaggcagtattgaagcttcctcggcttcaggttggtcaagtgttgatattttgagtttgggtggagtgttatggtagtttataaaataatggtgatgcctgtattgcagaatttaataatgcaacatgtggaccactcagccggggagttaataaatatggtgcaaggacttctgcgatttgatccgtcagagagaataaccgctcgtgaagctctgaggcatccgtttttcgcaaggagaagatagcgggacttgaatttgacgagtgtaaatagggaatgaaatatgtatgatttgtagcaagtctttaccccacaaccccacgaattctgatataaattaacaaatatgctaagatcactctttttttaaccgtgataggcgattgtttgtctatctttgtaaactggatcgtttcaattcaaaagagttttagttttggattctatctacaagtagaggtatatgcataaagagaaagtgctgctacaagtagaggtatatgcataaagagaaaatgctgctactcattactgaatgatttcataacaccaagctaagagaatggattttataacgcatttacattggattatatattgaagaagaaatggtataataagagataagttgcaaagaaaatatgaaaggccaaaactaaaatataaactaaagaaactcctccattgatgagcccatcataagaattagtgatacaataacccaaaccaaattaacggggcgtttttttttttctcttcttggcattcgtcggaaagaaacagcatgtagtttaaccagcgtaaagaaaaactacacgatttgtaagaaaattctccagtttcacttgagtttccgtgtttagctatcttctctggaatttacccagaacttcttccgccttgtccgattctgcttcacctctgcgcattccttgtctgatcctcgcaggaaactctactgtcgtaagtctgtcttttaccaaaatgtcgttgattttccatacgactttcgttttattttcacgatctacgccgatatcgaccattgagtctacgatttctctattacaatggatttaagaaaacaattctgacgaatgggattagattcttacaaatatacctgcaattgcattgttccaccctttcttttgtgattttttcaactactgtttaataaaaggttcagctcaaatttgtgagatcagaaacttgttcatgtgccagttttcaaaaatcgtggctttttagtcctgagggtttatatgtgaagctaaactatgttattcattgtgaaagttttttctaacataacttttgatgttcacagagcaataggttgatgggttctgcagccagacagcctctcttctcatttggtgttattgctgatgttcagtatgctgatatttctgatggccgctcttttttaggtgttcctaggtattacagaaacagcatccttgtccttcaaagagctgttgaaacttggaaccaacatggtaacctcaaatttgttattaacatgggtgacattgttgatggcttttgtcccaaagatcaatccttggctgccactaagaaactagtccatgaattcgagaaattcaacggtcctgtgtatcatatgattggtaatcactgcctctacaatctcccccgcgaagagttgcttccgttgctgaagatcccaggtcgtgatggcaatgcttattatgatttctcaccaaccccggagtatagagttgtggtgttagatggttatgacatcagtgctgttggatggcctcaggaacatcctaatactatcgctgcattgaaaatacttgaagaaaagaacccaaacacagacaaaaacagccccgcagggcttgaggatgttgcaaggagatttgtgaagtataatggtggtgttggggagaaacagctgcaatggctagacagtgttcttcaggatgcatcgaattcaaaccagagagttatcgtatgtgggcatgtgcctatgagccctggtgtggcatccaaagcagctttgttatggaattttgatgaagtgatgaacattatacacaagtatgactctgttaaagtttgtttgtccggacatgatcataaaggaggatactttgttgattctcatggggttcaccatagatccttggaagctgccttggagtgtcccccaggtacgtattcgtttggatatatcgatgtatatgataacaagctgtctcttgttggtactgatcggatgcaaagcaccgattttgagaactagagttttcctgaatgatcaattatttgaaatgcagagtttgtaatcacaaccatatttctatgtatttggtgctttgtgaataagatgattataagtttca

SEQ ID NO: 138160 - DNA, 1418 bp, Arabidopsis thaliana landsberg
ctgaaagatccgagcataatgtgtgttactatataagaggtattttcttttttaatcttaagctaaatatatcaatttttcatcagattcgaaatacctaagaactcgatccctaaggaagcagcataccaaatcatcaacgacgagctcaagtttgacggtaacccgaggctaaacctggcctcctttgtgaccacttggatggagccagaatgtgacaagctcatgatggaatccatcaacaagaacaacgttgagatggaccaataccctgttaccaccgaccttcagaatcgatgcgttaacatgattgcgcgtctcttcaacgcgcctttaggtgacggtgaagccgccattggtgttggcacggtggggtcatcggaggcagtgatgttggccggactggcctttaagagacaatggcagaacaagcgtaaggcccaagggcttccttatgataagcccaatatcgtaaccggtgctaatgtccaggtaaaccaaaacaaaaattgatgaaatattaaccaagacaaaattgaatttatcaatccggttaagttatatgtgtgactcaatttccggttcaatacaggtttgctgggagaaattcgcaaggtatttcgaagtggagcttaaggaagtgaacctaagagaagactattacgtgatggaccctgtaaaggcggtcgaaatggtagacgaaaacacaatttgtgtcgctgccatcctcggttcaacgttaaccggtgaattcgaagacgttaagctcctcaacgacctccttgtcgagaaaaacaagcaaaccgggtaattaaaccaaaccgagaaacaagctaatatcgattgtaaccggtttggagtccggttttaacgttctaaaacacaatttgtagatgggacacgccaatacacgtggacgcagcgagtggtgggtttattgctccgttcttgtatccggacctggagtgggatttccggctaccgttggttaagagcataaatgtgagcggtcacaaatacggtttggtttacgccggtatcggttgggttgtatggagaaccaaaaccgatttgcctgatgaacttatcttccatatcaattatcttggcgctgatcaaccaacctttacactcaacttctccaaaggtacattaccataagtccataacataaataactttcaatagtatttctggtacatggaattgttttatagactaaacatttgataatgcttgtataaaccaggttcaagtcaagtgattgctcagtactaccagctgattcgtcttggattcgaggtaaataataactcaaaatagcaatatatttaccaaatggtcaataaagaaactaaaatgtattatatttaagttgttacttgttactatactttgaattaaacgttcctaacctg

SEQ ID NO: 138161 - DNA, 2374 bp, Arabidopsis thaliana landsberg
acacccccttccattggggcacataatgttatgcagtctaaatttaaagacttagaatcacaactaagtaaagcggggaagtgggacatgacaagatcgagagatcccttggaacctcagcccagagcagctgagaacacactcgattcttctgcagttaccaagaaacttgaggaagaattgaaaaaacgtgatgcactgattgaggttctgcttcgtcttcctattgagcacacttttatttatgatttccttatttttgaattacccagatgatatttgaacttaacatttgtctgaagagagtagttgttttctgcagaggttgcatgaagaaaatgaaaaattgttcgacagattaacagaaaagtcagtggctagctcgactcaggtgattcttttctctatcctacactgcacatgattcagtatctgcacatgatatagtatcacatcatggacgcttctctttttggagctgttggaagaaaaattattctatctcttctcttcatcaaatgttactaattgccatacacatggagattttcctgctccagctagctcatccattgttgtatataggtatctagcccctcatcaaaagcttcaccaacagtgcagcctgcagatgttgacaggtagttatttgatcacttggaaccatttaatccaaatttctgtcttctctattttgtttacttcccttaccacctgatctgtattttctacaggaaaaatagcgcgggcactttaccgtcttcagtggataaaaatgagggcacgattacattagtaaaatccagctctgatttagtaaaaaccactccagctggagaatacttgacagctgcattgaatgactttgaccctgaagaatatgaaggtcttgctgccattgctgacggcgcaaacaagctactaatgctggtacttggttaagaactagtttcttagtatctttattagacttttcagtggtgtagttatatgacatgacaccattgttctatcataatatgaagaatgaaggttatgatggattcctgatgtctctagacactaatatcggttaaggacatgtttttatatcaacttatattggcaagcatttttcctattgttgactcgcaggttttggcagctgtcatcaaggctggtgcttccagagagcatgaaatccttgctgagattagagattctgtcttttcatttattcggaaaatggaaccaagaagagtaatggataccatgcttgtttcccgagttaggatactatacataaggtccttactggcacgatcaccggagcttcagactatcagggtgagcataggcatccgagttgtatctgatttttattttagctttggccttagcttgtatgactatgttatttctcctggtaaaattaaccctatcctcctcatttaggtctctcctgtcgagtgctttcttgagaagcctaatactggtagaagtaaaagcactagcaggggtagcagcccaggtagatcccctgttcgatatcttgatacgcagatccatggctttaaagtaaatataaaggcagaaaggagaaacaagttggcatctgtggtatcaagaatgcgtggacttgaacaggtagatttaccttggaagagcacttgaatttcaaagatgcttgagtttatctaacatgttatatattaagagagacttatgctcttgattgttatcatctaggatgctgggaggcagcaagttactggagttaagctgcgggaaatgcaagatgaagccaaaagttttgctattgggaacaaagccttggctgcgttatttgttcacactccggctggtgaactgcagcgacagattcggctatggcttgcagaaaattttgagtttctttccgtgacctcagatgatgtatcgggaggaaacggtggccaactagagcttctttccacagcaattatggatggttggatggctggactaggggccgctgtgccacctcatacagatgctctcgggcagcttctgtccgagtatgcaaaacgtgtctatacttctcaaatgcagcacatgaaggtatgcgatgtcattggtcaaaaaatattttttgagtggaattggcagatagacattcccaatggtctgaaatgaaagatctctttaagtagctgatgttgtggctgactttacggcctatgttgaggtctaaggactaaggttttagtctgagtaattagtctggagtgatgcctaatatggaactgtggtacaggatattgctggtaccttggcggcagaagaggcagaagatgctggtcaagtgtctaagcttcgatcagctcttgagtccgttgaccacaaaagaagaaag

SEQ ID NO: 138162 - DNA, 2874 bp, Arabidopsis thaliana landsberg
aaaattttaaagtgatagcccgaaaaaaggtgtaagcatggcatgatacgtagtaatttgtcccagcttcttatagataagtggttttcattgattatttctcattatcacagatatgctatgagttttgctgcaaataaattgaagatgatttacgtgaagagaactgccggagaccaacaaagccatccacgttgtttcaagtgggttcaaagctgttctcacctggcacaatatgcacacacttcaggtgagagccaatacattatacttattgttatgtgagaaagctcctatgagtcatactggagtttttttttcctattatttataaggaatgtcgagaagctgtcggagggcatggtgtgaaaacagaaaatctagttggtcagttgaaaggtgaatttgatgtgcagactacatttgagggtgacaataatgtattgatgcagcaggtaagcggcacattattgtgatttgcatgatcaatactgtaaatttccctgttttgaccatacaattttactttaccgttggggaatttaggtgagcaaggcgcttttcgctgaatatgtatcgtgtaagaagagaaacaaacctttcaagggactgggattggagcacatgaacagtccacgtcctgtattaccgactcaactcacatcatcaaccctcagatgcagccaattccaggtcatatgcctcctcattaactattttcctacttatcatttatttagatgaattttcaactcttaaacatgttcttgtattttgtccctaacagacaaatgtgttctgcttaagagagcgagatcttctggagcaatttacttctgaagttgcacagcttcaagggagaggagaaagtcgagaattctctttcctcctggtaaagcatttttttcacctaaaatttgcttccttttctgttctccgacctttaggattcagtaatagttttcttctcctttccatccgtacttgcagagtcatcaacttgctgaagacttaggtaaagctttcacagagaaagcaatacttcaaaccattttggatgctgaggcaaaactacctactggctcagtaaaggtaggtcaaaaggattattacctgtgacgttttgaacctattcagttgaatcatggttgttttgctagctctagggatcacggatggtacttcaggcttccatgtcatatgattagccattaacgtgcagagtaattgattttaaactatagttttttgctcgatagattgtaaaaagctgtgagacaagtgggatgttttgcttctctgagcacaataatagttcatcagctttagtcactagcaaaggagactacgcactagcagaggaaataatctaaactaactagtaacgacatcaatgtatttgatgacaggatgtgttgggtcttgtaagatcaatgtacgcattgatcagcttggaagaagatccatcgctgctgcgatatggtcacctctcaagggataatgttggagatgtgaggaaagaagtttcaaagctctgtggagagcttagacctcacgcacttgcactcgtggcttcattcgggattccagacgccttcttgagtccaattgcattcaactgggtcgaagccaacgcttggtcttcactttagttacttgctagtaataatctcttccactaatcatgattccaagatttctttttgaataaaaatagctatgtaagatctaaactttgtgatgaatctcaacttttgatagttcacaacacaagatttgagactgatatattattagccacactaggtgacatagcttgctttcataatcattggaatccgaaaatgtgaactacaaatcggggtattttcgtctttttcatacgtctaacaaacttttctttagttatagctagctgctgattttgaacttttttgataaatatcagtatcacagcaccgccttctcgttcgttacactgctgacaaacaaacatctccgagagagagagagagatagaggaagaatgaagaatggaggagagaagaagataacagtggaagaatacgttgagttctgcaactctgggaattccatccatttcaccatcgcttacctcaatcaggtttttctctatccatcgattctcctttctcccgacgattctcctcctcactctctctaatcttcgactcgtataatttctctctggcagatccttcatttgcatggtttccgaaagcttcacaaattacagaaggtaacaaccacctatcatcatcatcatctcttcaaaattccttgttcaaatttgcggtatagagcttttggattaaatttttggtttgaaacttgaaaaatccgatttcatcaagagtttctgggaatttggttctcatataatttgaaatcgattgggcctgtttacagaaaattgtagaagaagccgtggactcactggatcttctagatctctctcgctcaactctgaaacaagtcactgactcctcgccgtcatcgtcatccctaactctcgacgaagtgataagcgacatcgaagctctgaaatggcaggaatgctgctttacctcactccagatcatcaattcccaggaaactactccatcagaaatctccaaaccgaaacagaaatcgaacaagagaaagaaagctactatgaagaaatctctcaacactaatttcggtgatgagaatgacaacacaatgatgatgatgctcccaacgaaaaagatgagaaacaaaaagacgacgaagaacctcaaaagcatctccacatttgtcaaagacgcttcatcagcatccaaaccactctctgccaacaatttatcatcaaggttttcttcttttccataa

SEQ ID NO: 138163 - DNA, 1300 bp, Arabidopsis thaliana landsberg
tatgtgatttcaccaagctttggtaggaggtctggattcaatactcctaggtcacagcctggatttgagtctcatcctatggttggtgaggcctgggatgctttgaggcgctcaatggtttactttcgtggacaacctgttggcactattgctgctgtggataattctgaagaaaaactcaactatgatcaggtgaagaatctttatatcttctgaaaacttctgaataaccacattttactgtcattgaccttgtatctctgcattgactttatccttaaggtgttcgtgagagattttgtaccaagtgctttagcattcttgatgaatggagagccagatatagttaaaaacttccttttgaagactcttcgtcttcaatcttgggagaaaaagattgatagattccagcttggtgagggtgttatgcctgctagcttcaaagttttccatgatcctgttagaaaccatgaaacgctgatagctgattttggcgagagtgctattggaagagtagcgccggttgattcagggttttggtggattatattgctcagagcctacacaaaatctacaggagactcttctcttgctgacatgcctgaatgccagaagggtattcggctgatacttagcctctgtctgtctgagggatttgataccttccccactctcttatgtgctgatggttgctgtatgattgatcgtaggatggtaagcagcaaatttactttattagttatttctagtgattctttctacaaggagagtttgagctaggtgcttcatcagttttccatcttttaattttgtgctttttgtgttgtagggagtttatggttacccgatagagattcaagcccttttctttatggccttaaggtgtgccttgctcctgcttaaacatgacggagaaggtaaagaaatggtggaacagatagtgaagcgacttcatgcattgagctaccacatgaggagctacttttggctagacttgaagcagcttaatgacatttaccgatataagacagaggaatactctcacactgctgtcaacaagttcaacgtaatccctgattctcttccagaatgggttttcgactttatgccgcctcacggagggttctttattggcaacgttagccctgcaagaatggatttccgttggtttgctttgggtaattgtatagcaatattgtcttccttggctacacctgaacagtcgacagcaattatggatctgatagaatctcgctgggaagagttggttggagaaatgccactgaaagtttgccatccc

SEQ ID NO: 138164 - DNA, 1376 bp, Arabidopsis thaliana landsberg
accctttccttaaagatcacaagattcaggtaaaaaaaatcagcatttgcctcaagttcacactcatagtgtttatgtcttaacatgttatggggttttaaacagatgggacctagttacactccagaatcgctgtttggtgagagcaaagtgtctgagaaaccaaaagagagtgtcaatcctattacacagttatggcaccagaacggagtttgttctgaagggacaataccagtgaggaggacaaagaaagaggatgtcttgagggcgagttctgttaaacggtatggtaagaagaagcacctttctgttcctctgcctcgatctgctgatcctgatctcattaaccaaagtggtcatcaggtagactttagtgatctttatctatatacctatgtattatgtgaattctttatctaagggttctgttttgtatatctagcacgcgatagcttatgtggaaggaggcaagttttacggggcaaaggcgacaataaatgtatgggaacccaaagtgcaaagctctaatgagtttagcttgtctcagttatggattcttggaggttcttttggtcaagatctcaacagcattgaagctggttggcaggtaaagcacctagataatgtcatagcagtttagcttaatctcaattacacttgtgttcttagcttcactgacatatatatcgatacaggttagtccagatttatatggcgataacaacacaaggcttttcacatactggacggtaagctcagaaaaaaaactgaaaaactttcttcactgagagtatagtatataccctttgagctaacatattttgttggatatgtcttcttggaacataaaagagcgatgcttatcaagctacgggctgctacaatctcctttgttcgggtttcatacaaatcaacagtcaaatagcaatgggagcaagtatctctccggtatctggcttccataacccgcaatacgatataagtattaccatttggaaggtaaaaagtctcaacctttatggatgaatcaacctggtatccatttcttgagcttctctaaagaaccatctttttcatgaaattcttgaacctcaacattttgccctcaatgatgttatctttatggatatgtgagtgtgtctgattaataaaaactgataactcggggacattgttcttgtaggatccaaaagaagggcactggtggatgcagtttggagacgggtatgtgttgggatactggccaagctttctattctcttacttagcagatagtgcatcaatagtagagtggggtggagaagtagtgaacatggaagaagatggtcaccacacaaccacgcaaatgggaagcggtcaatttccggatgaagggt

SEQ ID NO: 138165 - DNA, 1406 bp, Arabidopsis thaliana landsberg
atgactgagctaacgtcggcgatggacattgacgtagacgaaattcagcctcgcaagccgataaacaagggcaaagacgtcgtcggttttggacctccgccgcagagtaaggcgacgccttgggttgagaagtatcgacctcagtcgcttgatgacgtggctgcacatcgtgacattattgatacgagtaattgaactttacacataacactctctccctctatttccccataccctagggttttagggatttagtgtttacagttttctaaaattgaaattgatgttgtttcatatatgattgagtaggctaatgcatgttatagcttattacctatatgctcactgaaggtgttgttgtgattttgaaaacagttgataggctgaccaatgagaacaaattgccccatcttctgttgtatggtcctcccggtactggcaaaacatccaccattctagctgttgcccggaaactatatggaccaaagtaccggaatatgattcttgaactgaacgcatcagacgatagaggaatcgatgttgtaaggcagcagattcaagatttcgctagcacgcagagtttctctttgtgagtatcctatcatgtttccatttgtgcatttagatacctcaaaaactggcttttattactcataatatcgaatgcattgtgatgggcgtgagctatgtttaaatgtagcatcataagtttgtgtttaacaagtttgctgtggatatagaaataaaagaaaattcatgattgtagaggaaaatcttcggtgaagttggttttgctagatgaagcagatgccatgacaaaagatgctcagtttgccttgcgtagaggtaaaaccttttagtgttatctagctctatgtggtccttccgcttaagcacggttctaacttctaacatctttggcgtccttattttcttaaattttgcaagtgattgagaaatacactaagagtactaggtttgcgctcattggaaaccatgtcaataagatcatcccagctttgcagtcgagatgtactcgatttagatttgcccctcttgatggagttcatatgagtcaacgtcttaaacatgtaatagaagctgaaaggtgagaattatagctatttcggtcttgtaaactttcttattgtgttttcttcatcctccctcttcactatttgtttcttttaaccctttgttttgtgcttccttttcataattggactaggcttgttgtaagtgactgtggtttggcagctcttgtacggctgagcaatggggacatgagaaaagcattgaacattttgcaggttctgtaatatttccttttggttctgtcacataatctacaattgtaaatctaaaaaagataatacatttcaatcactatgaatggatctgtaaaa

SEQ ID NO: 138166 - DNA, 2342 bp, Arabidopsis thaliana landsberg
tgtaggtttacggttgaataaacagtgcatcagtaaagcattcattaactaggattttttttagttgcctcaatgcctttctatcaagagatttatgagattagtcctagttaagccataccacactccaccagccgtcgccctacattccattaacttgataatgaaacctgtgcaagttatttgtagtctttatcatctcgacacattgtaaccttatgctacttaccttctcacaggtatgacttaaagagcaacaaagaagaaagagactccattcgacagctgaaactgtatgtttgcttatacttattgagagtttaatggcttctcaactttctaccaaatgttacgtttcccatttatctctgttctcctaggtggcagctggttattaacttgctcaatgtgttgataaaactaggaataagaagtagtagtttggaactcctacactgagatttcgagtcagtttgtaagtaacgtcttttatatctgtaaatcctgcaggacggaatatgaaaacctgcggagacagtgtcgcgagattcatgaacgctatgaaaatgtctgcgactcaaaggagacagctcagagcagcaacactgaagacagtcaggttcttgaatcccatgatattgaggaagtcgagagttccacaagaaccatcaccgtagatgaatcagagaagttgaattctgaatcgattatgcaggatgagaactgtgaaaagagcgatgtcaccacagaagatgctgctggtaatgattcagactcaaccaatcctgaagaaaccgagacttcaccttttctagctaacgaagaagtagaaagccacaatactgttaaccaagaaaaagaaatttcgtctccatcatcaaagccaaaatctcaggcagcggacgaggatttcatgtcaacttggcagagaattatccgcctagatgctgtgagagcaaatgacgaatgggtgccctactcaccaactcaagctgctgtttctgagacaaaagccaggggaatagccattcaggttggtctcaatgactatgaccacttggaaccctgccggatatttcacgcagcccgtctggtcgggatccttgaagcctacgcagtctatgatccagaaattggttactgtcaaggaatgagcgacttactatctcctttaatcgcagtgatggaagacgacgtcttagcattctggtgctttgttggcttcatgagtaaagcacggcataatttccggttagacgaggttggaatcaggcggcaactctcaatggtatcgaaaatcataaaattcaaagacattcacttgtaccgacacttggagaaccttgaagcagaagactgcttctttgtataccgtatggttgtagttctgttcagacgagaactaacctttgagcagacgttgtgtctctgggaagtaatgtgggcggatcaagctgcaatacgaactgggattgcgaaggcgacatgggggagaatccggttacgagcaccaccgacagaagatttgttgctttacgcgatagctgcaagcgtgctgcagaggaggaagacgataatagagaaatacagtgggatggatgagataatgaaggaatgtaacagcatggctggtcatcttgatgtttggaaacttctagacgatgctcatgacttagtcgtcaatcttcacgacaagatctaagactacttatatctttcactcttgttctctctctttacttgtttgttgcattctttgttatttgttacataaaatgtgataaaaaccgttgtcctaaaacgcatgaaaatgtcttcactattgctaaaattaaatgtagaaaaacttagccaaacgagaacccgctgaggctaaaagaaggacttgactttatttggttttaagagcctctggttgagctagaggtgtataactgtaacaaactaactattcttcgttttcaatttccagatacatcagatctcttcttcatcttcttcctcttgggagacttgatttattttgtgatcagtctcggattgtaacatactgcgatcttttttcagcttctctaatggcggatactgttgaagagcctcaattacaaaatggagcggcaccagctgagtccgaaaccgagcaaaatccgattccggaaccacaactccaaactgagcccaaactaaccggagaaattccggaaatagaagcggatttaacgccggaggaagtacaatcggaggtaacggatgcaaagccagaggaagtacaatctgaggtaaagccggaggaagtaaaaactgtggtaaccgatgcgaaaccggaggaagcacaatctgag

SEQ ID NO: 138167 - DNA, 1242 bp, Arabidopsis thaliana landsberg
atgaaggaagagggcgtaaagcataatttaaagacttattcgatgatgattaacggatttgtaaaactaaaagattgggccaatgcgtttgctgtatttgaagatatggtaaaagaaggcatgaaaccagatgttatactatacaccaacatcatctcagcattctgcgggatgggtaacatggatcgagcgatccagactgttaaggagatgcaaaagctgaggcatagaccatccacacggacatttatgcctatcatacatggatatgcgaaatccggagacatgaggagatcactagaagtttttgatatgatgagacgatgtgggtgtgttccaaccgttcatactttcaatggtttgattaatggtttagttgagaaacgtcaggtatgtttcacgaatctatgtcttgatgttttcctatagagattatctgattgaactaatctcttgtcaaattatttttgtagatggaaaaggcggttgagatattagacgagatgacattggcgggtgtaagtgcaaacgaacatacttacacaaagatcatgcaaggctatgcatcagtcggtgataccggaaaagcctttgagtattttacaaggcttcaaaacgaaggtttggatgttgacattttcacttacgaggcgttacttaaagcttgctgcaaatcaggaagaatgcagagcgcattagctgtcacgaaagaaatgagtgcacggaatatcccgcgcaattccttcgtctataacatattaatcgacgggtaatgtatctggttttgtaaccactttttggcctgcttctagaattctcattcgtttccctctggtttattttagatgggcacgaagaggcgatgtatgggaagccgcggatttgatacagcagatgaaaaaagaaggtgttaaacccgacattcatacttacacatccttcattagcgcttgttctaaggccggcgacatgaatgtaagtttccattcaagaagcagattcttgtcacgggtttgtaacgagaaataaaacttttggaaatgtttggcagagagctacacaaacaatcgaagaaatggaagcactaggtgtgaaacctaacatcaagacatacacgaccttaataaaaggatgggcgagagcatctcttccagagaaagccttaagttgctacgaggaaatgaaggcgatggggataaaacccgacaaagctgtgtatcattgccttctgacttcgcttct

SEQ ID NO: 138168 - DNA, 3136 bp, Arabidopsis thaliana landsberg
gttcatctaccaacaaatcctcaactccttcttcttcactaatagtataccacaaaacctcaaaattgtaatttattagattatcgtgatggccttagctaaagagttaatgggttatcctctcatcacagaaaggtcatcacttgtctcgtcggcgtcgcatttcaagaagaggacacagtcaacacagttctcgatcaacccttttgaccggagaccaagaaaaaccaaatccggcgtcgttgcagccatcagcgaggatttggtcaaaacgctgcgtttttccacaacgaccggagacagaaagagcgaagaggaggagaaagcggcggtgaagttcaaggtgagagctgtggttactgtgaggaacaagaacaaggaggatttgaaagagactcttgttaagcatttggatgcttttgctgataaaattggtcgaaacattgtcttggagcttatcagcacccaacttgatccaagtaagtccttctcttgaaaagcagagcattcacatattttctgaagatcgtgtaatctaaaatgggtttccaaaatactaagaaaaaacaaaactttttgattcaaacagaaacgaagttgccgaagaaaagcaatgcagcagttttaaaggattggtcaaagaaatcgaaaactaaggcggagagagttcactatacggcggagttcacggtggatgcagcgtttggctcgccgggagcaatcaccgtcatgaataaacaccaaaaagagtttttcttggagagcataaccattgaaggcttcgcacttggtcctgttcactttccatgcaattcttgggttcagtctcaaaaagatcaccctgataaacgaattttcttcactaatcaggtaactcattaaactaagtagttaatcatggtttccaaaatctttaaaacacgtcattttcgttccctcacgaattgattacatatcttagtcagtttcaaaatcttctttaacatttatgtcatggtgggtccattaataatacccaactccccagctattaagtatgaaaataacgtcatgtaaattgaatattattcgcagccgtatttgccgaatgagacaccaagcggattaagagtattgagggagaaagagttgaagaatctacgaggagatggaagtggagtgagaaaattatcagacagaatttacgactttgatgtttacaacgaccttggaaatcccgacaaatcatccgagctctctcgccccaaactcggtggcaaagaggttccttaccctagacgttgtcgtactggtcgccaatcaacagtttctggtatattttgtagctcaatatctctatgaaacatttttagtacgatttgcattcaacaaaaaaaacaacactttctgttttggttttatgaaacgtttctcatattgatctgtactgttgacagataaagacgcggagagccgagtagagaagccattacctatgtatgtgccacgagacgagcaatttgaagagtcgaagcaggacacttttgctgcagggaggctaaaagcagtcttacaccacctaattccgtcgctcaaagccagtattgtagctgaggactttgcagacttcggcgagatcgatcgtctttataaagaaggcttgttactcaagttagggtttcaagatgacatctttgagaagtttcctctccctaaggtcgtagttgataccctccaagaatctactaaaggactcctcaaatacgacactcccaaaatattatcgagtaagaaccctaaattaataacatcaattatttagtaaacaaaagttgaactaatgccatttcatatccccacaccaactaaagcaagcatcccctaattgagtaatttccaagaattttacattattttattggtcttttttggcgatttgtgtatcgttggttattgggacccattagtttcgaaaagcagacaaaacgcattactagagtactaaaacaacaacatatgttccacgtgattctcttaattcgttttgcggataacaaaagcgcgtttgcttttacttaactcattcatagccgtaacttgctttttagttattaatctttggaaatattaattagtcaattgatttctgacgactataaataatgcagaggataaaaacgcatggttaagagatgacgaattcgcacgtcaagccatagctggaatcaatccagtgaacattgagagagtcaagacttttccaccggtcagcaatcttgaccccaagatctacggtccacaacactccgctcttactgacgaccatatcattggtcacctcgacggattctccgtacaacaagtacgtttatctatataattccccttacaatggattaactaaactaatcaaaaaatgattaaattaaatagtcttttctattttttttcaggcgttggaagagaatagattgtatatgttggattaccatgacatattcttaccgttcctagaccggattaatgcgctagacggacgcaaagcctatgctactcgaactatcttcttcttgactcgtctaggcacacttaagccggtagccattgagctaagcctccctccccatggtccaaaacatcggtccaagcgtgtgcttacacctccagtcgatgcaacctctaattggatgtgggcagctcgctaaagcccacgttagttctaacgatgctggtgtccatcagcttgtcaatcactggttagtacttatacatgttaatacacatttatgtaacaagtagtgaatatagagttatatattgacatgttttgtcatatttgtttgtaaaggttacggacacatgcatgcttggagccatttatattagctgcacacaggcaattgagcgctatgcatcccatattcaagctactggatccacacatgagatacacgttggaaatcaatgctttggctagacaatcgttgatcagtgcagatggtgtgatcgaaggaggcttcactgctggtgcatacggcatggaaatgagtgccgccgcatacaaaagcagctggcggttcgacatggaaggcctccctgccgatctaattagcaggtatttagctaaacctttttttgttttagttgaagattttga

SEQ ID NO: 138169 - DNA, 2399 bp, Arabidopsis thaliana landsberg
tcaccatctagaatcttccctcaacctctagaaaacaactttcgtatccttcaaaaaccctaaaccctagcttttgcacagacgcaatttcatcgcatcattttgcaattttcctttactgatctgtcaccacctcttgaatttcgaaaccatggctaccgcagctctcctccgctctattcgacgccgtgaagtcgtttcctctcctttctcagcttacagatgcgtaagtctttatatcttctctcgatcttcttctatctttacgagacctgttagcgaaatcagagtttcaagtgagctaacttacatgatctgattttactcttttcttatggttcatttctcgcaatctcgaaaatgatgtttgttcgaatttccttggcctgatctggttcaatcttgttgcagctttcaagcagtgggaaagcatcattgaacagttcctatctgggtcagaattttagaagcttttccagagcctttaggtatttgatctttccatttatttgctaccaccaaagatcttgctatgtttctctgtttcttaaggtttattcttcttgatttagctcgaagcctgctggaaacgatgtcattggtattgatttgggtactactaattcatgtgttgccgtcatggaggggaaggtaagctgctgatttctaaatgagttataatttttttttcctgaggttttgatgtttgagctaactttgtgtgtgttttatctgatcttgtagaatccgaaagtcattgaaaatgctgaaggtgctcgaaccactccatcagttgtagcattcaacacgaaaggagaacttcttgtgggtacaccagccaagcgacaagctgtcactaatcctacaaacacagtatctggaacgaaacgtttgattgggagaaagttcgacgatccacaaactcagaaagaaatgaagatggtgccttacaagattgtgcgtgcacctaatggcgatgcgtgggttgaagccaatggtcagcagtattctcctagtcagattggagcgtttatcttgacgaagatgaaagagacggccgaagcttaccttggaaaatctgtcacgaaagctgttgtcactgttccagcttactttaatgatgctcagagacaagcaacaaaagatgctggtagaattgctggtcttgatgttgagagaatcataaatgaaccgacggctgctgctctgtcctatggaatgaccaacaaggaggggttgattgctgtgtttgatcttggtggtgggacatttgatgtatctattttggagatttctaatggggtattcgaggtaattatctcccatgtgatcttatgtttgtcaggtcttctgttgctttttctttgagaatcgttcttattattaaattgcttttttcaggtgaaagccaccaatggtgataccttcttgggaggagaggatttcgacaatgctctgctagacttcttggttaatgagttcaagaccactgagggaatagacctagccaaagacagacttgctctgcagaggcttagagaagccgctgagaaagcgaagattgaactgtcatctacttctcaaactgaaattaatctcccatttatcacagccgatgcatctggagcaaagcatttcaacatcaccctaacaaggtcaaggtttgaaactcttgtgaatcacttgattgagaggacccgcgatccttgcaagaactgtctcaaggatgctggtataagtgcgaaggaagttgatgaggttcttctagttggaggaatgacgcgtgtccccaaggttcagtctattgttgcggagatctttggaaagagtccaagcaaaggtgtcaatcctgatgaggctgttgctatgggagctgcacttcaaggtggtatcctccgcggtgatgtcaaagaattgttgcttctggatgtcacacctctatcgctcggtattgaaacacttggtggtgtctttacgagactgatcacccgaaatacaaccatccccacaaagaagagtcaggtatgcccgtcaagatttgatcttttgatggaaaatcacttagtaactaggaaggaatcctgacgattacattggcgttaggcaaaactagggtagtatgaggcatgcgttatagtttgagttactcctcttggcattgattcctacatgattccaatcttttattttaaggggtcatgaaagcacattcctgtgatatatactaatttatgagccatccaaagcaaccattgtttttgtcaagtttttactaaaatgttgattgtctcgtttcattctcttgaaggtgttctcacctgcagccgacacccagactcaagttgggatcaggggctcaaaatagcaaaaaggcaacagacaacaagctccgggagctt

SEQ ID NO: 138170 - DNA, 1771 bp, Arabidopsis thaliana landsberg
taagaagatacacgcagatatcatcaaaactgggtttcaaccagatttgaatatatccatcaaactactcattcttcatttaaaatgcggttgcttgagttatgcacgccaagtgttcgacgaattacccaagccaacattatcggcttacaactacatgattagtgggtacttgaagcatggattggtaaaggaattacttcttctagttcaacggatgtcatactctggggaaaaggcagatgggtacacgctttccatggttctaaaggcttctaatagtcgtggctcgactatgatactgccgcgtagcttatgtaggttggtccatgcccggattataaaatgtgatgttgagctagatgatgtgttgattactgcacttgttgatacttatgtgaagagtgggaagttggagtctgcaaggactgtgtttgaaacaatgaaagatgagaatgttgtgtgttgtacatcaatgatctcaggttacatgaatcaaggttttgtagaggatgcggaagagattttcaatactaccaaagtgaaggatattgtagtttacaatgctatggtggaaggtttcagcagatcaggtgaaactgctaagagatcagttgacatgtatatttcgatgcaacgagctggtttccatccgaatatttcaactttcgctagcgtgattggagcgtgttcggttttgacgtcccatgaagttggtcagcaagtgcacgctcagattatgaagagtggagtttacacgcatatcaaaatggggagctctttgttagacatgtatgccaaatgcggagggatcaatgatgcaagaagagtctttgaccaaatgcaagagaaaaacgtattttcgtggacttcgatgattgatggatatggaaagaatggaaaccctgaggaagcactcgaactcttcactaggatgaaggaattccgtatagaacccaattatgtaacctttcttggtgctctctctgcttgttcacattctggtttagtcgataaaggttatgagatctttgagagcatgcagagagattattccatgaaaccaaagatggaacactatgcttgcatagttgatctcatgggacgagctggagatttgaataaagctttcgaatttgctagggcgatgccggaaaggcctgactcagatatttgggcagctcttctcagttcttgtaatttgcatggtaatgttgaactcgcaagcatagctgcgagtgagcttttcaaactgaatgctgataaaagacctggagcttatttagctttatccaatgtctacgcttctaatgataaatgggacaatgtgagcaagatccgagaagtgatgaaaagaagaaggatatctaaaactattggtcgtagttggaccagcgaagattgattggaggtacttaaataagagtctcatacttatcaggctttttgagtttggtccattcatagaagattgattggagatgatactttttgcctcgagagtgtttgacagaagcgataacagtgaaacatacagtaaggcttctcttaattcacgctcttcaaatcaaatacactgagctccaaaacatttgttcagtgacgaaatcgaaattgtacaaatggttgatgattttgtgtttgtgttttattgtgcatctatggaggtcgttttgtcggtgatcaagacagggcaaattcacctttgtggaacttatccatggcctctttaaactcaggcattgcagattcgcgcagatttaccaaaacc

SEQ ID NO: 138171 - DNA, 1261 bp, Arabidopsis thaliana landsberg; identical to SEQ ID NO: 11275

SEQ ID NO: 138172 - DNA, 1002 bp, Arabidopsis thaliana landsberg
cttaactcttaagggtctcattctgttatatggtgctttttttttccaggtctctcaccatctactgatgtggagctcttgaaagaagcttttggcagttttggaaaaattgttgatggtagctatcgtttttacagctgtctcatttctccattggtttttcttctcattgctgactaaaatttactttgttcttcacagcggtagtggttttggaccgtgaaagtggtttatcaaggggctttggtttcgtaacatatgattcgatcgaagttgctaataacgcaatgcaagctatgcaaaataaggtgatgccaattttccggcttattttggttgctaattatcatgagtctaattactttctcactttactttctttccatatccttaaaatcttcttactttgtgacataagtttgtttctagtacactagtttgtatattagcaatttatcatatagcttgtaatgctactcctgtctctctcgtttgataagtaactcttttagtaaagaatcatactgtgaaattagaccattcttttcattgctttgtttatctcattttctttagacagaaagagagatgttttggtactacgttgctgcttcagaaaccaatgggattgttctttctttctttgcttgattatgtcaatccgccatttatagagtttcctgcttaaataggagcttgatgggcgaataattggagtgcatccagctgattcaggaggtggtgggggtggtggtggttttgcaagaaggggaggttatggtggtggtcgtgggggatatgctcgtggtggatttggtcgcggtggatttggtggtggtggctatggctttgttcgttaactggacatccagatatgtctaccgccaagattgattagtctgtggtttaattttctcttcacaaagaccactattttgttataacaacgctcttatgcttgaacaaacatatcaagcggctaaagttggcaaaaacatttgt

SEQ ID NO: 138173 - DNA, 2756 bp, Arabidopsis thaliana landsberg
  unsure (1)..(2756): unsure at all n locations
gattttgatctctcaaacaagcttggaaagggagggtttggggctgtttataaggtaagtcccttactgaatcgaacaatagctgtatatttttctgagatactaggaaagaagggtacatgtaaataccttttaatacgttttgttttgaataacacattcaacagggaaacctcaatgatggaagagaggtggcgatgaagcagttgtcaattggatcacggcaagggaagggacaatttgttgcagaaattattgcaatttcttcagttctacatcgcaacctagtaaaactttacgggtgctgctttgaaggagatcatcgtttgctcgtatatgagtatctccctaatggaagtctcgatcaggcattatttggtaatgaacagaaacatgacttacctatctctgcttctgccaagctaaagtaatcattatgccattgggttggatgttacaggggataagagtttgcatcttgattggtcaacccgttatgagatatgtctgggagtagccagaggtctagtttatctccacgaggaagcaagtgttcgcataatacacagagatgtgaaggccagcaacattccactggactctgaactggtcccaaaagtttctgattttgggcttgcaaaactatatgatgacaagaaaacccacataagtacccgggttgcagggacaatgtaagtaactcccaaccctgacctctggtttgcaacacaactatggatttataacacatgttggtgattttactgtatcaatgcagtgggtatcttgcgccagagtatgccatgcgtggacatctaacagagaaaacggatgtatatgcctttggtgttgtggctcttgagctagtgagtggaaggccaaactctgatgagaacttggaggatgaaaaaagatatcttcttgaatgggtacgtccatacttcaacactttttgataatgaacacaacttcaatgtatgtgaccatgagaggctaatctgggttatgccctttagcaaaagctgatattgattgtgtaacttgttcacaggcatggaatctacacgagaaaggccgtgaagttgaacttattgatcatcagctgactgaattcaacatggaagaagggaaacgcatgattggcatagccctgctgtgtacacaaacatctcatgccttgaggcaccaatgtcacgagtggtggccatgctttcaggagatgttgaggtcagtgatgtcacttcaaagccaggctacctnnnnnnnnnnnnnnnnnnnnnnnnnncagcctcctcaatcagcggctttccattaagaaacacacaggcttctgaatccttcacgagctttgtggcgcctagatccgagatatcaccgagaaacaacgacgctaggccaatgcttggagcccagatgaatgagggaagatgacaaagaccctatatggtggctatagatatagtcatatagagattatgtttgtgtatatgaggttcactttattcttcttggattggaaaaactctagatttcactttggttaaataataataatattttagctcctctgacttccacaagcggtcgtgatgggccacgtactattcacgtcctcaaccaaatcaatgccgtctcttttacagtgtaactgtgttggtttccaaatgaaggaagttattaagaacacttttcatgagtggttcaacgagctcgaaccggatatgacctgagattctaaagaatatttatgagtcccaagtcggagatggacgacgatttgaaacttgaaacgtgtgcttttgtttttatattttggtgtttgtcttacattattaaaagtcaataaagaaatggttcaggcaatttaagcaagccatgttgatcaattacataatcttataaacgtcacattgagattgtgttctgttgaattgaatgtttttggtctaattggtgatgtttattacggacgactcgcagcgcagccgccaccgtcgttgacacagcaggtgcactcctcggtccacgcacgtgagcttacacgccctcgctgtcgggacaagaccattaattaattcaaattagcaaatgcatctcttagtttggtaacggcaattgttatagtatttaaactgaaatcataaatgaaccaaaagcttagacctctcaactaaattttgcaaagagcagaaataaactctttctaaaaagcatttgtgttttttaaccaaaagcaaaaccaccgtcgtcgatgaccaggatacggaggtctccgtgtctactactcctcattatctggttcatgtgtattgccggttcggttcaggtggttcaatctcaaaaccaaaccggagccactactcatcccgacgaaggtttgtctttaatctaacacttacaaagagttcaatcaccaataatcaattggattgtatagattatagtcttatactagttattcggatccaaattgattagaaacaaaaaatacaccatgaattgtatccacaaattccaaaataataagatacttaccggttagtttctgttaataattgaccggttatattaatttgaccgttgtgtttgactgtggatacaacagcgcgagctttgaactcaattttcgcggcttggaagatccaggcgccgagagaatggaacatcagcggcgaactttgctccggcgccgctatcgacgccagtgtactcgactcaaaccctgcctacaatcctctcatcaaatgcgactgtag

SEQ ID NO: 138174 - DNA, 2573 bp, Arabidopsis thaliana landsberg
atgagactcacattagacttaggctgttcactatgcaccacagcggaaacaggcgttgttgatacaaccagagacagtttagcagaattactagaaggaagtgacaaacaccttttccagtaaggcgatgtgatcggacttgcaacaagaggcttttcactggtttctgaaacactaggacttagtagcaatcttctctcatagtttggtagagaagctttccttttcagactcagatttctcaaaattcctaaactaggcgtcggttttggtggtatttggatagaaacatccaattggcttccacttggctgagatctggatacatcttcaacagattgttctttaacctgataacaatcattgattaaaacctcatactgataaataaaaaaatgaatctttctacagtgaagcaaccaagttaacaatcatagcaatcagggactgaagaacactaagtatgcaattctccatttcctttttttctgattggttaatttcagataccagtgataaaccctagattattcacaaaatgaaattcatgaaacgataccaaaccaattgagcaagaaatgtaaaaccctttagcgattctgaaaaatatacatttaaaatcacactaacggagactttgtattataaagatttcaactttaacctagaatctagcaaaagaattacaaaaatttaagatttcgaatacctgagaagaagaagaagaagaagaagaagaagaagaagaagaagaagaagaaccagtagaagaatctttagcgagaacaaaatttctgggcggttgaattgaagagccttccatcataatcgaaccaatagaaaccaaaacaattttgaagaaatcaagtttgatcgacaaaaaaatctgagccagggagagaagcaatcaatctaaagagatttgagaaatttgtcgtttattaatatgtagctaaaatccgacaagagagattttttttattaatgtgtgtgtgtatgcaactatgcatgcatcagaagaatccagcatttttactgctctttaattacccgcttaattcaattaccagtcaaactcactcttcctctgttcttcagttacccatttactttaattcgactaaaccgaactaaaccaaacaaaaatgcttacccatttaatttatttcccatcaatatcacttaccaaatacaaaataagagtgtattcaacattcatatcaattgggcgccgacccagtctgtgtccggatagcccattatataacttttgggctaattatttgcaaaaaaaaaaaaaaaaaaccgcgagcttgtgagacataagagagaagacgaacagagtgttcacaaaccctaacatttcagaaagacgattactcgataacacagaagagagattaaatggtaaatctcatgcggaagttcgcaaaatcgtaagttcctctttcatatcattatgatatttgaccatttcgtagttaggtttcgggattgctttgataaggtagttggattctctccatttgtaataaccgtatcagttttttgaatttcaggattggtagaccgggaacagaattttggagaggggaagatatgataagcgcattacctgatcatttgctatgtcatatacttatttttctttctactgatgaatctgttttgacgagtgttttgtcttctagatggagaaatctctggaaatgggttcctaggttagacttaaacacctctgatttcccataccctaatgacgtaacttgtgcggctttcatcgacaagtttctgaatctttatatcgaatcctacttgcgggaattcaagttaagaattgaccaagctaactttcgcagtaatgtatctctttatgagccgtgtcttggtgtagtgattaagaagcccaacgttcgacatttccaagttgagagtgatctgcttgagcattggtgcactagtgagatacgattaaccctttccgcttgccaggcattggtatgcttaaagctccatttagtatggctgaatgactttgagtctctatctttgccctgtctcaagatcatgtacttggaagacgttttatttcctagcgatgcggctgcagagacgctaatctcgtgctctccagttcttgaagatttaaaaataagcctccatagagatgatgttgtagttgttctacgtgtctactcacagtcactaaagagcttcactctaaaacgggcggttcctgtttatgctataaacggtgcacatacagtgttggtcgatactccgaggcttgtgtatatgagtctcatagattaccaattcaaaagcttcaagataatcagcatgagtgactatgtcaaggttgatcttgatgtcgactttgaactgatgcgtgatgaattatcggaaagaaatatcgtctatgatcttctcaacaatttttcaggtgttagagatatgaccatctcgtggacaactcttaaggtatgtaaagtaaaactgtttacaagctctaaaatttccctttatcattctttttctcaactttcatgttctgtttactcttctttttgctc

SEQ ID NO: 138175 - DNA, 1829 bp, Arabidopsis thaliana landsberg
tgtatttgtggttgaatctgcttggtttcagtcgattcctacagtacagagatcctcgagctcaaaggcgtcacccattggttgatcctgtggttgtatctgagattaggagatgtcttgaagaaggtattgaattccaaggagagcttcttaatttcagaaaagatggtactcctttggttaacagactacggcttgctccaatacgtgacgatgatggaaccattacacacgtaattgggatacaggtcttctctgaaacgactatagaccttgaccgtgtctcgtatcctgtgttcaaacataaacaacagcttgatcaaacatctgagtgcttgtttccaagtggaagcccgaggtttaaggagcatcatgaagatttctgtgggatattgcagctatctgatgaagttttggctcataacatcttatctcggttaactccaagggacgttgcttcaattggttctgcttgcaggaggttgaggcagttgacgaagaacgagagtgtgaggaagatggtatgtcagaatgcgtggggaaaagagataactggaacactggagattatgactaagaagctaagatggggtcggttagctagagagctcaccactcttgaagctgtgtgttggcgtaaatttactgttggagggattgtacaaccttcccgctgcaatttcagcgcgtgtgctgttgggaaccggcttgtgctatttggtggggaaggggttaacatgcagccattggatgatacttttgttctcaatcttgatgcagagtgtcctgagtggcagcgtgtgagggtgacgtcgtcgcctccaggacgttggggacacacactctcgtgtctcaacgggtcgtggttggtagtctttggagggtgtggaagacaaggattgcttaatgatgtatttgtgcttgatctagacgctaagcatcccacatggaaggaagtagcaggaggaactcctccattgccaagatcttggcacagctcgtgcaccattgagggctctaaactggttgtctcaggtggctgcacagacgctggagtgcttctcagcgacaccttcttgttggatctgacaacagataaaccgacatggaaagagatcccgacatcatgggctcctccttctagacttgggcattctttatcggtctttggtcggactaaaatcctaatgtttggcgggcttgcaaatagtggtcatctaaagctaaggtcaggggaggcatacactatagacttggaggatgaagaaccaagatggagagagcttgagtgtagcgcattcccaggcgtggttgtaccgcctccaagactagaccatgtggctgtgagcatgccgtgtggtagggtcatcatctttggagggtcgattgcagggcttcactctccttcgcaactgtttctaatagatcctgcagaagagaaaccgtcatggaggatcctgaatgtccccgggaaaccgcctaagttagcttggggacatagcacatgcgttgttggaggaactagagtattggtccttggtggtcacactggtgaggaatggatactcaatgaattacatgaactctgcttggctagccggcaagactcggatctgtaaagactctttccttcttcatttggtttgtggttttgtatctgtcacattccaaactcttacgacatgtagaagagatatatcagaagctagaagcgtgtgtacatagtaaattagtgattgttgtacgctttagatagatattcatgtaatgttaatggttttgctgtatgaagatccttctataatatacttctccttgttactcgacca

SEQ ID NO: 138176 - DNA, 2782 bp, Arabidopsis thaliana landsberg
tcgcttcgacgagaatggagaggtagttttctgatttttgtttctatttatttccctgaatttcatatctccgttcttgtgttcgttggcttcaattagataagtgtacttagatttcgaatcttcttgtaaagcttcaagttttgaaaattgttatgttttcaattgcagtgtagatactgagcttactagtttcaacaatatggttgctaaatcatcatatcctgtacggattttgcatcacaacaatggtattagtgaagatgaagaaggaggttcaggagttgaaccttatgtgggtctagaattcgatactgcagaggaagctcgtgagttctacaacgcttacgctgctaggacggggtttaaggttaggactggtcagttgtatagatcaagaactgatggtacggtttcgtctaggaggtttgtttgttcgaaagaaggttttcagctgaattcgagaactggatgtaccgcgtttattcgtgtgcagagacgtgatacagggaaatgggttcttgaccagatacaaaaagagcataaccatgagcttggaggtgaaggtagtgttgaggaaacgactccgcgaccttcgagagctccagctcctacaaagctaggtgttactgtcaatccacatagacccaaaatgaaagttgttgatgagtctgatagagaaacacggtcctgccctggtggttttaagcggtttaaaggtggtggtggtgaaggagaagtgagtgatgatcatcatcaaacacagcaagctaaagcggttacgggtactgagccgtatgcagggttggagtttggttcagctaatgaagcgtgccagttttatcaggcgtatgcggaagttgttgggtttagagttcgtataggtcagttgtttcgatccaaagttgacggttcgatcacatcaagacggtttgtttgttcaagagaagggtttcagcatccttcaagaatgggttgtggagcttacatgaggattaaaagacaagactctggtggttggattgttgaccgtctcaataaagatcataatcatgaccttgaaccagggaagaagaatgacgctggtatgaaaaagataccggacgatgggacaggaggattggattctgttgatcttattgaactaaacgacttcggcaacaaccatatcaagaaaactcgagaaaacaggattggtaaagaatggtatccgctgcttctcgattatttccagtctagacaaaccgaagacatgggattcttttacgctgtcgaattggatgtcaataatggaagttgcatgagcattttctgggcggatagccgagcaagatttgcttgcagtcagtttggtgattccgttgttttcgatacttcatacagaaaaggaagctactctgttccgtttgctactatcatcggttttaaccatcataggcaacccgtacttcttggttgtgctatggttgctgacgagtctaaagaggctttcttatggttgttccagacatggcttcgtgccatgtcgggtcgtcgtcctagatccattgtagctgatcaagatttgcctatccagcaagctttggtccaagtctttcccggggcacatcatcggtactcagcttggcaaattagggaaaaagagcgggaaaacctcataccgtttccaagcgagtttaagtatgaatatgagaaatgtatataccagactcagacaatagtcgagtttgactcagtttggagcgctctcatcaacaaatatggtcttagagacgatgtttggctcagagaaatctacgaacaacgagagaattgggttcccgcgtatctaagagcaagtttcttcgctggaatcccaataaacggaaccattgagcccttttttggtgcttcacttgacgctctaacgcctctcagagaattcatttctcgatatgaacaagcactcgagcagagaagggaagaggaaagaaaagaggatttcaattcttacaacttgcagccgtttctacagacaaaagaaccggtggaagaacaatgcagaagactctacacgcttaccgtcttcagaatcttccagaacgagctcgtccaatcttacaattatctctgtttaaagacttatgaagaaggagcaatcagtaggttcttggtgaggaaatgtgggaacgagagtgagaaacacgccgtgactttcagtgcgtcgaatctcaattcgagttgcagctgtcaaatgtttgagcacgaaggacttctgtgtcgacatatcttaaaagtgtttaatctgctggacataagagagctcccgtctcggtatatactgcaccgatggaccaagaacgcagagtttgggtttgtgcgtgatatggaatcaggcgtgagtgctcaggatctcaaggccttgatggtttggagtttgagggaagctgcttctaagtacatagagtttgggacatcgtctctggagaagtataagcttgcttatgaaattatgcgtgagggtgggaagaaactttgttggcagagatgatgaactcggcttgaccatgtaagatcaatcttcttcattgatgtctgaaattaaagatcatccgtatcatgtctgaaagttgttgaagattctagtgtgagaaatgaaagaactaaagaggttgttatcgttgctgtaggtgtttttgctttacccttgaagaagataaagtcttggtcgccgttacttaatcttaacctttttgataacatcgtcgatgcaagaggtggtggtggaggtgggagttttgtg

SEQ ID NO: 138177 - DNA, 1059 bp, Arabidopsis thaliana landsberg
ggcgaagaagaagatcgtagtagcccgataatgaagctacgattgagacatcacgagacgagagaaaccctaaaacttgaattggccgatgcagacactctccatgatctccggcgacggatcaaccccacggtgccttcctccgttcatctctcgctcaatcgtaaagacgagctcatcacgccttcgccggaggatacgctccgatctcttggtttaatatccggtgacctaatttacttctctctcgaggctggcgaatcttcgaattggaaattgagagattctgaaaccgtagcttctcaatcggagagtaatcagacgagtgttcatgattcgattgggttcgcagaggttgatgttgtccccgatcaagcgaaatctaatcctaatacctccgtagaagatccagagggagatatttcgggtatggagggtccagagccgatggatgttgagcagcttgacatggagctcgctgcagctggaagcaaaaggctaagtgaaccattcttcttgaaaaatatactgcttgagaaatctggtgatactagtgagttgactactttggcttttatcagtacatgctgttatgttagaatctggattcgtgctgttgaatcatggctctgataagtttagcttttcaaaggagttactttctgtatctctaaggtatactctacctgagctgattacacgtaaggatactaatacagtcgagtcagttactgtgaggtttcagaacataggccctaggcttgtagtttacggaactctaggtgggtcttgtaagcgagtgcacatgacttctcttgataagagtaggtttttgcctgttattgatttggttgtggatactttgaagtttgagaagcagggctcttctagctactaccgggaagtgttcatgttgtggagaatggtaaaagatgaacttgttataccgttgttgattggtctttgtgataaggctggcttggaatctccaccttgtttgatgctcctaccgacagagctaaagctgaagatactagagttgcttcctggtgtgagtat

SEQ ID NO: 138178 - DNA, 374 bp, Arabidopsis thaliana landsberg
caagagaaagaaagagcaatggtgaacgaaatggtgtcgaagatgacaagtgtgtgctgggacaaatgcatcacaagcgcaccgggaagtaagttcagctcaagcgagagttcttgcctcactcattgtgctcaacgctacatggatatgagtatgatcatcatgaaacgctttaattcgcagtaaaattgattggaggatatcatacttgttggaattttaatttatcctttttttgtttctcttggcaagtgttgaaatcccttttattactctagtgatcttgcaagagtattctcggataagtgttttaggtgtttctttatatggttatgtgattgagattgttattgatggctagtaataaattaaga

SEQ ID NO: 138179 - DNA, 1656 bp, Arabidopsis thaliana landsberg; identical to SEQ ID NO: 36103

SEQ ID NO: 138180 - DNA, 1915 bp, Arabidopsis thaliana landsberg
ccttgttaggaagtagtagtactgataatagtagaaatgagtacattgaggttagtagttcagtgtgtgtgtttttaattagagatgagaagaacccttttatgtattattacctgtggtgttactcttaggagcgtactctggaggatatttgggaagaagaacggaagagacagcaagttcactggacgttaatcttttctcagttgattgcacagtgggctcagtggataggttgggcttttattgtcttgttactatcactccttgattttttaaaagggggattatctcattacaacttgtttcttggtttgcagccaaaatagtctttggatctggctcacttgttgggaggtttctttctctgcctacatttggtcaaataggtactggtgggaggcttctgccaccacctcttagtatgttgcaggtaatctaaacggtctaccttatcttttgaacattagataccaaaagatacgtttaagaggactataattcatcagcctataccatattcttttttaagtttacattttcacattaggttcttggtcttagcattgttgagatagctttagtagtttgtgtaagaatacttttgtaactgtaagaatacttgtgtaactgtatttgcactgtctcatttgtagactacaaatactttttattggcttgtgtttggaagaataatggtaactctggaaaacaaagagatgtatagaattagaaaatttatcagagtgtgtttctgcttggtgcctctaagtctcttacttgtgtatgtggtttattaggaagcttacttagtaaaatgatgactttctcttatggtctcaattgcttgtttttgttgctttttaaaattttaccggtttgttttgtttccagttatccatggtcaatttgactgtcactgtcaatttgatctccattctgtattttcttgcctcttattaggaagaaaggctgagaaatattaagcgaagaatagaaatcccatttgatggatctcgaatggagcatcaagtaagtgttctcatggactctctgtttgcttgattctctatattaattatgcacatgcaatgttttgtcgaaatttatgtaatctcatgattcacaggatgctcttagacaactatggaggctagcttatccacagagagaactaccacctcttaaatctgaactctggaaggaaatgggttggcaaggaacagacccttcaacagattttcggtacacaattttagctctggtcatgcaaatcttcttatatctagtcattttactgatgtttggtttcattaactggtttttgtagaggtggagggtatatatcactggagaatctaatcttctttgcgaagacctatccggtctgtgatgcatctctaattctcatctacatttttgatttaagagaactaataactttttacaattctaagtatagggattttatctctgagtcgctatgatcctaacaagatttgtgatatcattatgacaggaatcattccagagattgttacataaacaagatggaactagagcggaatgggaatatcctttcgcggtggctggcatcaatatctcattcatgctggcacaaatgttagatcttcaatcaggtaaaaaatgctcaagaaaccagctaaaaactgatcaagcttcatttccttttcccttctttgcccgtgaaaccgatcgattgtttcataccgtcaaatgtgtttgtgtttcaattcaggtaaaccatcaacaatagccgggataagattcttgggatttctggaagaagacgaaatggcattcgataatctctactgtatagctttccaaatgatggatgcacaatggcttgctagacgagcttcttacatggaattcaatgtaaatgtctttg

SEQ ID NO: 138181 - DNA, 798 bp, Arabidopsis thaliana landsberg
tctctttcttctctcctctgtgatgtgaggtttcgaagatccttctctgattcctcatcaaactcagatcagtagcggacccaagtaagaacacctaattagggtttctttttgttcgtgttccatcggttaatctaataccagattgagttccattggtacttttgttgttcctttcggagataatacgattcatggtcgatcatattttcaaggaatgatctttgctattcttaggattcatattatttgatcaatgcgtttcttatattcattttcaccattcaggatcatctaccaatccataagtttcattagggttcacattgagacttgagctagagaaaacatgtttttgtagctgcttgagaatttgttcttgtgtgaaacaattggttccttgtttttgatttattgcagataggatcaaagcaaacgaggtttcaatttagagtttttttaagctcaaatctcggttgcttcggttgaacttcttgatacactgtctcgttttgagttcttgttaggtcattcctttagagagatatatggcagaggtgaaggatcaattagagattaagttccggcttaacgatggttctgatatcggtcctaaattgtttcctgatgctactaccgttgctacattgaaagaaaccgttgttgctcagtggccaagaggtcagtgtctatgctcttactctgctttacatgtcttgatgatattcatttatgcaatgagataaaaccgcgaaaagctttatcggtctggcgatttctccatgactaggggggttt

SEQ ID NO: 138182 - DNA, 513 bp, Arabidopsis thaliana landsberg
aggtggttgaggtatcgacttcgaagactgggaagcatggtcacgccaagtgtcactttgttgccattgatatctttacttctaagaagcttgaagatatcgttccttcttcccacaattgtgatgtgagtcttgtgaatggattataaacgttatacaaagtctataatttttgactcacaacacaaaactgtttcctttttattggcacaggttccacatgtgaatcgtgttgattatcagttgattgatatctctgaagatggctttgtatgtgatcttctttttcactagttcagctttgtgttttgtctttgcccatatggttgaattagagggttttgttctttgattacatttacaggttagtcttcttactgataatggtagcactaaggatgatctgaagctgccaacagatgaagctttactcacacagctcaagaatggatttgaggagggtaaggatattgttgtgtctgtcatgtctgcaatgggagaggagcagatgtg

SEQ ID NO: 138183 - DNA, 1361 bp, Arabidopsis thaliana landsberg; identical to SEQ ID NO: 65766

SEQ ID NO: 138184 - DNA, 2010 bp, Arabidopsis thaliana landsberg
gtattctcagcatttgggtttgtccacaagattactactttcgagaagacagccggataccaagtatgttccaagccattaatttgctattttgctttgtattttattgttaatatctattatacttaaaatgtttactgtctgacttgctcgtaggcactggttcaatttactgatgcagaaactgcaaccgctgcaaaacttgccctcgatggaagaagcatccctaggtgacagttgtattaaatttttgacatggtatttagtctaactgtgaagggctgcatggttctagatatttgtttggagggtctgacatttggagcctttcaagcgtctgttggagttttagcactaatggcttgttccctagtgatgtatggctaatagcgttaatagatgtaggaaaacgaatttgtaacgagtcttttcatgtaggaacctgggaaaatactgtaggcaatggtagatacttagattaggattgtttttccatgtagaattcttggaaacatcgtctgtttattttatcacaaaccatacaggctttgcgttataagattctatatgtttgttagaggcatacttgtttactgacttatctttctgggcattaggtatctactcgctgagaccgtgggacaatgctcacttaaaatcacatattcagctcatacagatctgactgtcaaatttcagagtcatcggagcaggtatgtatgtgtattcacactttgtgttgaaacatgttttggtttacttggtgattgacatacttctgggaccaaaattactgaattgtttactctctatcttgcagggactatactaatccttaccttcccgttgctccatcagccattgatagtactggtcaggtgagcaatttgagatcagtctcttactggaaaatgcatttatgattgtaaatctgctttctacttagttgaatctcttactggtgatgtttattttatacaaagagatgcatgaaaaaatgcagacttcatttgttggtttagttactaaagtgaaagattaatgtgtcattcttactaggtggctgtgggtgtagacgggaagaagatggaacctgaaagtaatgttcttctcgcatctattgaaaacatgcagtatgcagtaaccttggatgttttacacatggtaatactggctctctattctaaaacctcgttgaaactttggttctgaaaatattgattctcttctcttgtatattgacgagtaggtttttgcggcttttgggaaagttcaaaagattgcaatgtttgacaagaatggtggggtacaggcactgatccaatactcaggtaacatcttgtatgatatactctgttttagttattattgatctctgtaaagagcaaattctcaaatgactctggcgggtttcttccagatgttcaaacggctgtggtggcgaaggaagcattggaaggacattgtatctacgatggtggtttttgtaagctccacattacttattcacgccacaccgacctcagcataaaggtgaacaacgatagaagcagagactacacaatgcccaacccaccggttccaatgcctcaacaacccgttcagaatccatacgccggcaatccacagcaataccacgcagcaggtgggagccaccaccagcagcagcagcagccacaaggtggatgggtccaaccaggagggcaaggctctatgggaatgggtggtggtggtcacaatcattacatggcaccaccatcttcaagctcaatgcatcaaggtccgggtggtcatatgcctccacagcattatggtggtcctggtccaatgcattagagagagaaaagaaagtccctcaaaagtcgaagacaaagaaagatgtttaatctctctctttatttctcttagctctgttttttaaagtttggaacacttgtacttgtgtccaaaagatgtttttttaaggataaaaccatttgagaaatgtattagaagctcttgatttctcta

SEQ ID NO: 138185 - DNA, 864 bp, Arabidopsis thaliana landsberg
acccaaaaacaaaacaaaaaatgggtttcattggtaagagtgtattagtgagtctcgtaacactttggtgcttcacttcctctgtcttcactgaagaagtgaaccataagactcaaaccccttctctagctcctgctcctgctccttaccaccacgggcaccaccacccacacccttcttattaccaccacccttaccctcacccttacccccacccaccggtcaaatctcctgttaaacccccgtttaaggcaccagtgttttcaccagccaaacctccggttaagcccccggtttacccacccaccaaagccccggtgaaacccccaactaaacccccggtcaagccacctgtttccccaccagtcaaacctccggttaagccaccagtttaccctccaaccaaagctccagttaagcccccaactaaacccccagtcaagccaccagtttaccctccaaccaaagccccggttaagcccccaactaaacccccggtcaagccaccagtttccccaccagccaaacctccagttaagcccccggtttaccctcctaccaaagctccggttaagcctccggtttctcctccgacgaagccacctgttacaccgccggtttacccgcctaagttcaaccgtagtctagtcgccgttcggggtacggtttactgcaaaagctgcaagtacgctgctttcaacacactcttaggcgctaaacccatcgaaggtttgaactattttctttgttaattactactatttcttccacttcattattcagtttattcactcatacatgagacatacctcagtaacaatctctcaaacaactcaacttggctctgcatacgcattcaaacag

SEQ ID NO: 138186 - DNA, 934 bp, Arabidopsis thaliana landsberg
acttttcttctctttctagaagaagaaaaccagagatacagagagattctctctctaccaaacccctggaaaaatctccagattcatcttccatagaccaaactaaactctgttcactgtactctctgtcattgtcctgtaagagaaattgaaaaccctaggagattttgaatttcgtaaaaccctaaacacaaaaatgaaaatcccagaaaaacccatcttcttaatcttcgtctctttgatcctagcttcgagcttaaccttcacagcgacagcgaaatcaacaatcgagccttgctcaagcaacgacacttgcaacgctttactcggctacacactctacaccgacctcaaagtctcagaagtcgcatctctcttccaagtagacccaatctctatccttttagctaacgccatcgatatctcttacccagacgtcgaaaaccatatccttccttcgaagctcttcctcaaaatcccaatcacttgctcctgcgtcgacggaatcagaaaatctgtctctacccattacaaaacccgaccttctgacaatctaggatcgattgctgactctgtttacggaggcttggtctctgctgagcagatccaggaagctaactcggtgaatgacccgtcgctgcttgatgttgggactagtcttgttatccccttgccttgtgcttgtttcaatggcaccgacaattctttgccggctgtttatttgtcgtatgttgtgaaggagattgatacattggtcggaatcgcgaggaggtattcgactactattactgatttgatgaatgtgaatgctatgggagctcctgatgttagttctggagatattctcgctgttcctttgtcaggtcaggtctacacaatctttaaaagttgtatcttcagatgtttgtataatgggaaggagcttctattggta

SEQ ID NO: 138187 - DNA, 3616 bp, Arabidopsis thaliana landsberg
ctcgccggacatgctagaagataacaatccacacccaaacttacccagagagacaatctctgattcacgtccactacaattaccgaatctctccgaagccaccgatcacctacgctagtttcagtggcaattcgaagcttccaatgagtttgttctgtaattcaatcgaaaccctttatccaaaaccattcctttcacacaaatctcacttctttaccttctccaattccaaattccaaaaccctaaattcacaagcttcccacttcgtcaccaatggcggatcgaatcatgtctgaaatcagcatcttcatcagaaatcgatatggtaagaaacaaagaaggtatctttgcaccaaaggagaagaaagttgtagtcttatgggacttagacaacaaaccaccacgaggtccaccatacgaagccgcaacagctctccgtaaagtcgctgagaaactcggccgagtcgtcgaaatctccgcttacgcaaatcgtcatgcttttatccatttacctcattgggtcgtcgaagagagacgagaaaggaggaaccttgatttcatggagaggaaaggagaagtgactccaattgatccgtacatttgtggtgtttgtggtcgcaagtgtaaaaccaatcttgatttgaagaaacatttcaagcagcttcatgagagggagagacagaagaaagttaataggatgagatctttgaaaggtaagaaacgtcagaagtttaaggagcgttatgtttcagggaatgagaagtataatgaggctgcgaggagtttgttgactcctaaagttggatatggtttagaggctgagctacgtcgagcaggggtttatgttaagacggttgaggataagcctcaggctgcggattgggcggttaagagacagatacaacattcaatgactagagggattgattggttggttttggtgtcggatgataaggatttttctgatatgttgaggaaagctagagaggctgatcttgggactttggttgttagtgatatggatagagcattgggaaggcatgctgatttgtgggtgccttggagtggtgttgagaagggagagattggtgagaaggatttgattccggggaagagaccaaggtttgaggaggatgaggtgggatttggtggtaatgatgagttgttttcgttgtcgtatgatgaggatgagaaggcggagatgacggtggagagtgatgggtttgggaggtttaatgtatcggcgttttcggaagatgaatgggtggaggatgaaggagactttgtgttgagtgatagtagtgatgatgatagtgatgatgagcttttctgattcatggtgaattgagttgcatttctaagtgttgttaattggtttacgaatagagttcataggagctttggtcgatgtaattgaaatcaaatgtaaaaccattcttacataagccaagattttgtgcattcatgcggtaaaagccatgagaattcaagtttttacataaaccaagattttgtggtattgtggtttgtcgaattgaaatttgggttggagtaaaccggattcaaatacaacttttattttgaccggtttagagtagacggttgagaaggtaaaatcaagaaagaaacgataaattaaaaaaccgttatttcgcttcgttaaaattctgcttcaccattgttgtttgcattcttgcttgattgcaaaaatctttgcctctcccacatttcaagttgagatttctagggtttagtctttaagttttctaaattgctttgaagaggtcgaaaagaagagaaaaaagccatggcttggaaaacagaggtccgtttaaaactatctcacaagtaatcactctctggttgattttgtgttggactagtgaggtttttagggtttggattgtaggtgaacgaagtttcagatgatataatcgatggtctttggtcagatgatcctccattacaacttgaatccgttcccaagatcagacgtattacatcacagagtaaaaacttcctctgtttttaacattctttactttttcttgatctcggtttgaaagattcgtcttttatcatttactctaatatctttccaggagatatatcttgtgtgatacgatctggagttgtaccgcgtctcgttcagttgcttaacaaacaagttttccctaagcttcaagttagttgatattttatgatgatgatcagtgtaacctttgattacgatatattcagtgatctttgtttttatagtatgaggtagcttgggctctaacaaacattgctgttgacaatccgggcgtggtagttaataacaacgctgttccagtattaattcagcttattgcttctcctaaagattatgttcgtgagcaggtaagtattttacttcgtgtagatatgagaatgcttgtcacagactcacagatatgagttttgacattattcttgcaggctatatggacactgagtaatgttgctggtcattcgatacattaccgtgactttgttcttaactctggggtgttgatgccactgttgcgtcttctgtataaggatactacactcagaattgctacttgggctttgcgtaacttgtgtcgtggcaagcctcatccggctttcgatcaggtcttcttacttctctctctgtctctgtttcctctgttttgtatactttttaacatatgaagcatgattcaacaggtgaaacctgctctccctgcgcttgaaatacttcttcattcaaataatgaagatgtcttgaaaaatgcttgtatggcactatgtcatctgtctgagggttcagaagatggaatccaaagtgtgattgaggctggttttgtcccaaaactagttcaaatcctccagttagtacttctcagaatatgtatttaacccttttgtgacatgtttggatactgaaggctgacagttttttcttttttcagacgcccttccccagttttatctgctcctgaacttcgtaccattgggactctagttactggaaataatcaccagagccaagtatgtaattcatgttccacttatgttgtccatcttgtggagtaatcgtttatcaaaaacgataaatctgtcgaaagcttatgtttatcacaatgtctatagaatgtttagtagaagggatgcagtgcttactttgttatatgtcccttgtttacaatgttatgattagattttgtaaccaaacaacaaagtacgtaggctctgaataaacctttttgaacatattctttaggctgtaatcaattgtggtatcacttattgttttctatttgtatttcttgcaatgatgataacagttgcttattgatgcaaatttgattccatcgtcggtaatctggctctaaatgctgaattggacataaagagagaagctgtacgggtaattttaagggccaccgtaggtggttcgcctaatcaaatcaagtacatccctgtcttctctctttatcacttttttcatgcgtattgattgatcatcaagtaacaatctccatatattggtgtgattcagatacttggtgcagcagggttgcacaaaacttctatgtgatctcctggtatgtccagatataatgatca

SEQ ID NO: 138188 - DNA, 1602 bp, Arabidopsis thaliana landsberg
acttcattgactctttttctctatctctctagatcgaaagggaaaaggagatagagattgaagatgcgtgacgcaatcatcgccgatcctcttctggccatcgaccatgaaacagtcgcagagaagaagaaacagagcaaaaatctaaagatttctcttttactgcttctgattctcttagcaacttcaggtctgttttttgttttactccaataatcgaggaaacatttacttctagttaatgaaacaatacaacatcttttttcactagtgaaaaagacttgttttggaaataaatatttctgattaatgtgttctgaaatttcttaggttattatagctttagtgacaacattacaacagttttcttatcaagacaagctattgatgatgatcatagtcttagccttggaaccatcagtgacgtggttgaatctgagaatggtgttgtggctgctgacgacgctcgatgttccgagatcggtgcctctgttcttagaagtggcggtcatgcggtggacgccgccgtggctattactttatgtgttggcgttgctaatccaatgtctagtggaatcggtggtgcctctttcttgattgctagctcgcagaaagattccaaagctgaggcttttgacatgagagaaactgctccattagctgcttctaaggtaaaagaagagcttctctaactaatctctcttgatccagttgttcagtgtgtaatgtgtttagcttgtgaattgatgattcaggatatgtataagaacgatgctagtgcgaaatcgttgggcgcattgtctatgggagttccgggagagatagctggactttacgaggcttgtaaacggtatggccgtcttccgtggaaaccgcttttcgagccggctattaagctggctcgggacggtttcgtggtgtatccgtatctcggaaaggccatatcgaccaaagttgcgatgatacttaaagatccgggtatgcggagtgtcttctcaagaaacggacaggttttgaaaaccggtgagacttgctataacccggagctagctcagagtcttgagactatttctgagcaaggcccgggagcgttctacaacgggacagtaggcgagaagcttgttaaagatgtgaagaaggcgggagggatcataacgatggatgatctaagaagttataaggtccgagttaccgatgcaatgtctgtggatgttatgggttatacggttcatggaatgccgcctccttcgggcggtacagtcggtttttcgatggttatgaatatcttggatagttactcgaatctttacactgcttcgggaagagagctcgggctgcaccgtttgatagaagcaatgaaacatatgtttgcagctcgtatggatcttggagaccctgagttcgttaatgtaacaaactctatgaaccaaatgctctcgaaggctcacgcggaagaaatccaaaagaggattttcgacaacacgacattcccacctgagtactatatgaaccggtggagccaactcagggaccaaggaacgaaacatttctgcgttgtggatgcggatcgcaacagtgtgtcgatgacctcagccgtgaatt

SEQ ID NO: 138189 - DNA, 1297 bp, Arabidopsis thaliana landsberg; identical to SEQ ID NO: 58986

SEQ ID NO: 138190 - DNA, 818 bp, Arabidopsis thaliana landsberg
gatcttcttcttcttcgttgtctattagtgaaaatgatgatggtggagagatcgaacaaggcggtgttacgcatcattcacctactcaggttttgaaaaactcgaatgagattcgttacttaagaattgagcttcctagtggtgaattagggattgatgatggagttttgttgaaatggagagctgaatttggttctactcttgataattgtgtgattctcggtgcttcttcagtgattccaccaaatccaatgagagtttctcaagcttgtgatactactacagtcgttgaagctcccggttctggctccgatgataatgggagtataccggaatcgttttacacaaacggaggtttgaaattgcgtgttgtatggacgattagctctttgattgctgcatcagcacgacattacttgttacaaccgataatcgcggagcataagacgcttgatagtttagtgctcactgattcagatgggcaaggtgtgctctgtatgaacagagatcagctagaagagcttagggtgaaaccattagcagcttcatcggcttcgaagaggacacttgtgcctgctctgaatatgagactatggtatgctccaaccttggaattgcctgatggaactgtgttaaaaggtgcgactttggttgcgataagaccgagtgaatcgaaaaaggaagtgtctgatatctcttgggtgtcttcggcttttgaggagccttatgagacggctgctaagatgctggttaaaagaaggacttactgtcttgaaatgaactcgttctagcttgaatggtttcagtcggaatctgag

SEQ ID NO: 138191 - DNA, 3779 bp, Arabidopsis thaliana landsberg
gcaaaaaaaactcaggaaccctcgattcgatctctcagacgaaatcaggattcgtagaggcgcgtcgatggctagagcttcgaagcgggaagtttcttcagacgaggcttactcgtcggaggaagaggagcaagttaacgatcaggccaatgtggaagaagatgatgacgagctcgaggccgtcgctcgctctgcgggctctgacgaggaagatgttgcgcccgacgaagcacctgtctctgacgacgaggttgtccccgtagaagatgacgctgaagaggtatgtcttcgtttctgttttccactcttcgatttacattcgcatgtcggctgtgaattcggggattgctgtatttggaaatctgaatgtattctaagtaagattagggtttcctttgagcgtatattcgatatttgggtgtcttttggtttcgactctctttgtttgaaggtgtatgcttagaagtgcttacaatgatgggtggtcgctcattatgatggtacattcatgtgactcgtgaggatatttggtcactcttttcataatttgatggttatatgtaggacgaagaagacgaggagaaagctgagatcagcaaacgtgagaaggctagactcaaagaaatgcagaagatgaagaagcagaaaattcagcaaatcttagactcccaaaatgcttccatagatgctgatatggtaagttagtaaataactgagctgcttgtctttagtatccagaggtattgaaacaactcaatcattccatttattagaacaataaaggaaaggggaggataaagtatcttctgcagcaaactgagttatttgcacattttgctaaaagtgacccgtctccgtcccagaagaagggaaaaggaaggtgtgttgagtgcaacttatctcaaaataaattgtggttattcatattaagtttccagaaatataatttattgggtttcactttatcgtcaggggtcgccattcttccaaactaaccgaggaagaggaagatgaagagtgtttaaaagaagaagagggtggtatagttggatctggaggcacacggttgctcactcagcccgcttgtaagtacctttgttttgctcctaatatcttgatatagcgtatgtttgctcaagtcctattgcgagtcgaagttattataggatttgacaccttatgcccacttctttgattggtagagttgtttgatatattcttcagttgcgacctcacaatttctaggtaggactgcataaattctgtagaatttagagatctgatcttcatactcttcatattgcaggtattcaggggaagttaagagattaccaattagctggtttaaactggctcattcggctgtatgagaacggcataaatgggattcttgcagatgaaatggtaaaccactaattatcttagcatataataagatttttcagctctctatgttatctgatgctaatctttattgtttttgttcatggtctagggtctggggaagacgcttcaaaccatttctttgttggcttacctgcatgagtacaggggaattaatggccctcatatggtagttgctccaaaatcaacccttggtaactggatgaatgaaattcgccgattttgtcctgtcctgcgtgctgtgaaatttctcggtaatcccgaggaaagagtaagtcataatagctcttacatttgaatggttgcatttatatgcacctggcaggattctgagatatattttaaataatgcagagacatattcgtgaagaactgctagttgcagggaaattcgacatttgtgtaacaagctttgagatggctatcaaagagaagacaacattgcgccgttttagctggcgatatataatcattgatgaagcacatcgaattaaaaatgagaattcactcctttcgaaaaccatgagacttttcagcaccaactatcggcttcttatcacgggaaccccccttcaggtacttgtcaaatcttttgatctataattgtttagatccttcaatttttctgtcagattgcttctgcctatgttgaaactactttcttgcttgagtctgttgaacttagttttttttcttttcgtgttccttagacatgcttcttactatcttctgtacttattttgcatgagttaatattgtattcatttcatatgtttctactacaaaataatctccatgaattgtgggcccttctcaattttcttctccctgaggtttttagttcagcagaaacttttgacgagtggtttcaaatttctggtgaaaacgaccagcaagaagttgttcaacaacttcacaaggtatgtactcatattttatcaaggttattctctaagttcttatgctaatcatttacctcatctttgtaggttctgcgaccatttcttcttcggaggttaaaatcagatgtagagaaaggcttacctccaaaaaaggagacaatactcaaagttggcatgtctcaaatgcaaaaacagtactacaaggctttactgcagaaggatcttgaagtggttaatggtggtggagaacgcaaacgtctgttgaacatagcaatgcaattgcggaaatgctgcaatcacccttatctcttccagggtgcggagcctggtcccccatatactacaggagatcaccttgtaacaaacgcaggtaagatttacattacaagtagatcattcagaaatgtggcaattggcttagttattttctctttacatgttcttgtttctaggtaagatggttctcttagataaattgctacctaagttgaaggatcgagattcaagggttctgatattttctcaggtattcattaacgcaaacaaataattgttcctatctttgattccttttttctgagtgatatctttcttggttctttgtgcttattccaacgattttgctcatctgtatcagatgacaaggcttttggatattctcgaggattacctaatgtatcgtggttaccagtactgccgtattgatggaaatactggtggtgacgaacgagatgcttccatagaagcctataacaagccaggaagtgagaaattcgttttcttgttatccactagagctggaggacttggtatcaatcttgctactgcagatgttgtgatcctctatgatagtgactggtaaggctctttttgtgtccattgtaatttatgagtgttttcttttatgcctaatgaggtgggtggattatggcaggaaccctcaagttgacttgcaagctcaggatcgtgcacataggattggtcaaaaaaaagaagttcaagtgttccggttctgcaccgaggttactcttgtacccatgtgtatgaagtaagaatgaccttgagaacttgaactaattctgcattggtcttatgcagaatgctattgaggctaaagtcattgagagagcttacaagaagttggcacttgatgctctggttattcagcaagggagattggcagaacagaaaagtaagtgcttgtgtactgaggctgttaaatgtattggattttctcttacatatatatactgatttcttttctttgctttccagctgttaataaggatgagttgcttcaaatggtgagatatggtgctgaaatggtgtttagttctaaagatagcacaattacggatgaggatattgacagaatcattgccaaaggagaagaggcaacggctgaacttgatgccaagatgaagaaatttactgaagatgcaatacagtttaaaatggatgacagtaagtgtg

SEQ ID NO: 138192 - DNA, 946 bp, Arabidopsis thaliana landsberg
tccaagactccgcgtcgtcgccgtcgataatcgcaccgccaccgctaccgttcattactccggcacgctctccgccacacccaccaaaaccacttcaccaccgcctcaaaacgccacctctgtcgcaaatacattcgttaattccctcagaagtctcaattccaagacatatccggctaacgttccgatcaccgttgaccacgatcttctattcaccgttggattaggaatcaaccgatgtcacagctgtaaagccggaaacttctcacgagtcgtcgccgccataaacaacattacattcaagatgcctaaaacggctctgcttcaagcgcattactttaacctaaccggaatatacacaaccgattttcctgcaaaaccaagacgggttttcgattttaccggaaaaccgccttccaatttagcaaccatgaaggctacaaagctttacaagcttccatataattcgacggtgcaagttgttttgcaagacaccggaaatgtagcgccggagaatcatccgattcatctacatggatttaatttctttgtggttggtttaggaactggaaactataattccaagaaagattctaacaagtttaatcttgttgatccggtggagagaaataccgtcggtgtaccttccggtggttgggcggcgatcagattccgagcagataatccaggtttttatcttattatactagtacataatatctacaaactttgtatatgaatttttgtaacaatgactatttgaaataatatatatatatatatatatatgtatatttgtgtggtttcaggggtttggtttatgcattgccatttagaggtacatacaacatggggactaaaaatggctttcttggtggagaatggtaaaggcccaaaccaatcaattcttcctcctccaagtgatcttcccaaatgttgaaagctc

SEQ ID NO: 138193 - DNA, 1886 bp, Arabidopsis thaliana landsberg
atcatttggactctgtgagtgacctctctttttacttcttctctgaagctttactctttttttttttatctctagagtgatgtcaatttttaccgacttctgtctttttatttttttcctatcagtatgatcatttggagttccccggtgttgtccctcgaacttttattggtaaggagggctgttgaatttcgctctctgtttttgcatcacctgttgatggttttttttttatcattatacattagtggatggttttttttttattccactctgatttgttcttgcaggagccttcatagtctctgtttttgcatcacctgttgtatcaattatcagctgccttggcttccccaaggtttatagccttgttgcaggtttctcttctgtttctccctccctatataattccttaatgaatcgctaactattttcccctaaacacagacaaaaccaattcacatcatagttttatcattttgtcttgcagctcgtttggtgttgggctgcatcatattgtccacactaagatttttccggattcaggtatgaagttcctttagtgcttctttccataccacacttctgactcccctatctgattctttgtcccttcccatgtccttggaattgggatctcttacatgcatcttgttggctgtttttctcctatatactgccactgaccaaaatctactggtttgtcagataaaaaaaaagtttggaaatcaagtggaaactttctttgtacttttcaccagtcttcagtttcattttcttttctactgcactcgtcctcttcctaatattctagctttgggattaggtaattacttctattcatcttactctactagtagtggtccttcagatgtcctagcaatctttcccatgacccatctagcgtaggccttactaggttctgcttatgtttttaaattttgattttgcagtcaatctggcatatggtaattggttaaagggaaatttttatccagctttgagtttcctggtatgtattatctttgtggtgacatattttctcgattatagatttagaaaatcggtcatgctatccagaactatggggtttgctgacatctctgttatccgataatcagatttttgccactgtaatccacagatgcgatacgatgttactgcttgggcctattggtcttgaacttttattggtgagctggtgacgaatattaaatagtttgggttctcaacttctgtatatgtataattggccgtatactttaccgttccatctgatgcgggtgctttatgtttgtcaatgacagaccaaatcgatctccttctggaaagcacttaagtattgtgttggaaccgctctgttggccgtaggttggttaaaattcctcttctttctgtgatctattttgctttttcccttcagacactaattcccgagtctattttctgtggtcatggaataatccttagcacaggtcttaccattttcgttgactctatcatgtggaagaagtttgtctggccagaatttgaagttttctggtttaactccattctaaaccggagttctgattggggtgtatccttcaaaaaaattgtttcctcaattgatttatttttcatatgatgcataatgttctagcatttttctactgcctgattaaaggattgcgttctgtacaatgataaccgtttggaatttccaattcaaagtttaatattgtggcacttgcatttgtatgaaatgatgtgttgtccttgaaaattagttgctaaactagacacattccatacattggtacttcacctcagcactcccacggtctttacttgtagcttataaactttcattggtaaataccagacttcctaacatctgtgatagt

SEQ ID NO: 138194 - DNA, 845 bp, Arabidopsis thaliana landsberg; identical to SEQ ID NO: 11205

SEQ ID NO: 138195 - DNA, 1986 bp, Arabidopsis thaliana landsberg
accgatacttcttctcaaccaaagaaatctgactcccagaaaccccaacaaaagccaaaaccagatgagaatcacccgcgaaaatcatcggaatccgccagaaaatcatctgattccgcaagaaaatcgatttcgtcaggctcatcaagaacagagagcaagagattctcacttaacggcgttatgggaaacatcatcgtgaaaccacagccagccgttaaaactgacgtgacacagacgaaaagtcggtgggagggtaaaccggtaaatcacagactcgatccagagactctgaagaaaatgggaaacgaagagtattgtcgtgggaggtttggacaagctctcgtgttttacgagagagccatttcagctgaccccaaaacgccgacgtattggtctaacaaatccgccgctttgatcagtctcggtcgtcttcttgaagcttctgatgcttgtgaagaagctttaagactaaacccaacttacgagagagctcatcagagactagcttccctccaactcaggtagagtctttcacttttgtttttctctaattggtccctctaagtttcagattattactttatggtactaaataaattattaaatagacctttgcaccctggatttttgtttttgaccagattgggtgaggttgagaaagctttgtgtcactataatgaagctggaaaatatacagagacaaaacatattgaacaagttgaagatgttgttaaatgcttaaggaggtgtgacgaagctcgaagatcaaaggaatggaatgttgcattgaaagagactctttttgcgatatcatatggagcagattcttctcctcgggttagctttgtctccttgtttataccatttatcaataaggagccaaatatagcaagttttatttgcctggttgtgttggtttagctaactggatattatatgtatggactcttgttttgactgattaaacttataaaatcttcaatctcataaggtctatgcactccaaaccgaggctttattgcatcttcagcgacacgaggaagcatacagcgtgtatcagaaaggaacaaaacgcttcgacatcgatagtttcataaagatttttggtctttccctcacttcttacctcttgatggtcggagctcaggtctacatagcagtaggaaggtttgaagatgcagtaacggcgtcaaggcaagcggctcgacttgatccaagcagcgaagaagtaaacgcggtggctagaaaagcgagagcggttgcttctgcaagactgagtggaaatttgcttttcaacgcatcaaaatttgaaggggctagcgtggtttacacggaaggacttgagaacgatccatataatgctctcttgctctgtaacagagctgcttcaagattcaagcttgatctgttcgagaaagctattgaagattgcacattggctctcagtctccagccatcgtaccggaaggcgaggcggcgcagggcagattcttatgccaaggtattcaaaagcttaatttaaccggtccgaccgatttcgaaatgatattagtgtggttttttaagtgtggtgtaatttgtgatgaatgttttgtttggtttacgctgtgtgagtagttggagaaatggcaacacgcgattcaagattatgagttgttgatgatggagacacctgaagacgaagagactagaagagccttaactgaggtgaatgtccggtttaagaaacagaccggtggagatgtccggtttaaaggagtcggctcggaattggttgtggctaattgaagtgtgagatttggctaagccgaattgtatagttttaaaaggaatttcttaatgatttaattttgtatgcgtgtttgtttgccctttttctttgttgctaattttgtcattttctgttttttaacatctaaattttgtatcaaacggaataatacctcataaggaagataatcatataattcatcttttttttaa

SEQ ID NO: 138196 - DNA, 2342 bp, Arabidopsis thaliana landsberg
cctggacgacctgcaggtttaagacaaccagctggaacgggagatacctcctttaatcggtttctatagcaatttttctgttcttgacatgtctgccaattctctgtctggtccaattcctgcccacttctgcagatttcagacgctaatacttctgagtcttggttcaaacaagttatcaggaaacatccctcgtgatctgaaaacctgcaagtcactgacaaagctaatgctaggcgataaccagctaacaggaagccttcccattgaattatttaatcttcagaaccttactgcattagagcttcaccaaaactggttatcagggaatatatctgcagacctgggaaagctgaagaatttggaaagactgcgtctagctaacaacaattttactggtgaaattcctcctgagattgggaatctcacaaagattgttggctttaacatctcctccaatcagctcactggtcacatccctaaagagttggggagttgtgtcactatccagaggcttgaccttagtggcaacaagttttccggatacatagcacaagagcttggtcagttggtatatttggagattttgagattgtctgataatagattgaccggagaaattcctcatagctttggagatcttactcggctcatggagttacaactaggaggcaatctcttgtctgaaaacatcccagtggagctcgggaagttaacctctctgcaaatctccctcaacattagtcacaataatctctcaggtactattccagacagtttaggaaatctacagatgttggagatactttacctcaacgacaacaagctttcaggtgagatccctgcatcaattgggaatctcatgagcctcctcatctgcaatatctcaaacaataacttggtcggaacagtaccagacacagccgtgttccagcggatggattcatcgaactttgctggaaaccatggtttgtgtaactctcagagaagccattgtcaaccacttgtcccacattctgattcaaagctaaattggttaatcaacggttcgcaaaggcaaaagatcttgacaatcacttgtattgtaatcgggtcggtttttcttatcacttttcttggtctctgttggacaataaagcggcgggaaccagcgtttgttgcacttgaggatcaaacaaaaccagatgtcatggacagctactatttccctaaaaaaggtttcacatatcaaggcctcgtggatgcaaccagaaacttttccgaagacgtggttttagggagaggagcgtgtggaacagtctacaaagctgaaatgtcaggtggcgaggtgatagctgtaaagaagctgaattctcgcggtgaaggagctagttctgataatagtttcagagctgagatatcaactcttggaaagataaggcaccggaatattgtgaagctatatggtttctgctatcaccagaattcaaatcttctcttgtatgagtacatgtcaaaaggaagcctcggcgaacaactacagcgaggtgagaaaaactgtttgttggattggaatgctcggtatagaatcgccctcggtgctgcagagggtttgtgttatctccatcatgattgcagacctcaaatagtccatcgcgacataaaatcgaacaacattcttcttgatgaacggttccaggctcatgttggagattttggcctggctaagttgattgatctctcttactcaaagtccatgtcagctgttgctgggtcttacggatacatcgctccaggtgagtaaaacatcacagttttctttcttcccacaatcgcttatctaacatatctaattgatgttttgctgtgtttcagaatatgcttacacgatgaaggtgacagagaaatgtgatatctatagctttggagttgtgcttctggagctaataacaggaaagcccccagttcaaccgctggagcaaggaggggatctagtcaattgggttcgacgatcgatccgtaacatgattccaaccattgaaatgtttgatgcgaggctagatacaaatgataagagaacagttcatgaaatgtctcttgtcctaaagattgcactgttctgcaccagcaattctccagctagtagaccaactatgagagaagtggtcgctatgattacagaagctcggggatcaagtagcctttcttcctcatccattacatcagaaactcctctagaagaagcaaactcctccaaaggtatgtatctacacatacacacacacacacacacacttctctgcaatttccgaactttttgcgattctcatatgaacatttcttgctattctgcagaaatttga

SEQ ID NO: 138197 - DNA, 2302 bp, Arabidopsis thaliana landsberg
aaaatcgttctgtggaacacaagtctcgccggaaccttagctccgggattgtcaaatctaaagtttattcgagttctgaacttgtttggcaacaggtttacaggtaatttaccgttggattacttcaagttgcaaactttgtggacgattaatgttagttccaatgcgttgtctggtccgattccggagtttattagtgaattgtctagcttaaggtttctagacttgtctaaaaatggtttcaccggagagattccggtttctctgtttaagttctgtgacaagaccaaatttgtttcactggctcataacaatatctttggatcaatccctgcttcaattgtaaactgtaacaacctcgtaggatttgatttctcttacaataatctgaagggagtgttgccgcctaggatttgtgatattcctgtgcttgaatatatctcagtgagaaacaatttgttgtctggtgatgtctctgaggagatacagaaatgtcagaggttgattcttgttgatttaggaagcaatttgtttcatggattagcgccttttgcggttcttacgttcaagaacataacttatttcaatgtctcttggaaccgatttggtggtgagattggagagatagttgattgcagtgaaagtttggagtttttggatgcttcgtcgaatgagttaaccggtaggattcctactggtgttatgggttgcaaaagtctcaagcttttggatttggagtctaacaagctgaatggaagtatcccgggaagtattgggaagatgagagagcctctcagtgatcagattagggaataattctatagatggggtgataccaagagatattggaagtttggagtttctacaggttttgaatctgcataatctcaatctcattggtgaagttccagaggatatatccaattgcagagtacttcttgaactgtaagttttaatcgatgttttcgagaatttatcggttcttgttactgtgtttgaatctcacattgttgttaatcgtttgcttgttggttgcagagatgtttcagggaatgatttagaaggaaagatctctaagaagctattaaacttaacaaacataaagattcttgatctgcatcgaaaccgtctgaacggaagtatcccacctgaacttggaaacctctccaaagtccagtttcttgatctttcacagaattcgctttcagggccaatcccgtcttccctcgggagtttgaatactctaacgcatttcaatgtctcctataacaatctctctggtgttatccctcctgttccaatgatacaagcttttggatcttctgcattttcgaacaaccctttcctttgcggtgatcctcttgtaactccctgcaattcacgtggagctgcagcaaaatccagaaattctaatgctctaagcatttcggttattatcgttattattgcggctgctgtcatcctctttggtgtctgcattgtgcttgctttgaacctaagagctcgtaaaaggagaaaagatgaagaaatacttacagttgaaaccactccactggcgtcttcgattgactctagcggtgtgataattggaaagcttgttcttttcagcaagaatttgccttcaaagtatgaagattgggaggcaggtacaaaagctttgctcgacaaggaaaatataatcggcatgggatcgattggatcagtctatagagcatctttcgaaggaggagtttccattgcagtgaagaagcttgagaccttaggaagaatcagaaaccaagaagagtttgagcaagaaattggacggcttggaggtttgcaacatccgaatctgtcttctttccaaggttactacttttcctcaacaatgcagttgattctctctgagtttgtccctaatggtagcctctacgataatctacacctaagaattttcccgggaaccagctcaagctatgggaatactgatttgaattggcacagaagatttcagattgctttaggaactgcaaaagcgctctctttccttcacaatgactgtaaaccggcgattcttcatctcaatgttaagtccaccaacattcttctagacgaaaggtacgaggcaaagctatcggattatgggttagaaaagtttcttccggttatggacagctttggtttgactaagaagttccacaacgcggttgggtacattgctccagagttagctcagcagagtttgagagcgagtgagaaatgcgatgtgtatagttacggtgtggttcttcttgagctggttacaggtagaaaaccggtggag

SEQ ID NO: 138198 - DNA, 2946 bp, Arabidopsis thaliana landsberg
atgacagagatatttagtgacaccgggttcagacagttaactcaaatgttcctggcgataatcttcttccacacatcggagtacattctcgccatagccattcacggagcatcgaaagtaactttaagctcactcttaatcagcaaacactatgctttagcaatgctaatatcagtcctcgagtacatagccgagattgttttcttcccggggctgaaacaacactggtggatcagcaatttcggtcttacaatgatcatacttggagaaatccttcgcaaaaccgcgataatcacagcaggtagatcgttcacacaccttataaaaattcgccgggaggagcatcataagcttgtgacagaaggagtgtatcaaatcatgaggcatccgagttactccgggtttctcatttggtctgtgggaacgcaagtaatgctctgtaatccaatttcagcgattgcgtttgcggttgtggtgtggcggttctttgcagagagaataccttatgaggagcattacttgaagcaattttttgggagacagtatgtggagtatgcgcagagagttccttctggtgttccttttgtaaactgatccttagatcaattgtgaacatatacgagcattgtttgattaccttttacatagaaaattatgaaagagatgttgttactcatgttttcagttaatgttctcttgtcaatgtctttgtgtttctttttttttattgctaaataatttggatattattccaaagactctgcctgagccagaggtttatgcttatgaacataaaatttgaccactgggttttaaaagtgatttagctccggcgaagagtctctccgtgagagcgagcttgtccgatttgtaagcacgagacggaaccatgttgtgcggaggctcacgtgtcttgcagcatttgtgcgaccacaatcatcataattcgattggtttaggattagggttttgtggtgctaagattgtgcagctctcttcattctttctcaggccttctcaggctatggcgaagagtcatcatttcagccataaattgcgtcagcggatgatttcttcatttgggtctcattgcagaacattcggagaagtcccaattcttcacaattgtttcaggttttgtttctctccttgattaggtatatctgatccttaagtgtcatcgtcgagattgatgtttctggactcaaagagagatctttaattaattcatctgactgatgttaaattcggggtcttttgctttcttctactgaagccaacgagaagatgatcctgagcttccagttgaagggttatctccagtgtcaggtatctatctagcttgcttgtttcttgcatcttcattcaatttcctaagaaaagtcacacctttctactctttgatggggattttgtggttactgtgcggttcctttccttttggaaagagctttagtatacatttggtagaagaatagatgttagctcatgatcatctgatgcataatatgttgcaggaggcattgttgctctagggaagtttgatgccttacatatcggccatcgagagcttacaattcaagcttcaagaattggagctccatatctattatcttttgttggaatggccgaggtacttggttgggagcccaggtaatgtccccacctgtagtattcatgtcttccctttctcttttccaacctaagattcttgttcgtttgagatggttaaacattatatatgatcctgctgatgaagttcgttttttttaatcaatatgtgctctcttccattgtgactactgacaatctaaatctgtacaaacagggcacctatagtggccaaatgtgatcgacaaagggtgcttacctcttgggcctcatattgtggagacagagcgcctgaagagtatgagatagaatttgccagcgtgcgacatcttaccccacgacagtttgtggagaagctgtcaaaggagctcagagtctgcggagttgtggcaggtgaactttaaaaagatctcaacccactcctttctgtaccatttcatgttgaaaacacacaaaataaattgtttgcaaaaacctttatccataggtgaaaattacagatttggatataaagcgtctggtgatgcctctgagctagtgagactgtgcgaggaatgtggtatcactgcttgcatcataaactctgtgatggacatgaagcaaggctcagcaaagagagactcaggggactcaaaagatagagggcaagtctcttctacacgtgtacgccaagctcttgcggcgggagatatgaggtacgtatcagagctccttggcagggcacatcgtcttatcttgagagtcagaacccaagatatgccaagtgaaaggatgatctcagtcccgagatcatcaatacttaatttgccaccagggatcggaatttataaggcatgtttgcttctagttggtgatgagtcttcagttccgtgtaccgtagttgttgatacatcaaatatccatgtagaaacagaggaggtacgactctgtaatttagattggtctcaagaatttcgactcgtgagtgttgagttcggttgagtcaatcttagttcgtataaattcatatttctaagtgtttgtgtctcaactgaaattccttagagaagccaagagtgatctgttcgctccatcgccttagagaagccaagagtgatctgttcgctccatcgttcacttttgtctttaagcgtatgttgctagaccagacataacagcatggggacacttccaaaccacaaattatggatatttaggccaaccatggcatccgtttcaattaaggaaacattaggaggcaacagcaagctgacatgggtgatttcgtggctggacagcggcaatgacaattgacaaagacatgtctcagtagatactgaaccaatctgttgtatg

SEQ ID NO: 138199 - DNA, 921 bp, Arabidopsis thaliana landsberg
ctcctttgaacgattactgagtttctcaccttgagcaaagattcatttatggagtcctcccgatactctatccttgttttgtataattagagagaaaactaatttttgttctgtaattatctagggatgcttgtaagagctttggagttggagtgggatgtgctgtctgaagaaatcggtttctggttacctgctgaggttaccaatgtagaacatgatgataaacctgaaggagaggaagagcctggtaatgttttcaaaattttctacattcttgatctctgcttttgcatttatttgggtggaaaagtgtggtgacactggcgaattcaaatctcatgaagttgtgcattttttccgtagaggaaatattggcaggcagaccagtgccagctgtatgtaatgcagagcttcacacagattatggtggtgctgcagtgagatgggggcttacacatcataaagagagtgcagctgattgttgccaggcttgcttagaccaggcaaagcgtgcgaaacctggagaaacgagatgcaatatttgggtttattgcccatctgagtttggttgtttctctccagatatttatgagcataaacatcaggagtgttggcttaaatacgtaagaacttacctcgtacacatactactttacccaattttcagtttccttgagattactcgtccaagttggactggaagcttggctcatatccaatatgtctatgtgaattgcaggcagagaagccaaaacagaatttcaaagacagatattctgagacatacagaaacaaccacccaaaagcgccatctatcgttccatgggtttcaggtgttgtaacggcttgagcaaaacccatgtggacagattgatgggagaaataggagatagttttggttttttttttctcagctgtgtt

SEQ ID NO: 138200 - DNA, 2216 bp, Arabidopsis thaliana landsberg; identical to SEQ ID NO: 29750

SEQ ID NO: 138201 - DNA, 889 bp, Arabidopsis thaliana landsberg
aagtgtaaagatcaaatttatgttttgcaggttgaggcgaagaaggctgtgcctcgagatgatcagcaggtgctaaagcgacacgctagtcctatccaccttatgtcacctgtccatggtggtggtggaaggacaaagaagatcttcgttggaggtttaccgtctagcattaccgaggaggagttcaagaactactttgatcagtttggtactattgctgatgttgttgtaatgtatgatcataacacgcagaggccaagaggttttggcttcatcacatttgattcagatgatgctgttgatagagttcttcacaagaccttccatgagctcaatgggaaactagttgaggtcaaaagagctgtacctaaggagatttcccctgtttctaatatccgaagcccgcttgctagcggtgttaactatggaggcgggtctaataggatgcctgctaatagctactttaacaactttgctcctggtcctggtttttataacagtctaggtcctgttggtcgtcggtttagtcctgttattggtagtggtagaaatgcggtttctgcttttggcctcggtttgaatcatgacttgagtttgaatttgaatccaagctgcgatgggacaagttctacgtttggttataaccgtattccaagcaacccttacttcaacggtgcttccccgaaccgttacacctctccaatcggacacaatagaactgagtctccttacaattcgaacaatagagacttatggggaaacagaaccgacactgcaggtcccggttggaacttgaatgtctcgaatggaaacaacagaggaaattggggacttccttcttcttctgctgttagtaatgataacaatggctttggaggaactatgggac

SEQ ID NO: 138202 - DNA, 1602 bp, Arabidopsis thaliana landsberg; identical to SEQ ID NO: 13327

SEQ ID NO: 138203 - DNA, 1242 bp, Arabidopsis thaliana landsberg
ttcttgggttagtcctatttcttccttttgccatcaaaagacaaaggatttggcttatatggtttcattttatttgataaagcaaccgtgatgacaaacctacgtaaagaattgaggatatctgatgatgaaaaccgacaactgttgaacaatgtccataatgatgatcttatcaaaagaataaggtaacgagtctgatcatttgtgatagtaaagctatgaatctagatttcgttgtatcttgtaataatgtgttgtatgatggaactggaccaacagagattcgagaccaagaggtggaaaccaggttgttagacatcagtccctcgatgttcatcctagtccgactttttcagcttctcggaagaaacagaagacgttccaatccgtaagacttcttgttttaatctttggtcatagaacaacaagcagaggatatctgtatttgcatatggttttctgtttatttactgatcatatcatttgtgatacacgtgcagtatccgtcgattggttctactagaagtaagtcattcaataaccgtgtagtatcagcaaatgaacctgcggaagctcttattggaagaaaagtgtggacaaaatggcctgaagacaacagcttttatgaagcagtagttacacaatacaatgcaaatgaggtaacttctgatggctgagacctttttattgagattgaatcagaaattcatatgttcagcattatatatgtttgtgtgtcgaggtgtctcctgtacttcgaatatctgactccaaggcctcaaagcctgatcgaaatttaccgtttagttcagagttactctagtgagtgagcattgcaattactttaggttgattgtaactgtgtagaaagctaagcaactagttgaatcgcttagctagatagctcactagtttaggcagaatgagccggggtactctggattagtctaggatcatggtttaggcatttgtcgaaagacttctctagttaatcaagtctctctatagtgtagttcttgatgaattgaagaaaggaggtgtttactgttaatgtgcatatgaggcgttgaaaagtatactatgactttgatatatctagaagtttggaactgtatttagcgttgaacatagcttaagtatattgtaattgatgcattcattgttctctcgcagggtcgacatgcgttggtatatgatataaacacagtgaatgagacatgggaatgggttgatcttaatgag

SEQ ID NO: 138204 - DNA, 1522 bp, Arabidopsis thaliana landsberg
ttattgtgactgtaggatgtgaggaatggtggagtcaatggaacaccaatgaagatgcttttagaacaggaaatgtcgaaagaaatggaagttaagctaagttcgacaaatttggttgctaagttgatgggtcttgattcgtttcctcagacacaatctgctcctaggagttatagttcaaagcctcgtctaaagaggtcgttaagtcacggggaatataaaaatgtctatgagatatggcagaaagagggggaactaagtagtaatggtgtggagggattaagcaagaagaagatggacattgtccgtgaaaagttcttggaagcgaagcgtttggttacagacgatgaacttcgacattctaaggagtttcaagaagctatggaagttttgagttcgaataaggagttgttcctcgagtttttgcaggagtcgaataacttcttctctcatcatctccacagtttccagtccacagatccaccaacctcagagaagtctaagcggatcactattttgaagccttcaaagaccgttgctgatgaaaagtttggaaatgaaccagccattgaatcttcgagagacggaagtaagagtggcaagggtcttgattttttcaaatggccggttgaagaagaatatccgacaaagcaatcaactcgaatagttgttctgaaacctaacggtcaagtcacaaaggcttcatcatgtccaacctctccaagaggttttgaggggagagagtcaagagatgtggctaggagagtgaagagccagatacttaaggaagaaactttacaatcttctgtcttttccaacggctatatatgcgatgatagttctcttaacgactacgcagattctgaaatcatgtcaccggtttctaggcattcatgggattatataaacaagtatgatagccctttttcttcttcgccttttagcagagcctcgggttctccagagtcatcatctgtctgcagagaggccaagaaacggctttctgaaagatgggcattgatggcagcagccaatgagaatttgcaggaggccaaagttattgaaaagaaaggctctaatatttccttaggtgatatgcttgcacttccagatttaagagaagatcttataactgaagaagaagaaacaagcaatggtaatgaacaggagggtcctaaagtatctgcatcttgctttgatggtaatttcagtagagaagaaggaaagttaaagcctcctaaaggccttacacgatcaaaatctctccctgaatcatcgacaagtcttggtcacaaatccctagatagttccaacaagagtaaatcatccagagttccagaggagctgacaaagtcaaagagcttgaaatggtctctgaaaggtaaagtctcaaactttcttttctcaaggagcaagaaagccagtaaggagagatcttatgaggaatcccctgaaatcttggattctcggtgtaacaatgaatatgatgcatcagtgtctgccagaagcatgacttctcggg

SEQ ID NO: 138205 - DNA, 3764 bp, Arabidopsis thaliana landsberg; identical to SEQ ID NO: 26718
  unsure (1)..(3764): unsure at all n locations

SEQ ID NO: 138206 - DNA, 3540 bp, Arabidopsis thaliana landsberg
aatatataatgatacatattgaaagagtttcctttatggattgagaaagagcttcaccggttcggtatcttcataattagcacatttgaaagtcaaccggtgatgtccggttacaatagaaccggtaatctcttaaaacggcgcgtttgagaaactgttaaaaacgcaccgtttcgatcgtctttttcaatcttcgtgaagaacccaccagcttcaaatttcacctctagaaagtttgttgctatcgtttctctttgcacttagaaatcgaggggaaatttttcccagctctaatctaatgactgaacaatgacgttttatatctcgagctcgttaactccaacccatttctcgaaacccttaaacccttctaataccctcttccccagtcaatttcgaggttctctgtctagtttcgtccgtcgaagaaaaccaacggaagctaaattaagctccaaattcaatctttttccttcacgaagaaatggtttgattacttgttgcagtacatcgagctttgagtctactgagtcttcagtttcacaggaagaagatgctgagtccaatcgtctatttgaggtttatctctatttcaaattatagctagaattatccaattctagggctttcgtttctagaatgcaaagtgaagaacttgcaagctaataagtgatactcagtttcggactttgatcgtatacttgtgtagtttctgttgaagaggttatgtttgcattcaatacttgaaacattttttggttgtagcttaattgatatacttattcctcattttgtttaatggagttttcaaagctttaattcgttttatcttttggtttttgtagaagttacgagaaactgaaagagaacgacttagcaacatggaagagctcgagagaaaggctaatgtacaattagaaaggcagcttgttatggcatcagattggagtagaacattgttaaccatgcgtggcaagttaaaaggaacagaatgggatcctgaaacctctcaccgtatcaattttagtgattttatgaagctcttagattccaacagtgttcaatacatggaatattcaaattacggacagacgatatcaggtgagaagtttcaaaaagtttcgatacattgcatctaactgcttgaaatctagacatggtgttcttgaaatcttttgcctaagttttgttgttgttgcagtgatattgccttattataaagatggggagcccctaggagaagaagaagattcgaaaaaggagataattttccgtcgtcacattgtggaccgaatgccaattgatggttggaatgatgtatggaagaagttgcatcagcagatagtaaacgtagaggctttcaatgtagatgtggttccagctgaagtctatactacagttggcacttttgtggtttgggctatgagacttgccctctttgtttcgctttatgtttggatcgacagtatcacgaggccaatctatgccaaactaatcccttgtgatctcggaacccctaccaaaaagataaggcagcccctcaagcgccaagcactcggttccctaggcaagagtcggtatgtttagaaatgctcgacttcctttgatattgacctcttctgctcaagtttgttggatctaagtttatgtttggttctctctgtaagggcaaaatttatatcagcagaggagaaaactggtgttacttttgatgattttgcgggtcaggagtatataaagagggaattacaagaaattgtgcgaattttaaagaatgatgaggaatttcagaataaaggcatttattgtccgaaaggtgttgtgcttcatggacctcccggaacggggaaaactttgttagccaaagctattgctggagaagctggtttacctttcttcgcggcaaatggaaccgactttgttgaggtgagtgattgattgtgtcaacatgaataacagtgctaaatatcttggttttttaaggtcttgagttaatggagttttcctgtttttgtttaaatctctcagatgtttgtaggagtggctgcatctcgtgttaaagatctttttgctagctctcggtcatatgcgccatctataatcttcattgatgagattgatgcaattggaagtaagcgaggtggacccgatattggcggggtaagaatgcaatgctttcttgttccggaaattagattttagtataagagatttaactttctttagaaatgtgttactcactgaatagggaggagcagagagagaacaaggtttgcttcaaatattgactgagatggatggatttaaagttactacatcacaagtaatgtttccctttgctatatagttttttttcaataaacaatacttgctagtaatcatggattttgtcaggtattagtcataggtgcaacaaatagattagatatccttgatcctgctctattgagaaaaggtcgttttgacaaaatcataagagttggtttaccgtcaaaagatggtagattggcgatattaaaggtacttaattttacttttctggatatgacgagttttggttggctttgtgctttaacgaaaagttctgtttgtaactaaaggtacatgctagaaataaattctttcgatctgaggatgagaaggaggagttgctgcaagaagtagccgagaacacggaagattttaccggagcagaactgcaaaacgttctgtaatatacaatgctacagcttcaactatgtatttagatgcagagggaaaaaaacagaaaacactgatctttggttaattgtttacagaaatgaagctggaatcttgacagctagaaaagatttggattacattggaagagaagaactccttgaggcgcttaagcgggtaactagtgtttgatatccagtttatccatgcttaggtgctgctttagcaaattctgattccactccttacagcaaaaagggacatttgagactggacaagaagatagtactgaagttccagaggaactgaagttgagattggcttaccgagaagcagctgttgctgttcttgcttgttatctcccagatcaatatcgtccaatcagcgaggtttattaagaaacttgagtgcagtttccttcatgtgttattttgaattatagcattactaagaccattttttgtatcatgtgcttctctctgcagactgacataaactcgattcgaagccaaccaaatatgcgttactctgaaacttcaggaagagtttttgcgagaaagtcagattatgtgaactcaataatccgtgcatgtgctcgtaagttgcaaagccaaacttgtcaacactttctctttttcgttatagatcacaaaaatctctgtcgcttacttcatccccttgtttgtgtcgtatagctagagtagttgaagaagagatgtttggaatagaaaacctgtgttggatctctgctaagtctactttagaagcttcacagcgagcggaatttctgattcttcagacgggaatgactgcttttggaaaagcttattaccgaaaccg

SEQ ID NO: 138207 - DNA, 1551 bp, Arabidopsis thaliana landsberg
atagattttagatttggtgctgggacacaatgatgctttatttaggcgggctcagttgaaagctcttgtatccattcacagccaagaggtattattagagactttgaaattgttaactactttgtttacttcctcacaagtcacaaccttttggaaatttagattactaatttggttaccttgttgctctgacaatggttttaggctggtaagggaggtgagcttacacatgatgagacgacaatcattagtggagctcttgatttgactgagaaggtgtgtgcttgactttctagaattcctgaaccatggcttgatctgtgtagaaatatggtgaaagttatttatgcaaaagtggtatttggtttgacagactgcacaagaagccatgacaccaattgagtctaccttctccttggatgtaaattcaaaattggattggtgagtttagttatcaactgtcagtggtataaaatattttatctgttgtctcaataattctgaaaagtcctgcatggcagttgtttcggcaactattttctgacatgtatcttatactgctgtctgtgtaattaatctcttagggaagctatggggaagattctggcacgaggccatagccgcgttcctgtctactctgggaatccgaaaaacgttatcggacttctcttggtaatgttgctgactcttattttgcatgtttcaatggtggcttatcatgtttctgcaaactctaatcaagaaattgttctgttttctaggtgaagagtcttcttacagttcgccctgaaacagagacccttgtcagcgcagtttgtatacgccggattccaaggttctgccattaccattttaacctccagtctttactattatgtagaatgaagtttcgtattattgatgttataatgtttgaatagggttccagctgatatgcctctctatgatatactgaatgagtttcaaaagggaagcagtcacatggctgcagttgtgaaggttaaggggaaaagcaaagtcccaccttcaactttgcttgaagaacacactgatgaaagcaatgactccgacttgactgcacctttgttactaaaacgagagggaaaccatgacaatgtcattgtcacaatcgacaaggctaatggacaatcgttctttcaaaacaacgagagtggacctcacgggttttcacatacttcagaggctatcgaggatggtgaggtaattggtatcatcactttagaagatgtctttgaagaacttttgcaagaagagattgtggatgaaactgatgaatatgttgacgtacataaaaggttcggctaaatactctctatggcatcacatatcatatcgtcatatcatcactgagaatttccgcgtttgcaggattcgagtagcagcagcagcggctgcttcatcaatagcgagagctccttcaagccggaagttgcttgcgcaaaagggaactgtgagttaacactcttttgtttctttgttgtttatgcaagagagaaagttagaattgttgaaacttgtatttgcagggag

SEQ ID NO: 138208 - DNA, 674 bp, Arabidopsis thaliana landsberg
ctctcgctttgctttctcgcggcaatggcggcggcgacgggaaatgacgacaacggctgcttcgataaaccagaatctgaaccggcaccggttaacgtttcgcctcccctgtcgaagaatgctcagaagaagcagctgaagcagcaaagatacgaagcgaagaaagctgagaagaaggcacaggagaaggagcataagagaaaagaaggagagagaaagcttaaggaatgggaagaaaccctagcgaacgcgacggaggaagagaggctgaagcttattgagtcgaggaagagtctgcggaaggagagaatggagaagagatcggaggagaaggagaagaagatagagaggctgaatcaagctaaagaaataggtcaaaagatcgtagtagatgttgattttgctcatctcatgtctgagtctgagatctcaagcctcgttcagcagattatgtattgctatgcggtgaatgggagaagcacttcaccttgtcatctatggcttacaggagtccaagggaagatgagtactgagcttgacaagcttcctggttttgagaaatggttcattgaaaaccaaagtaggtgttacattgaagccataaaagatcagaaagataatttggtgtatcttacggctgattcctcccaagtagttttggtatgtaacccctt

SEQ ID NO: 138209 - DNA, 225 bp, Arabidopsis thaliana landsberg
ccctagttcccaacaaggtgacgatggcggcagcgaggtaatccttttttgaaccctagaaattttctgatgtgctttcttttgtaacctctttttaacatagtatttattatgttagcttgaatgcatctggaaaaggatcgaagaaaccaaatgggttgaaggagtttctggaaagtctagaagctctgaaggcagatcttaaaaccttgagtaaggaggagc

SEQ ID NO: 138210 - DNA, 1873 bp, Arabidopsis thaliana landsberg
  unsure (1)..(1873): unsure at all n locations
agcttgatgtatggagtcgaggatccttcgattgcaggaatgattctagacagccccttctccgatttagttgatctgatgatggaacttgttgatacatataagtttcgtctgccaaagtttactgtaagtaaatgtatattttggtgggagttgttctttatactgcaaggcttccacatgtattcagctctctctactgtatattcaggtaaaatttgctatacagtttatgcggagagctattcagaaaaaagcaaagtttgatataatggaattgaacaccattaaggtcggtcctctacctgtttgtcctttttatctacttgagtgcataaatggtctaatatatacaaacagcatcatcattgcttttcataatcatcctgctagttggtaaagtatttaacagtttaattgtttatcttccatgattcaggtggcaaaggctagttttgttccggttttatttggacatgccttagatgatgactttatccgccctcatcattcagatcgtatatatgaagcttacgtagtaagtttccaattcttgatagccatccttcttcttacacatgttcatcttcggctagcttcagtataaacacctggcttatgtttatgatggtagggtgacaaaaatatcatcaaatttccgggagaccacaactccccaaggcctccattctattttgattcgatcaatatctttttccataacgttcttcaacccccagaggtggtggggccgacattttatgacccattggatgattactttgcaaatgtaatgcgactgtggcacatctgaacgtttagatttttgtttctgcctaagaaacgtcaataacgatgtctattttatgttcagggcagttggggaactatgaatgacacaaatattccacaatcctctgtacagaaaagtgagtaatacttgtttttctcttaagcttctggtaggttttatttgagcttaaaggcgacatgttctgtcaatattcaggtttagccgcaggtagcatctctgaggcaattaatgaagtccgcaagaaacgacccatgagtcgcacagatgtaagtagttctccactaatctgggtctttttaatacttatgcatagctttggatgttttgtttaccattattagtctgataccctagcaatggttcaagcaatcaaatgcttccgactcttccaagattcataatgcctgtagtgcaaaactttaggacgccatatttgtctgtttgtagagccttacagaaagagtataaagcttgctaaacttgttacctctaaaatatacttgaaggttctggtttgtaatcttgagctttctccatcgcattttatatgccttttattactttcttcaggttccttcaaatgtcacactcacatctaacggttctccatcagaaactaaggtataagatcagtttctcttcctttccttatttcctttctttgttgtgtttatgattggttaccatgtcaagtgtatggttgtttgatcatatagtggttcattcgatcaatgatggttgagacacaagtgccatggtgatcagcttataatcgtgtaaatataaacgaatgacataaaagagaagaaagagtggaattcatgatgtggcataatgattttgtttcaggaaaaannnnnnnnnnnnnnnnnnnnnnnnnnnnnnnnnnnnnatatgataagctttgatttgtcagacggcaatcaataccctcctcaccttaggatggctttagatgatgatcaatatgttgagtatcagatggaggacatggctgatttcccatctaatgcagaggaagaagcaagagtaagacccaaaaacagttattatgtatat

SEQ ID NO: 138211 - DNA, 2764 bp, Arabidopsis thaliana landsberg; identical to SEQ ID NO: 37065

SEQ ID NO: 138212 - DNA, 1093 bp, Arabidopsis thaliana landsberg
ccgcgggctatttgggttagtcgacccgaccggaggactcggtgtcgctaacgccggtttagtttatttcaatggtcatctcttagccatgtccgaagacgatttaccgtaccatgtcaaagttactcaaaccggagatttagaaacttcgggtcggtacgatttcgacggtcagttaaaatcaacaatgatagcccacccgaaaatcgatcccgaaacccgagaactcttcgctttaagctacgacgtcgtttcaaagccttacttaaaatacttcagattcacatccgacggtgagaaatcaccagacgtcgagattccgcttgatcaaccaacgatgatccacgatttcgcgatcactgagaatttcgtagtgattccagaccaacaagtggtattccgattgccggagatgataagaggtggttctccggtggtttacgacgagaagaagaaatcaagattcgggattttgaataaaaacgcgaaagatgcttcgtcgattcaatggatcgaagtaccagattgtttttgtttccatctatggaactcttgggaagaaccagaaacagacaaggttgtcgtgattggatcatgcatgacaccacctgattcaattttcagcgaacacgacgaaacacttcagagtgttttgtcggagataaggctaaaccttaaaacaggggaatcaacacgtagaccggttatctcggaacaagttaatctcgaagctggtatggtcaaccggaatttattaggtagaaaaacccggtatgcttatctggctttaaccgaaccgtggcctaaagtgtccggtttcgctaaagtggacttatcgaccggagagattcgaaagtatatttacggagaggggaaatacggaggagagcctctgtttctaccttccggtgacggagaagaagacggaggttacataatggtgttcgttcacgacgaggagaaggtgaaatcggaactccaactcataaacgccgttaatatgaagcttgaagctaccgtaacgcttccgtcgagagtgccttatggtttccacggaacgttcatcagtaaggaagatttatcgaaacaaaca

SEQ ID NO: 138213 - DNA, 1989 bp, Arabidopsis thaliana landsberg
ctgccttcagtagtaacctctgagcttgagggaaactcatgtccatggcgctaattgtccggccattctttgttcctggtaattttctcttctttcttctgttcagtgcctttgttttcggctaaaagctctcttctctgtaatccattagataattttccgatcttaaacaatttgtgtaaagaaaagcgacaatctgattctggggatgtttcgtttgctcctccttttcatttttataacataaaaatgggcgtcaaaggttttatgtgcatattgtttcaactacaggagtgattagattccatatcatgttctcactgtttttctttatatcggaaatgaaatgatatatgacattttaattgccttaggaagtgctggaatttctgggagtagaaacatatgcaagaaaaatcaatggaggaagtatcttctgaaacccagtggatcatccattaattgctcatttagtacagagaagaatcctctattaccatctatccagcagttagccgatgctcgtctcatatacagtgtatctgcagcattgggtcataacaaggtttttacttgctatattttggtgtttctgtccctctcaatccttttttcacattcatttaagcaatcttttactcgcaggaatcacatccagaatgcagcgctagagttcctgccattgttaatgctctcgagatgaatgagctcactcctaaggtatgaaacaatccatctctatcgtttctatctgacattcttctatattatgcacatgtagctagggaagtttggttaaccgtgatttacaatatttaaggcaaatctcaagtggatggagaccaacataatgcttgtgtaaagttgcattagctgaaattttgtacttttctggagttagttagatagacttgcacatttcttctcaaacaagtagattcttttcgaaatatgtttgatgtatttataggtctgcttttgttgtatacaccattcttccttttgttggtttgcttcttcgatggtgaagatctctgtcactatttactgaaaatgacctacgtcttctatcaatgaattctcatatgtgaatcttttttccttgtgtatttcagttccgtggctcacagattcttgaactcgcaaatttcaagactgcaactgtagaagacattgcaaatgttcacgacaaggcttatgtctttggcctagaaaaggttattaactttactcatgttatattattagcatttactcacaactttttatttcataaccaatacattgacacatatagcaaagcaagtaggattgaaaaatgaggatgtacggtacgatttttattctgaccattacaaagacattcttagtgtaggcaatggatgaggcttcagattcgggactaattttcattgaaggctctggaccaacatatgccacttcaacggtaactgctttgtgctcatccggtaacatctccaaaggaaccattttacctacctaaacatcttccctctgtgccagacattccaagattcacttatcgcagcaggagccggaatggctttagttgattcagtggtgatgtctcgtctcaccatgttagtctgcttttactgcttcagtttcattatgttgggaatggttgtagatttcttatatgattatttgtttcagatcgcagcatccagaaacagcgtagatccacccattggttttgcattgataagacctcctgggcaccacgccgtgccaaaaggtccgatggggttctgtgtttttggtaatgtggcaatcgcagctcgtcatgcccaacgcacacatggtctgaagcgcatcttcataattgacttcgatgttcaccacgggaatggcacaaatgatgcatttactgaggaccctgatatattctttttgtcaactcatcaggtaagcctctaacatttttgcgtgacatgtttctaattagttcattacaaaatatccata

SEQ ID NO: 138214 - DNA, 1371 bp, Arabidopsis thaliana landsberg
cgcaaggagcgaagctaattcctctcgcgatctccgtctcaatcggcctcatagtcagattcttaatcccaagaccagaacaagtaacctcacaaggatggcaattactctcaatcttcctcttcaccatctcaggtctcgtccttggtcctctccctgtaggcgcttgggctttcattggcttaaccgcttcaatcgtcaccaaaacgcttcctttctcaaccgctttcgccgcttttaccaatgagctcatttggttaatcgctatttctttcttcttcgctcgtggattcatcaaaactggtcttggcgacagaatcgctacttatttcgtcaagtggctggggaaaagcactcttggtctctcttatggtcttgcgttctgtgaaacgcttatgggtttgattatgccgtctaccatggctagagccggtggcgttttcttgccggtgattaaatctttggcgatctccgccggaagttatcccggagacccatcttccagaaaattgggttcttttctcattcaaactcaattgcaggtaataactcaaagactctaatcagtaactatagcttggtctttggaaataacatcaactatgttcattaagcattaaatgtttggaatgagaaattgtatcttgaagggtttatgttttgtctgtgacagtgttcaggagcttctggtgcgattctactcacatcagctgcacaaaacttgctatgtctcaaactagcaagagaagttggtgttgtaatctcgaatccatggatcacttggtttaaagtcgctagtgttcctgcgtttgtgtctcttctttgtactcctctcattatctacaagctttaccctcctgagttgaaacacacaccagaagctccggctgcagctgctaagaagctcgaacgattaggtcccatcacgaaaaacgaatggatcatgctcggcgctatggctttcaccgtctctctttgggttttcgggtacggtttcttgcagaatttgaacaaagcatcattagtatcatacaagagaaatcgcataaaactatttagtgtctaaaactagacgtattgatacataagtctataactacataaaactcactaaaaaagttttcaaaatcaacgttaaccatattatgaactttatttttcgtatctccttgcagagaggcaataggaatagcaagtgttgtgtccgcgatgataggtctatcaacacttctgctgttgggagtcataaactgggacgattgtctcagtgacaaatcagcttgggactctctcacttggtttgcggttttgattggtatggctggacagctaacaaaccgtcggtgtcgttgcttggatgcgggattgtgt

SEQ ID NO: 138215 - DNA, 1236 bp, Arabidopsis thaliana landsberg
atttctgcagtggctaggtcgtttctgcaggcgatatcgaaggatgaggcggtggctcctccgcttagagttgttcagatcgaaggactggtaacgtttcttagtgttccctgattttacggttttaagtgtttttcctcgttttctgctgaccgatggtgtttgataaataaaaactctctaggtgaagctaatttgcccattatcatttggtaggaagttgtgatgctgagaattttgtttgctattgtgataggctgtactaaagataatcaaacactgcaaggagtttttaccgacccttgtcactggacagcttcttggacttgatgttggtagcgtcctcgaagttaccaattgttttcctttcccggtatgttgatgaattttacacgcattgtgaggatttaagagcttgttcatgattgatgtacatgtgatttactggaatttgtatcttaaacgaggacaggtcagggatgatgatgaagaaattgaagctgatggtgctaattatcagcttgagatgatgagatgtctgagggaggttaatgttgacaacaacactgttggctggtaggttttttaatgacatcagtctgagttcacttgttaaattttttcttgtgaatgtatttagatctgcctaattctttgttcaggtatcaatctacagttcttggttcgtatcagactgtggaactgattgagaccttcatgaattaccaggtacttttttttttgttaaagaatcctgtctaccatgtcattataacattctagattctggatttggtctgttcatatgttatgctcttcattcagctggaaatttatatgtatagcatggctactctagtgtatgataggtatattggcatgtgtaaaagttgaatgtaaattggaccatgaatatattttctgagactttttttgtccgcaactctgttacaatcccttgcagaatcatgatatgaactcttaagaaatgattcttctgcatctacaggagaatatcaagaggtgtgtgtgcatcatatatgatccctctaaagctgatctaggcgtcttagctttgaaggctttgaagctttcagattcctttatggagttgtaccgaggtggaaactttactggcgagaagtatgtatctcgatccattgaaaatctaggttttatgagtccacttaggatgattgttgtaacgttttagtcactatctttttcaggttgaga

SEQ ID NO: 138216 - DNA, 3452 bp, Arabidopsis thaliana landsberg
  unsure (1)..(3452): unsure at all n locations
agtaacaatgccaaagataataatcgagttttaactcaatctcaaatacttctccatatgtattcatcatcatcaaaaacacatagaagttcccatagctcaaaaaggtaaagnnnnnnnnnnnnnnnnnnnnnnnnnnnnnnnnnnnngagccgtttgatcaacagaacccgaagcaagctttgttccattcgaattccaagctactgaatgtaccttcaatccaaaaattcccccagattcagcaaaaaactagggtttcgcaagttttattgagtacagaaaattagactggagatagaaaaaaaaaaccttcttcttatgaccttgatattctctgctatgtaagctcttgaaaggaatcgtcgtctcctccattttttaattctcaactcttcttcttcaaccttccttcgcggcctactgaatatcagagcttcgcttcctgaaacgcagcgtttagtcattccggtatagataaaccgaatcgaattttagtaaaccggatgtaaaaaaccttctagatggttaagagtcttcagagagaaactaacaagaagagcggtaaaattgggtaaaatatgaaacaaagaaaaaaggtgaaaaaaaaaacagctaagcaaacaacaagtaatcatttcacagtctctataaaatgacctcttaaatccaccgacgttatagagagacaacaacagctttggttctgcctccgccgcttcttcttcttcttctaatctccgacagatttactctgattctgttgtcttcgagatgatgatgatgtcgtcgcttggtggtggtggtggtggaggaggaggaagtggtggtggtattggtggtggcggcggagggaggtttatgacgtattcgtcgtctctttcggtgcctccttctgctcctcagtctcctaattactccggtggtctccgatcacagtcttctgtcttcgttgagcaagagaagtaatcgaatcttagtttttcatcttcttttatatttttgttttttattgtttggtgatcttttataattagctgatgtatctgatgaagtatgttgatctttgctttgctgattttgatttttagatcttaatagtgtatctcgaatctggatttttgtcttttttgttttcttttgattatattaggatctatgtttcggaactagctcagtctatttcagatttgtctcaatccagttcattttttgtaaagcataagtctttagtgtgtgaggatcatttcattggttgtgttcgtttctgttattgttgatttctgttcttggctgatgaaactgttaaaaaaaatacgatttttggaagattgactagatccacttcacaaaagaatggaaatttgaatctggttgtatcgatttagagtgaatttgagtgtatctgtttgtaagtttgatgtgtctttgaggcttttttactaatttggatactctgcacaatttctgttttggcaggtatctttcagagttacttgcagagcgtcataagcttactccattcctgcctgtgcttccacatgcatttcggctactaaaccaaggtgagcattactgtttttgttgtttattatttgtattttcatctcacataatacttcattctttgcttcagattcatgaagctataatacagttgataaactcttaaacagtactgctaagagagacctaattgttagctattagaagtagatcacgaaatgactaattctatatttcttatactgacttcattctatttaaccagagtgtatttaactagagtgagagcaaaaatatattttaagctaactcaattaactatgctgtctctccattcattggtgtcttggtgactgatttgttgactaattctaactggtgcgtcttactcttgcaaattgacatttttggaacagaaattttgcgtgtaaccacactgttggagaatgctacagttttaagtcagagtgggcttgaccaccctagccctctggcttctggagggatatttcagaatgcaagagctgacatgaatggatgggcctcccagtttccatcagaagtatgactactaaccattaacataactctctaattcatactactgcaatagaagttttattgacttaagttataatactgacataacatatttgactgcttttagtcctagtttatcatgacaggtaggctaacacttcatatccgtaatgtttgtatgttcataccttagatcaacactaattagatcctccactatcctcacgagtaggatggaaattaatgctataattttctcatatatctgcggtcactgtatgcatattattaggatataacagctacaggttgaaatgccttgatacagtgaccactctcattgaatgaagttccagggcaagaagttgcagtattcatgtgcttatgcttaaaggttgatcttgcttctaattttgttggttgatcatttgtagagatcggtttcatcatccccagcaccaaattggcttaactctcctggtagctcgtccggtctcatcgtcaagcgaacaataagggtggatattccagtcgacaaatacccaaacgtatgaatctttattcccttgatgagttcctttattatcttgtcaaagtataaacaataatttcataatttgcagtacaattttgtcggtcgtctcttgggtcctagaggaaactccctcaaacgagttgaagcgagtactgattgtcgtgttctaataaggggtagaggcagcattaaagatccgattaaggtaatcacatttttcatttgttcagtctaataataccttaactccaattgtatcttcattaatatagcgttattgtttgcaggaggatatgatgagaggtaaacctggttatgagcacctcaatgaaccactccacatattagtcgagcgcagaattacccattgaaatagtggacgcaagtctcatgcaagcccgtgaaatactagacgatctacttactcccgtggtttgttcttagctcttaaaagatcttaaaccagagatacatgtagtatttgtttgtctatataaccgtacttgttttgtgtactgttttaggaggaaacccatgatttctacaagaaacaacagctacgggaattggcccttctcaacggcagtcttcgagaagaaggatctccaatgtctggttccatctcaccttacaatagcctcggcatgaagagagctaagacaaggggctaaaaacacgtctaaatttcatatttttgcttgcctctctcacctttccaagaaggtatatatccaccgtaacagcttccttcaaacaagaaggatttggagattctgtctccatcccattcctcctcttcctcgggctaccggtactgtctctaatccctggaataaaaaaacaaaaagaacagcgtcgtatatgaatctgt

SEQ ID NO: 138217 - DNA, 1066 bp, Arabidopsis thaliana landsberg
aggagttacatggtacatcattggagcaatgtaactccaacttgtgaaagctgttcatcactagctagaagataaagaaacataagattcatagatcatatatatgtacatcatatccctctttagagcaggtacttgtgttcacctgcaaatgtaacaaagaacattatactatacacattgaattatgcctgtataaccaacataggtcaagattacatcatacgtgggctaggcccattttatattggcccaataagtgagtgactaaatcctttcgttcccaaatatatctccaccgatcaagagattcatcttcaccgccagaaatggcttcctcatcatcgagaaagtacgagacacgaaagcgagatccaaactctaaaatcgcagctgatccggttagcgacatgcagaatcactactcgtccatggccagacccatcctcaacaacgttctcaccacgatcgacatctgccgacgcgcctcagtccccgtattctttacgcgtcacaaccacaaatcccctaccgaccacggcatgctcggcgagtggtgtaacggcgatgtaatccttgacggaaccaccgattctgaaatcatccaggagatacaaggccaagtaaccaaaccagacgagatggtggagaagaccacgtacagtcatttaacaacacccgcctccaggaaaacttggaaaagatcggagtaaaggaggtgatcgtgatcggagtgatgacgaacttgtgctgtgagacaacggcgcgtgaagcgtttgttaagggctttagggtttttttctcgacggacgcgactgcgacgtttaatgaggagcttcacgaggctacgctaatgaatctcgcttttggctttgcttatctcgtcgattgcgataaactccggcgaagtctactcggtaactaaaaaatgataactacacgcacagccatcgtcgcgaaaagttatccgacgttacatgttatgtggagaagcaaagttggagtctctatgcttaccatattgagctttttttcttaagtattttgtctaatatctttcatgtga

SEQ ID NO: 138218 - DNA, 1296 bp, Arabidopsis thaliana landsberg
ctgctggatggcctgcttggctagtctcagtggctggtgaggcacttgtgaattggactccacgacgtgctagtacctttgagaaattggagaaagtaagtatgctgatgtgtttatcgcctttttgatctgacttgattcaatgatgaactcctttgacaaatgtttgcttcttgtgtggatacagattggccaaggtacatatagcagtgtatacaaggctcgtgatcttactaataacaagattgttgcactcaaaagagtccggtttgatcttagcgatttagagagtgttaagtttatggcgagagagattattgttatgagaaggcttgatcatcctaatgtacttaagttagaagggttgatcactgcctctgtttcatcttctctgtacttggtttttgagtatatggatcatgatctcgtcggacttgcttccatacctggtatcaagttttcagagcctcaggttatccctttacttatgctttacgtacactatgtctcagtatatcaacttgcctagacatcaatcaacttgttcttctgctgcttaggttaaatgttatatgcaacaacttctaagcgggcttcatcattgtcacagtcgtggtgttctgcatcgtgatataaagggctctaatctactgattgatagtaatggagtcttgaagattgcagattttgggttagcaacgtttttcgatccacagaactgcgttccattaactagccgtgttgtgactctttggtatcgacccccagagcttctacttggagcttgtcattatggtgttggggttgatttgtggagcacaggctgtatcttaggtgaactatattccgggaagccaatcctggccgggaaaaccgaggtaccaatttttaaatccatctagaactcagcttcccataatctcaaaaactgacttgaagtttaacctttttctaggtagagcaactgcataaaatcttcaagctatgtggttcaccggcagaagattactggaggaaactaaagctaccaccttcagctgcatttagacccgctcttccatatggaagacgtgtagcagagatgtttaaagacttgccaacgaatgttctttcccttttggaggctttactctccatagatcccgatcggagaggctctgcagctagagctcttgagagtgaggtacaggtttagcttatatttgatattctgactcattcaagcattatgattagtaacacacagaaattttggagcagtatttcagaacagagccgtttgcttgtgatccgtct

SEQ ID NO: 138219 - DNA, 718 bp, Arabidopsis thaliana landsberg
tcttcggttcgagcttttgtgtgatcgatctaaaaggctatagaatatggtgaaaccatcggatttcaaagcaattcaagggtttattcggctgcattacactcgggtcaaccctgtcacaattggccgatcaaacccatcagctttgtcttctccagctattccctccaatggtgtttctcagcttcagcctaagtttagcttccacagcttatcctcgaaacccacttccaaaaacgtgggattatatcagattctgtcgtctcctaagctcaatcctaagttgcagcaagctttgggtttgcctcgtgtgaatgtgagttttgcatcggcgtttagattggtatccactaagagctctggatttcgaaaggttgatgggagttttgcgagaaaggttgttgataagcctgtcaaagctgttagttctacttttgctagataccgtgaggctatagggttgcacattgatgcattttggaaaaagaatagtcttgttgtgtttggagctgcaggtgtttttgtatgtattttcctttggcggattatgtttggaattgctagtacgtttgttggcctctcagagggcatggccaagtatgggtttcttgcactctcctcagccattgtagcattttctgtaagtttcactctttataagcttttcgatgggaatttgtgcttcaattcttggtggttggctccatttatagtatgt

SEQ ID NO: 138220 - DNA, 1973 bp, Arabidopsis thaliana landsberg
ccacatctacagagtcagaaaataaaaagtagaagaagcagaagcgagagtgcaaaaaggttagatctgctttcaaaattgttcgtactgcttctttaccacataaagttcatagctttttacgtttctaccgataattttgcattccgaattctccattttctcaattttgcttaaatgggtgtttctcttctgcaggaaattaggttttgagtggtcatgtctgctcctatctattctccgatagatatgcaagagattgttcaaaatcctcctgggtaattcttcttttctgataactatgttataaatgtgaacaaaaacttgttttgtctctggtttgttttggttatcctgtgtctgaatctttgctttgatttcttgaacaacttagaccttttgatgggtttatgtccggaaatgagaccaaattagtgtttagctgatatctgttcaaaattctgacctaagcacaaaaagttcttgagtttagatgagagaagattaaattgtttagaggaacatttttgtctttgggaattgtgtgaaacttacgttgagcaaaagttagggttcttattctaattgctgctaccataaaggatgtgtctttagggtttgaagtctccatattttgttattcattatgcctgagtatgcttgtttcaacactacggtataatgaagtgtataatacattgtttgtctacatgttttaatggtgctacgtacaaggcaaatgatatgtgtctgttgtcatgttgtgtttatcacacttctctttcatcttctctagtgttgatttgcatgcaggtttgatacggaaccagtcccaatcagtacttaccgagacaatgaacctgtcccgctttcaacttaccgagaaaatgattcagatcatctcgacgccactcagcaagagaacgatgacttttgggaaaacggtttcagtagggaagaggccattgaagatccagagccttctcaggcaaaggaaaatggaaagagaagtgtagacaacagcgctttcactcatggggaaactgatctcaatcaacttcctgcgattcctccggtttcaactggtcaaggtttgccgtatgcccctgttgattggccaagccctggtgatgtatggacttggagagttgggaggagagtgactgctatggggtatcatcaggataggtttcttattctccctcaaaggcttcagcaaaagcatgtcccaaagtctttcgcaagcaaaccccaacttgctcgttatctcgaatcggatttccctggcatggatgctgatgcattctttgcttcttttagctggaaggttccagctctcttccagcctgcaaatacaggtgatcttatagctgtccaagagaggttacgattttgcagatgttcatagatgaacgtaatcagtgatatcattactcttctgtagttgatgctgcgtctctttttgaggagacaccgaaggaagtacagactgaggttggccagaatgatgagaatgctcaggatgggaaaggaaattctcgatacagccaaaggaagagaaagccaatgccgacgccacaaacttatgaacctgttgaagcgaaaccaaaatcaactccccgaggtagcagcaacaagaagaagaaaggagccacaactccggctattggacctcaatcctctgccaaaccaaaaccatctcgacaatcgggaagacgtgcctcgatccagcagcgcggtggtgctgtggacttgaacttcctgaatgaggaggagagtgaacctgctactgcaccaaagactagtaacaagagaaagaagcgtggagttaactatgaggaagaagatgtttctattccccatatttatgtctctcctatgaatggggtcctcgaagtctaacactcgcctatcgatgttaacccggaagagtttgatagctatctgaactctcttgataacttgatgcggca

SEQ ID NO: 138221 - DNA, 1869 bp, Arabidopsis thaliana landsberg; identical to SEQ ID NO: 67134

SEQ ID NO: 138222 - DNA, 1996 bp, Arabidopsis thaliana landsberg
ctctttcttcctcttctctcattgaaatcgaacgaggatggggaagaagaaatcgaaggaaacggagccggaatctcaaaacgatgaatctcagacaatcttctccactctcttctccggcgaggttgaaagctctggctttgcgagtctcttctccgctgataaccctttccggcgaaaacaacctcaagaaatcaaagagtcgtcaattcctgatgagaagaaaggggataaacgaaatgcagagaacgaagaaggagaagaagaaacagatttgcctgtgaagacgaagaaatctaaaaaggaaaaaaagcttacagattccggcgacgagaaagagacgatttcggaggctgtagaagaaagtgggttggtttcaaagaggaagaagaggaagagagatgagattgagaacgaatacgagacgaagaagtatggaagcgttgagatgaaagagaagaaggttggtgagaagaggaagaaagctgatgaagtagctgatacaatggtttcaaaggaaggttttgatgatgagagtaagcttcttagaactgttttcgttgggaatttgcctttgaaggttaagaaaaaagtcatcttgaaggagtttagtaaatttggtgaggttgaatctgtgaggatacgctctgtgcctattgttgatgtgagtttcttatagctaaagcctaaagatgaatttaggttgagtttttgtgttcattggtttctgatttcgtttgatttttattgattgatttagtcgaagaggacaaggaaaggagctataatgctgaaacaaatcaatgagaaagcttcaaggtttgtgcttgaaactctatatagtaatcatttgattttgaagtttcagtgatgaaaaagtctaatgtcaatgtttgtggaattgcagtgttcatgcttatgttgtgtttgaaacagagcaatctgctgcagcttctctggcacataacatgtctctggtaatgtaacttttgcgccttttgttctatctggttgatttttaaggagttatgtgtagattggctaatagttttatgttataatcagattgatgggaatcatgtccgcgttgatagagcatgtccgcctcgtaagaaacagaaagggcatgatgatactcatttgtatgatcctaagaggacagtctttatgggtaatctccctttcgatgtgaaggttagtagtactagtcttaaggctcttcttctgtttaatttgcgatgatcgaactttatcttagattctcagttttgtttgtttctaatgcaggacgaggaagtgtatcaactgtttacgggtaagagtaatctggagaacagtatagaagctgttcgtgtcattagagatcctcacttgaacattgggaaaggaatagcttacgtcttgtttaaaacacgggtatgttgaagtaaactttgatctttgtaaggtttgagtaataaaaactaattagatctgatgagtccttttattttgttaactataggaagctgcaaatctcgtactcaagaaaggatacttgaagcttagagaaagagagttacggatttctcgagtcaaacctgatacgccatcaaagagaaagagcaatccgtctgaagcttactcgccggcccagaaaagactgcagaaggacaaagtggtcacaccaactccaacagggaaggctaatctttcatatcaaggtgtacgagcttcaaaatctggtgatgataagaaaacaccttatcagaaaagctccgcgcagacaaagatgagacctagaggtagcagcagcaatgacaacaaaaaatctgggaataatagtgcttcaaaggaaagaagtcagaagcgaccagctgttgcagcaagaaaggcgaaagcaaacgcaaaaggttcaaaagagagcggtggtaagcggtttgcagggacaaagcgtaaacaagaaaaccggacgcctgaaagcttctctaagaagaaaaaaacaaaacggttttag

SEQ ID NO: 138223 - DNA, 2024 bp, Arabidopsis thaliana landsberg
catttctcttccgtaatcgttaaattatgacataacgtctttgttttggtcgtatcgttcacgcaaaacttcacgattcagatctgtgcgtggcagaatttgaatcgaagcataggatcaatccggtaagcagccgtaacttgcaatcgatcgccgatctggatccgttaaaggatccctcgcagtccttgaagatatcggcgtcctccgccaccgggaacaggatccgttaccgttcaccttccgcttctgagctattggagtctggactagccaccggattatccggtaaccattctcctacttccgactctcatcagggacttgtgtctatcgacggaggaaaaatgacggcgaagcgagcgatcggacggcacgaatcccttgctgacaaggtccatcgacatcgtggtcttctacttgtgatttcgatccccattatgttgatagctcttgtgcttctgttaatgccggggacgtcgacgtccgtctctgtcatcgagtacacgatgaaaaaccacgagggaggttccaattcgaggggtccgaagaattacgctgtgatttttgatgctggaagttctggaagccgtgtgcatgtttactgtttcgatcagaatttggatcttgttcctttggagaatgagctcgagctcttcttacaggtattcattgcatttcttttgctcttctgaagtgttgttttttctgataatggaaccttgcctcaggctcatgaacgaactctcgttagcaaatgctagatcaatgttaagctaatatttgattcggttattcggtattcaagtttgttaccaatgatgcaattgtcttagttaagtttctatttttagtttataaccgcatggggctctgtttctatagtttcttcaaattgaagttgtgtggatttttctcacaattgggttaaaaaacttcacttatgtacttccaacgataaacttaaaagggacgatattagattcccgtgttcattgtgctttgctgcaatgtttattttgcatttggtggtatttctagctcgcagaaatctttttgtctgaacttttattgtgatattatttcagctaaaaccgggtttaagtgcatatcctaatgatcctcggcaatcagcaaactctttagtaactcttctggacaaagcagaagcttccgttccccgtgagttgcgtccaaagactcctgtcagagttggggtatgaaacgagttctttcacacaaagtcaagtaaagctactaatgtgttcattcattttcatgttaatgacctaactgttttgctttatatttttttcaggcaactgcaggtttgagagctttgggtcaccaagcctctgaaaacattttgcaagcggtaatattcgtgtatatgttttctaaagacattcgcctgcttgcctagcttgtaaacttaaatgtaattttgttttaaggttagggagctcctcaaaggtagaagtaggctgaagactgaggcaaatgcagtgactgttctggatggtactcaggaaggatcttatcagtgggtatgttgtagattttccatcaattagagtcagattcatgttaaatccagttcggattttaaatctgttgtattatggttagacttttgtgcctgtatttgttgtatttctgtatgtctctttatcttaaacatgtagtcaagtaacaagttttaattttcatcaaacttcccattgttaaggtgacaattaattacttgctaaggactttgggaaagccgtactcggacacagttggagtggttgatcttgaaggggggtcggttcaaatggcatatgctataccagaggaagatgctgcaactgcaccaaaaccagtagaaggcgaggattcttatgtcagagaaatgtatttgaaggggcgaaagtatttcctcgatgttcataggttggttctctgtcgttgcttctgtgctcgttagagaatttctatgttctattttacaagcaatacataaagctgtgtttgagtgtatc

SEQ ID NO: 138224 - DNA, 1539 bp, Arabidopsis thaliana landsberg; identical to SEQ ID NO: 22675

SEQ ID NO: 138225 - DNA, 1478 bp, Arabidopsis thaliana landsberg
agttcatgcattttccgtcccaaatttgaaagttcgggcttttttttacatttttccccttttaaaaccctctctccgagctcggcgagatcagaggaagtaaattatgcaatcggagatggcgatagacacggtggccacggcggagaaatcaccactagagctacttcaacaaaccaaagcctccgtcgaagcaatcatagcaaagatgctctccatcaagcaacaaggaacccctaaatccgagaatcgagaactcctcactcagatgtttctcaacttcatcaatcttcgtcaagcgaatcgctcgattcttatagaagaagagaaagtgagaacagaaacggaaatagcaaaatctccggtggatttcacgacgttggagcttcacaatctcatgtatgagaagagtcattacctcaaagctaataaagctagtagagatttcaaatctaggtatccaaacatcgatctcatatccgaacaagacttcttcagtgatgctcccgaagcaatcaaatctcaaacgttatcaaatgatagttctcatgatttgatgcttaaaagactcaattttgagcttcatcaggtaaatttcatttcaaagttcatgtctttaaggtcttgtagtagcttgattcaatgtgacttgattcaatgtgattcaatgttaagctttatacatctctgtctcgaatcgttagaccaagttcatgtgttagatattgttggagtttttattcaaaagtgattgaatgtttaagtttgttatacacagaggaaagagctatgcaagcttagagtgaggttggagcaacagaagaagagtttacttgaaagtaatgcggagaggaacaagtttctgtcaagtcttccagtgcatctcaaatctctaaagaaagcatctttgccagtacagagccagttgagtttgcagaatcagaagaagctgaagtatcataatctagctgagcttcttcctccgccgctttatgttatatattcgcagttcatggcactgaaggaagctttcgaagagaatatcgatgttgaggtatctgggagtcttaaggatgctcaaacttatgcgcggcagcaagcagaacagaactcaggttagcaattctcacacctttagttaaaataagaattgaaaatggaatagttatgtgctcgttaaaatgacatgtatgttcaataatacagagagtctaagattagaggttggtgttgatgaagaaaggcaaaggaaacgactcaagaaagtgggttctgatgagggaggagtatatcaagttcatcctcttaaagttgtccttcatgtttatgatgacgagattacagatccgaaatctcatgaacttgtcatgctcaagtttgagtacttgttgaagctcaatgttgtatgtgttggcattgaagagataaaaggatggacttgagaaaaatatactatgtaacttatttccagcggtttc

SEQ ID NO: 138226 - DNA, 783 bp, Arabidopsis thaliana landsberg; identical to SEQ ID NO: 49982

SEQ ID NO: 138227 - DNA, 1366 bp, Arabidopsis thaliana landsberg
tactggcatgaaacgtaatggtggaggtcgtggaaactggggcactactgaagatgatatccctccgtaagcatccttgtcttcactttaattatccatatgactttaactttaggttgtttataaacttttgttgttcttatattagaacgtctgaggaacctaccacagaggttgagaagagccctgttgctgagaagcaaggaggtgaggatgaaacccctgaagcaaagaaagaactcactgcggaagagaaagcacagaaagaagctgaagaagctgaagccagggtacaatcatttacagctcttgaaacatcttttgaggtttagttaagtttgaagtagaatgtttgctaacatttgaaactgatatggttttgtcatataggagatgactctagaagagtatgagaaaattctggaggagaagaagaaggctctgcaagccacaaaggttgaggaaaggaaagttgacaccaaagtgtttgagtccatgcaacagctctctaacaagaagaacaccgatgaagaaatcttcatcaagctggtcagaaaatcatctactgttcagtttatctattcccttcactgtaacggagcaatagttaatacttggtattttattgtttcagggatctgacaaggaaaaacgcaaagatgctactgagaaggccaaaaaggtcttagttcattctgttctcacttcatgatttcttttgggttgtgtcatttttttacctgagtgattttgggtgattttgtagtcgttgagcattaatgagttcttgaagccggctgatggaaagaggtacaacgggagaggtggaggctcccgcggaagaggaggtcgcggtggtcgtggtgaaggaggaaaccaaaggtatgcaaaagaagctgcagctccggcgattggagacacagctcagttcccttcgttgggctagtaaagacccctggtccttcagcctcgctatctctgtctttcgtttctctttggttgaattttgttagttttataattttttgttacactttctgaaggtcttttctgcgaaactattacgttttttaagttatgaaaaaaattattaagatatttttctctctaattttggtattacacattcgatctttcttttcgtacatcataaatgaagtatatttctaatagcacgatatctagtatctttcatacttgagcgatgatttagaatcgtcgaaggcattaaagagtgctctacattatttgcataaaagaccttttactatatagaagttatgggtttcaaacttcaacgtacatcagaaaagaatcggatcaaaagaaagcaaatgaaaaacaagcaaaaggatccaaagagctg

SEQ ID NO: 138228 - DNA, 1751 bp, Arabidopsis thaliana landsberg
  unsure (1)..(1751): unsure at all n locations
gtagtctgaattttttctntgttatgtatcctgcactttgtccccaaagctattctcacacatctatttctttacaaagatattctggcacggttattggtgtgaaagactgctcccctcactggaaagactcaaaatggcgatgcttagaagtaaaattccttccacttttacatgttttttaaagtgtttattaagtgtgaaaactcaatcagtttgctacatgtttgtgtaggttcattgggatgagcctgcatcgatttcaagacccaataaggtttcaccatgggaaattgaaccgtttgtaaattcagaaaacgttcccaaatcagttatgctgaagaacaaaaggccccgtcaagttagtgaagtatctgcacttggtgaggcacaatctaaccgccactgatttgctagtacatagcttaagtttccttgctaaatctcacatgctgtgtttagatgtaggcataacagcttcaaacctttggagctctgttttgacgcaaccccatgagtttgcacaatcgtgcatcacctcacagtggagttctcctcagcaatgtcatcgtgatgcaaatgaggatgctaagaaatctgactggctaaataactcttactctgtgtcaaatgtagcaaaagactcaacactgaacgaccaaatggtttccccagtcgagcagaagaagcctgagacaaccgctaattatagattatttggaattgatctgatgagttcctccctagcggttcctgaggagaaaactgcacccatgcgaccaatcaacatatccaaaccgactatggacagccactcagacccaaaatcagagatttcaaaagtatcagaagagaaaaagcaggaacctgcggagggatcaccaaaagaggtccaaagcaagcaaagcagttctacaagaagccgtaccaaggtatatatatgcctacatggctaccgtgaagtgtatatacattgtgtaatctgtgagttgcaaaacagatacacattatgtataatgtttgcgggactgaacaggatcctgaattctttatcgctgaacaggtgcagatgcaaggcgtacctgtgggcagggctgtggatttaaatgcgctaaaggggtacaacgagctcatagatgacattgagaagctgtttgacataaaaggggaactgcggagtcgcaatcaatgggaaatagtgttcacagacgatgagggagatatgatgcttgtcggtgatgacccatggccgtaagtaacttactctttatctcttagtcaatagaatcactacacaaaactcatatctgttgacttaatttggtggtgcagtgagttctgcaacatggtgaagagaatattcatatggtcgaaagaggaagtgaagaaaatgacgcctgggaaccaactccggatgctgttaagggaagttgaaacaacactaacaacaacttccaaaacagataatcattccaactaatttttattctattctctatcagtcttcgtctccttcttatttgctttgtctttcggaattatcttgtttgtgtctgtgttttgttgcgcatggcttaaacaagaaactacatcccctgaggcaaaaaaaatggctcgtttttttggagcctcttatggagaaagggggtttatggggagagggttttctacttttaaaataggcttttggaagtttctttttcttctaggaacttgtgtgtaagagaaacaaatatgtaacgaacagaaag

SEQ ID NO: 138229 - DNA, 2264 bp, Arabidopsis thaliana landsberg; identical to SEQ ID NO: 4563

SEQ ID NO: 138230 - DNA, 1035 bp, Arabidopsis thaliana landsberg
agaaaatggtgaacattagagtacaaaaagctccggaatctccgaggacgatggaggtgggagaaatagacacaagagcaccgttccaatcggtgaaagctgcggtgagcttgttcggagaagttgcagtctcaaagcaaagaagtactccaaggcgatctcgactctcctctgaggtaagtaatccaataacaacaacatggatcattaaagtctgatcaagaaatggttctatgattctatcatggttttagatgaccagaatatgtctaggtaacagattgtgttgtgtgcaaaactaaaaatatttgtttatgttatgtttcagagcgtttgcgacaaggaaacacagctaatgctggtccacaaggaattcatgaagatcaagcaaaagcttgacaacgctgagagcacaagatctcgtgctctagacgatctctcaaaggcgaagaagacaatggaggatcttagcaacaaacttgagactgtcaacaagtctaagcaatcagctattgacaccaaagaaactgtccaacagcgggaagaacagcttgagcatgataagtgtcatggctctcctcctcatcaccatgaacttgacgtcgctagagaacaatatatctccaccaccgttgaacttgatgctgccaaacagcagctcaacaaaattagacagagctttgattccgctatggatttcaaagccacggccttaaaccaggctgcagaagctcaacgtgcactccaagtcaactccgccaaagttaacgagctttctaaggagatttcggatatgaaagatgcgattcatcagctcaagctagcggctgctcagaatctgcaggagcacgctaatattgttaaggaaaaagacgatttacgagaatgttatagaactgctgttgaagaggcagagaagaaactgctagtgttgaggaaagaatatgagcctgagctctcaagaactcttgaagccaagctgttagagacaacttcagagattgaggttttacgggaagagatgaagaaagctca

SEQ ID NO: 138231 - DNA, 2272 bp, Arabidopsis thaliana landsberg; identical to SEQ ID NO: 67270

SEQ ID NO: 138232 - DNA, 351 bp, Arabidopsis thaliana landsberg
gtctttttgagaagtttcagttttgaggccatttgttgtcagatgagagacgcaaagcttagctttttctttctttgtgatgagattcatggtttggttttgctgtgcagaatctgtgaagtttgtgggtcgattgcgggtaatgttgttggaagtgttgaggtggagtctgaggaaagccggaatgaagcaaatggtgtagagaatctaactctgagaacatctggtccacgattggtggaaggtagaagcttctggcaaggtcaccggttcttgaatttccttttagcttgtatggtctttgcatttgttatctcatggctcttccacttcaatgttccttctacatag

SEQ ID NO: 138233 - DNA, 2193 bp, Arabidopsis thaliana landsberg
aagatgatgccattggaaccttaaacccggagactcaagaagctgtccagctgaaagttggatcaagcagagagctcaaacggggattcgattatgatctgaatttcaggcagaaagagccaatagtagaccagagctttggagcattgcagggtctattaagtctaaaccagacaccacaacataaccaagaaacaagacagtttgttgtagaaggaaagcaagatgaagcgatgggaagctctctgacactctcaatggctggaggaggcatggaggaaacagagggaacaaaccagcatcagtgggttagccatgaaggtccatcatggctctattcaacaacaccaggtggaccattggctgaagcactgtgtctcggtgtctccaacaacccaagttctagtactactactagtagctgcagcagaagctcaagctaaacaaatggcgctcgagttccggtttagtgattagaaaccatcgttgttagtgttttgtttgaaaaactgagaccttttagctttctgttggtgttttacggttggattttgcagtagactgctcttatgaatggaaaattgtttgagacaacgctttactttcactgctggattagtgaaaagtcagaataatcacttttgctaaacatttgactaattatttcaagagttgaccagaccgacaggtccaagtattgccaacgggaagcttctgtgattatgcaggatacgtgacgtcggcaatgacgcgtgcgaacaaattaaaaagcatatatccccttaaagcgacttcgcagcaaaacctcttgtctcgtttatctatataaagaaaatttagtagcaaacttctcgattccttgattcgtgggaaaaagaaagtctagatttttgtggattttgattttgtgataccgtgattgtatgaacttgagccgttttgcttcgagattaagaatgtgcggaagaaatctcaaagacgaaggtgggatcttcttctactgcttggggggctgattcatctgctgctgcgtcggctgcaacgaatgcggccaaatcaagatggaaaattttgtggcctaattcgatccggtggattcctacgtccaccgattacatcatcgccttcaagaaacgtcttctctccatcctcaagtagatctttctctctcaagcacacatttttattctcaattagggatataactctcagttggattgattgttgacataaatgaatttgaaattctgtaatttgggtttagccctgtttctgggtcattgtttcttagaggacgaaatgtaaaaggagagttttttaggttctatattagggatacgctgcttattagctcttttgggatgattactcttcaggacgccttatgtacaagagcaagtcagtattggttcaggaccaccaggttctaaaatcaggtggtttaggtctacgagcaatgagtcacgttacatcaacactgttacatttgatgccaaggagggagctcctacactcgtcatggttcatggttatggtgcttctcaagggtttttcttccgtaattttgatgctcttgccagtcgatttagagtgatcgctattgatcaacttgggtaagcaactttggtatcattcaacttgtcttcctcaactgtattagtcacaatatggccttttggttgcttcaagtgttaaagatttcatgctgttgccatcacttgattttaatgtcttaaaaatcgaagacaggatattgctgcccattttaaactacttgtatacattgtgaatgtataataaggtagttctctctttttcttcgtaggtggggtggttcaagtaggcctgattttacatgtagaagcacagaaggtatttattccctctactgttaatgaatcgtggctaaactttcattggtaccctctcagtctcttaatggcttgtatatgagttgatataccagtaatgaaactgcattgttccttctttaattgtgcagaaactgaggcatggtttatcgactcctttgaggaatggcgtaaagcccagaatctcagtaactttattctattaggacattcttttggaggctatgttgctgctaaatacgcgcttaaggtgaattctcatatttggataggtgagttagtaagtggaacacaaccccaccttatgatatctgacttttca

SEQ ID NO: 138234 - DNA, 3005 bp, Arabidopsis thaliana landsberg
tgacctttgtggttgaatgagttcaaaagtatagactggctagtagagtagctcctttatcaaataaagtaccgtaatgcttttctattatatttcaggttggttgtacgcagccccgaagagttgcagctatgagtgttgctgcccgtgtggctcaagagatgggtgtcaaactcggacatgaggtatgcttgtttttcgtctttttctgctggtagctgattgttttaaattgtcggttcactctcagaatctgaactttggttggtacttgtcacaggttggctattccattcgatttgaggattgtacttcagacaaaacagttctgaagtatatgactgatggaatgcttttgcgcgagctgcttggtgagccagacctggccagctacaggtaatgaatattctggcacatttttttattatcactattggacagctaaacgtttttgcttactgattgcaaaacatttcagtgtcgttattgtggatgaggcacatgaaaggaccttgtcaaccgatatactgtttggattagtcaaggcaagcagattttcttgtacaatgtctcttcttacttgtgtaaccagggttaaatccttggatacattctgattgactcttcttatatttgacaggatatagcgcggtttcgacctgatttgaagttgttgatatctagtgcaacaatggatgcagaaaaattttctgattattttgatacagccccgatttttagttttcctggaagaaggtatccagttgaaatcaactatacaagtgcacctgaagctgattacatggacgcagccatagttactatccttacgatccatgtgagggagccacttggagatatattggtcttcttcactggtcaagaggaaattgaaactgcagaagagatcttgaagcacaggataagaggtttgggtacaaagatccgtgaattaatcatatgcccaatttacgcaaatcttccaagtgaactccaagcaaaaatatttgagccaactccagaaggggcacgtaaagttgtcctagcaacaaatatcgccgaaacatcattgacaattgatggtataaagtatgttgttgatccaggctttagcaagatgaagtcatataacccgaggacagggatggaatctttgcttattactcctatctctaaggcttctgcaactcaacgagctggtcgtgctggaagaacaagtccagggaagtgttatcgtctgtacactgcgtttaattacaacaatgacttggaggaaaacacggtgccagaagtacagaggacgaatcttgctagtgtggtgcttgctttgaagagtcttggaattcatgatctcataaacttcgatttcatggaccctccacctgctgaagcacttgtaaagtctttagaactgctctttgctctgggtgctctaaataagctcggggaattgactaaagctggtagaaggatggcagagttcccccttgatccaatgctgtcgaaaatgattgttgtttctgacaagtataagtgctccgatgagataatatcaatcgctgctatgttgtcaattggtggctctatcttctaccgtcccaaggacaaacaagttcatgcggacaacgcaagaatgaatttccacaccgggaatgtcggtgaccatattgctttgctaaaggtttgaaccttctgtattcctccttttctgcattcttccactagtttatacttttattctctgtatgtttatcgtctttgtttttctcttcaggtttacagttcatggaaggaaacaaacttctctactcagtggtgctacgagaactacattcaggtaccaagttgtttctttatgtttatcagatcacatgtggatccaattgacctttgttttgggttaaacatgtgttcaggtccggagcatgaaaagagccagagatatccgtgatcaattggagggacttctcgaaagggtggaaatagatatcagctcaaacctgaatgaattggattcagttagaaaatccatcgtagccggtaattgccaatctcattctcctttttgttgatttgaaatgtataattctttacaattatgcctctgctaatgaacttcttacttatatactcagggttttttccgcacactgcaaagctacagaagaatggatcgtaccgaacagtgaaacatccccagacagtgcacatacatcccaattcgggcttatctcaggttaatgaattctcactctacataaaccacaaatatctgattactgacagaatctcaaaactttgaatactgataagtttttctcaatgcgtgttgtaggtattgccgagatgggttgtatatcacgaactagtacttacgtccaaggaatacatgcgacaggtaattaatatgtttgatactgcaaggtttagccataattgtatttctgttcttaattacttttggtttaacttattggtttcattcatcggtttgtctgtatgctactaaaactcccatacccaaaaatgcaggtaacagagttgaaaccagagtggttgattgagttagctcctcactactaccagctcaaggacgttgaagacggtatgaaccttttttctcaaatccagttatactttttagttattactgtcctttgtagaatcgactctttcagtctctaaagacaaaaccgatctttcagctgcatcaaagaaaatgcccaaaggagctggaaaagctgcaatgtaagaactcagatgggattggcaaaagaataatggaaacagatgcgagtacatacgactttgacagattgttagaaaagctctcttcactacattaactcatttttggtcagcctcctgagtttttgttagaaaatacttaaaatgttatgaacagttcaatgtagtgccatttattcccattgttatatattgtaaggtcgagctacattatgtctgaatcagtaacttcttttccgctgcatggagcagttgtg

SEQ ID NO: 138235 - DNA, 3788 bp, Arabidopsis thaliana landsberg
atgcagtatactatgtcggaaatggcgcagaagtttttgaatgtagaaaaaaccgtcgaaacactgcaaacaacccaggtatcactcagtcaaaatgttagtactattcaatctcgcattcgttcattgaatgcaggtaattcctctggagttcgaagaactatcttcggttccccaaattcccttccgcgaaatgcagcaagtgatcaaacgaccccggatggtacaaacgcggacatccatccgaaagatggagaaacacatcccgaagacgacaaccagttcgttaatcaacacgagcaagaaaacttcaaccagttcgaaaccatgagagaagtaagccgggaactgaaagaaatgaggtcaaaattccaccaagctacaagctcagaaccggatatcaaccgggtcatagaagaagctaggcgaacacctttcaccctgcaaattgctagcttgagaatcagagattctcgaaaacttaacttagaaccgtacaacggtttggaagatccgaaaggctatctcgcagctttcctaattgctgctgggcgagttgatctgaatgaagccgatgaagacagaggatactgcaaacttttctctgaaaatttgtgtgggcaagccctgatatggttcactcaattggaaccaggatcgatcagcaatttcaacgaactatcggcagtatttttaaaacaatactcaattctaatggataagagcattttggacaccgacttctggaatctatctcaagggccaaatgagacacttcggactttcattaccaaattcaaaaacgtgctttcaaagctcccaagaatctcacaacaatcggctctttctgctcttcgaaagggattatggcatgattccaggtttaaggaagatctgatacttcacaaacctgatactattcaagacatactatttcgagcgaataattggatggaagtcgaagatgaaaaagtaaagtttcgcaaaaagagataagcaagcaaaaccagcggtcactttttcgcccaaaaagttcgaacctcgggagaatcagggaccaaggaagtttggtttgctaccattcaataacaacgtcggaaagcagtttcaggggaaaggaaggtcgaatacctggatccgtgatgaaagctcgtattgcgatatacaccgagtcacgggacatctgaccaaagactgcagcatccttaagaggcatctcgcagaattataggccagtggagatctctcaaaattcgacatggagaacttcatcaaacaatatcatgaatcaagggataatccagagaatcaaaactctaaaagaccaaggccggcgagcgaagagggaccaagaacttcaaagggtaaaatcaacgtaattctcggaggatctaaactctgtcgtgattccatcagtgtaatcaagaaacatagccgtaacgttcatttgaaattaagcttaagtgaggaagtagattttcaaagcacttcgatattgttcgatgagaaggagacgcaacacctcgaaagatctcatgatgatgcgctcgtagttacgttggatgttgctaacttcgaagtgtcaaggatcctcattgatactggcagttcggtagacttaatctttcttagcactttggaaagaatggggataagcagggcggacgtggtaggacctccatcacccttagtggcttttacaagtgaattagcaatgtctctcggaactatcaagcaaccagttttggctggaaagatctcgaagattgtggattttgtcgttttcgataaaccagcggcctataacatcattcttggaactccgtggatttatcaaatgaaagcggttccttctacctatcaccaatgcctcaaattcccaacttcgagcggagtggaaacaattcggggagatcaagaagctttgagaacttgttatttagctagccaccgattaaaaattcaatagcaattaacgaaacccgcaaagaaaggagtgatcccaagatttcctagcgggcagaaagtggatgatgttgtggtcgaagtaattctagaagcggataagccagatcaaaaagtccgaattggagctactttatcgggcgaagtaaaggaagccttgattgagctgttgaaaaggaacaagaaatcatttgcctggtcggtagcagatatgcctggcatagatccaaatataatttgtcacgagttaaatgtagacccaagtttcaaaccggtgaaacaaaagagaagaaaactcggagtggagagagcaaaagcagtaaatgacgaagtggaaaaacttctgaaaattggatctataagggaggtacaatatccagattggttagcaaacaccattgtagtcaaaaagaagaatggaaaggatagagtgtgcattgactttacagatcctcaacaaagcttgtccgaaagatagcttcccactcccacacatagatcgtctcgtggagtcaaccgccgggaatgaattgttatccgttatggatgccttttcaggatataaccaaatcatgatgaatccggaagatcaagagaaaacgtcttttatcacggataggggtatctattgttataaggttatgccattcgggttgaagaatgcaagagcaacttatcaacggctggttaacaagatgttcaatgaagcacctcggaaaaacaatggaagtctacatcgatgacatgctggttaagtcagtgaaaaaggaagaccacgtaaaacatctagaagagtgttttgcgattctcaaccaatatcaaatgaagttgaatccggcgaagtgtacgtttggagtcccatctggggaatttctcggctacattgtcacgaaaagaggaattgaggcaaacccgaacaaaatcaacgctttcctcaacatgtcatctccaaagaatttcaaagaagtacaacggttaacatgtaatcgttttatttcaaggtcaaccgataaatctttaccctttcatcaaatcttaaagggtaacaagaaatttctttgggatgagaagtgtgaggaagcattcgacagctaaaagcgtatcagacttcgccacccgtgctgtccaaaccagaagtagacgaaaaactttatctatacgtctcagtttctaatgatgcagtcagcggattcttaatccgagaagaccggggggaacaaaaaccaatttattacataagtaagtttatggcggaccctgaaaccggatacacaatgatggagaagcgtgcacttgcagtggtaatctcagcttgaaaactgagtccatagtttgaatcccacacaaggtaagtaaaatcaagtcagccactagggatgattctgcagagcccgtaccagacgggtaggttagcgaaatggcagctgaagaagcgagcatatgtcgtgacgtacaatacttggtgttgttatgtatgatgacctcatcacctagtttctcactttcacgcccagttatctccatatcttctccagtaaaaccatccttattctctcgcttattcttcttcttcctcttcttttccttatccttcatagaactgtgctcggaaatgaattcttcaccggtttcttcagaatcaaccttagcgtcactctttttcttcttattcttcttctcctcagccatctcatataccggcggacacggttacgaaaccctaatcacaaaaaccgccgcgactttcgctcaaatctaaatccgaatttcgattgagtgattttaagacacagcgatgctgagattgattgtgaaggagcttt

SEQ ID NO: 138236 - DNA, 952 bp, Arabidopsis thaliana landsberg
tggcgaaacggcttaatccaagtctctctgttgatgaacttgttgctgcttgtgacaatctggattcagtttcgaggaattcttctgttagcgagaagcttaaaactatggacggtgatgatgataagcttgagactgggaaaatgaagtatactgaggaaaatgtggatttggttaggaatattataagaaacaatgattattatgcgattttgggtttggaaaagaattgttctgttgatgagattagaaaagcttataggaagttgtctttgaaagttcatccagataagaacaaggcacctggttcagaggaggcgtttaagaaagtttcgaaagcgtttacttgtttgagtgatggtaactcgagaagacagtttgatcaggtggggattgttgatgagtttgatcatgttcagaggcggaatcgtaggccgaggaggagatataatacgcggaatgatttctttgatgatgagtttgatcctgaagagatattcaggacggtttttggtcaacaacgagaggtgtttcgtgcttctcatgcttataggactagacaaccacgtaaccaattccgagaggaggagattaatgttgctggaccaagttgtttgacgattattcagattttgccattctttctgcttttgttgctggcttatttaccctttgctgagcctgactattctctgcacaagattcagtcttatcagataccaaagacgacacagaatacggagattagtttttatgttagatcagcatcagcctttgatgagaagtttccgctcggtagctcagcccgagctaaccttgagggcaacgtgatcaaagagtacaaacactttcttttccagtcttgtcgcattgagcttcaaaaacgtcggtggaacaagaagataccaacccctcactgcatcgaacttcaagatcgcggatttgttgacag

SEQ ID NO: 138237 - DNA, 1099 bp, Arabidopsis thaliana landsberg
atgtatccatcaatcgaagacgatgatgatcttctcgctgctctttgttttgatcaaaggtttgatttttattgttgaattgtgttgtattgtgccttttgttatttgggtttcttaacaattccaaatttcaatccaattttagcaaaagtttcgattttgaatatgaaaagtttttctagcggtcgttattgttgttgatggagattgttgttaccttgattctgtagcaatggagtagaagatccttatggatatatgcaaacaaatgaagataacatatttcaggattttgggtcttgtggtgtgaatctgatgcagccacaacaagaacaatttgattcttttaatggaaatcttgagcaagtttgtagtagctttagaggaggaaacaatggagttgtttatagtagtagcattggatcagcacaattggatttggctgcatcgtttagtggagttttgcagcaagagacacatcaagtctgtggctttagaggacaaaacgacgattctgcagtgcctcatttgcagcagcaacaaggacaggtgtttagtggtgtagtggaaatcaattcttcgtcatctgttggagctgttaaggaagagtttgaggaagaatgttcggggaagaggtagtcttttaagaatttggataccttgctctttacttttctttgttctgatgatttgaaagatgttgtgttttctgtggtgtgtttagattgaattaagatatttgcagctaatgatttctcttggtctccactagttttgggtcttgaattgagtcttttagttatgtagcttggattggccatggttatcttgttgtttggttatctacaagacaactatagcatccatttcgttgtttgatgtgattatgtatgaacaggagacgaactggatcatgtagcaagccaggaaccaaagcctgtcgcgagaaactaagaagggaaaagctaaatgacaagtatgttcagagctttctctacatatgttttagttattgcttgcactgtgttgttctgcagtcgtcttatatgaaaaaatattgtgtattttttcaggttcatggacttgagctctgttttag

SEQ ID NO: 138238 - DNA, 4621 bp, Arabidopsis thaliana landsberg; identical to SEQ ID NO: 72034

SEQ ID NO: 138239 - DNA, 933 bp, Arabidopsis thaliana landsberg
  unsure (1)..(933): unsure at all n locations
gagcatacgtaacagtacgtatcgtagaaagctagggttcttctcctcatgctcaacaggaaacccaatagatgattgttggcgatgcgataaaaaatggcatcgccgaagaaagcgattagcggattgcgcgatcggtttcggacgtaacgcagtcggaggccgtgatggacgttactacattgttactgatccatctgatcatgatccggttacaccaaaacccggtacactccggtacgctgttatacaagacgaaccgctatggatcgtctttaaacgtgacatggtcattactttaagccaagaactaatcatgaatagcttcaaaactatcgatggtcgtggtgtcaacgtgcatatagctggtggtgcatgtctcacggttcagtacgttacgaatattatcatccatgggataaatattcatgattgtaagcgaactggtaacgctatggttaggagttcggagagtcattatggttggagaacgatggcggatggtgatggtatttcgatttttggatcgagtcatatttggattgatcataattctctttcgagttgtgctgatggattgatagacgcaattatgggatctactgctattaccatctctaataattatctcactcaccacaacgaggttagatattttttcattgattcttctattctagtaatttatgtttaccaaatttggtaacgcgttaggtcatatatcaaaagatattagtagtatcggtgcagaagttggtgatgatttaggagtgcacatttactatgtttagaagtaggacgggaaatagagggtaaaagtcagaaaccgataattcggttgtaagaatttattagccgaaatataaccaataataaaataaaagggaacatgtaattcaggtatattgagaantagagaccggttaacttcag

SEQ ID NO: 138240 - DNA, 628 bp, Arabidopsis thaliana landsberg
ttttttagctctgcatctgttgtgttaaggttctcatgtttaacatattgtttattctctatctggcaggaacctggaagattcttcagcttttctagactttgttgtgctcttcgtggtgttgatatgaagacttatatcttcttattagtgattgttcccacatgtgtactcgctggctatgtccacggtcagaagatttcttactttctccggcctttatgggaatcaccacctaaaccttttcatgacattcctcattactaccacgagaacgcttctatggagactctttgtaaactccatggctggggtgttcgagactaccctagacgagtttatgatgcggttttgttcagtaacgagcttgatatcctcgctgttcgttggagagaattgtttccttacatcactcagtttgtcctccttgaatcaaacacgacgttcactggcttgcctaagcctcttgtctttgctgctcaccgagatgagttcaagtttattgagtcacgcttgacttatggtactgttggtggaagatttgtcaaagggcagaatccgttttacgaagaggcgtatcagcgggtagctcttgatcagcttctgagaatcgctgggattactgatg

SEQ ID NO: 138241 - DNA, 921 bp, Arabidopsis thaliana landsberg
  unsure (1)..(921): unsure at all n locations
gtgattcctgatctcccgggagacattttgattacagaggaacaggtcatggagacagaagaagagtctgtaatggggaggtttatgaaggcaataagagactcagagagagatagctttggcgtgttggtgaacagcttctacgnnnnnnnnnnnnnnnnnnnnnattatttcaagagctttgtggcgaaaagagcgtggcatatcggtccgctttccttaggaaatagaaagttcgaggagaaagcagaaagaggcaaaaaggcaagcattgatgagcatgaatgtttgaaatggctcgactccaagaaatgtgattcagtgatttacatggcctttggaaccatgtctagctttaaaaacgagcagctgatagagattgcagctggtttagatatgtcaggacatgattttgtctgggtggttaacagaaaaggcagccaaggtaccatagacatcactctctttgcagcaaaatcctctgtttttgttttagagaaaaaccaatggtctaattaggattctactgtttcaaactctaacttttgcgtttgcattacatataaatagttgagaaggaagattggttaccagaggggtttgaagagaagaccaagggaaaaggattgataatccgagggtgggcgccacaagtgctgatacttgagcacaaagcaattggcggatttttgacgcattgtggatggaactcgttattagaaggggtggcagcgggcctgccaatggtgacatggcccgtgggagccgagcagttctacaacgagaaattggtgacacaagtgttgaaaacaggagtgagtgtgggagtgaagaagatgatgcaagtagttggagacttcattagcagagagaaagtggagggagcggtgagggaagtgatggttggagaagagaggagga

SEQ ID NO: 138242 - DNA, 754 bp, Arabidopsis thaliana landsberg; identical to SEQ ID NO: 25319
  unsure (1)..(754): unsure at all n locations

SEQ ID NO: 138243 - DNA, 1455 bp, Arabidopsis thaliana landsberg
attacttctaccaactacccaaaattgttttatttattgaatagtacaactaaaaaaaacaatgattttgtaggtaaagagaagaagtcgaagtttaatccatacagatacacattcatcgataaagcaagcacattctcatcatcttcctcatcttcattttcatccaacggtcaagattcgtcctacgactacatagtcatcggaggtggaaccgcagggtgtcctctcgccgcaacgttgtcgcagaatttcagcgttcttgttttagagagaggtggcgttccgtttacaaacgcaaacgtttctttcctcaggaattttcacatcggacttgctgacatttcagcttcttccgcgtctcaagcgtttgtttccactgacggcgtttacaacgcccgtgctagagttctcggtggcggttcctgtattaacgccggtttttactccagagccgatgctgcgtaagtataatttttacctttttaagacaagaaaattatgttgtttattatatactactaaaaggatttattggtataatcgatgcctcgtgtcctagtggatatgttacatttatgaaaacgcaccgagcgagaatgttgtgttttcttaataattttgggggcaatggtccgtaagacttttaattctctttaatttttcacactaatcaacacaatatttttaacaaatacttttcttcagtaaaaattgcaaccattttttttttcttttcgaaaaattgatttcttaaaaaattctcgaaaaaactgatttactgtcataaaaactattttttttgttcagtaaaataaggtaagaacaaataaatgatttaaattgtgacaaaacattcaggttcgtgaagcgagcaggatgggatccgaagctggtgaaggagtcgtatccatgggtggagagagagattgttcatcagccaaagttaacgttatggcagaaagctctcagagacagtcttttagaggttggagtcagacctttcaatggtttcacttacgatcacgtttccggaaccaaaatcggcggtacaatattcgacagattcggccgtcgtcacaccgcggcggagcttctcgcttacgctaatcctcagaagcttagagtcttgatctacgccaccgtgcaaaaaatcgtctttgacacttctggtactgataaatttttgtgtctaccaaatgttcgatgaaattcctgagtgaggaggtttttaacttttgttttggttttggatgtaggaacaaggcctcgagtaacaggagtaatattcaaagatgagaaaggtaatcaacaccaggctttactctcgaatagaaagggaagtgaagtgatcttatctagtggagctattgggtcaccacagatgctgatgttaagtgggattggacctaagaaggagcttcagaggctgaagattcctgtggttttagagaa

SEQ ID NO: 138244 - DNA, 2821 bp, Arabidopsis thaliana landsberg
tcgcaggcggtgtgcttctttgtcatcgggaatttagcgactcaatacgctttggcgtttgtcggtttatcggttactgaagttataaccgcaagcattaccgtcgtcattggtatacttcctttggtttgtgatgaatcaaaaacttatgtttctatggtttcttgcgtatcacggttgaattttataggtacaacattgaattatttcttggacaacaagataaacaaagccgagatcctcttccctggcgtaggttgcttcttgatcgctgttttcctaggcgctgcggttcatgcttctaatgcagctgatgttaaagagaaactcaagtctttacctagcgagtataaagctgagacaaactaagatgttgctctttcttttgcctttgttccatgttttaaaaatgttttaacaaaactctgatctttttcagagatttatattcttctattgaaaatggtgaagacaagcctgaaataggtaaaacctatatatattgatttgtgtgaagatatatgcaaagcaaaggaatgaaaattcagttaaaattagaaacttttggtggaactttgatcaaagttgtgatgttttcttgtttgttcttaccatgaacagagaaaactgatgtcgaatctcaagagaaactcgcggaaaaggcgaaagcagggacggcaggattctatgtagagctagagaacaaaagagcaatcaaggttcaattacaatgaccaagagaaaaacctttagcaagattacgtagcaaaggagagtatacaactactctcggtgcttaaaacctcatcaatgcgcaggtctttggaaaaagcataatgatcggactattcataacgctgttcgcgggaatcagcctttctctattctctcctgcattcaacttggcaacaaacgatcaatggagtacattgccaaaaggcgtacctaagctcgttgtctataccgcctttttctacttctcaatcgcgggttttctcatttctttgattctaaacctcatctttctttaccggccaatggtaggcttagcgagatcatcgcttaagaagtatatatatgactccaaaggtagaggttgggcggttttcgctggattcttgtgcgggtttggtaacggtttgcagttcatgggaggtcaagccgctggatacgcggctgcagactctgtccaggttaggcttctttagatttagtaatctcaaagtttacattttggtttttgcaagtacatgagctctgtttttggtttaggcacttcctcttgtaagcacattttggggtatagttttgttcggagagtatcgaaaatcgtcgaagcgaacttatgcccttttagttagcatgttggccatgtttgtggcggccgtagctattcttatggcctcttccggtcaccggaaatgatgatcttatcatagttgtattatacatgtaagattataagtgaatgaagaatatatgttctgtttcaaaaatgttatgttttttcattctaattggagaaacataattttttcgtttcgtctctacttaaatgaatattcaatgaaagaaaggagaaagaaaaagaaatgttaggtacttgtctttttccagaattaatttctctagtataaacgaaaatattagaaaggtcaaaaagtatccaaagattggaacctcactatgaagattccaaggcaaatcaaaaattttgtatatcaatttgagttaatgttcagtatctttacattctctggacaaaagatctaaaagatatgtggtggaaactctcttgaacttatttgcagaagtgatattatcctctgttcttgcagaacctagcaaaggtagtgtctttttcatatacctattttggatgatttggttctacttatcttttaaatctcaaactctcttgtcatgaatagtttatggacatatgtatcttccatcaacatgagaaacaatcaagaatcttctctagtcttatgtggattgtttatctgcttttaaggattagataattctgaaattctccaagcatatcttttgcctaaaccaacatttttgcttgcagggctgatccatttagagcccgagaatatgtatctagtggagagcaaaggaggtgccatagcttgtatgcttttagccttactatctctagggacttggccagcagttttaacacttttagagagacgtggccgtcttcctcaacacacctatcttgattactccatcactaacttgttggctgctattattatagctttcacttttggtcaaattgggtctacaaaccgcgctcgcccaaacttcatcactcagcttgctcacgtatacttaactcccttgtggtgttacatgcaaagagacagtttcaatttgttctgaccaaccacttattcactaggataattcgccgtctgttatgttcgcaatggcgaacggtatcgtgcttagcctcgcgaatcgtatcaactcaatatccatgggctatagtaggcttatcgagttccagtatgtcatcaccatcacgcatcactgtagtcataggttagttcatgaacttatatactccggtttgaaattggttagtttccgaattcttgttttctaactttcaggcacaactttgaactatttcttggatgatagaatcaacagagctgaggtccttttcccgggggtcgcttgtttcttgatcgctgcttgtttcggttccgctgttcataaatccaatgctgctgataacaaaaccaaactccaaaatttaaaaggttgaaaaagattcattctattggtgttccgtttg

SEQ ID NO: 138245 - DNA, 750 bp, Arabidopsis thaliana landsberg
ccatttccgaggatactataactgttgtgtgtgtgtatggaaacattaagctgttgtgttattcgggggagagatgaactcgagcatttgttagatgacaacgaagacatggctgacttatacttaacaaggaaatggatccagaaccagcaaaccgaggcaatactggcgggtacagcatcaaacagcattgccctcccagcacataatacatcaaatcttcaccggctcacatcaaacagaagtgcgagtatggtgacgagcaatacagaggaagatgacgtggaggatttggagatgttgttggaggcatacttcatgcaactggatggaatgcggaacaagattcttacagtgagggagtacattgacgacacagaagactacgtgaacattcaactggataatcaacgaaacgaactgatccagctgcagctgacgctgaccatagcctcgtttgcaatagccgcagagacattgttggccagcttgtttggaatgaacataccatgtccattgtatagcatacatggcgtctttggttactttgtgtggagtgttactgcactttgcattgtgcttttcatggtcactcttggttacgccaggtggaagaagctgctaggctcataatctccctctctcttacaaaccatgtgccacttgtgtaataatttatacatatgttactggacagagttgtttcactcatatcttgtccagtgaagacgttagtgattcatatatgtt

SEQ ID NO: 138246 - DNA, 2660 bp, Arabidopsis thaliana landsberg
cactagaccactggcgcttgtatgtcccaagaggaaaatacacttatattaccaaacatataataatgcttgtagtttcgttcagttaaatcggactgagcacaagtagaagagacacaaacatcgttaccttcgccgccatggcctccgcactcgaatgctggacaacacgtaatgccgccggtggttgcgccgacgacgattttgttgaccaagtcctaatgtcctccgaagacaggtctgagtccctcactgctcctccaccttccgatcaaacctcttccgctatgcaaaagcggtttcagcgtctcggccgcaacgtctccgacgcgatcgcgtctctcaagaactctctcaacctccattcgagtcgagacaaccaaaatgcagctaccgtaggaggtaaaaagctcgtttgggctactgtagtgaagaaccttgctaagatgtatcctgggagtcaattaccggagaagctcatatcaaatctcaagaagcattacgattccttgccattcaggtaaacctgagtttctaattatggacagttacatatagtgtgtgtgtgtgagttagcaaatcatggagcaatcttaggttaattggttttgtgcttggtgtttgttgtttcaacagttatagtcaggctgatttcgatatgaaagaagtatttctacacgtcaagttgatagaacaagctgctggagatgacaatcctgtgtttatgattcaagaagtgtctactgaggaacctcgaggttccgtgctcagactcacattcgcctgtaactcttttctatcatggtcaactatgtcaggcgttcttgatagtgcttcgatttgttgcaagaagatacaaatctttgagaagaaggggttgactctcggggttgttcttcttctggatcaatctgggcaacatagtttgtttaaaacccgggtagaaaacaccctcaaggttgcaaccaaaaagccaaaaccgacatctgttaagctccctttcgggctttgtggctgtcaagaacagaacggtggtgtaggggaacttggaggtgttgaagaagagtccattcagcatagtagtaggctagggatagaaaacttgaatagtacgatccagattcaggttccacttccgagttcttcatttgctgtatcagtagatgaatggcagaccatccaatcgggtggcaatgagattggaaaatggctattgaattctgatagttttgagttcggtgatcagattggaccaacttctctcaaagaaattttccgaggtaaaaaagtgggaatcaagaaactaaaaggttgtgataaggggaattcctatgagtttgagctccgaaaagattacttggagctgatggcttgtggacacaagagcattctgcaattttacggtgtttgcatcgatgagaaccatggattatgcgttgttacaaaactgatggaaggtgggtcactccatgaactgatgttgaagaataagaagcttcaaaccaagcagatactgcgaattgcaatagacatagccgaagggctgaagttcgtgaatgaccatggtgttgcttatcgggaccttaacacacaaagaatattactagataagcatggcaatgcatgtttgggaaatattgggatagtcaccgcttgtaagagctttggtgaggccgtggaatatgaaactgatggttatcgatggcttgcacctgaggtcagtattcttttactcttgtctttgttcaacagtttacttgaaaagttagattgtgaaacataatcatgtttgccatattctgatcctttgttacctctaagccaaatgatacagaaaactaggtacctgaaagcttgctaagaaatttctctggcccatatcataattctcatagaaacaaatcggatgccctatgtgcttcatctctattgtccccatatgacccacagcatcttgttttgattttttttccttttgaaccaaataagttcctttgctttttgttttggccatatctgatttaccattttttgtttgtctgggcagttattggatcctcacttttggatacatatatcgtagacaagtgtggatctaattaggttctgtctaatcgtcacaaaagcaccttagactagctaacaactccaatttcatcacttctttagttgagctatacttatctttttttggttatacattagtaattccaaatgttttgaaccgtatgttacgcctcctagctttgtcaagccatgtgcttgcaaatggtccaatcattcctactagagcacacttatataattgtatttggttctacatggccagcctttagttcaattcttggatctgaacacgaagttactagaatttaatttacgtaattaaacctatttttgtatgaaatgcttgaaagcagatcatagctggtgacccggaaaatacgacagagacttggatgagcaatgcttatagttttgggatggtactgtgggagatggtgacgggagaggcggcttatgcatcttgctcgcccgtgcaggcggcagttgggatagcggcttgtggcctgaggccgaaaaatccgtatgaatgccctcaaatcctgagaactatgatgatcaattgctggaacggctccccctccaaacgccccaac

SEQ ID NO: 138247 - DNA, 1252 bp, Arabidopsis thaliana landsberg
atgagcaaggaacaaagctgtgttctaaaggcttgggaggtgaccgtaagaaagacccaacaagcgaagaagcgtgcaaacagcatttttgggacggtatctgtagctccacagacagatgatgatgctactactacgactgaggagaatgatgatgagaccagcactaacagaagcagcataggggaattgtaccatgcagagagaatacttcctaatggagactattatacagggcaatggtatgatagttttcctcacgggcatgggaagtatctttggacagatggttgcatgtacattggtgactggtacaacgggaagactatgggaagagggaagttcgggtggccttctggtgccacatatgaaggcgaattcaaaagtggatacatggatggtgttggcctttacacaggtcctagtggagatacttataaaggtcagtgggtgatgaacctgaaacatggacatggaatcaagcgtttcgcgaatggagatgtgtatgatggtgaatggaggaggggtttgcaagaagcccaaggaaagtatcagtggagagatgggagctattacatgggggaatggaagaacgctacgatctgtggcaaaggtacttttatttggacggatgggaatagatacgacggattttgggatgacggttttcctagaggaaacggtactttcaaatgggctgatgggagtttctacgttggtcattggtctaatgatccggaagagatgaacggtatttattatccatcaggagacgacgggagtcctgaatgggatcctaaagacgtgtttactaatctgagtgagtacaagatctgcagcggagagagagttcctgtgttgccttcacagaaaaagctatctgtttggaactcttccaaacgtgtcgagaaaccgaggaggatgtctgttgacgggagggtaagtgtgcgtgtagatagagcgtttgagaagatgaatatgtggggaaccgaaagcggagaaggtgctgctgatattgattccaccacgaggagggacttggatgctgaaatgatgagactagaggctgaagggttcattcagagcctgagaccgagccctgcacctatgagattgccaagggcagggaggaagcaaggcgagacgatatctaaaggccaccggaattacgagcttatgcttaatctacagcttggaatcaggtaaatatcccagtttgctgcctcatttatacaatttgaagttttgttga

SEQ ID NO: 138248 - DNA, 1619 bp, Arabidopsis thaliana landsberg; identical to SEQ ID NO: 7765

SEQ ID NO: 138249 - DNA, 4919 bp, Arabidopsis thaliana landsberg
aattcaattggagctagatgaggaagaagattctgctgtccacacttggttttacgaccacaagccactcgttaaaacaaaactgattaatggtcccagttaccggaggtggaacctctcacttccaatcatggcaacccttcacaggcttgcaggccagttgctgtctgatttgattgatcgcaactacttctacttatttgacatgccatctttcttcacagcaaaagctctgaacatgtgcatacctggtacgccattttccttctatgctccagtttttatatttttgctgcgggtccattgcttttaatgcattctcctactcttttccaggtggacccaagtttgaacctttgtaccgtgatatggagaaaggggatgaggactggaatgagtttaatgacatcaacaagctcattattcgttcccctctgcgtactgagtacagaatagcttttccccatctctacaataatcggcccaggaaagtaaaactctgtgtgtatcacagtcctatgatcatgtatataaagaccgaggatcccgatcttcctgcattttattatgatccgttgattcacccaataagcaacaccaacaaggaaaaacgtgaaaggaaggtttatgatgatgaggatgacttcgccttaccagaaggtgtggaacctttgctaagagatacccaactctacactgacactacagctgctggcatatcattgttgtttgccccacgacctttcaatatgaggtctgggaggacgcgccgcgcagaagatattcccttggtgtcagagtggttcaaagagcactggtaagctatttgtttttattctactttggtcctctttaccgttttgaaatttactggtgaccgtcctaatacatattgtgaactcattaactgcagtcctccagcctatccggttaaagttcgggttagttaccaaaagctattgaagtgctatgtgctgaatgagttgcaccatagaccgcctaaagctcagaagaagaagcacttgtttcgatctcttgcagctacaaagtttttccaaagtaccgaactggattgggttgaagtgggtctgcaagtctgtcggcagggatataatatgctgaatctgctgattcataggaagaatttaaactacctgcatcttgactacaacttcaacctcaagcctgtgaaaactttgaccaccaaagagcgaaagaagtcacgttttgggaacgctttccatctgtgccgtgagatcctccgcctgacaaaacttgtagttgatgcaaatgtccaattccgacttggtaatgtcgatgccttccaattggctgatggtctgcagtatattttctctcatgttggccagttgacgggtatgtatcgttataaatacagactgatgaggcagattcggatgtgcaaggatttaaagcacttgatatattaccgtttcaatactggtccggtgggtaagggtccagggtgtggattttgggctccaatgtggagggtatggttgtttttccttcggggtatagttcctcttcttgaaagatggttagggaatcttcttgctcgtcaatttgaggggcgtcattcaaaaggagtggccaaaacagtcacaaagcagagagttgaaagccattttgatctggagcttcgggctgctgtcatgcatgacgtccttgatgctatgccaggtttccatttttacaaacttgtttatcaacgatgaaattgctttgctttattctttggttaacattttctgataatgtgcagagggtatcaagcaaaataaagcgcggactatattgcagcaccttagtgaggcatggcggtgctggaaagctaatatcccatggaaggtccctgggttacctgtaccgattgaaaatatgatcctgcgttatgtcaagtctaaggctgattggtggacgaatgttgctcactacaatcgtgagcgtatccgaagaggggctactgttgataagacagtttgtagaaagaatctcggaaggttgactcgtctttggctaaaggcagaacaggtctgttcattgacttaatgactttgtcatttttgtttgaacattttatgaaactgcgttatatattgatgcgttatccttgtaaaactgttacaggaacgacagcacaattacctgaaagatggtccgtatgtcactccagaagaagcacttgcaatttatacaactactgttcattggctggaatcaaggaagttctcaccaattccattccctccattgtcatacaaacatgacacaaagttgctcatccttgcccttgagagactgaaggaatcatatagtgtagctgtgaggttgaaccagcagcagcgagaagagcttggtttgattgaacaagcttatgacaatcctcatgaagctctatcacgaataaaacgtcatcttctcacccaacgaggctttaaacaggtaactttatatttctctctatattggagctttggattgacataggtcttcaaggttactgttgtaaaatgatggtgaatatgtttttcttgcaggttggcatagaatttatggatcttaatagctacttgattccggtttatgacatagagcctctagagaaaatgaccgatgcatatcttgatcaatacttgtggtacgaaggtgacaagcgtcacttgtttccaaactggattaagccagcagactcagagccgcccccacttgtggtttataaatggtgtcaaggtatcaacaatttgcaaggcatatgggacacaggtgatgggcagtgtgtggtgatgctccaaactaagttcgaaaagttctttgagaaaatcgatctgacaatgttgaacaggtacatatctattcatactttattaattatagacattgagccacgactttctggagtaataaatattttgtgttgtttctttcaggcttcttcgtttggttcttgaccacaatattgcagactatgtgtccgccaagaataatgtggtcctgtcttacaaggatatgagtcatactaactcgtatggtctcattaggggacttcagtttgcatcgtttgttgttcagttttatggactattgcttgatcttttgcttcttggtttgactcgagcgagtgaaattgctgggccacctcagatgcctaatgagtttatgacgttttgggatacaaaagtggagacacgccatcccataagactctattctcggtatatagacaaagttcatataatgtttaaatttacccatgaagaagctcgggatcttattcagcgatatcttacggagcatcccgatcccaacaatgaaaacatggtgggatacaacaataagaagtgctggccaagagatgcaaggatgagactgatgaaacatgatggtatgttcttccctttttgttttatataatccggttgactatcatttatacattagatgttcatgttgtgtctcattgattattcttctttcagtcaatcttggtagaagtgtcttctgggacatgaagaaccgtcttcctcggagcatcactactttggagtgggagaatggctttgtctctgtctatagcaaggataatcctaacctgctctttagcatgtaagtcttttattcgagcattctagtccatctgatattagtgctagggcttcgtttagaccgtaatttggtactgctatcgacattagtgactcttttgcatcttgcttgcaggtgtggatttgaagtccggatactccctaaaatcaggatgacccaagaagctttcagcaacacaaaagatggtgtctggaatctgcaaaatgaacagacgaaggagaggactgcagtagcttttctgcgggttgacgatgaacacatgaaggtatttgagaatcgtgtgaggcagatcctcatgtcatcaggatcaaccacctttaccaagatcgtcaacaaatggaatacagctctaattggtacaatcctatgagccttggtttgcatcattgttagttttttatgatgtgttgtttagcatgaaactgatcacatactcttttataaacaggtctcatgacttacttccgggaagccactgtacacacgcaagagctcttggatctactggtcaagtgtgagaataaaatccaaaccaggattaagattgggctgaactcaaagatgcctagtcggtaagcaaacgctatcttactgaatttatggtcgacatagtagagctgtgtgtttatgtttctgtaacctgattgttctacttctctttggcagatttcctcctgttatcttctacactccaaaggaaattggtgggctgggaatgttgtcaatgggacatattttgatcccacaaagtgaccttcggtacagcaagcaaacagatgttggtgtaacccactttaggagtggaatgagccacgaggaagatcagcttataccaaatctttaccgttacatacagccgtgggaaagtgaatttattgattcacagcgggtgtgggcagaatatgctttgaagaggcaggaagcccaagcccaaaataggcgtcttacactggaagatctggaagtaagtatcatacttgtgtatttgttacctctttacttaaatgtcgaattttgagagagatatcagcgtgctagcttgctttcttttggtaatcttggaagtagtcttttctctttgcttgacagagggttttgggaggatatcatattgttggttggcctctatttgtgaataatattttcttctagaaatatctgatcattgacgtagaataataactcgtgtataaaaatatgacaggattcttgggataggggaattcctcgtataaatacactgtttcagaaggataggcacactttggcatatgataaaggttggagggttc

SEQ ID NO: 138250 - DNA, 795 bp, Arabidopsis thaliana landsberg
atggatcatgtcagcaatctaccagagggggttctttgtcatatattgtccttccttaccacaaaggaagctgctttgacttcgattctctgcaagagatggcgcaatctcctcgcgtttgtccctaatctcgttattgatgactctgtctttctccatcccgaagagggtaaggaggaaaggtacgaaattcagcagagcttcatggattttgtagatagagtattggctctgcaggctgagtctcccattaagaaattctccctcaagtttagaactggtgttgcttcacaccgagtggatggttggataagtaatgtgctaaccgtggtgtttcagagcttgatctattaatcattttaggtatgactatggaagatagctatcggctgtctccaaaaggtttcgccagcaagacactagttaagctggaaataggttgtggaattgatattagttgggtagctgggagcattttcttaccaatgcttaagactctcgttcttgactctgtttggttttatgttgataagtttgagactctacttcttgctttgcctgcgcttgaggaattagtcctggttgatgtaaactggttagattcggatgtcaccatctcaaatgcaagcctcaagaccctaacaatagattccgacggtcatttaggcactttttcatttgatacacctagtcttgtttatttctgttactctgattatgctgcggaagactatcccgtagttaaaatggaaaacttacgtgaggctcgaatcttccttttggttactgataatg

SEQ ID NO: 138251 - DNA, 1572 bp, Arabidopsis thaliana landsberg; identical to SEQ ID NO: 29390

SEQ ID NO: 138252 - DNA, 2579 bp, Arabidopsis thaliana landsberg
aaaatatgcacccaaaattcttggaaaggtaatagtcaaaagcctttgcccaacccccaatatatcgaaaccgttgtcactggttcaatgggacagtacgttcccatgttgaactactattgtaacgacctgcctctcgtttcaacaaacttacggttcttcggagactacctttgggatcaatctagatcctctgtgcaaaccgaaagatgtttcttacactttcatgcccaacatgtcttactttgagttcataccaatggatggaggagacaagaacgatgtggttgacctagaagatgtgaaacttgggtgcacttatgaacccgttgtcacaaatttcgctggtgagcttaaaaacatcgatcatgaattcaataaaatgcatacttttttctacatggtttaactaatgtttgtgaaaatgttttttttttgttcaggcttgtataggatgagagtgggagatattgttttggtgactggtttctacaacaacgcgcctcagtttaagtttgtaagaagagaaaacgtcgtcttaagcatcgattccgataaaactaacgaagaagatctgtttaaggctgtgagtcaagcgaagctcgtactcgagtcatcaggtctcgatctgaaagacttcaccagttatgctgacacctcaacatttccaggtcactacgtggtttacttggaagtagataccaaagagggagaggagaaggagacggcacagtttgagctcgatgaagaggcactctccacgtgttgtttggtaatggaggagtcgcttgataatgtttacaagagatgtcgattcaaagacggatcgatcgggcctctcgagataagagtggtgcgtcaaggaacgtttgattctctcatggacttcttcatctcacaaggtgcttccaccggtcaatacaagactcctagatgcattaagtcagggaaagccttgcaagtattggagacatgtgtggtagccaaattcttcagtatttgattgttcttccttggttttatataggttcaagtgatttgtcttctttttttttccataaagggtttggttcaattgatttgttgtgatttgagagtgtactaatttgtctgaatgtttgtttatatttttttaatatatatatttgattcagtctttatctgattttcctctttaaacggaaaacaccattgagaatttccgagtctttactcagaaacagagtattttattccattgaactgaagttggcaaagacttggaagatggccaaacaactttgagatgaaaccaaacccttcgttacacttcaccaccctgagccatgagtccatgactaacaacaagtaccaaaataacaatccggtttcgttttctttcggttcgtgtgtttttcaaaaaccaggtaaaccatgtgtagtttggttttgttttggttatgatgattttagcataattttagtagagtgtccaaaacacaaaattttatatgcagtttagtacctgactaatcttgcagcttttagaaaaataattgcaactttgcaaaattctctccaagcaaaagaaaagattggactcgtcaatagaagcaggcccggtccaaaaggtggtacatacaggcgacggcccaaaggcccaatttatccggaattaatataaaatatggttaactgtaaatatatgattttcaaatggatacactcatacaagctttgattcctaaaattagattacaaaaattatttttcgtactttgctgcatatataataattgatttgtccataacaaatcaattatacgatcgaatttcaaaattttaatagataatatactggaacaaatacatatacaaatataccaataaaaataaaactgacccaattagtttattttattttttagtaaaaaaacagatgaaaaattagaaatgttgggtccgcactcattccttatttgtgcataacactgctgccaaaacatgcgaagttataagctccaaaaaagtttaaagattgagaaaaagaaaaagagaactatgaactcattgaacggtcccaccccgcaccactccaaagattttaattaatattttatcatctattttttcttgtagatccttctctttataaaacccttttgtcacctcttctttcctcataacatcacatcatagcctaaacccaagaaaacccttatttgcgatccccacttgttgttcatcaccaagccaagctccatgtcctagtcactccacagattccctatcatcatcaattcgtttcaaacttagttcctttcaaagtcttgtacatatatacacacacctattattctcttggtgtgtttgtgtgttacatatacgtgtgagtacatactttgttgtaaaagtggatcggaggtatggaaagggaccggttccaccggaaacatcggcggcggcggatgataattcgtcttggaacgagactgatgtcaccgccatggtctccgctctcagccgtgtcatagagaatccgacagacccgccggtcaaacaagagcttgataaatcggatcaacatcaaccagaccaag

SEQ ID NO: 138253 - DNA, 581 bp, Arabidopsis thaliana landsberg
  unsure (1)..(581): unsure at all n locations
ctctcagtgaacaaatttggctatggctttttctgcaccatcactttccaaattctctcttttggttgccatttcagcatcagctctcctctgttgtgcttttgcccgtgatttctccattgttggatacacgccggagcatttgacaaacactgacaagcttctagagctcttcgagtcatggatgtcagaacacagcaaggcttacaaaagcgtggaggagaaggtgcacaggtttgaggttttcagagagaatctgatgcatatagaccagaggaacaatgagatcaacagttactggctcggtttgaacgagtttgcggatttgacccatgaagagttcaaaggaagatatctaggacttgcaaagccacaattctctagaaagagacagccctcagctaacttcaggtacagagatatcacggacttgcctaaatccgtagactggagaaagaaaggcgctgtggctcctgtcaaggaccagggtcaatggtggaacatttttcttttccaatctgncccaggtatatagaacagaactcagagattcgaatagctattcaacgatcttattttgt

SEQ ID NO: 138254 - DNA, 3973 bp, Arabidopsis thaliana landsberg
  unsure (1)..(3973): unsure at all n locations
ctgctgacagagagagtgatgaggattcaagcaatgctttagcagttagatacacaaaccctgtttccattagaagcagttgttctcagtctatttggggtggggatcgcgaatttctgtctattgtgcgttctggcgaaggtattcatggccgtacgcgacatgcaatagcccgaatgaggggtgggagaactcgtcggcacctggagtcttttaattttgattctgaaattccagctgatctaccagtaacgtcatcttcccatgagctgaaaaagaaaagcactgaagttctcattgccgaaattttaaacaagttgaattgtacactacgtttttttttcacatcccttgtgaaaggatttacctctgctaatcgtcgcaggattgatgggccatcattgagttcagcatctaagactcttggtactgccctagctaaagtatttcttgaagctcttaacttccaggggtacggtgctgctgctgggcctgatacatctctgtcactgaagtgccggtaccttggaaaagtggtagatgacataactttcctgacatttgatactcgaaggagggtctgttttacagctatggtgaatagtttttatgtccatggaacatttaaggaacttctcaccacctttgaagctacaagtcagttgctttggaaagtgccgttttctattcctgcatctagtactgagaatgagaagccaggtgagagaaatatatggtctcacagtaagtggctggtagatactctgcaaaactattgccgagcgctggactattttgttaactcaacatatcttttatctccaacctctcaaacgcagcttcttgtgcagccagcctcagttggtttgtcgattggactttttcctgtaccaagggaacctgagacatttgtgcgaaatctgcagtctcaggttctggatgtcatacttcctatatggaaccaccctatgtttccagattgcaatcctaattttgttgcttcagttacctcccttgttacacatatatactctggtgttgtggatgcaagggaaaatcgaagtggtgttacccggggtataaaccaaagagccttgcctctacagcttgacgaatccattgttggtatgattgttgaaatgggtttttcaaggtcaagggctgaaatcgcgttacgaagagtgggaacaaacagtgttgaaatggctatggactggttgtttaccaatcctgagcagccggtgcaggaagatgacgaattggctcaagcacttgcactatctcttggaaattcatctgaaactccaaaacttgaggatacagaaaagccagtagatgttccgcaggaagaagcagagccaaaagaacctcctgttgatgaagtcattgctgcatcagtgaagttatttcagagtgatgattctattgctttcccgttagtggatttgtttgtgacactatgtaaccgaaacaaaggggaagatcggccaaaaatcgtgttgtatcttattcagcaactgaagcttgtacaacttgatttctccaaggatactggtgctttgactatgataccacacattttagcattagtactctcagaagatgataacacacgagaaattgctgcacaggatggtattgtggccgtagcaattggtatcttgacggatttcaaccttaagagtgaatctgaaactgacattctggctccaaaatgcattagtgctttgcttcttgtattgagcatgatgctgcaggcacagacaagactctcgtctgaatatgtggaaggaaatcaaggtggatctttagtgccgagtgattctccgcaagactcaacagcagctttaaaggatgcattatcttcagatgttgctaaaggggagtcaaaccaggctttggaattgatgtttggaaaatctacannnnnnnnnnnnnnnnnagagagttctaaagttttactaatcgcctgtggcctcataaagcagcgtgttccagctatgatcatgcaggctgtgcttcagctatgtgcccgtctaacgaaatcacatgctttagctatccagtttctggaaaatggaggcttatcttcactttttaatcttccgaaaaaatgttttttccctgggtatgatactgttgcatctgttattgtacggcatcttgttgaagatcctcagactctccaaattgctatggaaacagaaatacgtcagaccttgagtgggaagagacatataggtagagtattacctcggacattcctgacgacaatggcacctgtaatttcaagagatccggttgtttttatgaaagctgtggcttcaacttgtcagttggagtcatcaggaggtacggactttgtgatactgacaaaggaaaaagaaaagccgaaagtttctggcagtgaacacgggttttctttaaatgaaccccttggaatatctgaaaataagcttcatgatgggtcaggaaaatgttcaaaaagccacagaagagtccccgctaacttcatccaagttattgatcagcttattgacattgtcttgagttttcctgggttgaagaggcaggaaggtgaagcagccaatttaatttcgatggatgttgatgagccaactactaaagtgaagggtaaatcaaaagttggtgagccggagaaagcagaacttgggtctgaaaaatctgaagaattggccagggtaacttttattttgaagttgttgagtgatattgttctcatgtacctacatggtaccagtgtcatactgagacgggatacagaaatatctcaacttcgagggtccaatctacctgatgattcacctggaaatggagggttaatttaccatgtcattcatcgattgcttcctatatctctcgaaaagtttgttggacctgaagaatggaaggagaaactgtctgaaaaggcgtcctggtttctggttgttttgtgcagtcgttccaatgaagggcgtaaaagaataatcaatgagcttacgagggttctatccgtatttgcttccttgggaaggagttcgagtcaaagtgttctattacctgataaaagagttcccgcttttgctaacctggtttattcgatcttgacaaagaattcatcttcaagcaatttccctggttgtggctgttcacctgacgttgcaaagagcatgatagacgggggaactatccagtgtctgaccagcatccttaacgtgattgatcttgaccaccctgatgccccaaagcttgtcactcttattctcaagtctctcgagacactgacgagggctgcaaatgccgctgagcagctaaaatcagaagtaccaaatgagcaaaaaaatacagattctgatgagagacatgatagtcatggaacttcaacttcaactgaagttgatgagctgaatcaaaataatagcagtctacagcaagtaacagatgcagtagataatggacaggagcagcctcaagtttcctctcagagtgaaggtgaaaggggttctagtctaacccaggctatgcttcaggagatgaggatagagggcgatgagacaatactgcctgaacctattcagatggatttctttcgagaagagattgaaggtgatcaaatcgaaatgagttttcatgttgaagatagggctgacgatgatgtagatgatgacatggacgatgaaggagaggatgatgaaggagatgatgaagatgcagatttagtggaagatggagcgggtgttatgtctattgctggactgatgtggaagaccctgaagatactggccttggagatgaatataatgatgacatggttgatgaagatgatgatgatttccacgagaatcgtgtaatagaggtgcggtagagggaagctcttgatgggctggatcacttccagattcatgggcgatctggtggtggaaatggttttattgatgatattacagctgagccgtttgaaggtgtaaatgtt

SEQ ID NO: 138255 - DNA, 610 bp, Arabidopsis thaliana landsberg
cgacgtctcaactatcggaaaaaaacgccggcccaaactttagcgtgagagggttcgagctgatcgacgagatcaagacggcactcgaagctcaatgtccctctacggtctcgtgctccgatatagtcacgctcgccacacgtgacgccgtgttcttaggtggaggaccaagctacgtggtccccaccggacgtcgcgatggctttgtgtcgaatcctgaagacgccaatgagatccgtccctccaccattcatatccgtcgaaggcatgttaagttttttcggcaacaaaggaatgaatgtttttgattccgtagctcttttgggggcgcacacggttgggatcgcgtcttgtggtaattatgtggaccgggtcacgaactttcaaggaaccggactgcccgacccatccatggaccccactttggctggcaggtaattgaaatctggttaagccgtgtttacgtacgtgattaactatagatgggttacgtactttacgttataaattcaatatttcccatctatataggctaaggaacacatgtgcggttccaggcggcttcgcggcgctggaccagtcgatgccagtaacgccgggtttattcgac

SEQ ID NO: 138256 - DNA, 755 bp, Arabidopsis thaliana landsberg; identical to SEQ ID NO: 10104

SEQ ID NO: 138257 - DNA, 2108 bp, Arabidopsis thaliana landsberg; identical to SEQ ID NO: 8513

SEQ ID NO: 138258 - DNA, 637 bp, Arabidopsis thaliana landsberg
tttcaagagctctcgttacattagagaccagccactcgaattatgaaatagtattaaaacaagacaattaacgtgtcccttataatgatcaagacatgtatgaatgattaggtaagtgtaccatacgcaagtttgttcacacttgtgacggtgagatgtggccattgtaccaatttgctatccctcaacattggagtttcacttcatcaaacctcagctcctcccattcaccaagatcttcaggtatcatattatattcattagtccttcaacatttttattattcccatttagaaatctggcttatatagtttttgaaatcatgaagcctcatagacagcacacaacctctctggtgacaaggaaagattgtgcatcgtcttctaggagcaccaacaatttatcggaaaacattgatcgtgaggctcctagaatgcctcctattcgccgtatgtctctctatttacctcttgcattccgtacatagtatttaaagtttgtgtaatatatgcaatcaccaagctaagtgagtccataattttcttttattttcatgtggcagcaccggagaaaagacaacgtgttccttcggcctacaacagattcatcaagtaagtgttaatcctttgatgaaata

SEQ ID NO: 138259 - DNA, 520 bp, Arabidopsis thaliana landsberg
atgtgatcgccgaggaggtgatcttagttcgaggacaggacgaacagagcgactcggctgaagctgagtccatttcttctgtctcgccggaaaacgtggtagcggaggagattaagagtcaaggacaagaggaagtaacagaattaggaagaagtggttgcgtagaaaacgaagaaagtggtggagatgtcttagtcgctgaatctgaggaggttagagttgaaaagagtagtaatatggtggaggagagtgatgctgaagcagagaatgaagagaaaacagagttgactattgaagaagatgatgattgggaaggaattgagaggagtgaacttgagaaagcctttgcggctgctgtaaatcttttggaagaatccgggaaagctgaagaaattggtgctgaagctaagatggagttgtttggccttcacaagatcgccactgaagggtcatgtagagaggcacaacctatggccgtcatgatctctgctcgtgccaaatggtcccatacttttccact

SEQ ID NO: 138260 - DNA, 1561 bp, Arabidopsis thaliana landsberg
caggtatggtatatgacatgggagtggaaaagaggaatacgaagctatttgcatccaatgttgttcgcattcttgtataaacttctacaagttactggccttgatactccctacataatggtttgtttctcgattttttttggtcttattagaagcagaacctagttatcttgattttgaactaagttttatccaaaatctgattcaattgaacatagttttatctagctttcaccgtattcaaagaaaggttgatagagtggtttatgtgttacaacctttttcatttctttgcagatcaaagccccacgtcttatgcaatccatattttcagctattggtgatctctatttgtataaactctctgatgctttatatggaggaaatgttgcaacttggtctgtatcctttctatgcagcatactaagttaattgctttacatttttgaatgatatggctatgaatttaaccaagattaaaccttggttaataaaaaacaaacattatctacaataatggagccaacccatcattacactacatttgatggttccctacgcaatgataggtcgatgtaacgggaagggtgttagattagatatcctgagcttcaatgaaatacttagataagtctgttagtggtttcctcttaatctttcttggtttgtatttgcattttattctggattgcttccttaacttttttagtagctcttttgtcaaatggcaaactggttcatcttcttctgtttgaaccgtaccttttcaaactgtttggagactgttcttaccatcatggggctgtactactggccttgtattagagattcttcaatagactatcccgtgaatcggaagtggggtttggtcatagcggccctagcatgtgccataaggccaactagtgcagtcatatggttatacgttgggatgctcgagctatttttgacacctaataaggtcaaattcatcattctagaggtgatcccgattgggtaagtttaactctgcagctaagctatactcttgaatgttcgttttaatgtttgattttgaagatttcattgcgctaacttgcttctggtgttagatctttggtcctcggtttcacctgtttgttggaccgtctgatgtacggctcgtgggtcattgtgcctctcaattttctgaagtttaatttcctttcgtctggtggagactattacggaactcacccatggcactggtacttcacccagggatttcttgtcatgcttttcactttcacaccattctccattgctggaattatcaagtctaagaatcagaagctttcagctcttattctatgggtcttagcaatatacagcatactcggccataaggaattcaggtaatatgattggagaacataccccgttttcttacactttcaatatcgaaaaactttgcaaagaacaccctttcatcatttattatgttttccatgtcatctacttagattatgaatgataggtttgtcctgcaagtgcaacccatagctttgatattctctgggtatgcatttgctcaaatggaagt

SEQ ID NO: 138261 - DNA, 1270 bp, Arabidopsis thaliana landsberg
atggaaggagaatccaaaggattaatcgttgggatctcactaggtttggtgattggtgttgtcttagctatctcagctctgttctgctttaggtatcatagaaaaaagtctcagattgtgaatagtggatcacgaagaagtgcaaccattcccatcagagagaatggagctgattcgtgtaatataatgtcggattcgaccattggtccggattcacctgtgaaatcttctaagaatgggaggtctgtttggcttgaagggtttagtaagaggagtaatgtcatctctgcttctggcattttggaatattcttacaggtttgtctccttctctgacaaatcttagtttcctgattaggttattgttttattgtcttaactatactcaggactagacttctcttgttatagtagttactttggttattatttcaaagtttgaaagttcattaaaaaggggaatgctgttgtggatatgagaaggtcttgcattcttggggttatattccgtttttgacatatggtctttggtgattgcttcagggatttgcagaaagcgacgtgtaatttcacgactttgataggccaaggagcatttggacctgtctacaaagctcaaatgtctactggtgagatcgtggctgtgaaagttctagccactgattctaaacagggcgaaaaagagtttcagacagaggtaagatatatctatggattcatttccgaagaacaagttagtgtgtaaaacatgtagcattaggcagacttttaagcattacaataggctttctgaaatctctaatactcaatttattagttgtgtcatctataagacaggctacatgaatgaacaatctatatatcttactctcttagtatctgcttagtttcttgataaactcatccactcgcctcaatcttttcaggttatgttattgggaaggttgcatcaccgtaacctagtgaacttgattggatactgtgcagagaaaggccaacacatgcttatatatgtttacatgagtaaaggaagcttagcttctcatttatacagtaagtaactacctggttatacataccatattaatctgcttgtcactaaatgaactgttaatgcaatgttgagctattcggtatctttgtagaacatttattgagttgatggtttagacttcactaaatgatgagccttggtaaagatttgagatgcactaaaatggtacttttgatacatgcgaaaaacatgaaccgctgagctgggatttgagagt

SEQ ID NO: 138262 - DNA, 1451 bp, Arabidopsis thaliana landsberg
  unsure (1)..(1451): unsure at all n locations
gaaacagtggttgcttctttagttactaatgaattgagattaggaatatgtgagctgatgtgttgctatgctatataggtactctctttaatcccaccatatgaagggaaatctgtgcttgaacttggagctggtattggtcgtttcactggtgaattggctcaaaaggctggtgaagttatcgctcttgacttcatcgaaagcgcgattcagaaggtaaaactacttaggtagctagctgttgttgtgttaaaagtttctattttaccattgcttcttttgatttctttgatgatttttttctttgcagaatgaaagtgttaatgggcattacaagaacatcaagtttatgtgtgctgatgtaacatctccagacttgaaaatcaaagatggatctatcgacttgattttctcaaactggttgctcatgtatctctctgataaagaggtaactgtttttcattacttgattcttgtagtttctcgaatgtttagagatgaaagtcttaatctagtcgatggtgatggtaggtggaactaatggcagagagaatgattggatgggtcaagccagggggatacattttcttcagagaatcttgcttccatcaatctggggacagcaagcgaaagtcaaaccccactcactaccgtgaacccagattctacacaaaggttcaatcttttgacttgactntcatatttctgaaatgatctacttgcaaaacatgggttatgcctgaactttcgagtatatatatcgtttgaaggatatctaaaactatgaggatattctcttgttttgtgctatagcatgggagtaatttataagaatttaagaggacttctagaaaagactgctccagttggattaatttcattttgaatgtggtttagatccaagttcgataaggcttaaaaagtgtgtatatcatcaatttatagatttgaagtcactttgatccactctaagctaatgtattgggattagttgagtgcattctcttcaatatgggtgggtgaaatccagataacctaaatcttctgaagttagaaatgtatggtgtaaatgtaatgcaggttttccaggaatgtcagacacgtgatgcttctggcaattcatttgagctctctatggttggctgcaaatgcattggggcttatgtgaagaacaagaagaatcagaatcaggtaccaaaaaatttctttatcagattgtttacttttcatattcatttgatttcactgactgacaaggggtaaactttattctctatgatggcagatttgctggatatggcaaaaagtcagcgtggagaatgacaaggatttccagcgtttcttggacaatgttcaatacaagtctagtgggatcttgcgctatgagcgtgtctttggggaaggatatgtgagcactggtggatttggtaattccattcttactcttttat

SEQ ID NO: 138263 - DNA, 489 bp, Arabidopsis thaliana landsberg
tgtgttcaagagtccagcatcagacacatatgtgatctttggagaggcgaagatcgaggatttgagctctcagatccagtcgcaagcagcagagcaattcaaggcaccagatctcagcaatgtgatctcaaagggtgagtcatcgagcgctgcagtggttcaggatgatgaggaggttgacgaggaaggtgttgagccaaaggacattgagttggtgatgactcaagcaggagtgtctaggccaaatgctgtgaaggctctcaaggctgcagatggagatattgtctctgccatcatggagcttaccacctaaaccaaagtcttttctacttagatgtggtttaacctgagttatgtgccagagattgtccaaagaattcggaaatttttggtttcaatgtttttcatgaagtgattttcgatgttgtatcagtataaacctcataagtttttgattttcagtttgattttatattgaatatcaagtcc

SEQ ID NO: 138264 - DNA, 830 bp, Arabidopsis thaliana landsberg
  unsure (1)..(830): unsure at all n locations
gtctcaacacaccaaaaaaggacaacactcctttgttgcaatgcacacatcacatgtgccctgttagagtccactggcacgttaaaactaactacaaagactattggcgagtgaagatagcaatcacaaatttcaattaccggatgaatcatacactctggactttagcaattcagcatccaaatctcaacnnnnnnnnnnnnnnnnnnnnnnnnnnnnnnnnnnnnnnnnnnnnnnacggatccataagtaaataaatacctccctcaaccacaactattcaacttcaaaccaaccattgaatgactaataacattcttaaatctttttgatacagatgatactggaatgttctatggaacgaagttttacaatgatttattaatggaagctggaccttcagggaatgtgcaatcagaggttttgctacagaaagatcaaaagacttttactttcaagcaaggttgggcttttcctagaaaagtttactttaatggtgatgaatgtatgttacctccaccagattcatacccttttctaccaaactctgcacaagggaactttgcttcgttctcactcaccattcttcttctcctattcatctcaatatggtgatttgatctgatccttctgggttttaaaacactgaaccagaactgttttttgtaaactcattgcaaagattgtaaaagaaaaaaaggagttttgtgagaggaaatgattagagatgtgcaaggcttttttaccttgatcactgccattgatcaatgactctgtacttcttggctttttgctttggtactaatgtgaaagtgaagcatattgatttg

SEQ ID NO: 138265 - DNA, 2956 bp, Arabidopsis thaliana landsberg
gagaaaagagagttcgcgtgctgtttgagtatcatatctaatcccagattctttcttccttctctgtatatttccacgacggttgacctaattttcgtcaccatccaattggatttgagaagagagaaaagtattctcatcatctgaagaagaagaaagatagattgatagatagagagagaaatgggtaattcatttgggtgttctgcctccggcgagagattagtgtcggcggcgagagatggggatttcgtggaagccaagatgcttctcgattgcaatccatgtctcgccaagtattcaactttcggtggtcttaattctcctttgcatttcgctgcagctaaaggccataacgaggtttctttttcactcttcattgctcataattttactgttctcgaatttttaatataaagttttctcttttaccgatatgtgatgttagatcgtcggattgttgctcgagaacggagctgatgtgaattccagaaattattgcggccaggtaataaatctagtttcagttttttttctcaattggatttgaaattgttgagcggattctgagctgattcattgattcaagttcgattcttttgattcgacgaatcttaatttgatttagggatttgtatcattagtgaaatgtgaaatctttggctaagtttgagctcattaggctaatagatcgattttgtttgaaatctgacttagattactaatggttacaaattcgattcctacactgaatctattaaaatccaggaatatgctaagtttgcaattaatcatgtttcagacagcattgatgcaagcttgtagatacggacattgggaagttgtgcaaactcttctgcttttccgatgcaatgtgagttcttttcatcactagttgaaagaaaattataacatttggttttgattttgattcttagtatcgtctttctttgtcaaaggttacaagagctgattatttagctggaagaacagcgcttcatttcgctgctgtgaatggtcacgacaggtgtattagacttgtcttggctgattttttacctagtgataaacttagctctcttcctgaaactggtgttgtcactgcaaagaacaaatctgagcacaggtttttttttttttggaaaccatcttcatgtttgtaaggttttgattgactatgtagttccaacaaaaaaagaaattgtcttttggtgcagcgcattgtctaaatttgtgaataaggcggctgatggtggaataacagctcttcacatggctgccttgaatggattatttgattgtgtgcagcttttgcttgatcttgaggccaatgtttccgctgtgacatttcattatggaacatcaatggatatgattggtctcagctttctatccgccttcttttttattgactaaaggattctttctatactgctcccaagatgacaatcttgttcttcgttaacgttgcaggagctggaagcacgcctttacactatgctgcttgtggtgggaatctgaaatgttgtcaggtaagaacaatactattaagtttattctttttgctttggtattttggagacaaagacttgagagaatctgcattttatgtatttctccatagattcttcttgcaagaggtgcaagaaagatgacattgaactgcaacgggtaagttattccatcacaatcttctaatgttttacttcatgttcaaaatcagtttcagggaagtatttgacgtcgttagaatggaaactttccttttccaaaatatgtttgtaggtggctacctattgacatagcacggatgtggagtcgtcattggttagaaccgttgctttcaccaaattctgatgttgtcattccagcctttcctcattccaactacttatcattgccccttttgagtatcctcaacattgcaaggtaatgaagaaatctccatctgagtttatagggccaaactctggcctcaatatgatttctcttcttgttgactatttgcttgcagagagttcgggttgcagtctgcaaccattggagatgaagtcgatatctgtgccgtttgcctggaaagaacatgcacagttgctgctgaaggttcggtctaaattgttgtcatatcctttgagagatgtttattagtgtcctttgaaaaaaccgggttttgtgtttcaggttgtgagcatcagctatgtgtgagatgtgcgttatacctttgctcttcgagcaatgttccctcggtgacagttggcccgcccggatcaattccttgccctctttgtcgacatggaattacagcgtttaaacgactcccaagctccctgacaagagaaatgaagttacctatgtcactcgggttctgtgcaccatgtatgcttcacacgggagacacaacagatcaatcatcaccgacatgcccaccagcagaacaacgcagcagcaagacccgtgcagcctcggtttcatctgatatattctgtccggtaacatgcagcccattcccttcagtaaacattccaatgtgcgcctgcaacgaagggacatgtccaaactttgagacacatggaacagagagacatagcgaagaacacgtcgaatcttctccttctcgaacaacaactgaacaggagaagatagaagaagggcaaagacttgggaaaacaacaacttgttcaagtatgttctggggaagaagaagctgtagcagagagaaccaatgcaactccgagatcaatgcttgatcataaacatattatttgtatgtacagagaaagaaagaggagaatctatatgtctcccatcatttcttacttttaaaatggggatgagccacaacacagagagtcttcttgttaggtttgtaacgtttgtttttgactttggagaggctcaagttattaattatggatgatgatttgtaattgtcaacataatgatggggtcattttgc

SEQ ID NO: 138266 - DNA, 609 bp, Arabidopsis thaliana landsberg; identical to SEQ ID NO: 62978

SEQ ID NO: 138267 - DNA, 3720 bp, Arabidopsis thaliana landsberg
aaaatatgtagcagtgattattgggtttttgctttgctgtagttcatttcttcttttcaactcaatttccgaagctgcaaccaactctgatgctgcaaagttgtcagtatcaaaactatttgtaaacgaactaagtagaaggcttcgactttctctttatttattttggtataaaaattgacaagctttttatatgcagcatttaaaccaatcgagtgtgccagtgaaatcgaatctcctcactgagttcccatggagtccaagatgggaagtgggacgcatggctgagcgactgtggttagtctctatggactctttcttagatgtcttatttaactaattctccttctgaacatttaaaattttacttttttgcagtgacttcctgaccgacgaggctgtcaactttaaaaaatattgtaacgaagctctgctccaacattagtgtatctatttcgaaagttagtattgtccaaattttatgtgacactcctcttgctatgtaaactgaaatggattactgttctgcattaaggagaatacaattataagcaatttgtcttgatttcaacaagattttgcttggctataggattcattggctctgtttgcttttacatttacatgtcataatagtttcgaattttacacatttcagttggatgttaagaaaagagagggaattgatggggttttgtgggtttaaactttaaagtagtcaagaattaagtcattggtttactgttgctctatatgtgtaaaatgaaggcaactccaacggttcttaggtggaatagattatttagacgatttaacatcataaagtccgtggcgactgtaacatcatagattgttttttatttttttcagtagctggtgatgttttttgatttaacttatactactcaaaatcaaaattccataaaccctagacgaccaaacagtctcttcaatatgtaaaacagaacaaagtttttgtagtagcctaaaaagacactcccatggaagctctgagtcacgtcggcattggtctctccccattccaattatgccgattaccaccggcgacgacaaagctccgacgtagccacaacacctctacaactatctgctccgccagcaaatgggccgaccgtcttctctccgacttcaatttcacctccgattcctcctcctcctccttcgccaccgccaccaccaccgccactctcgtctctccgccaccatctattgatcgtcccgaacgccacgtccccatccccattgatttctaccaggtattaggagctcaaacacatttcttaaccgatggaatcagaagagcattcgaagctagggtttcgaaaccgccgcaattcggtttcagcgacgacgctttaatcagccggagacagattcttcaagctgcttgcgaaactctgtctaatcctcggtctagaagagagtacaatgaaggtcttcttgatgatgaagaagctacagtcatcactgatgttccttgggataaggtaatttcgatttcggaataataaagtttcttcgttttgatttcatgaattggataaaggaaggaacttttatctagtgaaggttcctggtgctctctgtgtattgcaagaaggtggtgagactgagatagttcttcgggttggtgaggctctgcttaaggagaggttgcctaagtcgtttaagcaagatgtggttttagttatggcgcttgcgtttctcgatgtctcgagggatgctatggcattggatccacctgattttataactggttatgagtttgttgaggaagctttgaagcttttacaggtagtttgacttgctttggtaatttgacgagcgttggctttataagaactttcttgatttgatactttgttattgagtcttgtgtaggaggaaggagcaagtagccttgcaccggatttacgtgcacaaattgatgagactttggaagagatcactccgcgttatgtcttggagctacttggcttaccgcttggtgatgattacgctgcgaaaagactaaatggtttaagcggtgtgcggaatattttgtggtctgttggaggaggtggagcatcagctcttgttgggggtttgacccgtgagaagtttatgaatgaggcgtttttacgaatgacagctgctgagcaggtatacagtttagatacctttttttaatttctttagcatgatataactttaggtttctcattttaatgtatgttgtgtggtaggttgatctttttgtagctaccccaagcaatattccagcagagtcatttgaagtttacgaagttgcacttgctcttgtggctcaagcttttattggtaagaagccacaccttttacaggatgctgataagcaattccagcaacttcagcaggctaaggtaatggctatggagattcctgcgatgttgtatgatacacggaataattgggagatagactttggtctagaaaggggactctgtgcactgcttataggcaaagttgatgaatgccgtatgtggttgggcttagacagtgaggattcacaatataggaatccagctattgtggagtttgttttggagaattcaaatcgtgatgacaatgatgatctccctggactatgcaaattgttggaaacctggttggcaggggttgtctttcctaggttcagagacaccaaagataaaaaatttaaactcggggactactatgatgatcctatggttttgagttacttggaaagagtggaggtagttcagggttctcctttagctgctgctgcagctatggcaaggattggagccgagcatgtgaaagctagtgctatgcaggcactgcagaaagtttttccttcccgctatgcagatagaaactcggctgaacccaaggatgtgcaagagacagtgtttagtgtagatcctgttggtaacaatgtaggccgtgatggtgagcctggtgtctttattgcagaagctgaaagaccctctgaaaactttgaaactaatgattatgcaattcgagctggggtctcagagagtagcgttgatgaaactactgttgaaatgtccgttgctgatatgttaaaggaggcaagtgtgaagatcctagctgctggtgtggcaattggactgatttcactgttcagccagaagtattttcttaaaagcagctcatcttttcaacgcaaggatatggtttcttttatggaatctgatgtcgctaccataggtatgattaaatgatgcaattttcatatatctgcattgctcaaaatatgcttgttttgtgagctaagaacatagttcccacttaatacatgtcccaaaagttgtaccaagattaacaagttgctgagtaaatttcactaattatgctgcttgaattttttgatcaaactgtagacagaaatgtaaatttcactctcaacatttctgtttagaataacgtaggattagagattgccttagtgtggctttgtccaacttttctttccttgatttttttcttttcgatttagggtcagtcagagctgacgattcagaagcacttcccagaatggatgctaggactgcagagaatatagtatccaagtggcagaagattaagtctctggcttttgggcctgatcaccgcatagaaatgttaccagaggtgagggaataaatctacaattcaatcaattgtgtgaaaactgttggacatgattatagtctg

SEQ ID NO: 138268 - DNA, 826 bp, Arabidopsis thaliana landsberg; identical to SEQ ID NO: 14000

SEQ ID NO: 138269 - DNA, 2566 bp, Arabidopsis thaliana landsberg
gagtaagtccgttcaggtcgatcataataattccgacgaattagaaagcgaaaaaacaaatctacgaaattctcctctttccgaagatgcagattgaagaagaaggagaagaatcataagaataaagctttgaattatcccgttttgctccaccttcgttcttctgattccatatagatccgtttaatagcagcaacgttgttcaattgagaaggtggaaacatgtttaagttcttaaaaggagtagtggctggatctgggacgggactcaaggatctaccttataacatcggtgatccttatccttctgcttggggttcatggagtcactttcgtggtacctccaaggttatttctcttttctcccctctctccggatgtttgtaattctgcgttttttttcttcctgttacttgctttgatcttagctcttctttctagtattttttttatcctgtttgttttatcgttatacttaggattttgagttctgcagattagctgtgtaatcgaattcggttctgtttagtgttgctttatgtcaaaacgaaatacgataccaaaggaaatgtaacgtgattcagaagctttaagatttttatgcttagtagctgtagtttaagaattaccaattcgaattattattgctcttggttcttccaatatgtgagtactctgagttttaagatttttggctttgttttattaagtttatgtcttttttctgcttttctgctttattggatctaatttcagatactgtaagttgtgatacaatcttatattctttactgttggtttcttcaggatgatggatctccagtttcaatatttgctctctctgggaacaatgctcaagatgggcatttggctgctggacgaaatggtgtcaagcgccttcgtaccgtaagttctcattaatttatcacatggtttaggctcgattcatacaaacgagattcttttttctgattactgacataaacgtccattgagtactaagttgtaactctaagcacttggaaatcttattcatcaaactagtgtgtacggggaagtatgaagttgcaataaatttatataatccgtaattcattcctacttaagaattccctagttgaactgacacctgcataatttttgtttcttctgactgtcggacttgatggatataaatatcataaatatcaatgtacccttttgatttatctgaatgtcggaccttatggattcctttctcctcttgttagtatcattggcatcattctgttagattatcatcgactattttgttttgcaggtgaggcatccaaatattctttcatttctccacagtactgaggtcgaaactcatgatggctctactaccaaagttacaatctatatagtcactgagcctgttatgccgctgtcagataagataaaggagctaggcttgaaagctacccagaggtatgactcttattatgaggatctaggcatttaatctgttccaacaaattatgtcacactttaatctgtctttttttcataataatggctttgccactgcacattatcatggtctgcatggtaaattttaattaccttccgaaaattttgcttttagggatgagtactttgcactggggctacaccagataggtaaagctgtgagctttctgaacaatgactgcaaacttgtaagtatctgtttataacactataattcagctattagagtatataaccggtggctagtcgattttttagttaaaactcttaagttctactgtcttaacaggtgcatggtaatgtctgtctggcaagtgttgttgttacacctactttggactggaaactccatgctcttgatgttctatcagagtttgatgggagcaatgaatctgcaagtggacctatgctggtacacatcattcactattggtgttcactttcttgatcttgtcaatttgaaagccattttctcccccaaaatcttagaattcaaacctgctgtcatatttgttctttaacattattttatgatatccttgataaagcgtacaatgtagtatcatagaccttgttcatatgttcagggtaggaatacctgtcagtatttattgcttttttttcatctttgcttccttatttttcttgttttagccatatgaatggctagtgggaacacagtacaagccaatggaaatggtcaagtctgattgggttgctattaggaaatctccaccatgggccattgattcgtggggattaggtactgtagtttttatgccttactaattctcaatggagattatatgctcctcgacccttagtgcacttgagagctattctttcactaaagccctttacttacttttttgaaggatgccttatttatgaactcttctcgggctctaagctggcaaaaacagaggagttgtgcaacactgtcggcattcctaaggttttgatttaatcctttacgtatacatttgcatatacatgttgattcttcatattgatggattaaactccatgtagttgtgacaactttaactccagtgtatttggaacttatact

SEQ ID NO: 138270 - DNA, 4673 bp, Arabidopsis thaliana landsberg
atgatgatgaaggaagacggtagaggaaggaatccaccgtcgcgacatctttgggttggtaaccttcctcatgggatacttgaacgagaattagccgatcggttcttaagatttggtgaattggaaagcttagcgtttcagcctggacgaagctacgcatttgttaattttaatcacgatgaggatgcgttcgctgcgattaagtcgcttcaaggcttcccactctctggaaacccacttaggatcgagtttgctaaggcggttagtgttgaaaactccttttttttttttttttttttccaatgcttgcttaatttggcttggtttttgagtcttgaggttgattagagatgacatgaactaacttattaggagtgattgaaagttatcagttagtgtgtcttcaatagatgactagttatgtgattacttacacgtaaattagttccagtcagtaccattctagaaattaatgattgttgactacgcaaaggtaacaagtctcttaccttgttctggataagttgttactcggatgatacttaatcattgtctaagtttatagaacttagcaatcagtaccattctagaaattaatgattgttgactacgcaaaggtaacaagtctcttaccttgttctggataagttgttactcggatgatacttaatcattgtctaagtttatagaacttagcaatgagcaaaacaaacgaagatggtggtatctcatttttgtctcctcttcataggcctcacactttattattacaagaagttttttttcacattaactgtgaaagttctgtagtttctatatatggaaacttagaatcattctttattaaaccatatgcctccacatcaaaagtatccatgtgtaaccgcacaagcattcacctttatcattcacagcacaaacattcacctttatcattcacaacacaagcattcagccattacgttgtgaagcattcagaatgttattgacaaataatacaaacttggtagttgatcccaagttggagttctttgttcatttaaagatgctcttagctcacttgaggtcaagtgtgttccaggaacatcagcatgtgttgaagggaagtggaccagtgttcaactagatcttacaataaagataacagaaaattgtcattaagctttatggctcttagagttaatgtttacctaacaactttggatgattccatatgcttcagcgtcagggtcacattcatgcaaaagtcataaacccaagttaatagaattatgttggcattggtccacatgttgtaagtttgattgcgttgctgcctgacttcagttgcctctcagtacttacgaaggtgtgacttgatcatctatattgtgtctccgagtaacttttcctgccttctattatgtcattataaactgagaagttacagagtatagaactattattcagctagcagttggtgacattttacatattttctccataatatgtgagtaacaacccaccatacgttcgaggcattgttaaagttcattctcatcttcaccatgtttcatattcctctgcaacttgccagtgccaaacagatacatgcttttgaaatggttacctatacatagacattgttaaaagcagaatttgattcgtatgtaccaattccagcttgcaactgcccaataaaattgatcattgttatttttttagattatacaaaaattgacagggccaaatatcttaagcttgatgattgtttgtgtttatgacatgtttactttttgccatgattacatcttggtcatgtcttaaattctccatggctagtgatgatgtgtaaaattgaggagctaaatttgtataatgtttaggattggcctattgtctgatacctcaatatattaatattgtaacttatacattgcagggatattctttagctcaaattaatcaccataggcagctcttccttccttagacttgctgataactagatactcgagttttttcatcggttaatagtttaaagagtttctatctgctttatattgttgatattaatgcatattagcttttactaactgtgaggcagaagcgttttctgttgcacagtgtttgttgcctggtggactttcttacccagctgtgttagatgggcatctcattatctagttatgaattaaaatagcgtatggattttaataatcttgtgatggatttgaaacttgattctatatattatttctcttgataacagtagctactgcatagctatttagtttgttacttgaagtaccatataaatacactgctgaagtttccttctgattagctttcatttagagcctactgaagctgatgctttattttcttgatcatgcagtgaagtaggccgttggttaatacttctatctttgtgatactctttatcgcaggaaaagtcatcaactggatcacgcactgatgatatatatcgccatgatgaacagcggtctgcagcaagagggtcgtcttttgtccaaagggactccagaatgcgttatgagagcccagacacatatagcaaatcaaaaatgaatgatagaaatgcagaacccagtgaggtactatatatagggtttcctgcttcgttgaaagtagatgatgcgctcttgaggaacgtcttttcttcgtttggagaaataacaaaggtcacggtattccctggtcgcagttatgcatttgttcaattccgaaatctgatggcagcttgtaaggcgaaagaaagtcttcagggaaagttatttggcaatcctcgagtgcatatttgttttgcaaagagtgaaccttcctcatctggcagtggaaggggtccgtcgggtagatcactctctccaccttacagatctgttgatcgactgggatcttcagaaggttatcttcaggatagaaactatggaagcatcagcagaattcccagtgtgagggaaccacattacatagaagatagggatttagaagattctgaaggttacatttttaacaggaaacgagactcaagtagcgatggaggtcctgcatatggaaggtcgagatctacgcatagatttcctcaggatatgcatgaatatcatggtagtcctagggaaatgggtacttcattccgtgataatcctcacagattccagacaaggagttcagagtatgaagagccatgggatctacccgaagatgactactactaccaggaaatcaagagattgaagacaagatcctcgcagcctgagaggcagctcccagggcatcagctttctggtatagagcaagaaagacgccccttttcaagggcatctgctgatttttccccaaaagatgcatttgagcggaactatgaggctggacagctaagatacaaccaaacagttgagcagccgttaaacctggctataaggaatggggacaagagtagcttacgagaaccacatgaagagttaatgggaggttatcctctgccatcagttgtccctgaaagaaaaaggtacacccctgaactgaatcgaccatcactaaaggactggaactgggaagggactattgctaagggaggcaatcccatttgtcgagcaaaatgctttcctgtgggcaaagtgatggacatgatgctgtaagtagctctaagtctttatttttctgtatttcttgttttgattggctctctatatttggcttaagttcattcaaccaagtataagtcaaatccgtttgtgtattggtttaagacttttgcttaatttcattgttctttttgtgtattgcttttagacttctgatcaaattaatttttattggtttgttatggttataaatgcaggcctgagtttctagattgcacggcaagaactggtttagacatgctggctaagcattactaccaatcatctaaagcatgggtggttttctttgttcctggaagtgatgctgatatcgtgttttatgatgagtttatgcattatctggaggagaagcaacgggcagctgtttctaaattggatgacacaacaacgttgtttctggtgcctccatctgatttctccgagaaagtacttaaagttcctgggaaactaagcatctctggagttattctacgtttagaatgtggtggttctggctccggtgggcctgttcaacagcaaggtgagagaaaagatacagacttgctaaattattacggtgaaacatcatattcagaagctagtggaaagtttcctgatgtgggaaacccacgtattccgggtccaacagcttttctgcgtagtgcgggtcgtgacaatcaaagtgcatcaatggatccatacgtcgaggacaagcatgatcagttgagtcaccggtattctggatcggactggctgcctcgtgatacaaaccccagaagttcacccttcatagatcatactgttcaaaaacacagcgggtttgttcctgggaaacagcaaaatgcagatctaagtcgttatcatgatacggaaactccagtcccagcagggtttcagcctgaacagcttacacatttagcttcctcgctacccagacagcaacaacaggtacagaacactccaaatcagcctgagagatatgcaccagaaggccgagcaagtttcagccatttgcaacatgcgcagacaccaagcatacctcaattg

SEQ ID NO: 138271 - DNA, 853 bp, Arabidopsis thaliana landsberg
acggcggcctacacattaaccacctcttcactctcctacaccataccaaaaacctctctctccctcctccgcttcccggcgactgagccaccctcctttatcctccgcaacatcactctcaccgctcatccaaccgagatcctcgccgtcgttggcccttccggcgccggaaaatcaactctccttgacattctcgcctctaaaacctccccaacttccggttcaatcctccttaactccattcccattaacccttcctcttatcgaaaaatctcctcttacgttccccaacatgactctttcttccctctcctcaccgtctccgagaccttctccttcgctgctcgtctcttgctcccaaacccatcattagtttctgaaaccgtaacctctcttttatcagagcttaacctaacacatctttcccacacaagactcgctcaaggcttatccggtggcgaaagaagaagagtctcgatagggttaagcctccttcacgacccttgctttcttctcctcgatgaacccacttcgggtttagatagtaaatccgcttttgacgtcattcacatcctcaaatccatcgctgtgtcaagacaacggaccgtgatattgtccattcaccagcctagcttcaagattctctccatcatcgatcggttgttacttctttcaaaaggaactgttgcgtaccacggaagacttgactccctcgaaggtttcttgctcttcaagggatttactgtccctccgcagctcaattcccttgaatatgcaatggaaatacttcaagaactacgagaatccgatggaaacaccgacgctactgatctcccttcaatcgaaaaccgga

SEQ ID NO: 138272 - DNA, 1620 bp, Arabidopsis thaliana landsberg
  unsure (1)..(1620): unsure at all n locations
tcgatacctcagttgaactttctatttaacggctatgatggatagttgtgatcaatacacgttgtgtggctcttacggaagctgcaacatcaatgaatctcccgcttgtaggtgtttaaaagggtttgttgctaaaactccacaggcttgggttgcaggggattggtcagaagggtgtgttaggagagtgaaactggattgtggtaaaggagaggacggctttctgaagatttcaaagttgaagttaccagatacaagaacatcgtggtatgataagaacatggatttgaatgaatgcaaaaaggtatgcttgagaaactgtacatgctcggcttattcgcctttcgacattagagatggcggaaaaggatgtattctctggttcggagatttgattgatataagagagtataatgaaaacggacaagatctgtatgtgaggcttgcttcttctgagataggtaaggtttaagacttgtgaaacaataaacattgttttactatacattgatttataaatcttgaatattcttttttgttccgtttcgatcacagatgagtacaatatccattacgtgaagggaaagataaggatgatactcataatagtattatctactgctctgtttcttttttgtctttgcattggtttgactgtcttcaacatgaaaaaaaagaaacttgcaacaaaaggtaaatgatcattgtagttgaatagcnnnnnnnnnnnnnnnnnnnnnnnnnnnnnnnnngtgctctataagtttattaaacccgttgttttattcagaaactttgcagcgcgaatcatcccgtgtttcaagcaggaaacaagaggaagaagatcttgaattaccatttcttgatcttgacacggtctcagaagctacaagtggattctctgctgggaacaaacttggacaaggtggttttggacctgtttataaggtaacaaaacaaaacttcttgtctaattctcagattgtgtgcaaaaagggtaaaatgttttgttctttgagcagggaacattggcttgtggacaagaagttgctgtaaaaaggctatcaagaacgtcaagacaaggggtagaagaattcaagaacgagatcaagctgattgcaaagcttcaacacagaaatcttgtgaagattcttggatattgtgtggacgaagaagaacgaatgcttatctacgagtatcagccgaataaaagcttggattctttcattttcgataaagaacgacgtagagaacttgattggcctaaacgagtggaaataatcaaagggattgctcgcggaatgctgtatctccatgaagattcaaggcttcgaatcatccaccgagatctcaaagcaagcaatgtgttgcttgattctgatatgaatgcgaaaatatcggattttggattggctagaaccttgggaggagatgaaactgaagcaaacacgaccagagtggttggaacatagtaagattaactctgttttttacttcaatgcagcaagtaaaattttgaattactcaaaaaaaaaaaaaaacaaactatctttctgcagtggatatatgtcaaaagagcatcccaaacacgggcgtatcgctgtcgatgggatcgacaga

SEQ ID NO: 138273 - DNA, 2782 bp, Arabidopsis thaliana landsberg; identical to SEQ ID NO: 7031

SEQ ID NO: 138274 - DNA, 897 bp, Arabidopsis thaliana landsberg
tgatgataattcttgacaattcgatacttagaaatggcttcttcgtcttcacccccggcggcgatggaggtcggagaatctacaaactggacggagcttccaccggaactgacttcagcaatcctgcaccgtcttggcgcgattgagatacttgaaaacgctcagaaagtttgcagatcttggcgtcgtgtttgtaaagacccatcgatgtggcgtaaaattgacatgcataacctcggagatttggacgacatggattacaacctcgagatcatgtgccgtcacgctgttgatcgtagccagggaggcttggttgatatcggtatttggtactttggtactgttgatctcctcaattacatcgcccataggttctctcttttaccactcacaatctcgccaaattttatttccttcaaaaggagtttttgattccttgtttagagaacttggattgatttgatttcaatatgttagttctagggttagaacagattttggttgtggaagttactatttcttgtgagaattggggaaattatttgtagcttatgattgtgttgtgttacattgtatctaaattctatgttggagtagtaaatagtcacttgattataagattgttatgcttctgaggtatgaatggttacgttcaggtttttatgggatgctagaaaaaagatgttttggatctttgtcattcttcttctctatcttagatgttgtttttaactttgttacacacaattatttgcaggtcgagtaatctgagaagccttagacttacaaggtgttctcaaattacagacgatggatttgtcgaagcagttgtgaaacttccacttgaagaactcgagttgtcatactgctcattttcagtagagtctctcagagttg

SEQ ID NO: 138275 - DNA, 580 bp, Arabidopsis thaliana landsberg; identical to SEQ ID NO: 39557

SEQ ID NO: 138276 - DNA, 803 bp, Arabidopsis thaliana landsberg
aatcttcttcttctctctctctccctcttcctctgtcacacagatattgacaaaaacaaaaagaatgagtcaatcaaatcgtgtcagagacgaagttacattacctttactccaaaaaacctctcatctgaaaaatcactcctctgttctctctgttttcctaaatgaagcaatctcaatctgcaaaatctcttacccattggtcctcactggtctcttcctctacgttcgctccttcgtctctctgtctttcctcggtggtctcggtgacgccactctcgccggtggctccctcgccgccgcatttgcaaacatcaccggatactctcttttctccggtttaaccatgggcgttgagtctatctgttcacaagcctttggagccagacgctataactacgtctgcgcgagtgtcaagagaggaatcatcctccttctcgtcacttctctccctgttacacttctttggatgaatatggagaagattcttctaatcttgaaacaggacaagaagctcgcgtccgaagcgcacatctttttgctttactctgttccagatcttgtcgctcaatctttcttacacccattaagagtttatcttcggactcagtcaaagactcttcctttatcaatatgtacagtgatcgcgagttttcttcacttgccaatcacgttcttccttgtaagttacctcggtttggggattaaaggaatcgctttgagtggtgttgtgtctaatttcaaccttgtcgctttcctctttctctacatctgtttcttcgaagacaagctaagtgttaata

SEQ ID NO: 138277 - DNA, 1686 bp, Arabidopsis thaliana landsberg
  unsure (1)..(1686): unsure at all n locations
gtgcagctggagtctcagataaaggaacttgaaattagagagttggagttggcaaaacgtgaggcagagaatgaaacgcagaggaaaatagtggcaaaagaacttgaacaggtatatgctaacaagctcatttcttaaactgatttctggattgcctctttcgtcttctaaaattcaatgacattattttcagaatgctgctataaatagttatgttcaactatctgccttggaacaacaaaagaccagagagaaagcgcaaagattggctgtagatcacaaggtctgggaatgcttccttctttaaaaaggttggctctttaactttatgtgacagggtcctaccgtgtttttaaccttagatgcaaaaggaaaagcttcataagagaattgctgcactagaaaggcagcttgatcagaagcaggagcttgaactggaggtccagcaactgaaaagtcagctgagcgtgatgagactcgtggaattggacagtggttctgaaattgtgaacaaggtggagaccttcctcagagaccttagtgagacagaaggagagcttgcacacttaaatcaattcaatcaagatcttgttgttcaagagcggaagagcaatgatgaacttcaagaagctcggagagcattgataagcgtacgtatattcaaacaattttctttgaactttcgtctcatagaggagctaggtgactctttgcatgtactgagtgataaactcgaatataactgacatggtaggctagagtggttggatgcattaacaacagaaaagacactacttgaattttcctctaatttttttcttaactttgattgcatgtatagaatttgatagacatgggattgcatattggtgttaagagaatgggggagcttgacaccaaaccgtttatgaaagcaatgagaataaagtactgtcaagaagatctagaggattgggcagttgaagttatccagctttgggaggaatatcttaaggacccagattggcatccttttaaacggataaagcttgagactgcagaaacaatagtggtattccttctcctgtatatcactaattcaatgttttttatttctcatcctaaataatatgtttcgtaagtgttactagcagaagacctccattcaagtgcatgcgtacaactaccagctgcatatgcagatttgtttatgcatgttatggtgtttgatatgtagaaccctgaagctgttgatatctatgtcaggaagtaattgatgaggatgacgagaagttaagaaccctgaagaatgaactgggggatgatgcgtaccaagcagtggcaaatgcattgctggagataaacgagtataatccgagtggaaggtacatctcctcagagctatggaacttcagagaagacaggaaggctacncttgaggaaggtgttaattctctactggagcaatggaatcaagcgaagcatctcaagtcataaaggtttatatttgcatttacccggtacactcaaaaatcccagctctttggaagtttgcctctttgcttacatagttgtattttcgaattttgctaatctgaggtctgtactttgcaagttgcaggagatggaaaataaatttagcgtgtaaaggatgtcaaaatgcaaggttcaacaattgtctctcgtctttgatgcaatatatgggtc

SEQ ID NO: 138278 - DNA, 683 bp, Arabidopsis thaliana landsberg
tccatcagattccgatcagaaatggcaccgtatgactgaaatcgttcatcagagaccaccgattgatgattcgcgacgtttattccagagactatggactgacgaagacgagatcgaacttctccgtggctttctcgattacatcacaaaccaccgtggtaacagctctcatccgcctgatacggcgccgttttatgagcagattaaatctaagctacagttagagtttaataagaatcagcttgtggagaagctaaggaggttgaagaagaagtataggaatgttatgagtaagtttagttctggtaaagaagtattctttaaaagtcctcatgatcaagctacttttgatatctctaggaagatttggaatcaaactgggaaaattattggttttgaagataataatgtgatggatttagaagaaactaatcatgtaaataacgcgaatggtagctcgggttttaatgtctctattatcggtaatgcgaatgtcgatgttgattccgagaatggtttggagaagaaagtgacgataagtagaaaacgatcacggtctaggatcgggaagatcgacgaggataagcctgttcttgctccgtgcgacgggggaatacagaatgcggttaatcttaacgagaatgtggctgttggttgtgattttggtgatgggaggaatcttg

SEQ ID NO: 138279 - DNA, 1605 bp, Arabidopsis thaliana landsberg
tggcatcgtcctgatcgggtacttagacagtttggtcttcaccaaacaataccagcaccttgtgataatgaaaaagctcttcatgctattgacaaaagaggcaaatcagaatatgactggtcagcacgtcatagtcgacatattggattgtgggaggcacgtgtgtcatctgttgtatccggtgagccagagtgtagcccaatggactataatgatccttatatggagtggtaccgcagaattactagaagaattattagtcctatgaacgagaggcgccccggacaatttctacccactggttttgctttccaagtgcttgtaagttattatgtccaacatcaaaacttctatggtttttcagcttacttaaatctcattacccaatataaaaattacaggttcagagggttgcagccattcatgctcgatctagggcttcacttgaggaggaacttactgttggctccgcgaggcaaacattacaagatatcgttgatatgtgtgcaggcgcccttcaactcaatgcgcctttaggctcgttatctaatggtaggattccataagaactatcagaatagttttaggctacaattccttttcttagtgacttaaactttcaagttttgtcgagacttatcttttaacttaagaaattcctttgctataggctccgttgctcaagctccaactccagaaccatttttgatgttacctcaacctacacctacaataataccccaaaagccgatgggtggagaaatggtatgcttaccattgaatgacatggagatagatgatggtcttgcagcagaaccgttggaactgatgccacctgttcaggatataggatgtgagcagtctttatcatcagtttcccagaaacctcttttctggccgtcgggagggaaacttactttcagctgggtttgtgaagtaatgttggtgtttgattggtcgtctaagaatctcccaccttgtgaattttcaagtgttctgccttttaatgtcttggatgagctggttctctttgcttccaaaatcctgaaaaaagagccaaactgcgttaggatagacagtgagaaagcagaggtcgttgtggttggagatctacatgggcagctacatgatttgctgtaccttatgcaggatgctggattcccggatggtgatcggttctatgtgttcaatgggaattatgtagacataggagcatggggtttagaaactttcttgcttctattatcatggaaggtaagcttattagccttttgatgtgtgtagtattgatatcgtgtcagtggagcttaggacgcagacacatactctactttaatgctgctaaattaaatcatgccgcagcatattttaattgtaggaccttcatttttctgctaggttcttctaccggcaagagtgtatcttctacgtggcagtcacgagagtgaaagttgtacatcaatgtatggatttaaaaatgaagtattaaccaagtatggagataaaggagcagctgtctacaagaagtgcttggagtgcttccagttactccctttggcttctgtaattgctggaaaggtatattcaggtggtggaggtcttttt

SEQ ID NO: 138280 - DNA, 674 bp, Arabidopsis thaliana landsberg
tgaatactcgatagcacaggagttgatcggtatggggggaagaacatttttggtgcccggagagttcccagtcggatgctcagttttgtatttgacatcacatcaaacatcaaacatggaagaatacgatcctttaacaggatgtttgaaatggctgaacaagtttggtgaaaaccatggtgagcagcttagagcagaactcaacagactccagaagttgtaccctcatgttaacatcatatacgctgactactacaacgcgctgtttcacctttatcaagaaccagccaaattcggttagacttcttgatcgttttactgaacctaaacaaacaagtacattgatcagtttgctaaatattgagttaattatgcaatcaggattcatgaacagacctttgtccgcttgttgcggcgcaggaggaccgtacaactataccgtaggtaggaaatgtgggactgatatagttgaaagttgtgatgatccttcaaagtatgtggcttgggacggtgttcatatgactgaggctgcgtacagattgatggctgagggtatactaaatggaccgtatgcgattcctccttttgattggtcttgccgtagctctggagttaagaacagtgggtcatctgacacatagaattctttgatgagaaactgatacaagttggtc

SEQ ID NO: 138281 - DNA, 2324 bp, Arabidopsis thaliana landsberg; identical to SEQ ID NO: 30292
  unsure (1)..(2324): unsure at all n locations

SEQ ID NO: 138282 - DNA, 3245 bp, Arabidopsis thaliana landsberg
  unsure (1)..(3245): unsure at all n locations
cttcttaaacaacgctgcagactgtatctcaaatgtagtgaagtcaagctttttaagcagcgttacgaaggagaagaacgaagatgaaaactgtgagtatgaaatggtatgggacgcagaaggatctatgcatcttgtgaagaaagctcttcaaactcctgtgaaacgtcaaagcgataaacctcttgtagaaaagtaagacgacctcaaccatcctttaaattctcactacagacacaagtttttattttcacctcttcttattttctctctaggggtaacgcggtgatgagatcagcggctagaaagaacgctagcgaacagattgagcttgtgatggactcagatgtaaatgcaagtgctggtgggtctgatcctctgatgagatcagcatcaaaatcaagaacaaaacttgtgatccagagagtgatacgtnnnnnnnnnnnnnnnnnnnnnnnnnnnnnnnnnnnnnttcccatttacatgatgttgctgttcaaggattggattgagcaggagtgatcaactaaagataaatcttattgacatgaaattttggattacgcaaactatcatctgtaggatttgtggtgaaaagtgaaaactgttgtattattagaatatgagaatcaaaaaagacatgtttagtctatatggttcaacataaaccatagacttatttatttggtcttattacattattaggcagtaaaagaagaaccaaaactgaaattttaaagaggaaatgtcactgatgaaaccaaaacagtcttctccggtccaaagtgaaaccaatcataaggaacccttcaaagatcttcatttttcttaaagaattagcatctccactgtctctgtctcagacacagtaaaaactccggctcgcttggcggataaatctcttgttctctctctctctgtcttgtctgatgcaaattaacccatgaagcaagcccaaaaaaaacccctaaaagaatgatcatttaggttaaaaaacgacaggcttgtaaaagggttttgcaccagaatatatcagaagagagagtcaagtttcttgtgaaaggattttgccaagcagccaaaggagagcttcattgtccatggaacttcaagaactagatattagggaactatatatattttatatatagatttatatataattaaggagaagagtcatctctttactcatcgccttggatgtaccagcaacaaagcatggtagcacaacgacgaagaatgtagagacgagctcgttgctccttcaccaaggaagcacatttgcttgtaaaggcgtgacctttgtttaacttactcttgaactcagccattacaacaatcaaggtttttttggtatttcaatatattaattgaagagaacaaataaaaacagattaaaactttggggtgtagaatgtgatgaagaaaagaaaaaaccctttttgtgggtgaaagaagagagagttgatgagaagtagaaaagggatgggagagtatatatagagtgaagagaaagaatagaaatcttgagagaaaaggtgacttggatatgaagaaaaggagaaacagatgaacatggtctgatttttggttcattaattgacattgggatttgcatgaatcccttttttggttctccaaggaagtatagtttcattgaaatcaataatttattatatcttatattataaacttttgtaaatatagttcattgatacaaagttttgcatatgttgtatattacctttgccaacaacaaatatacaaccgcccaaatcttacgaatttataattttattgtcatggaaatgatgaaatttttggtaatttctatgaatagaatagataaatataactccaaaaagaaaatcacacgaccacttgcatataaatcaaacaaacgagagtgaagtactgaagtccaagaaagagtagaaagggaggaaaggcaaagcatgaaaagaggatatttgtggaaaagaagacaaagcattgaatgtatgtattttgctttgcttctgattctcttaatctcaatttcctagtaagttgtaaacttacaagctctaaagttaatgtaaaaactaaaatcaagattattaatgttttggttttcttaatgtttcatagtaagtggatggtaaccgacgatttctctaagtgtgtgtgatactacctggaatggtctatggcctgattttgggacgtaaggtggctgtattcattgactccggagcgtcgaacaactttatctccgatgagaattagtcactcgtctcaagttgccaattagaaagatcacccctgtttcagcttccatgggacacggtcaacacattgagagtaaaggaagttgcattgggatcagtttttggattcaagaagctgcaatatttgaaggctaccttttacttgacttaaacaagacagatgctgatgtgatcttgggttataaatggctatcgaaactgggagaaacgatgatagattggaatgaaaacactatgactttctacaatgacactagctggatcacgataaataacaaagctcatacttcagatgggactaagaaagggtacaagtggccatcttccagcgattcaaagtgtagagagcctaaatgggagaaaaatagtcttatgggaaaagtagaatatcacaaccttgaggacaaggttggttctttaggggaaggcagaggtatgtatgcaaggttggattttatgggtaagacaactgttgctaaagaggatagaagtaatataggtatggtacaagttctctgattctgtcgaagatcatacatttttggttatgagcggcttgagttgtaatatcatcagccaagctatttctgcatcatcttggaaaccttgttaagttgatgatacttacctatgaagtttctcactcgccaagaccaccagatttgtcatatggtgaaatgttggtacaagaggatttggaaacaactaaatgaagtccaaaacacgtatgtgtcgagtacataacacattgtcttccctcatcaggacaagtttgaaaattcttggtggaagcacatcaaagtgttgttgtcgtcttgtatgagagacacaaaggagatactaacgagccacaacacttatggtacgagaagcgtgaaagacaagcttggtttgttgtatcaagggtgcagagcagtgatcctaggagcggcaagttttcggagcgggttgtctcataaccggagtcatcattag

SEQ ID NO: 138283 - DNA, 764 bp, Arabidopsis thaliana landsberg
gttccattgattcattgtactatatatggtaacttaaagtaataaatttacagtcttagactcatgtaattagttaaaatataatatggtagctatttttatagcctatcagaatcaaaataaatttagattctttgactaatctgacgggaaaggttaaaaaaaaacagatagagagttttggcgtaaattacaccggagtcaaactttgttccaatttaaaacgaacttaactaatttaattctatccaaaagatatgtgtatcttgcttaagtatagaagataattcacctaaattttagcatttggtagtttttaactttctgttaatgttaaaaaaaaataaaaaatagtgcttctttttttactgtctaaacttactaacattttccaaaacaactaaacatagcagatagcgttccatatcatttatgtaacccaaggtctaggcccaagcccaagcccatatgagggcgatacactgaaatggcaatgtatgtggggacaacattgtgaagctaagtccgagtagtcacttaaccggagatcggagactcatcgttgcaacaacaacaaatttcagaagatccgaagacgaaacgatgcctataagtgcgacaatggtcggagctttgctgggtctcggtacccagatgtactccaacgccctccgcaagctcccttatatgcgtcgtaagtcgtccaccaatcgaaaaatgctacaacaaccctaatttttgttttctgatttcgattgttgaga

SEQ ID NO: 138284 - DNA, 662 bp, Arabidopsis thaliana landsberg
taacttacttctactacaaacagttgccacttttacggtggaaaagatttgcattggttgcagcaatgtgtatcctcgctgtccgagctattattgttcaaatcgccttttatctacatattcaggtactaaaccattttccttatgttttgtagttgttttcatcaaaatcacttttatattactaaagctgtgaaactttgttgcagacacatgtgtttggaagaccaatcttgttcactaggcctcttattttcgccactgcgtttatgagctttttctctgtcgttattgcattgtttaaggtaaacaaagatggaaaaatattaaatctatgtatacttaaagtaaagcattctactgttattgatgagaagttttcttttttggttggatgcaggatatacctgatatcgaaggggataagatattcggaatccgatcattctctgtaactctgggtcagaaacgggtacgatatctaaactaaagaaattgttttgactcaagtgttggattaagattacagaagaaagaaaactgtttttgtttcttgcaaaattcaggtgttttggacatgtgttacactacttcaaatggcttacgctgttgcaattctagttggagccacatctccattcatatggagcaaagtcatctcg

SEQ ID NO: 138285 - DNA, 1045 bp, Arabidopsis thaliana landsberg; identical to SEQ ID NO: 12020

SEQ ID NO: 138286 - DNA, 1309 bp, Arabidopsis thaliana landsberg; identical to SEQ ID NO: 27060

SEQ ID NO: 138287 - DNA, 998 bp, Arabidopsis thaliana landsberg
ggaggagcgtggaggagcatcccagactcggcgccgtgggaaacgcctcgttaaagagatcgtaatcgatccttccgattccgccgataaactcgatgtctgcaaaacacggttcaaaatcaggatcccggcggaatttctcaagacggcgaaaacggagaagaaatatcgtggagtgaggcagaggccgtgggggaagtgggtggcggagatcagatgtggaagaggagcttgtaaaggacgacgtgatcgtctctggctgggtacttttaacactgctgaggaagctgctctagcttatgataacgcttcaattaagctgattggacctcacgcgccgaccaattttggtttgccggcggagaatcaagaggataagacggtgattggagcttctgaggttgctagaggcgcgtgaagtggggttggtaatttagttgttagcattagcaagaaggtctctctcgtattttgtaaatttcatcttctgatgttgtgtatgatcttgatgtctttcgtctatgtatatatatgaaactcgagaaatgaactatattttgatttacacacaaattttaaggtacatatttttttgaatttttaaaacgtttaggaaagaaaagtttgggttgaaataggctctttttacttgtatactattcaatctttttatcatttatggatcaacacataatagaacagaactctaaccaaattgaacgttaatgacttggatcagagttatattttgatggttgatgaaaagttgaaaattctttatatatctttccatcttttggttcttgtatcaccgtatcaacgatacatttttatactttggggtgtctaatgaaaaatactgaatttatcaatttactttgacttgttgaagactgatggccatgggtgaggggtttggagataaagaaagtaataaagaacatgaagagatcagctaaaccaagagacttcatcatacacatgatatatatgatctt

SEQ ID NO: 138288 - DNA, 1476 bp, Arabidopsis thaliana landsberg
tcggttgaagcctgccagagaaacattaagttcaatggtttgatgtctacttcaatggtggagtcatcatcttactgatgctcgtgtccatatgctcagccacccaaaagattttgatgtggtaagtatccaatttttgcaaaatcttttcatcttattgatcacataactaacttggttcagtgatgtcttaggttgatcttgacccatatggtgcgccgtctattttccttgactcagctgttcaatcagttgccgatggtggtttgctgatgtgtacagcaactgacatggcagtgttatgtggagctaacggcgaggtctgctattccaagtgagattttactccttcattaccttattctgaaaacaaatatctttgattttgtctgaatgtcttaaatctgtctgttgttagatatggctcttatccactgaaagggaaatattgtcatgagatggctttgaggatcctcctcgccagcatcgaggtaattttttgctaccgttgaattgattcactctcgccaaatcttccaggctttgattgttttaaagatgctcgactggtatttcttttctaaaaagcttttgtttttgatatattgactttggtcatatttttatttgcagagccatgcaaatcgctacaagcggtatattgttcctgttctatcggtccaaatggatttctacgttcgtgtttttgtccgcgtctacacgtgagttttcctttcttttcaaactgttcctctcaattagagggaagtaaagattgaagctttatgaaatgcagttcggcgagtgcaatgaagaatactccactaaagctctcatatgtctaccaatgcattggttgtgattcctttcatcttcagtctgttggaagatctctccctaaggttttgtggctgtctcgttgcaatgttagtttagtagtttttgaaagctgccttttctgataatcctcttctataattttcttacagaataacagtgtgagatatctacctggagttggtcctgttgttcctcaggattgcactcattgtggaaagaaatataatatgggtggaccaatatggtctgctccaatccacgatcaagaatgggtgaattcgatactaaacggtgttaaatccatgaaagacagatatcctgcttacgaccgaatttgcgctgttcttaccacaatctcagaggcaaaactctcctccacactctgatagctttagtttttggttttgatcaatttctctaaatccctaaatgtttggcttgtctccaggaattgccagatgttcctctctttttgagcctgcatagtctctctgcaacgctaaaatgtacttcaccatcagctgctttgtttcgatcagcggtaatcaatgcaaagtaccgtgtctctgggtcccatgtgaacccgcttgggattaaaactgatgctccaatggagattatctgggacatcatgcg

SEQ ID NO: 138289 - DNA, 1992 bp, Arabidopsis thaliana landsberg; identical to SEQ ID NO: 31023
  unsure (1)..(1992): unsure at all n locations

SEQ ID NO: 138290 - DNA, 1388 bp, Arabidopsis thaliana landsberg
tcttctgtttcacagtgtctcaatatgcacctacttgtctatttttttcttcggtacagggtggagatcctgtttaccgccaggcatgggctaagatttgcgaaatcagccgaaacgagtttgccaaggtttacaaacgccttcgaatcgagcttgaagaaaaggtaaaggaataactgggacgtatactaaattatttgagatatacatgaatgggtaatggaaactacattgttttatgacagggagaaagcttttacaacccttatatcgctaacgtaattgaggaattgagcagcaaggggttagttgaagaaagtaaaggtgctcgtgtgatattcattgaaggctttaaaatcccactcattgttgtaaagagtgatggtggttttaactatgcctcaactgatctaactgctctttggtgggttatctttatgttaatctggagtttagtagcaatctttggcaaatgcatctcatatattattggcttggcccaggtatcggcttaataaaaagaaagctgagtggattatatatgtgaccgacgttggccagcagcagcattttgatatgttcttcaaagtaggttttgataaatattttcattgtttttcacgtcttgtgaaatgttgtcttagttgaaactcagtcgtaactgttgtttttcctgtaggctgccagaaaagcaggatggcttccagacgatgataaaacttaccctagagttagccatgttggttttggtcttgtccttggagatgataacaagcgatttagaactcgggcagcagaggtagtccgcctagctgatttgctagatgaggccaaggatcgcagtaaagctgcccttattgagcgcggtatggtatccaactttgtgtcagcactctctcaattgctgaactattcattgttcagttattatttggtcttattcatccccgtatatgttgtttctctgtttaggtaaggacaaagaatggtcacccgaggagctggaccaaatagctgaggcagttggatatggtgccctgaagtaagtattcatatctctctattctactgctggtgatagtgaattctatttagtatcttctggttttcaatgacttttgcaatgaggctgcacaaatgtgataaatgacttttgtttaattttctttcaaggtatgctgacctgaagaccaacagaattacgggttatacttttagctttgatcaaatgcttaatgacaaggtacttgaactttggagctagtctacatattttgcattatggagtcatctacacatgcttattgaatattttgcccatatagcgagatacagccgtttaccttctaaacgcccaagctcggatctgctccatcatcacaaagtct

SEQ ID NO: 138291 - DNA, 1161 bp, Arabidopsis thaliana landsberg
agtgtgtttaagctcttcaaattgtgctgaaaacatgagatttgagctttacaatttcaggggactggcagaaatcaaggattcacaacggaaagcccaagctcaggctgaagagctgaaaaacgttttggatgaacactttcttgaattgagagtgaaagcggctcatgagactgagagtgcttgccaagaaaggcttgctaccgccaaggctgaaattgctgaattgaggactcagttagatctttctgagaggtatgctctctcatggtaccacatccaaggtcattcattatattcttttcaccgttttgggggcattaatcagtattatattgctttctcatttgcagggaggttttggaacttaaggagggtattaaagttaaagagcaggaggcagaggcatccattgctgaaatggaggtacaatcatccttctgctcgtttttcctattttaatgttcttaaggagtttattagaaatctgaaagtcgaaatgctcgtttctcatcaatactttacttctctagactataggtcaagcctatgaagacatgcagacacagaaccaacatttgttgcagcaggtggctgagcgggacgattataatatcaaggtaaattttagtgttaataggacactttgatactgagatttgttttttgttttttttttcatcttttctcaattccaatctttgactttaactatatctagcctttgaacacatcttttgtagatttctgatttgatctatgatttcagcttgtttccgaaagtgtcaagacaaagcatgcttacaacactcacttatctgagaagcaagtaatggaaaagcagctccatcaggttaatgcatccgtagagaattttaaagcaaggattgcacataatgaggaacaggttagaggagagttcttgtgtaatttttgtaactctctaaaacttctctcatcagtgtcttttactaatgttcttatgttcgcagatgaaaggctgtttttctgaggcttataaattgattcaagaagatcgtcacctcgttatcagcctcgaaaccaccaaatgggaagtagctgatgctgacaaggaattcagatggctcaagtcggccgtgtcttcatccgaaaaggaatatgaacagatcagtaggagga

SEQ ID NO: 138292 - DNA, 799 bp, Arabidopsis thaliana landsberg; identical to SEQ ID NO: 42374

SEQ ID NO: 138293 - DNA, 569 bp, Arabidopsis thaliana landsberg
aactacacttttcttgctcttaacgagttttggttctcatctaactaaacctatatatccgtgttgtgattgtgaatagatcattcactatgagcttcctaataacacggagacatttgtccatcgaaccgggcgaacgggtcgggctggaaagaaaggaagtgctattctgatctacagtcaagatcaatccagggctgtaaaaataattgagagagaagttgggagccgattcactgaggttagataatctgactttctttttacttctttgtttcttttcctgaatgtatgaagtcaatgtttgtatccattgggttttgaattcagctccctagcattgctgtggaacgtggaagcgcaagcatgtttgaaggaataggttctcgatccggtggttcctttggaggaggcatgagggatcgtggttcaagctttggtggtcgttcaggcggtggtggttatggtggcagcagtggtggttatggtggtgggcgttcaggcggatcaagcaaccgttattctggtgattctgaccgttctggttttgggagcttcggtatgcgttc

SEQ ID NO: 138294 - DNA, 439 bp, Arabidopsis thaliana landsberg
aaagtcataatcatgtcaaagtctctagctggattggcggttttggccgctctttttattgcggttgatgcgtttaggccttctggtttaactaatggtcacgctacattctatggaggaagtgacgcttctggaacaatgggtaatttcacactttagtttcattatgatctgactctaatggatttgttcaaataacgaaattatttttgttgtttttttccaggtggagcttgtggttacggagatctttactcggcggggtacgggacaatgacggcggcgttaagcacggctctgttcaacgacggagcttcttgcggagaatgctataggataacgtgtgatcacgcggcggactcacggtggtgcttgaaaggagcttctgtggttattacagccactaacttttgcccaccaaactttgctttgcctaaca

SEQ ID NO: 138295 - DNA, 2984 bp, Arabidopsis thaliana landsberg
caggatcttcttgggctggtgtattagggaaacgcgaaggtcttagtttccctgcaaacgtgtatctagaaggtacagatcagcatcgtggatggttccaaagttctttgttaacaagcatcgcaacgcaaggtgagaagtgcatgccatgatattgccttaaattgagattattctacagatttttagctatctttgtgtggcttttgatttttttcttcacattttgcatgattgtatataggaaaagccccctattctgctgttataacacatggatttgtattggatgagaagggtatgaaaatgagcaagtctctaggtaacgtagtggacccacgtttggtcattgaaggagggaaaaattcaaaggtttgtcacattgtaaatcccattgtatagaactatcttcgttatttaatctgtttcctgacatgggtttgtcttcttacgacaggacgcacctgcttacggagctgatgttatgcgtctttgggtttctagtgtagattacacaggggatgtactaataggtccccagattcttcgtcaaatgtctgatatatataggaagttaaggggaacgttaagatacctcttgggaaatcttcatgattggagagtaggttttctaactcttaagctttacatagagtagtgtttttcacctcttttcccacttgtcaagacttcttgcttctgttttatattctggggttggtgacaatctgttaatatttaagttgtgttggtttgtaggttgataatgctgttccataccaggatttacctatcattgatcagcatgctctctttcagcttgagaatgttgtaaagaatatacaagaatgttacgagaactaccagttctttaaaatattccaggtaacctctccatcttattttggtacatcattcacgtatgtattgattttcctgtgacgggaaacagacatagatcactcttacaggagttaatttatcagttaaaagctttaatatatctaagaaactttagttcagcaattggatcactatccattaaggtgagagtgaggttgatgtatttgcaatggacctttgaacctcatgaggcttaatttcatgttctagatcatctgtgttactaaatgagctttctttatttcagatcatacaacgattcacaattgttgatctgtcaaatttctacttcgatatagctaaagatagactgtatactgggtaagtttctcatcttcttttggttgatatttgctagaacctatgtagacctgttcttaatacgtctgtgctattcaacgtaatctggaccaaaaatcttttttctcaggggtacttcaagttttaccagaagaagctgtcaaacagttctttcaacacatcttttatccatattgagagtgattgctccaatcgtacctcacctagcggaagatgtctggcagaatcttccatttgagtacagaaatgaagatggctctgcagcagaatttgtcttcgaacttaaatggcctactttgaatgaacaatggctttcatttcctgctgaagatgttctcttctggcaaaggcttctcgaggtatcaaaactctcctaaatcaattcggaaaaactcagcaattcagcccattgtatactctctactctgcttgtaattaaagtaatagagttccttagctacttagtggagatgaactcaatgaaatcttacacaatatcagaatattcaactcgatgttatgtcaagttgatcgtgtaatcagttcttatgatatggcattatcgaaatttctctggaagaacttttaagtttattctttgttttactggccttattcttgatgcgctttttgtaatgaggatcttagaaatacttatggtgtttgtgtgacagttgaggactgaggtgaacaaagtgctggagctagcacgtaatgagaaaatgattggttccagtttagaagcaaaggtgtatttgcatactgcagatgcaggcatggctgcaaaattactagagatgagtgaagcaaagaacgaggctgacactctgcaacgcatattcataacatcacaagtaagcactaaatctccttatctggaaaattcatattcctgttatagcttaagataaattagaatcatggtgaccatcaacaagtagggccgtttttatgtgaaccgtggtttttctgtgtaaagttcaggccaaactacaagtaggctcttcccaaaacagataagtaaaagatttagtgtgaataggattaggcacaaaccggaatttgttttaatccagtctggttctttatcctagatatagtatttggaccccaagagaaatgctaaatgtttagatgttaaaagaagagtactttgtagcagtagacacatgtactgatcagatctatagaagccactctcgaaaagccctttaaatccctaagaaataggtatgaaggaattccaatatattgtgtttttagttatacttggtgatggtgattcatctcaaattcctcaattattatccacaattttcgattgaagttgagatttgatcatgctgagtgtaattctatgagactatagccatgaaactgatgtggatgcatattacaggttgaagtattgtcttcaatggagaaggagatgataagcagtgtgcaacacacaggagagtatgtggagggagagaacaaagtgtggattggggtgtcacgagccgaggggtctaagtgtgagaggtgctggaattactcgggccaggtcggatcattttctgaccatcctactctctgtggacgctgcttcagtgtcattgttgctaatccacctgagcctgcagttgcagctgtgaacagcttagcctaaaatttgctctatactattacagttcctttgtccattgcacaatttgcacgttctccgattcatttttgtttcagtaaactcaataaattgaagtcaactccagttatga

SEQ ID NO: 138296 - DNA, 1019 bp, Arabidopsis thaliana landsberg
aagaggtggacatgataccaacaagatagttgatagcattcaagatcgaggaatcaatcaggttagggaataaacacagccactgctttttactttgtatgtgaaaaagtttgtcaaccttttcttgatgtagtatctgttatcatttaggtttacattattggaggagatggaacccagcgaggtgcttcagtaatatttgaggtaattccattgtgatatttcagaataacagttgtaagttttaagttttaacaatcaacaactgaacttagattgtatataaccatgtaggaaattagaagacgtcgactaaaagttgctgtggttggaattccaaaaactattgataatgatattccggtgatagataaatcttttgggtttgacactgctgtggaggaagctcaacgagcgattaacgcagcacatgttgaagccgagagtaatgagaatggtatcggttttgtcaagcttatgggtcgttacagcggtaagtctttgttttgaaacatacaacttaaaagaccttttcgatttgttactgactaatgctaggcgggtgttgtactacagggtacatagcgatgtatgctacattagccagcagagatgttgactgttgcttgattcccgagtcaccattttacctcgaaggagaaggtggactctttgagttcatagagagacggctgaaggatcatggtcacatggtgattgttcttgctgagggtgcaggacaggatttgatgtgcaaaagcatggaatctactcctatggatgcttctgggaacaaacttcttaaagatgtcggcttgtggctatcacaaagcatcaaggtaagagttaaaaactttcaagatcatgagattcttatgccttttacagaaaatttcctcatagggtttatttcctcttgttgtaggatcattttaagaagaataagatggtgatgaatctcaaatacattgatcctacatacatgatccgggctgttccaagtaatgcatcagacaatg

SEQ ID NO: 138297 - DNA, 2662 bp, Arabidopsis thaliana landsberg
ccgccaccccacacacacacacgaagtatattagttggcactttcttatcgatttgagtgtatttaatacggagctaactatagtgtgggttcatgctattacagtcgttatgttcactccgactgagtagtcaccaagtgaatatgcttctttcatccctatggatccaagcaacttctaccgacaatacccctgaaaattttgaggccatggccagcacatatcaaatcactttactgttttcactagcaaaggttagtcgatacttctactctagctttattgtatattgagttctagatattccaccataccaaaggcttatggaatgttggtattatttcattctggccacggtgggtaattccactggaaatctggccccggacatcttgactcttttagatcaaaatgaacttacaacaccttgtttttgaaactgaattttatggttaagaactttaatactttatgcaatccatctagatgggatggtcttttgattttgtaaaattttctctgtttttgtgattgcaaatggcagagatcaaatcacatggctctggtgcagtgttttcagctggcattctctcttcgaaatctctcattgaatcaagatggtaagtgaaagactgtggttagtggcttaatgctttttccgttcatcgagagaattacctactttcgctagattttatgaatggatctcattaattagcatttaactatgatgaatattgttcattaaattatgccatgccatttttgttgatttgcgatgtaattttgttagtggtggatgttattatacagtctctcgcgttcatattgtacacctattaagagaggataatatggtgataaatcaaacatctagtcaggatgcaaggaatttaatcaaagggaacactagtttagcttttagttcctttttgactcaattatagttttagcatctacatattggacaggatcttccggaagttaatttgttttgttgaaacttgaaacactacctaccagtcacagattggctagaacttatatgttcagtaaaagtaccttttgttgtggaataccgatgaacgacatcttctccttgtaaatgcaaaaagattaatatgtactgaactccccattctattgagtttatttctgacgtagatttctggtataatgttgaaggaggtatgcagcactctcgtagaagatctatcttcacttttgcatcatatatgctcattttcggtgccaagatttccaatattctggagctagttccaattatcaaagaatctttaactgcccaaatggtgagctttggttgataattgcatccatttgttttccgttttctaaatctcttgtttctgggttgctcagctgtttttaatctatatgtgcaattcttcatgtcctaaataggttgatccttatcttgtgctggaaggagatatcagactgcgtgctgtatgttctggatttccacaggaagaaacgtatggatctgacaaagatgatagtgctgctctcaattcttcagtgattgtcacagatgatagacgcctgaaggaaatcgtgataactcattttacatcgaaattgcagacattatctgaggtacttatctagtttaaagttatataatgtgtaattcatgatagttctgttattttttgcggagggagtgcttgaccttataaccatttcatgcaataatttcacacttttgttttgaatttttatatgtgtaattctcttaggaggagcaattaaatttgagaaaggaaattcagtcagatttttccctagatgatgcacattcgcttggtggacaattattcacggatacaccaggacctagttctcctcttaatcaaacagaacttccagcttttgaagaggtataatgatttcatgataaatttgcttcaggaatgattctcttattgcaattttgtggatctttcaggttgagctttcagacatagcggcatttgaaggaatatccccaggggccagtgggagtcagtctggccacagaacatcattgtccacaaacactaacccagtagatgttctgagtgtcaatgagttgttagaatcggtaatagctacactcaatatttcataatagtttttattggtctcctcctttttaatgtgattttttcatcggtgatgtgtaggtatcagaaactgctcggcaagtcgccagctctccctgtatacgtgaaaaatataaaagataaaaatagataagaaagtaaggagatagagaaagaaacataggactaaccaaggaaaatataaaagaaaaaaagaagagtaaaacaaaaaagcaagcaatgctaatggcatcaataagacaatgaaaagaacgaacaatatcttctcaagaaggtgagagtttgttctctgtgacattaattgtcatcctataaacgttgaatcttggttcagttcagtgttcatttttttttgtattctcctgtgctgcagacagaagaagctggtgaagatgatgagaaggcaataattgtggctgatgttcaacctcaaggccagcttggattcttctcacaagaagttccacaaaattcatttcggttaccgccttcgagcccctacgataaattcttgaaagcagccgggtgttaa

SEQ ID NO: 138298 - DNA, 4254 bp, Arabidopsis thaliana landsberg
  unsure (1)..(4254): unsure at all n locations
ttgggtatatatatatataggcgtcaaattanttatacccatccaaaaaaatcagtaacctattttttaaaataagcccaaaatgaaagacagcccaatagctaaaaggcccatgaggccatgactcgatttataatgcccaatgcttattcatacagtttttcctgttctgtgttttgttttttatctgtcaaccaaaaaagagcttttgcgaactcttcttatcctttcaatttaacagagtcatcagcttgaagacgaaagcctttctaattccaatcttcttcacttgtatgacacgttcgtctactcttgcgcttggtcggttttcttaggatttttgcacaagaatgatcaacgcatgattcggattccaggatagagaatccatggctactttcaatgttctttgtagcaatcgatttagattcaatggaggttattctccggagaaatttaatagaaaggtgtcttcgaggagtagtgagcttaatgtttgtgtctctagaatcaggactcaatcgtttagttgcaggagacttggtgggtttatggaaattggtgaaaccagattaggggttattagagttcatggcgattctcgtaatagattttcttgtaatagcgagattaagcgacttgtgactggtgattacggagataaggagactcgtattggtgaaaatggtagaaacaaagggaagagaagaaggttttctcttaggcttcgacctagattacgattagtgagaatgagacttggcagatttgatttcagagcatcaatggaagattttcgatattttttgaaaaagaatctcaaaagagtgatcttgtccaccggtgtggctttaatctttggactgtgttatttgttcttgaggttaactgctgttccgtccccatccattgttccttactcagatttcgttacgaatcttcgaggtggttctgtttcaaaggttttgctcgaagaaggctcacgtcgaatctattacaacactgatgagaatgttgaggttgttgatgatgttcacaagtctgaaactttagaagatccggcaatccaaattgatggcggcacagtgacagaagctgttacgaaagacgatactccgcgaaaggttcgagctttgcctcctgtgtggaagtatgtgacaagaaaagtcgatcatgatgagaagtttcttcttagtttaatgagagagaaaggcattacttatagttcagctcctcaatccgcattgatgtcaatgagaactactttgataacaatcatctctctgtggattcctttgacacctcttatgtggcttctttatcggcaactctcagcatctaacagccctgcgaagaaacgacggtctaaaaatcccactgttggcttcgatgatgttgagggtgttgattctgctaaagacgagctcgtggaggtaaaaagatacgtaaatgcaacgtttatagaattaagtttgaagtccaacctccatgtgttctgtttttctttgtagatagtctcatgtcttcaaggaagtataaactacaaaaaactaggagcaagattaccgagaggtgtgcttttggtcggtccaccagggaccggtaaaaccttgttggctcgggctgtagctggagaagcgggagttccatttttctctgtctccgctagtgagtttgttgaattgtttgttggaagaggcgcagcgcgaatcagagatcttttcaatgcagcaaggaaaaactcaccttccattatattcattgatgagcttgatgcggttggaggaaaacgcggtaggagtttcaacgatgaacgtgaccagacgttaaaccaggtaaagaatcaacatttagtacccttttaaccatgtagactccattgctgatatacttcctttgtagttgcttactgagatggatggattcgagtcagacacgaaagtcattgtaattgcagcaactaaccgaccagaagcgttagacttttttctttgtcggcctggaaggttctctagaaaagttttggttgcagaaccagaccaagaaggccgtcggaaaatcttggccatacatctgagagacgttcctttagaagaagatgcatttctcatatgtgatctggttgcttctttaactcccggatttgtaggtgctgatctcgccaatattgtcaatgaagctgcattgcttgctgctcgtagaggtcagtctttaagtgatcttttaacagccctttcttgatttaagtagttattcgatctggttgcttcccaggtttgatcttttgggatgaagctgcggtttttggcttaacagacactagcgatttcttgattgttttcaggcggagaagcggtggcacgggaagatataatggaagctatagagagagcgaagttcgggatcaataataaagaagagaggccaaggacactaggaaatgagcttgagctcagcaagctctttcatggatgccatctttggtggcaaagcaacagggatcatatcaagacggtttacaaggatcgttggcttatcaaactcttttctaaatcaagccaaaccaagaatttaccaaatttgacattctttaataatttcttttaatttttaactgattgattctattaaattttcacattagtaattataatagatattaagtatttttgtaattttaggccattacaacgcatactttgcagtttgcaaataatttgacttactaaacgttcttcaaatttgatttagccagttgcatacatactttgctatttctttcctaccttaaattgtgatagaaaaatattgaaaacgtcccatgggctctggacttatatcatacattcatagtctaaattttttaagacacaaacaaagcccaagggcccgaacataatacacagtaaacaacactatacacagtacaacgttcacgaatcaaatttgtgcttacaatcatatttacatcatatatcattatcaacatcaaaagtacttctttttttgtgttttaaattaatttgaaaatagtacaacatcaaaattgaataccaatggtctttgccgttgaaaattttaggtgtatgaacttcatactatgaagagttcaaatgaaaatttattcaaacgtgtcttgatatagtattcaaaaaatcaaaggtaaccggtatgttgagtttgacaacgtacgtattgtaaccaataaaaatattggtatacagcttttttgtgtggtcaacttacatttttcatatttttggatatgtttgactttgtggctatttgcgggttgtaattgcgctgaagtcaaatcgactgactagcatggcgtttgttcatgaagccggagacaaaaccctgagacttaaccaatataatacgaccatgctcccgctacatctaacaaaacaactggtcaatataattatagaaataaaaaaatcaataactagtaattaaaagtcttgaaactttaacgaatttcataaagtaggaataacataaagcgactaatcggcctaaccgaagaggcggcgggtgagcatgcaacttgttgtaccaaaatggtggctctaacgacttagggatactcgttcttgcttggaagctctacaaagaaaaaattatgccttctcaaaagtgtgaagattgattaaacctttaatttgtgaattaagttatgcatagatacagaacattgcatatttgatttgcatacttgatatggaagaatttcttacaagaatcagataccttgataacttttaaaataagacgaaatattaatcagagaaaaaacgagatatatatgaaaacaaactgaaaggtttttggacatttgaaacgtcatcttgtatgcatgaatgtatatcatcttagttttatgatttatgacgatgggtacatcacgaatataacttttggttctgattagtgtttgcattatataacatcttaatacaatttttttgttttaaacttgaaagggataatatattaaataaaaggggatctagatattattgattcggagaaaattataaagtaaaatggattaataacacaatttacaaaaacattaattgtatatacttaaccaaacggtaaatctaccgtataattgatctgattgatgatatcatctcataaatcaacccacatgttatgtgtaaatataacttattgatttctacaagaaaaaaaaaacaatttatagatttcgaaacaagctttttcttatgaaaaaattca

SEQ ID NO: 138299 - DNA, 1151 bp, Arabidopsis thaliana landsberg
aaaaacttgactggaaactgctagatacgctagcatgaacactcaccttggcattggtaataccagttcatttagtttctaactttctaattattttaaagaacgtaattctggataggtaattgctattttattacagaacaaagtcgtagagatgatttggagtcacttggattcgttctcatgtacttcttaaaaggaaggtatgtacctctcttccgtacctgttggcatgttgctattggttctttttcggcggcatttggcttacttatccaatgtaatgcagtcttccttggcaaggactgaaagctggcaataagaagcaaaagtatgagaaaatcagtgaaaagaaagtatcgacatctattgaggtaaaataatgttctgatacctgtgttggtgacacctatggtttaatactgattaaatattctattcttcttttaggctttatgccgaggttatccatctgaatttgcatcttatttccattattgccgttctctgagatttgacgacaagccagactatgcctacctgaaacggcttttccgcgacctgtttattcgtgaaggtttggtccctcaatcacttatgttaattctagtcttgtgaagcaaatataacttggaccagttaatcaacatgttaatttgagtttgcgtcatctgcttatattaggcttccagtttgattatgtatttgattggacgatcttgaagtatcagcaatcacagatttctactcctcctcctcgtcatcatgtaagaatcagtttttcttttccgaatgtcatcgtcctacttaaactctgctgaatatgtacctttcttccagggtcctgtagttgggccaagctctgccctcccccctgccattaccagtgctgagaggccatcaggtagttccatctatttcgagtagtttttttccaaatttcattacgcatttggctatgttactctgttctataggggcatggttttcacccatctgatgtgttctttgcaggtggcgacgaagctagaccttctggctggtcatcaggaatccctagacgaaattctggacaaatttttaactcaggaagcttagctaaacaaaaagcaccagtttcaagtgatcctgcaatatctaaagatgtagtg

SEQ ID NO: 138300 - DNA, 320 bp, Arabidopsis thaliana landsberg
cagctttttaaacccaacagagcaaaaaagcaaaagattcaacaaaaatctcctcaaattctattcatggtctctagaaattctgacggatatttcttggatccgaccggtatgactgttcctggtctcggaccttcctttacagccgccgtttcttcttcttcttcaccaacgacttcttctacggccgtggctgtggcggatgtgacggcgatggtttcttcttcggaggaggatttgagtaagaagattaggaagccttatactattactaagtctagagagagctggacggagcctgagcatgataaattccttga

SEQ ID NO: 138301 - DNA, 962 bp, Arabidopsis thaliana landsberg
aaataaaaagattgaaaacatgacatctgcttatcgtccaagagttattgtgaatggaacaagaagaacaagaacgttccattacttctattgtcgccattgtagccgtaccattaggctaagaagctttggtctatatggtcccatatgtcctttctgttctagagagatcaatcttcacgatgagcttgacattatgaggccaagccgaccttattgggatagtgataccgattggatcactctccatcttatcaacgaaccaagaagtaaccggttcaatcatgatgatctagtttataatactgacgaggaattcgctgatgtcatgcctagtgtacaaatcggtccaccaccagcctcgcaatccgccatcgaggctgtaaggacggtgataatcacggatgaagatttggtgaaagagaaggtttgtgcgatatgcaaggaggaatttgaagttggagaggaaggaaaagaattgaaatgcttgcatttgtaccattcaagctgcattgtgtcttggttgaacattcacaacacttgtcccatttgtcgttttgaggttaacttaggtgtttccgagagtaacgtagacgaaggagggtcttacaacatcgacaatgatcgatcaaatcggtttcggactcgggtttgttctttgtggcctctccgaatgatgattgattgggtacataatctcataggtaagattccacctcccgatatagctttcatggcttttctattatgcttatacgggttttgactatgatatttaactcttaaaaatatatacaatttcgcagatataagaataacaaactcttgacaaaaaaaatttaaagaattgcaaacaagaatgtatgaaactaggaatattattgactacatattaagtgtattatgacttatgagagagaggagaagaaacacacatcaataagaaacgacaaaaaaaaact

SEQ ID NO: 138302 - DNA, 1339 bp, Arabidopsis thaliana landsberg; identical to SEQ ID NO: 9881

SEQ ID NO: 138303 - DNA, 961 bp, Arabidopsis thaliana landsberg
  unsure (1)..(961): unsure at all n locations
atggnnnnnnnnnnnnnnnnnnnnnnnnncggtgcggattgtgctattgcaaatggtgaagtgacaatggaaggagacagtagtaatggaaatggtggtacttcagagaatttggaatgttgttctactcagcatcctatggaggcatctgaggttggtgacaaagaattttaacgtttttttttttttgccttttctgcacaaataattgttattgactttgcagttttttcgctttttccagggcacacagaatgaacaagtggatgattcaaaacagatgagaggacaaaaggtgcaaggaagggtcaagcatgagaagacctctggaggcaagaatatttcatcagtcttggtgaataagaaaaaagatgggaaagtggtggcatcaaatggttcatgttgctccaaacgtaaagcctgtaaagtctcctaagagcaaatcgctcaatggtagagaggctcatgtcacgaaggttactaatctctttgttgctcctatagttactggtgattagccatgtgtcttcttggctgaatgttgtctctgatctcttcatttgttcttatcagcatgggaaccatgactctctaccagctgaagggaccaggtaccaatatcattctttaaaacatggtttctgttttgcatcagttcattgccaaaactctaaaacgattaatgcaaacattccatcaagattatgtattagttcctgtcgttaagtctggtagtttgtttctctctttgatacagggacaagccaaaactgagggaaacaaggaaacaagtcaatgatacatctgaagatgatacacagtagtatgtctttttgggattcactcttcattctcatttccttagcacttttttctgactaaaacttgcttactgtttagtagtccaaaagaagatgatggcaaacctcgtcgagctagtgcacttccaaattatggattc

SEQ ID NO: 138304 - DNA, 965 bp, Arabidopsis thaliana landsberg; identical to SEQ ID NO: 55305
  unsure (1)..(965): unsure at all n locations

SEQ ID NO: 138305 - DNA, 2041 bp, Arabidopsis thaliana landsberg
cgtcgtccgctcgagaaaagaagattcacttccatctgcaaattccttcactccctgtgagctcaatagagagagaagaagagatgccgctcggagagagaggaggatgggagaggaccgagtccagatactgcggcgttgagactgatttctccaacgatgttactcatcttctcaacttcaacatttccaccggcggttttgactatgttctcgctcctctggtttgtttccttcttcttcctcgactctcacgtccttgcctgttgttactgtatcaattgggatttgaaattttatatctttgacggagtttacttctttctcttcctgcaggtggatccttcgtataggccgagcttggtggaaggaaatggtgtagatactcaggttcttccagtctgtggctctgacttagtcttgtcaccttctcaatggagcagtcatgttgttggtatgattctatttgcttctccaccgtgtgattttgtactcgttatgaatatgatgggttttgatttgagtggtaaatcttcattctctaggaaaaattagttcgtggattgacttggattctgaagatgaggtcttacggatggattcagaaaccacattgaagcaagaaatagcttgggctactcatctctccttacaggtgcttgtgcatctatggatttaactcactctctttgttttcttgcctgcaaagtgattttgaagagaaattcttttgttgcaggcatgccttcttcccactcctaaagggaaatcgtgcgccaattatgccagatgtgtgaaccagatcttacaaggcctcactaccttgcaggtggtttacgagtttcttgctgccggtctagctttatttcagatgagacttttctttacaagatcaccttcaatcaagctctaacattttgtggatcttctttgttttgtttaaatgtcatttctgcgctgaagttatggctaagggttccactggtgaagtctgaaggtgattcaatggatgatacctcagagggactggtaagacattggatcaaattttatgcaaacttaagattgttagtactttttgtgccttctcagatttttaagggactctctaatgcggatcccttggaatcacttgatgtggctgccttttaaacctagaaatacaaataaatgtccctatctgttcacgtttttgtacactttgtgtgaggattactttaatatatactctcttctatgcagaatgattcctgggagctgtggaattcgtttcgtcttctttgtgagcatgacagtaagctgtctgttgctcttgatgttctgtgagttgagagaaactcttgattattgttgttaatgtggacccaaagttttttttccactctactaacataacaccattttcttcatataggagtacactaccctctgaaacttcactagggcgctggatgggagagtctgtgagagcagccatattaagcactgatgtaagtgcctgacttcttgccgcattattataaactccactttgaagtattgcgaatcacaaaatgcctctaatttggcgttgcaggctttcttaacaaatgctcggggttatccttgcttgtccaaacgccaccaaaagttaatagcaggattttttgatcatgctgcccaggtaacaaacatcccactctttgtgatatagaaataaattaaaatcttcttttgactcacaaaagagatctattagactcgatctggtgctcattatcatcaatcttgtaaatgcaggttgtaatttgtggaaagcctgttcataatcttcaaaagcctcttgattctagctcggagggtaatttttctgtataatcttttgtcctctgaaaattagctattatcctctgggcttgttttccgtagctcaatttatcacgggcattgttataatcatagttgattccaagttttgagctaaatattttattacgggcattgtttgtcaggtacaaagaagaatcctctgcgcatatatttggactatgttgcttatctg

SEQ ID NO: 138306 - DNA, 1709 bp, Arabidopsis thaliana landsberg
gcctctatgattgcagctatgcgtcctgatattgacaacatcgatgaatatgtgaggaacacaacagcgagagctttcagtgtggtggcttcagctcttggaatccctgcactcttgcctttcctgaaagctgtgtgccagagtaaaaggtcatggcaggcacggcatactggaatcaagattgttcagcagattgcgatactaattggttgtgctgtcctgcctcacttaaggtctttggtagagattatcgaacatggtcttagtgatgaaaaccagaaggttaggactattaccgctttgtcactggctgctcttgctgaagctgctgctccatatggtattgagagctttgattctgttctgaagcctttgtggaaaggtattaggtcgcaccgtggtaaagttttagctgctttcttgaaggcgatcggttttatcattcccttgatggatgctatatatgcgagctactatacaaaagaagtcatggttatcttgattcgtgagttccagtcgcctgatgaagagatgaagaagatcgtcctcaaggtggtgaaacagtgtgtaagtacagagggtgttgaaccggaatacattcgtagtgatattctgcccgagtttttcaggaatttctggacaaggaaaatggctctggagaggagaaactataagcagcttgttgaaactactgtggaggttgcgaacaaggttggtgttgcagatattgtgggaagagttgttgaagatctcaaggacgagagtgaacagtatcgacgtatggttatggaaaccattgataaggttgtcacaaacttaggagcatctgatattgatgcgaggttggaggaactgctcatagatggcattctttatgcttttcaagaacagactagtgacgatgctaatgtgatgcttaatggattcggtgctgtagtaaatgctcttggtcagcgagtaaagccttatcttccccagatctgtggtaccatcaagtggcgattgaacaacaagagtgcaaaggtaagacagcaagctgctgatctgatttctcgaattgcagttgttatgaagcaatgcggagaggaacagttgatgggacatctaggtgttgttttgtatgaatatcttggagaagagtacccagaagtcttgggatcgattcttggggctttaaaagctatagtcaatgtgattggtatgacgaagatgactcctcctattaaggatcttctaccaaggctgaccccgattttgaagaataggcatgagaaagtgcaagagaattgtatcgatcttgttggtaggattgctgatcgtggtgccgagtttgttccagcaagagaatggatgagaatctgtttcgagcttcttgaaatgcttaaagctcataagaaaggtattcgtcgtgctactgtcaacacttttgggtacattgccaaagccattgggccacaagacgttctagccacgttgcttaacaatctcaaagtccaagaacgtcagaaccgtgtttgcaccacagttgcaatcgccatagtcgctgaaacatgctctcccttcaccgtcttacctgctttgatgaatgagtaccgtgttccagagctaaacgtccaaaatggtgttctgaaatctctctccttcctcttcgagtacattggagagatgggcaaagattacatatacgcaggtacacccgtgcttgaaga

SEQ ID NO: 138307 - DNA, 623 bp, Arabidopsis thaliana landsberg
acttactgttgattcttgtgttcttcatcattattttctcacatggaattcttcttacaatgcaggcgctcttagctgattttgaggtgtctgaaggaatatattcacgggcctgcattgaagacacagactcagtgtgtttgtggttgggagctaatgtcatgctggaatattcctgtgaagaggtccattaccctaaaaacatattctattcgctattttaaatctccgggaccatagaataagttcttataatctttgttgttccaacaggcttcagctcttctgaaaaacaatctggaaaatgctaaagccagcctggaggttcttgtagctgatttacagttcttgagggatcaagtcacagttactcaggtacagagatacttgtaaatttatctcatttcatttgagttagcccctaattcgtgagaagttacatataagtaggggcctgatcttactttaacataactgttaattatcaaaaacccaaaattgcaatttaggcaacctgtattgtagatacatacaaagattgagtaaagagtagtctaaaactaggactttttggtgatcgacaggtaactattgcacgtgttgataactgggatgttaatcaa

SEQ ID NO: 138308 - DNA, 494 bp, Arabidopsis thaliana landsberg
aggaaagttatcaaaagttttgagagctttggatagtgaagctcaaagaactaaacaatgggcttcagagtttgtgttattgtcgtcttcttgggttgtcttcttctagtccctgagaaaacaatggctcaagaaatgaaacgtgcatcgatcgttatccaaggagctcgacgagtttgtgagaccgatgagaactttgtctgtgcgacattggactggtggcctcatgacaagtgcaactatgaccaatgtccttggggttactcttcagttatcaatatggtaatagcaaaatagtaaaggattcacctttcagtctcttcataataacaatgtccgcagttgcgataattttctgatctttccaatgttttacaggatttaacgccgtcccccttcttactaaagctattaaaggtttgcactggcatccaaaaatgttcatgccattgctttgtgtgtcttgaatctgaaatttttaaggatttggattt

SEQ ID NO: 138309 - DNA, 1032 bp, Arabidopsis thaliana landsberg
  unsure (1)..(1032): unsure at all n locations
tttgattctattgtttactagtttagggtntatgttttctctgatcgattcttgaattttgaatgttaccggcgttgtagttgaatgagaaaggacttttggtgttgaaaggattggactcacagttagccaagaatctaccgccggatctgcagaaacttcgatgcaaggtaagatttttcaatcaaccctttgttttccagtctctagaggaaggtttaatttgttggtttgtaggttgctttccatgcactgagattcgcggcaccaattgagaatctcgggaacaaactcacgagaagaatgtggatagaaggtccatatattgctctccatttaaggctagagaaagatgtttgggtaagaaccggttgtctcactggattaggctcagaattcgatcggatcatagcagaaaccagaacgtctcagcctcgatacctcactggtagactaaacttgacctatacagagcgtagacttgctggtttttgtcctctcaatgtatatgagattgcaaggtaacttaaaaggaagaaaattgacatgaaacagagctttgaccatttgtatacatggtttgaggaaacttaatgctcgagtctttttttttttggatcaaaggttgttgaaggctttgggagcacctagtaatgcgtcgatatatattgcaggaggtgaaccatttggtggctcacgagcattagagcctctcgctaaagagttctctaatttggtgacaaaggagacattggctcataaaggcgagctcttgccttacaccaatagatcttcagctttagcagctattgactacattgtatcacttagcagcgatgtttttattccttcccatggtggaaacatggcaaaagctatgcaggtaacacagaagaatagtcttttgagattttccaaagtttctttcttaaactctgtttttctctcagggaaatagagcttatgtaggacacaggaagtttataatgcctaataagagagcgatgcttcctttaaggagaattcttcggt

SEQ ID NO: 138310 - DNA, 2917 bp, Arabidopsis thaliana landsberg
gaggaacacatccgttaccgttccttgctgaaatttttggtttatcaaaaggaaaactattagtgactgatgatataatgatttttagctttgaggtattaaatatttgtatagtgtgacccgtattgtctgccttaaaaagatgctaactttattccattaactagttttagactaaaatccactttccttagcaggcgcaattattcgatactcatacttagataagtagattatcatttccggagaacaacgtgattcgatcgattgagtatcattaaactttaaaaggttctgccggcaaaaaaaaagaagaagaaggcttataagacttgagaggttccattcaatcaattctttggttttctacgatccggatctacccggttctcatgggtttcaccacatattccattgagccattaaattattatggactgggcctcggcctactaagcttctaagccgtgtaacatatctaaaagactaaaacattttccatgcaaccattcctttttttgtattttttaaaaaattaattcaagaaattcttttaccaaaaacatataaacccatgacaaaaatagtaattttcactaatgttacaacatattactccaacaaaattattactttatatattattctattaaaatataactgatcattcatggattttgttttcttttcttttagactccaaatcctgaaaatttcttttatttatatatatatatatatatatcttacccatcgaaaattcgtaatagggggattatgattatatatcactaccccagtatataaaattgaggttcaatccagtatatatagccgtctctcagctcttgaagataataaacttatgatgaagaagaacaacttaaggttgtgttcttgacacatagacgtatacgtttactcactttgatacagagcgttgcactaatttacaacctgaaatgtataacgtaattaatgaagttagtctcatatgcatgggccatcaataatcatataaacaaaagcttacacatactctcacacgtgccttatctctctctccatctgttagattcctcgccaccatcttcatctacatttctacgacaagttccattcttcgtttgctgttaaatacacaacaacaacaataattatttacttaaaacgcatttcaagaaaattactaaacactacaacaatcttataataacatttactaaaaatgtccacgtttgtaaaagtcaccgacttaatcactatcatgttctttctagccattgctgccgtcataaccgcctcaaacacagccgagttggatgtacttgaaatggctagaactgctgtggttgaagccaagactagttttgggtcaatggctgtgactgaggcaactagtgaagttgctggtagttattataaattggggttaagtgaatgcgagaagctctacgatgagagtgaagctaggctatcgaaactggtcgtagatcatgagaatttcaccgttgaagatgttagaacgtggctaagtggcgtgcttgcgaatcatcacacttgtttagacggtttaattcagcaacgtcaaggtcataagcctttggtccatagcaacgtcacgttcgtgctccatgaagctttggctttctacaaaaagtctagaggtcatatgaaaaagagtaagaaaacttacacatacattcatgtatacataattaaataaaatgatacaataaatcgctctgttttatcactaaataacgattgtagactccaagataagtgtaaatttttgtttgagatatcatggtttatctattatggatctctaataacatttggtagggctgcatggaccagcgagacagggccatggaccaacgagaccaaaacatagaccaacgagaccaaatcatggaccaggaagatcacaccatggaccatcaagaccaaaccaaaacggtggaatgttagtgtcatggaatccaacaagttcaagggcagatttcgtggtggctcgggacggttcggcgactcatcggacgataaaccaagcattagccgccgtttcaagaatgggtaaaagtcggttgaatagagtgataatatacataaaagctggtgtttataacgaaaaaatcgaaatagatagacacatgaaaaacatcatgctagttggtgatggtatggaccgtacaattgtcaccaataaccgaaacgtcccggacggttccacgacttatggatcagcgacattcggtataaaatatttaaaattctactattaatcttcatacatagatcatgcatgttgaataattactgcgcttactcgttatataggagtgtccggggatggattttgggcacgggacataacgttcgagaatactgcaggaccacataaacatcaagctgtggcgttgagagtgagctcagacttgtctttattctatcggtgtagtttcaaaggatatcaagatactcttttcacgcactcacttcgtcaattctaccgcgattgtcatatttatggtattatttttaatctatgtactatttgtttaaactcgtatggaagctagtcatgatcatacatggattaagaatttttgggaaattttggaataggtacgattgatttcatatttggagatgcggcagctgtttttcagaactgtgatatatttgtgaggcggcctatggatcatcaaggcaacatgatcacagctcaaggaagagacgacccacatacaaattcaggtaatgttttgtttggccatcttttgactatcaatcaggggtcatcaactataccgaaattattagaaccaaccgattctaatcagattatatttttaaaaaaattgttcatatgaaaatatccaaaaactaatgcatgcgaaagggagct

SEQ ID NO: 138311 - DNA, 1208 bp, Arabidopsis thaliana landsberg
aagatgatcaagaaatatggttctgtcaatctgcacgagtgataccaaaaaaaaaagaaaagaaaaagcaaagttttgcagtaagattttgacttgaagttaattaaaaaaaattaaataatgaactctaatgttacttgtttctttattttgtaataagaatctaattgggttaaataatgaactctaatgttatctttttcattattttgtaataagagtctaattgggatgttgatcttactgccaaggtccgagaggcgttccacaaagaggaggcaaaccactactccccatccatgatcaacgagtggagcagttatgggtcaaatgaaataagctaaatggcgcaaacgaagatattttaaaatggatatttccgatgcattaaataatgcgggttccgatgagttgtaaaagaaatcggaaaactgattattgtaacatattttttttgtatcaaattgtaatgctttatgattcgatctacacaacataaaacatgataactaattctgaccaaacacatatataataatgtaggttacctcttcacgttgttatagtttaaacaaaacaataacgtagattgagtatctctacacgttgtcattcctgaagagtgtcgttgactttttagttttttgttcttttcctcatattttccaattttcgaatccgatcaaacaacttgtgaaaacttttctttccaaatttgtttccatggcgcagcagagccaacgtccaatctcaaaccgtcacatctctctcctcaaccgtaacggtctcatcctccttctccttctagctctctttgttatcctcggtgtattcttacctttgacaaaatcttccttgttcatgtttccaaacacaacatcttcttctctttctccttcttcttctttatcggtctccgactggcgcgactattcccttgctcaagccgttaagtttgttgctaagaacgagactgtgatcgtctgtgctgttagctaccctttcttgccttttcttaacaactggttgattagcatttctagacagaaacatcaagaaaaagttcttgtgatcgctgaagactatgctactttgtacaaagtcaacgaaaagtggcctggtcatgctgttctcattcctccggcgttggatcctcaatccgcacacaaatttggttcccaggtacagagagagttttcaccttttcg

SEQ ID NO: 138312 - DNA, 546 bp, Arabidopsis thaliana landsberg
ataccatttagattagcagcgaatttcaaacggagatgtcagaatcagtgattcagggatcgaatccggatcgggttttatctccgacgagctcgaaatcagtgacgcagacggtgaacgggtcgcatcaattcgtgattcaaggatacagcttagcgaaagggatgggtatagggaagcacatagcgagtgataatttctccgtcggaggttatcagtgggggatcttcttctacccggacggtaagaatccggaggataattcgtcgtacgtctctgtttttatcgcattggccagtgaaggaaccgaagttagggcgcttttcgagctagctcttgttgaccaaagtggaaaggggaaacataaggttcatagccattttgagcggtcactcgatggtggcccttatacactcaaatacagaggaagcatgtggtaaggtttttcagctcactgctcataattttagtttttcttgatttcaattagttcgtttgtagggttagggttcgcattgggtttcattagctttctaaattgatgca

SEQ ID NO: 138313 - DNA, 969 bp, Arabidopsis thaliana landsberg
cgccgatcaaaaaaccctagaatttcttccactgttatgtaagtttgatcttgttgtctccactaagaggcgaagagagaaagagggttttaggttgtgtgtttctgtttcaaagggtttacttctcgttgaccccgatcgagatggcggattcttcacccgattcgtgtttcaaaggaggcaaatttagtgctccagggtttcgatttcatccaactgatgaagagcttgtgatgtattatttgaagaggaagatttgtaggaagaggcttagagttaatgttatcggtgttgttgatgtttacaaaatggatcctgaggaattgcctggtaaatttcgtctctcgtttacaaattagcttaagctttgtttagatttgtattgtttcttgatcatatagttttggttgttgttgactacatcaaattcgttatcattatactggaactgatttcattttgtgtatttcgattgatacaggtcaatcaatgttgaagacgggagatagacagtggttctatttcactccaaggagtaggaagtatccaaacgcagctaggtctaatagaggaactgaaaatgggtattggaaggctacagggaaggatcgagtcattgagtataattctagatcggtgggacttaaaaagactcttgttttctatagaggccgggctcctagtggtgagcggactgattgggtgatgcatgagtatacgatggatgaagatgaactagggagatgtaagaaccctcaggagtactatgctctttataagttgttcaagaaaagtggggctggtcctaagaatggtgaacagtatggtgctccgtttcaagaagaggaatgggttgatgatgataatgaagatgtgaatgctattgctgtagctgtgccagagcaacctgtggttcgttatgaggatgctcgtcgtgtggatgagaggagactttttaatcctgttatt

SEQ ID NO: 138314 - DNA, 442 bp, Arabidopsis thaliana landsberg
atttcagtaatcgctgccgcactatcgtctcctacctcctttgcctacaagctttcacgcgggagctcaacatcagccatggcggaacaggttactcgatctgttctctcctctaagcttatcctcgttttatgatctattgatccttattcactcaaatgattctaatactcttctcttttctctgtcactaattttcagactgagaaagcttttcttaagcagcctaaggtcttccttaggtaattttgcgattcgatttctctctgttctctattgtttcattgtatttaagttccaagttgtttatattgttcattgtttctgatttatcaagctcgaagaaatctggaaagggaaagagacctggaaaaggtggaaaccgtttctggaagaacattggtttgggcttcaagactcctcgtgaagccattgatggtat

SEQ ID NO: 138315 - DNA, 404 bp, Arabidopsis thaliana landsberg
gttaggtagtagggaaaccaaacttacttttgatgaatcattacttctgtaaatgaaaatgccagcttttgatcagatgtttcagacatttggtccatttgggaaagtacttctttctctcgaacctactaaatataaagataagacctcacatgtttttgattttctaaaatagggggaaaaagtacaagacttttcaagctatgtccttgattaagtctagtgatatcttcaataagaaatgttttgagaacaccattgggatctaaatttgatctctgatgatttactttaatgttccaattatatatgtttttgacagtatgcaagataccatagatcgttatctgaggcatactaaggatcgagtcagcaccaaaccggtttctgaagaaaatatgcag

SEQ ID NO: 138316 - DNA, 469 bp, Arabidopsis thaliana landsberg
gcacaagcacgagtgagtgagagatgtttgccgtggagaatgggttgcagggagacccgagattaaaggccatctccgacgccattcgtgtcattcctcacttccccaagactggtccatttttctcttctttgcctttagtttttcttttagcttacaaactaactaagcttagagtgtgtttgtgttgcagggatcatgtttcaggacataacaacgttgttgctggatccagttgcctttaaacatgtcgtcgacatcttcgttgatcgttacaagcacatgaacatctctctcgtcgccggttcctttcactttcctttctttaaactttctcatgattattagatgccttcttttatagtttaagtcgctatttaattagtctttgccaaatacgacacacacgaacaaaacccgctaattattgatttagcttgaaaggcacacatttctttatttattcttg

SEQ ID NO: 138317 - DNA, 1526 bp, Arabidopsis thaliana landsberg
ctcagtgaagctcgtcaacgcttagtagaaggcaagtagtttcttattggaacattaaaacaacgtttctttcatatgataactttggtttcagtatgaatttcagctcaaataaaggaggcggttctcattggtattgctcttgatgatgaaaagagagaagagtttaataaaattgaacaggtttgatgtaaatcagtttacttggtaaattggttctatgtttgtcacaactttgcttatgcttacgcgctgtttttttcttgattgtaggaactcgaaaaactttcccataagttttctgagaatgttttggatgcaacaaagaaatttgaaaagttgataacagacaagaaagagatcgagggattgcctccatctgctcttgggctattcgcacaagcagctgtctccaaggtatcaatattaactgaaagatatataaagttccatgtttcgttatttttttagtaaggtttgttaatttttgcttcttgatatgtgacactagggccatgaaaatgcaactgctgagaatggaccatggatcattacactggatgctcctagttatcttcctgtcatgcaacatgctaaaaaccgtgctctgcgtgaggaagtctaccgtgcttacctatctcgtgcctcttctggcgatttggataatacggcaattattgaccagattttgaagcttcgcttggaaaaagctaagcttcttggttacaacaattacgctgaggtagagtcatcaacctaagtaaaactgttcttttttctttctaattggcttaatgcgactttctactgttctaggtaagcatggctatgaaaatggctactgttgagaaagcagcagagcttttagagaagcttcgtagtgcatcctgggatgcggctgttcaaggtaacatactgatacagagaagatgtattcaaatcaatttgttatttgttaaacaagttggctactgttgaaacttgttacggtcagaaatagcatgaggcattgggctatccaatacggaactttgactttcttgaatcgttgtataaattagacatggaagacctcaagagtttcgcaaagaaccagggtgctgcagaatctgacagtatgactcattgggacaccactttctggagtgagaggcttcgtgaatccaaatacgatattaatgaggttctttgtccttctgtagctagtgatgcaattatatattgttttgaaagtcttgatccttatctctcgttttggtctttctaggaagaactacgtccatacttctcactgccaaaggttatggatggacttttcagtctagctaagacactttttggaattgatattgaaccagcagatggtttagctccggtaaatttggaatcttatctgttacctttccatatatcgaccatgtgatttattaaccagtcgtttagtgacatgaattattgatttgaaggtctggaacaatgatgttcggttctaccgcgtcaaagattcttctgggaacccaatcgct

SEQ ID NO: 138318 - DNA, 2116 bp, Arabidopsis thaliana landsberg
aaggaaagttcttagaaatcgattagtaataaactattttcttttaataaacttttttcttttaataaaaaatttaaaatgtattcgaaaaaactgtgttacatcagatgcagcgtttgcgttaagaatttcttagatacaaacaaacaaggatcaaaataaagatttaatgtgtacagcttcattagagggaaccaaaccagagtaataaactatttcgatataagaattaattcaataattctaacaaatcttttcatatcgatgaatccttaaatcatataaaggtaaaatataccatataaaagaatattatatacgaagaatctatacgaaaagattctagtcgtttggcaaaaataaaaaaagattctagtcgtgaatattcttgattagatcatcacccattgccgtcttctcatagctttgttttcctttatcttttaatttaacttgaagagaatgataacgaaaaaaaaagaaagaatatgattggttaagcagaagatgatgcaacattaaagcatatgattaataaatttgtaaatgttggttgtttgtctattcagaccacttttggaccagaacttgtactacataggaatgaaagccacgtcagcaacgtatagttctgcctttgttaatgcacttcccgccattaccttcataatggctgtcattttcaggtaagtttgcttctaattaccaaagaccaatcatattaatcattctctatattttttacgtcataattttatagttattaattcaaaaattgcttaaatttaattaggatagaaactgtaaatttgaagaagacacgaagtcttgcaaaagtgattggaacagcaataactgtgggaggagcaatggttatgacgttgtacaaaggtccagccattgagctctttaagactgctcatagctctttacacggcggctcctctggcacctcctccgagaccactgatcagaattgggttaccggaactctagcggttatgggtagtatcaccacttgggcaggtttcttcattctacaagtaagcaaacattagttacttatattccaaattggtgtgtttacattaattagtaaatgtgttataccatactattatagttattctgatcactataacataacaaagagtggtaccaaatctccattttgactaggcctaggcaaaatagccaaacccgaagaaccaaaccgaacctgacccaaaaaacccgattcgaattcgaacccaaaactttaaaatacccgaacggatcctaaacttcaaaacccgaacccgatccgaacctaaaaactcgatcaagtacccgaacatatccgaaatatatatacatagaaaataattcattagtaataatcacatttacaacaacttaaatgtctaaaatatttggattctaagacatgttgtatagtttgggtattttacctacttttagatagattaggatagaaaatactcaagttctttaaaaattttgtgtattttgaagtattttaaaaatattttgatacaaaattttgagttttggatactccgggtttacccgaatccgaacccgaaaaacccgatcgcgaatccgaaccgaatccgaagtcttaaaatacccgaacggatcttagattatgacgctaatggatgatgaagtttttgaattatcatttcatgaggtaggagcgtcacaagaatgtgacatgtcaccctttccaagcacaaattcaaaaggacgggaagaaaaatgttagtggtttgtgatttaaattgagtttaactgacttaaaatattatttagaatctgttgttattcagtgaagatgttttaaaaatttgttaaagtttgatgttattagtttaagatttttaaaaagtaatataaaatcttcataaatttgaagttattagattcatacttttataaagtcagtaaattttttatgttattcaattaaaataaagaatctatgattcccggtgaattaaattattatattattggtttataattttctacacttttgttcacaaaataaaatcatgaaaaatatcaccaaaataaagagatgatttggaaaactttacaatattatgaaaaa

SEQ ID NO: 138319 - DNA, 2785 bp, Arabidopsis thaliana landsberg; identical to SEQ ID NO: 10366

SEQ ID NO: 138320 - DNA, 1352 bp, Arabidopsis thaliana landsberg
aatagagtaataattaaaagctctctttctctatctcccacgatttcctttttccgccggaagaagaagcaaaaaaaaaagaaatcgaatctctctttcaagtgttcgatttaaagcaaaagtgtaattataatcggaagcgagatcttgagaaatggtgggatgacggcggagggagatggcgaggggaggaggagaatggaccggagggatcgccggaaccggagttctctctttcaaaagaatcactctacttgtttgctttttcaacattctcattgctctctttgttcttcgctttctctatgcttcttctctccacatctattccaataacgataatggttcctactttttattttccttttcatttttgctctctgattcatgataattcgtatctgaagcagctctgttggttttttgttattcagttgttaagtacacagctgatgagattaggaaaatggaggaatctattcggattcgaagatcgaaggaacctactctgattcttcaattggttagtggctttttaaaatggaactcgaagatgcacattggctcttctcacaatgtttgatttccttgttaggtgaagaagctcaagcatgaggtttccactgcagaatctagtactgaactatctcctaatgttaaacacaaactagttgatgagatcctccagcgtttgaaaagctttgaggacaaatctaatgttactcagcttagaggtttgtgctactctactatgcccattagcttcatgacatttatttttcaaactgccacaaacttgcatttcatgacttttcctgatctagctgcttaggatttgtcttattacctctttggaatgtcatggtgatttgtcttattacctaacctgtgtaagattttgttggtatcaatagctcagtttagtaaatatttcattatcattcatgtagaagtggatttttgctcaataatgcatatggttatcaggatagtaaaataggctcacaaatttcagacctttctgcatgcactatcacatactagacagaacaattgattttagcgggattttcaatggagattttttcatgcctagtttttctattcttcttgtataagttcatcaggtctatggaacataagctctaacacccacttaagttctgttataatctatgcattgatgatcatatgctatgtacatgaaacatttgagccacagaaactctagcggtggtgccattgtatacataatcttttcgatgttctttagattctcagtagcttacctaacatgttcgtatgtctcatcatgcttctctaattcctttgtgctgcatcagaaaaagtat

SEQ ID NO: 138321 - DNA, 621 bp, Arabidopsis thaliana landsberg; identical to SEQ ID NO: 23495

SEQ ID NO: 138322 - DNA, 1105 bp, Arabidopsis thaliana landsberg
ttctctccaggttcgtcgtcaagatccttattcccctgtttctttctcccggcaaagctcgtttctttttaatttagtttcttattggttttgtgaaggtatgtggatcaggggaaagggattcttcaaccacataacttaattgacgaactcgaatctgttatcggagacgatgaaacaaagaagagtctctctgatggtccttttggagagatccttaaatcagcaatggtaaaaaaaacttttcctcttcttcaaaattcatcttgaaactaataatagattgttaattttggtgtaggaagctatagttgtaccaccttttgttgcgttagccgttagaccaagacctggtgtttgggaatatgttcgtgttaatgtcttcgagctaagtgttgaacaattaacagtctctgagtatcttcgtttcaaagaagaactcgttgatggacctaatagtgaccctttttgtcttgagcttgatttcgagccctttaacgcaaacgtgccacgtccttctcgttcgtcttcgattggtaatggagttcagtttctgaatcgtcacttgtcttctgttatgttccgtaacaaagattgcttggagcctctgcttgatttccttagagttcataagtacaaaggtcatgtaagtttcctataaaacctctttagttgctaattaaagatgttatgaaactgctgaaaattgtaagtttttcactttgttcgcagccgttgatgttgaatgatcggattcaaagcatatctaggcttcaaatccagcttagtaaagcagaagatcatatctctaagctttcacaagaaactccgttctcggaattcgaatacgcgttgcaaggaatgggttttgagaaaggatggggagataccgcagggagagttcttgaaatgatgcatcttctctctgatattcttcaagctcctgatccttcgtccttggagaagtttcttgggatggtaccaatggttttcaacgttgtgatcttatctccacatggatatttcgggcaagccaatgttttaggcttacctgacactggtggacaagtatctccctaaacccctacgtttaatttgtctttcg

SEQ ID NO: 138323 - DNA, 749 bp, Arabidopsis thaliana landsberg; identical to SEQ ID NO: 66227

SEQ ID NO: 138324 - DNA, 1733 bp, Arabidopsis thaliana landsberg
attttcacattcactgttacttcttcatagaacttctcactctctctcacacacaactgtactctctctggagatttgaagaaaaccctaattcccaattttcttttgtcgttttccttctccgacgattgagagttttcctagatctaaagaaaaaagtttcaatcttcactatgcaatactgagaagaaattccacaaggaaaaaaaatgtcaagctccgacccgaaacccggacctaaaccgggtccatggccaccaactccagaatccgccgcaatgccaccgtcttcctgggctaaaaaaaccggatttcgtcccaaattctccggtgaaactaccgccactgattcttcttccggtcagctctcattaccggttagagctaaacaacaagaaacccaaccggatcttgaagctggtcaaaccagactccgtcctcctccttctgtctccgccgcagtaactaacggtgagactgacaaggataagaaagagaagccaccaccaccacctcctggttctgttgctgttccggttaaggatcaaccggttaagagaaggagagattctgatggggttgttggaagatcaaatggacccgatggagctaatgggtcaggtgacccggttagaagaccgggtcgtattgaagaaacagttgaggttttgcctcagagtatggatgatgatttagtggctaggaatttgcatatgaagtatggtcttagagatactcctggacttggttagtactgatttttattattactatttgttaaattgttattgattctcttgattatgacttatatataattggtaattaataatatattgatagattccatttgtggatttcatgtcagatagtgactgaatctttttaaagtttcttttttttatattggtgtttggttaatgattgttgtgtgtgtttgtgttttcagttccaattgggttctatggtttgcagcattacctttcaatgttgggatcattgattctggttccacttgttattgttcctgcaatgggagcttcacatgtaagtgtgattcttttggactctctactttggacaatgatgattgcaaatgtaatttcaacttttttttgggattataggaggaggttgcaaatgttgtatcgactgtactttttgtctctggaatcactacactgttgcatacttcgtttgggtcgaggcttcctttgattcaaggtccttcctttgtctttctggctccggctttggctataataaactctccagagtttcaaggtttgaatggaaataatgtaagtttgaaagaagaacctcttctgctatctatgattaagtaaaatgtcagtcattgggttccgttgaggatatggtgatgttactatcgaaatgtagctgttatttcagaatgtagcctcgtaattttttgctgcttagggtaatctgttgtaaaaatcatgcaagtcacctgttggagctctctttcaacttttatggcaaattttacttagcgagaaataacaaatcgtcattaggaagacttctgcactaggcaagggtggattgaaaacatccttttctactcttggcatttctgattattctgcgtttgtctatagcaattcttcttttttctatggatagctgatttgttctagatgtgagtgtttgggtaatacggaagaacttcaagcatatcatgagggagctgcacgtgcaatcataat

SEQ ID NO: 138325 - DNA, 1519 bp, Arabidopsis thaliana landsberg
  unsure (1)..(1519): unsure at all n locations
gatatgcgtatcactttttatccgggaatgctaacctggttggtttaaatcaagagccgtgatccatacccttttggagtacgataatagtttgcgtgacagtagtacagaaatgccctacctattctctcttaagataaatatgtctattcagctagtcaatgttcaaatgattcttggactagagttaattttttttgttgaccgctttttcggcttttcattgcatgtaaggtttatgtaatttgtcatttatcatccaaactttctgaagtcatttatgtttttaagcctcccggaatcgattatgtctatgtgatgtgtcttcaggtatcagtttatactttcggataatatttctcaccagcttatttggttacctttcactgctcatcatcatcaagtggtgcactggatctcaagcagacttgtatcatgtaatgatctacatgtttctgagccctatggatgatttaggagagaatcagctgttccctaaccagaaaatagtacaggtttgcattgatacctaacgatgtactctctctgtatcaaaaatcatatgccttagtctcatctaattcctttcctattccagctcacattcctctttctggctctggtttctgtgccgtggatgttgttgccaaagccattcatcctgaaaaaacaacatgaagctgtgagtccctgccctcgtcgatatacttaaaagctttgatattgaaatttgtgctgaccgttactgaaaggtgatttatgttttctccagagacatcaaggactgtcatatgcacagcttgacgagacagatgagagtcttcaagtagaaacaaatgggggaggacatggacacgaagagtttgaattcagcgaaatctttgtgcaccaactcattcacaccattgagtttgtgcttggagctgtttccaacactgcttcttatcttcgtctctgggctctcaggtacaaaatactacttgctttcaaatagtcctgattgtcatctaccagatagtcctaccaaaactagcacttgtcaatatcatctagcagtagtattctgttgaattcattggttcttgatggcttaatgtcgaagtattggtttgcgcatttcgtgactaatctttatgctttgctgggattcctattcagtctcgcccactcggagttgtcgtcagtcttctatgagaaggtccttcttatggcttgggggtaagtaaatgcatctacaatcttttagcctccgtatgcaaatgtcaactaatacgctgtagaaggtgttaataacaatctctatctgaccccaaacagtttcaacaatgtcttcatctggatcgttggaattctcgtcttcatatttgcgactgtgggagtgcttcttgtgatggagacatnnnnnnnnnnnnnnnnnnnnnnnnnncttcactgggtggagtaccagaacaagttctacgaaggcgatggtaacaagtttgctcctttcacttttactctcgtcggaaacgaagacgag

SEQ ID NO: 138326 - DNA, 1364 bp, Arabidopsis thaliana landsberg
  unsure (1)..(1364): unsure at all n locations
accacattacaatgtcaatatgacagcagttcaagttggtcaggagtttctaactatcccagccgatttatttcaacctggagatagaaaaggagcgataattgacagtggtacaaccttggcctatcttccagagataatctatgaaccattggtgaagaaggtacagttcaagaaaatatccagttcctttaagaaattgaactgcagggtctcataaatctggttcttttattagataacctcgcaggagcctgctctaaaagttcacatagtggataaagattataaatgctttcagtactctggcaggttagttatacgtcttcatttaatgatttacactacaaaattttcaaataggcatctgccaagaataccgttggacatcattgtggatggtttgcatgtacgcaactgctcattgtgatgtcaacgtatcacacaatagttttcttatgaaaaccacatcttacctttgctgcagagttgatgaggggtttccgaatgtcactttccatttcgagaactcggttttcctcagggtttatcctcatgactatctgttccctcatgtaagcatcttcagcctttatggttgatttttggctcttgtaatattcttgttgcaacctgattttaccctcaatctttctatccattgcataccaaactcataaccccaaaatttcacaggaaggaatgtggtgcattggttggcaannnnnnnnnnnnnnnnnnnnnnnnnnnnnnnnnnnnnnnnntttgggaggtaccttaaattggatacatagtttgcagtcacattatacaaaagcatgacttagtgacaaagtttaattgcatgcaattcagtttgtggaaaaagcccattgtgttctcttgctgtcagtgacaatgaaccccgtgtgatttaatccaatgcccacaatatcttacattctcttttgcagatttggtgctttcaaacaagcttgttctctacgatctcgaaaatcagctcattgggtggactgaatacaactgtaagtgctatattcatacactcaaacgattcatgtctcattgtgagtgggaaagatttcgaatttgaaactattttatctttgttttatctgtctttgcaggctcatcaagcataaaagtaaaagacgaaggcacaggaacagttcatctagtaggctcacattttatctcttctgcattacctttggatacctctctgtgtcttctattttctttacttctcctcatgactcttttcctcctttagagactccttatagtttatcttttgtacatagattcaacattttgctaaaatggtaaagaaaaaggtctgatatatagataatacgaagaaa

SEQ ID NO: 138327 - DNA, 637 bp, Arabidopsis thaliana landsberg
aaaaacatgtttttatcaaacattgtggaagcaaaaaaagttgccttcttatctctgtaaggcttttgattgtaaaatttgtgtaattttataggtttggaatgataaagatcgtcttagattggtcagccctcataaaaatgttgaacaatggattgagaatacgagaaaagcgacgatgcctccctttgataaggtccatgaggtccttttcagagccaaagatagatgtcagaagcagcgagagatggcaaccgcatctaaactgggtcctcaatctaagatgtaagaacaaaaaacttgaccactttcatcgggggaagaaaaaacttaatttctcatccaatttcatggatcttccataatacagtatccaatttagtactattggtgagaagagtgatgatccaaacctcgttcaaaacacaaccgatcgtagaaaacatagacgcaaatggagtcgagctgaagatgccattcttattagtgcttggttaaatactagcaaggatccaattgtcgataatgaacataaagcatgcgctttttggaagagaattggtgcatattttaacaatagcgcttcacttgcaaatctgccaaagcgagagccgagtcactgcaagcaaagatggag

SEQ ID NO: 138328 - DNA, 1761 bp, Arabidopsis thaliana landsberg
ttttgatttaaattccggggaggaattagggtttatgaaagtaaaagaagaaactttgaagaatttgggagatggagtggttttaagacctgttgatcattgttctagcatttggagtatgaagatgaacatgaagaactttcttaagaaacttcatatctcgcccaatcaatcagatgaagctgaaggatcaatttcaacaactaagagcaatcatcataagtctatcgatgtatcatcatcatcatcaccgaggtctcatcacagcaatagccctgaaatcaaacctttttctggtttatctaattggttaagttctgttggtcatagaaaaatccctagtcctcctaattctttcaatgccaagaacagagccgccacggttgatgacactgttgttgttaatgggtcagaacatgtggatttaggttccaaagatccagctgttgaagaagagaatcagatacagttggctttagagttaagtgctagagaagatcctgaggctactcagattgaggctattaagcaattcagtttaggctcttgtgctcctgagaactctccagctgaactcatcgcttatcgctactgggtaagcttttgattcaattgttttctctgcataacagaaactctttagttactcccaagaactcatttcattttggtattgttgcattcacagaattacaattgtcttggctatgatgacaagatcttggatggtttttatgacttgtatggagtgttgaatgcatcctcagcagaaagaatacctcctttgctcgatcttcaagggacacctgtttcagacggtgtgacatgggaagctgttcttgtgaacagaagtggggattctaatctgttgagacttgaacagatggctcttgatattgctgctaaatcaagatcagtttcttcctctggttttgtgaatagtgaattggtaaggaaactggctattttagtgggagattacatgggtggaccagtcgtgcacccagagagcatgttgagagcttggaggagtcttagctatagtttgaaagcaactcttggaagcatggttttgccacttggttctctgactattggtttggctcgtcaccgagccttgttattcaaagtatgcactttttcttctgaatctcagcacttttaagtttatttcatttcttatggttctttctttatatgaaactttgtaggtattgtgtgatagtgttggtgttccttgtcgaatagtcaaaggtcagcaatataccggttctgaagatgtggcaatgaactttattaaggctgatgatggcaggtaatcatcacattaatgtgtagattcaatatttgtctatcattcatgtatattgttatctaatctgcacctcctgaagctaatattgaggcttaaagaaagaaactttgttatatgctattcaattgtgaatttcagggagtacattgttgatcttatgggagatcccggcacgcttattccagctgatgcagctggactacaaatagactatgatgaatctgcctattccgctagtcctggagacaatgattcaattcatgtagcttcttccagcaatggtattgaaagctcatatgaagagaatacagagtttcgaacagtggaacatcgttctagtaccaagagttctgggggagagaaaccaatccggaggtggaggcgatctcattgttcatccaaatatttctagagaagatgtgaaaaatcagaagaaagttgaaaag

SEQ ID NO: 138329 - DNA, 640 bp, Arabidopsis thaliana landsberg
atgttgaaaactaaacttttttgtgttgttgttattgctgactggccagaggagacccaaaaccgaaacgaaaggtatgttgaaagttatatgtgtattcgctcgcattcttcattttaacgagttgtgtttgatctaatttctgtaaatgagttattagaaaaccatgtgtgtggaaggtgatagtattaaatatcgttcttgaaaagcttttgaaatcttgcagcttcttctcctgaagttgcattccaaccaagcttgtcaccacttgcaataaggtcctttggtgttcctaaagaagatgacaagcccaattctgatgttaatccgtcttctcctgctagtattcttcctgctgtttcgtctgttactgctgcccaagaagatggagaagaggttcataattttgttacaagaactggggatgactacgttgaaccttgggtaactagaatcttcagatagaaaaagattttccctcccattttctcttatgttggtttatgtgacataaggtttggctcattttatgtgccaggattatagaaactcctactatcctactgttcttcctttgagaaagcctaactctggtgatataggtatgcttgttcccggctttgcaatagtctttacgccg

SEQ ID NO: 138330 - DNA, 493 bp, Arabidopsis thaliana landsberg
cagagatctattccttttagcttaatctgttatttagttatagtgtcttaatctttctagtatgaaatgttaattggtcttaacaagttttaacctttgggttgattttctgatatatatataggaaggatcctaactacaagagaacagtaatggcctgttttattcaagcagcttacttgcttgaactcgacagacaagagaatcgaaacgagcaaaacgctctcgcaccaaaatggtggattccattcaagtacaagttatcacaaacgctcattgacgagagagatggatcaatatttggtgctgttcttgaatgggacagagcagctgcaatggcagatttggttgtcatcagaccaagtggggcaccaaaagcagtacttgcgctgcgaggaacgatactaaagagtcttaccatgagacgtgacatagaagatgataaacgaaatttagcttgggagagccttaaaggttctgtaggttgatgtgc

SEQ ID NO: 138331 - DNA, 855 bp, Arabidopsis thaliana landsberg
aggaagaagaagatatctgggaggaggatgatggcaaggttaaaactgattcagtcaagaacgtggctcatgtgatgagaactcagcagagtgagaattcatctttaccatcatcaggtgaagcaaagaagtctacatcagaagctaggtccaataaagtgtcgaacactaaaaaagttggaagcagtggaaactctcttagagacaagctaatttctgaagcgcctgtgatgaattggggatcacagttgactaattgggaatcaactacggaagttcgagctaattaccggggtttagagatcgagagccactggggcagggtggatcaagatgctataattccagcagataaaatagcagaattgaatcttcaggcaaccgtgtatagagaagagagaacagagacacctccatgccgtgcttctctaaagaaaggtggtctttgccagagaagagatctcagagtctgtccgtttcacggacccattgtaccccgggatgatgaaggaaacaccataatccaggaatctccattagatgagagtgaaaaccaaacttcttcaacttcagggaccaaccaggatgtgtctatggatgaaacaacttcagattctgatcctaatcagttagctaggcaaatagcgaaacaggctctgaagaatatccgggagaaagacaaagaagtggtgaggaaaagagcaaagcttgttaaggttaaggttaaggaacacaatcatgaagttctgcgtggtgcggcaatagcctcaacttctagatcgaatgctatggatgatgagtttgatagagtttttgctgaaaagaaaaacaagaagcaaaccttttccacaaggc

SEQ ID NO: 138332 - DNA, 941 bp, Arabidopsis thaliana landsberg; identical to SEQ ID NO: 10388

SEQ ID NO: 138333 - DNA, 886 bp, Arabidopsis thaliana landsberg; identical to SEQ ID NO: 71519

SEQ ID NO: 138334 - DNA, 1395 bp, Arabidopsis thaliana landsberg; identical to SEQ ID NO: 68179

SEQ ID NO: 138335 - DNA, 856 bp, Arabidopsis thaliana landsberg; identical to SEQ ID NO: 54942

SEQ ID NO: 138336 - DNA, 257 bp, Arabidopsis thaliana landsberg
atcgagaattcaggtgcgattctatgtcaaatctctattttcaaggacatgcttgatcaggttctactcttctccttcttcttcttcactggtatggtttctaggacatgcttgatcaggttctactcttctccttcttcttcttcactggtatggtttctcgtctttagcttaatttgagctgtgatcgaatgacactgatcaatcgggaaatcgaagtaaaacacaagagatgcttacgaaacaggaactggata

SEQ ID NO: 138337 - DNA, 652 bp, Arabidopsis thaliana landsberg
gtatggaatcgaacaagaatacactttgttgcagaaggatgtgaactggcctcttggatggcccattggtggcttccctggccctcaggtacattccgtttttgcggagttttttcgtttgtttactgctctttttcgattctccgttcttggcttctgaattatctcttgcactcttgcagggaccatactactgcagtattggagctgacaaatcttttggaagagacattgttgatgctcactacaaagcctctttgtatgctggaatcaacatcagtgggatcaatggagaagtcatgccgggacaatgggagttccaagtcggcccatcggtcggtatctcagctgctgatgaaatatggatcgctcgttacattttggaggtataatttaaaaccattcacttttcgattcttgttgatctctttaaggaaatataaacttataacacaagttttggtggttttaaaaacagaggatcacagagattgctggtgtggttgtatcttttgacccaaaacctattcctggtgactggaatggagctggtgctcacaccaattacaggtaaaaagaatcatgaatcttttcgcttgttagatcattacaatgtttgtgagaacattcaagaaaatggtgaacgttttta

SEQ ID NO: 138338 - DNA, 2244 bp, Arabidopsis thaliana landsberg
tgtatctttaacatttgctacaggttgctatcaattatgaagatggccgtccagtggaggctaaaggtatcggccgaaagattcttgacaaagttcaggagacctatcaaagtgatttgggtgccaaatactttgcttatgatggcgagaagactctcttcactgttggcgctcttcccagcaacaaacttgacttctctgttgttcttgaagaaataccttctagcaggtgtgattatgacttcttttgattttttttttccctgtgaaatttctcgactgtttccttttcttcaaagtctaatatgctttgatatcctctttatctgcagaaatcacgctggaaatgatacaaatgatgctgatagaaaaagatcaaggcgtcccaaccaaactaagaaattcatggttgagataagttatgctgcaaagatccccatgcaggctattgcaagcgctcttcaagggaaggagacagagaatcttcaagacgctctgagagtgctggatattattttgcgccagagtgcagctaggcagtaagttaaatattctgggtatttgtatttcaaataaattctctgcttgatctttaatgtcatgttctcatatctgttcgcagaggttgcctccttgttcgccagtcctttttccacaatgacgtaaagaactttgtacctattggtggaggtgtcagtggttgcagagggttccattcaagtttcagaactactcagggaggcttatccctgaatattggtaattcttttccagatctaatgtgtattagattcttccttgacattcggctgctaaactttgatttttttgctttggcatttcttcagacacttcaactacgatgatagtacaacctggacctatagttgatttcctgcttgctaaccagaacaagaaagatccatacggaatggactggaacaaggtacatcattttcttttatgttgtactatttcactgatgtattaacatctctaagaagtattttatctgattttatctcatcaggctcgacgtgtcctcaagaatctgagagttcaaattactctttccaatagagaatacaagataagtggactaagtgaacacagctgcaaagatcaactgtatgtcaaatttctttgatcacaagtttatatgcttttgagtttattctaagatattggtctttgattgatagatttacatggaggaaacctaacgacaagggagaatttgaggaggttgagatcacagtgctcaattactataaagagcgtaacattgaagtgcgttattcaggtgacttcccttgcatcaatgttggtaagccgaagcgtcccacttacttccccattgaggtaaataaaatgaattgttgttttctgttttccacatatattaactagataatgtggcaacatgcgaatagcaaatcatcttatccaaaacttttaaaacaaaatttgacatcttcatttcgaattttgaaacgcggagttgataaacaaactttgcgggaacgaccagaaagagcgtttgaagacgctggtcaacgcgttttatacattaaaatttccaaaattcatcaacgtgttgaagcaagcttacacaactcagaagagctttgttagtaaaaaaaaggtgattcaagattcgtattcacagggaccgatcatcacaagagtgaccattgaccaataactttggttgaagttgagagtctacgcatgaaaaccgagctggacttagacgctcatggaactcgttgtgatcgttgttatggctgctagatatgttacactgcttcttccttctctgtacctcatccttgactttctgcaaatcacaaagacatatgtcacatagaaataaccgatgaaagggatgaatccttgtgcagtgcaaacacaaacgctataaatcttctaatttgcttaatgttcacttgcactagccaatggttcaattattatccaataacgccctcatttcaacagatacaactacaagagatacacagaaacactcacaaatacatcaagagatccatacttttgaattctctaattgcttaaccacattgttcggtgaatgcttaaacaacactttttcctgcatctaccctatgttgaatgaaactgctcctagattaccaatgaagtaaaacaagaaaagactctctcagcagctgtgactcgacagaatctcaaacaacaactgtgaagatttgacacattttc

SEQ ID NO: 138339 - DNA, 3179 bp, Arabidopsis thaliana landsberg
gtattttgattacatctatgtaaccgatgtcacagtgtgccaggtggatgacaataattatattgactagcatgactgcctatctgtatctatactcgcacggagatgtaaagttggctgcatctcaaccagtgtaatagatgcatcttctcttaaagttgtttcaaagagattttgattcattttttcataagagtgaccttttcggatgtttccaggtggttttgtatttctcagctgtgattattctgataatccctttcaatatcttctacatgtcgtctcgctactatttgctttggactttttggcgaatactcttccctgtgcatgtaaaggaatactattgtttttttttctattgaagattcacttacatcatctaactatcctttcgtgtatcacaaacaggcagtgactttttcagacttctttctagctgatatcctgacttcaatgtcaaaggtaacacaattgtttgtctttcctatatatatgtataatgcaattgttgaacaacaacaaatatattttgcaggttttgtcggatttagaacgttcagtatgtcgtatggtccatcgacaggtcagtaagttttcttcttctttacggttaaattatgcataacaaatgctcagtgtatctgataaattcgttgtaggtggctactgttgcatggtttgaagctgattcggtttgcgggagtcattctgctgcaattcccttggttcttgttctaccttatcttttccggctgttccaatgcattcgtcagtacaaagatagcaaggacattgcaaacatctacaatggtaataaccccaaatccaagagattcttttgtgtttggctttctgctagatttctaacatctctcccttgtctttgtttttcagctgggaagtatttaacagcggtgcctgtcatctttctctcagccctcaagtattatatcgatccagatacatggacttactccatacagccggcatggatcctctctggtctagctaacactttcttctccttcttttgggatatattacgcgattgggatctaaggtactgtgaatgtaaaacagattactccaatcttggattcagtgtgatatttagatttcttacctctttgttgcttgtagtgtcttcactcggattttcaaattcaccagaccaaatcttttctcccatctactatatggacgccgttgggtaatatatagtttcattttttcattaaatcttcaacgacagtagccaaatgtgtctgaacaatcttggattttgtggttttgcaggtatatgtttgggtaatcggaagcaatctggtactaaggtggacatggacatataagttatctgctcatctccgtaacaactacataacggtcttcatcatcactgccttggagatttacaggcgattccaatgggcgtttttccgtatagagaacgtgtggtataaaatcaacaatcccaagcatactgctcatcaatctaatcctctttcactccaacatgatatcgacagtgaacatgagaaattactcgcgcatagtcacagccccggtgtataaaaatctcaatgttcttgttgttttgtgctaagttctgaaaagttttgaataacaacacatacaaagtactctgttacttatactgtaacttgtaacttccattacagagagagagactacactggctctataatgtacatgaagatgtgtaattgtgtaatttctcttgtattaatattaacttcacctgttcttgtaagagataaactataaagcattaaaggaacttgctttaggtgcaactaaactggttttggacaagtgtagcaacatgaacattgtctggttttatagtggattaggtaaaaccaaaaaaagaaaagcttacttgatccaacatacatactaactctcaacagatacaaacacaagtttattatttaccaactcttatctcaaaagattcttctcaataatttatcctcctttgacccctatatagacacacatttgacaccatatgtcatgcacaaaacatcatcatctcttgatctatctttcagttctcttgtcaattttcccccaaaaagaaaaaggatataagaagataatggcatctagagaaatgctgatcataatctcggtcctcgctactacactcattggtttaacagtagctactgaccataccattggtggtcctagtggttggactgtaggagctagtcttcgaacttgggctgcaggacaaacatttgctgttggagacaatcttggtaagatatatcacatctctatcttaaactttgattcaaaaaaaaaaaaaagactaaaaaccaaaactctgtttttgcttgaaacagttttctcctaccctgctgcgttccacgacgtcgttgaagtcacaaaacccgaattcgatagctgtcaagcggttaaaccgcttataacgtttgctaatggaaactccttggttcctcttactactcctggaaaaaggttaatactacttccacatacaaatgaattaaagaccaaatgatgattggcaatatataaattcttgatccattttgtttaggtacttcatttgtggaatgccgggacattgtagccaagggatgaaacttgaagtaaacgttgttccaaccgcaaccgtagcaccaaccgcaccgcttccaaacaccgtcccatctctaaacgcgccttcaccttcttctgttctacctattcaacctcttttacctcttaaccctgtcccagttctctctccatcttcttctactccacttccttcctcctctctgcctctcattcctccactttctccggcactatctccggctactgcagcggggacttctctgccgttattcccaggctcaccaggtagctctagcagcacaacatccaccaaaaccgtcgggaccttcccttctagtactaccggtacaacggccgatcttgctggcgcagactctcctccggctgactcctcctctgccgcgaaaacacttgttttaggatttggattcatggttgctatgatgcttcatttgttctaagtgttctttttttaagtggagagaaatttgtttgtagagggaaatgttgtttgtgtttacttgggtgctttcttgtgaaatttaccactatctccg

SEQ ID NO: 138340 - DNA, 991 bp, Arabidopsis thaliana landsberg; identical to SEQ ID NO: 17005

SEQ ID NO: 138341 - DNA, 544 bp, Arabidopsis thaliana landsberg
gatgaggaagtcaaatcacgccctattccacaatcaagatttcatcgagctctcagtaagtagcaataaaagtaagttaaaagaaggtcttgttccttttcttgataatgctgctcagaaaaacattatcatagaattacaagatgtgttccagagattcatgtttgatacttcttcaattttgatgactggttacgatccaatgtcactatccatcgaaatgctggaagttgagttcggtgaagctgcggatattggcgaagaagcaatctattatagacatttcaaaccggtgatcttgtggaggcttcaaaactggattggtattgggcttgagaggaagatgagaacagctttggccactgtcaatcgtatgtttgcgaagatcatatcttcaagaagaaaagaggagataagtcgcgccaaaacggagccatattccaaggacgcgttgacgtattatatgaatgtggacacgagcaaatataagctcttgaaacctaataaagataagtttataagagatgttatttttagtctagtg

SEQ ID NO: 138342 - DNA, 3229 bp, Arabidopsis thaliana landsberg; identical to SEQ ID NO: 37639
  unsure (1)..(3229): unsure at all n locations

SEQ ID NO: 138343 - DNA, 1435 bp, Arabidopsis thaliana landsberg; identical to SEQ ID NO: 62607

SEQ ID NO: 138344 - DNA, 739 bp, Arabidopsis thaliana landsberg
gaaaagaagtgacgaagaaagaatgagaagacgaagaaagagaaaacaagatccgattcaaaatatggaaacttgaatatcttcttcttcttcttccttctcctttctcatctctcactttgagggtgaatttggattttgtagaaaatggattcgaaggagatggttgtggaagaaatcatgagaattcatagatctctaccattgagaccagatatcgaagatgtagagacggcaacttctctgatacaaaacgttgaaaaagaagatcggaatcgtttagaagccattgataaacttgttaaaacctcttcttctgaggttcctttagagcttttcaatgtgttgaaggagatgaagaaaagtcttgttcgtttccagagcacagaacagacaagagaagctacgaaaatactcgatctggaatctgtacacgttgtgttcgacgaattgattcagagagcttctttttgcattgtttctcccaacgccaccaccgctttgcctcgatctgtatcggtaccggcaccggtagtatcttctgatgagattcctttcaagtcacaggaaattatctcgcgtgacgatacgtttgtaaagaaagctaaatcttcgttttatagtgatgggttgtaagctcctagtaagccccaggttctggattcaacacttcatcaggctaagaacgttgcaggtgagtttcatttgaaatgccttttaccttaggatctgaagtttt

SEQ ID NO: 138345 - DNA, 1948 bp, Arabidopsis thaliana landsberg; identical to SEQ ID NO: 5888

SEQ ID NO: 138346 - DNA, 510 bp, Arabidopsis thaliana landsberg; identical to SEQ ID NO: 20600

SEQ ID NO: 138347 - DNA, 637 bp, Arabidopsis thaliana landsberg
  unsure (1)..(637): unsure at all n locations
tcttttggtatcaaatgcgctggttgttcagcgacagatggcatctgtgtggctgtgctgggaattggtttggaaaaggaagagaggcttataatggggatttggaatgctcatacttctgttgggaacatttgtggttctttaattgctgctggtgttcttgaatatggttggggatggtcttttatagctcctggttttgtcatgtctttaggaggagttcttgtttatttgttcttggctgcgtatcctgaggatgttnnnnnnnnnnnnnnnnnnnnnnnnnnnnnnnngtttattaagaggaagagagatgttgaagaggaagaagaggaagtagaagaagatttagggacagatgttgaaggggatggggagggatcatcagggtcaggttcagggtatgagaataaaagaagtgttggacttttgcaagcttgtatgatccctggtgttataccgtttgcgttgtgtctctttttctcgaagctggtcgcgtacacgttcttgtactggttaccgttttacttgagccaaacaagtaagttttgattgtcattttctgctagtaaaaccagatttagaccatgttcttacttgctcttatttgcagctattggtggagagtacgtgtctg

SEQ ID NO: 138348 - DNA, 1936 bp, Arabidopsis thaliana landsberg; identical to SEQ ID NO: 35759

SEQ ID NO: 138349 - DNA, 672 bp, Arabidopsis thaliana landsberg
tagaaaaatccctaaatctcaacaaaaccctaatttcaaggaagacgaagaaagaatgagttacagagtcgctaaagcatcgcagtatcttgcgatcaccggtggtgggatcacagacatcaagcttgcaaagaagtcttgggtgtttccatggcagtcttgcaccgtcttcgacgtttctccggtgaactacacgttcgaggttcaagctatgagttccgagaaacttccctttgttattcctgctgttttcacaatcggtcctcgcgttgatgatcctcacgctctcttgttgtatgccatgcttatgtctcaacacgataagcactcgaatcacgtcaatgagcttgttcagggtgttatcgaaggagagactcgtgttcttgttgcttccatgactatggaagaggtcttcaaaggtaaccaaacataccctttttgattatcttctttatttctgagttctgttttaatataattgtttgaactgtgtttgaattgtggaattgtaggaacaaaggagtttaagaaggaagtgtttgacaaggttcagctagagctaaaccagtttggtcttgtgatctacaacgccaatgtgaagcagcttgttgatgtgcctggacatgagtacttctcttacttgggccagaaggctcatatgaaacaacaaac

SEQ ID NO: 138350 - DNA, 542 bp, Arabidopsis thaliana landsberg; identical to SEQ ID NO: 65557

SEQ ID NO: 138351 - DNA, 1080 bp, Arabidopsis thaliana landsberg; identical to SEQ ID NO: 62548

SEQ ID NO: 138352 - DNA, 994 bp, Arabidopsis thaliana landsberg
attcttcacggtgttggtttatcagacgacggatttgctaaaaccccagattggtatctcgtcggtttggtatgaagggaacacttgtaacatgcatttgctgaaattgtctgaggctgtgaaagaaggagttgaaaatgcaggaatggttgggtttaggtttaatactattggtgtgagtgatgctatttcgatgggaacgagagggatgtgttttagtttgcaatctagggatttgattgctgatagtattgagactgttatgagtgctcagtggtatgatggtaacatatctattcccggttgtgataaaaatgtgagttttttttttttaatcatcgatctttgtgttgtctttatctccatgttttatgtgatttgtttgctataatgttattgttgtaatatttttagatgcctggaactattatggctatgggaaggcttaacagaccagggattatggtttatggtggaaccattaaggtacttacttttatcaaattgatgagaagatagtttcttaaaccctaaacccttgtgcctagttggatagcctattcaccttgctttgatattattgcagcctggccattttcaagacaagacatatgacattgtatctgctttccaggtatcttttcttctatctgctacgagcttggttataacaattttaatgtgtatttatgagacttcattgagttttccaattttgggattgagttacagaaatcttggtgactttggtgtcaaattgtaccagtacttgtgggattcatcatgttttccaattttgtatttcagagttatggagaatttgttagtggctccataagtgatgaacagagaaagactgtcctccatcattcatgtcctggagctggagcctgtggtggcatgtacacagcgaatacaatggcttctgctatcgaagcaatgggaatgtcccttccttacaggtgaggctttcagtcctgaagaccacatttat

SEQ ID NO: 138353 - DNA, 757 bp, Arabidopsis thaliana landsberg; identical to SEQ ID NO: 48150

SEQ ID NO: 138354 - DNA, 1095 bp, Arabidopsis thaliana landsberg
acaaaagcatgtggattatctttaagcctttgacacttagtctttggctaacaattgcaagtttctttatcttgacgggggctatagtttggttgatagagcggcatgataacgctgacttccaaggctcttgtttccaacagattggaacattgctatgttttgggttctcgacccttgtctttgcccatcgtaagtacgagaagatcgaattagccttcttgattttatctattacaagaactctctgaccattttttttgctttgatattgttgatatataggggagaggctgcaacataatatgtcaagatttgtagttattgtttggatatttgcagtgcttatattgacttcaaattacactgcaacgttgacatcagtgatgacggttcaacagatacgcgggttgaaatcaaacgaaaacattggcttcttttctgcctctattgcagcaaatgtggttaatgataatcctacgttccaaggaccgagatacaagggattaaagacagctgacgattttacaaatgctttaaggaatggaactatctcgtttatcgtcgatgaagttccatatgtaaagctctttgttgcaaagcacccttcagaattcgtcattgtcgaaaccgaaagcgtaaccaacggctttggatttgtaaagcttttacccccaaaacattcgtctattattacattattggtatgcacacttatttgacttaatccatctctctctctcaggctttccagaaaggttctcctttggttcacaggtgtcaagagaaatcgcaaagctaaggagaacagagaagctaaaagccatagagaattggtggttccagagacaaacgacgtcagccacaagcgaggatacgttccatcctctcactgtatacacatttcgcggtttgtttatgatcacaggagtttcttctgcgtatgctctcatcgtctatctaatcccctggaacgagaaacaaaggcaagttgtgcttaaacatttccaccgttatgttagtcatcgatttgcaagagaaattcgtccttctcccaccacaccaaacaggcaaaatgagaattcagtcatctga

SEQ ID NO: 138355 - DNA, 2689 bp, Arabidopsis thaliana landsberg
gctctaacaaagtttctaacgtttgtttcttactgtgcagtgaaaacaaatccattggcggatataggagttgacttcgaggcaatcaacaggaaagagaaacggctagagaaaccaactatcacacaacaacaagtaacatcaactatcaacatggggaaagccatgggatctggtactggcttaggtcgcgctggtgcaggtgctatgagacctccaacaaattcaatggtaggctcaagcatgcccacgggcatgaatgttggtggctatggaggcatgaaccaacaccaacccataggcatgaaccaaaaccatcccatgggcatgaaccaaaacctttccatgggaatgaaccagaactatcccatgggaatgaaccaaaactatccaatgggaatgggcatgaacatgaacatgggcgggtatggacaagggtatccgatgcaaccacaacaaggaatgggcatggctcctcctggtgcaccacaaggcatgaccggtgcctataatccaatgatgggtcaaggcggttacaaccctcagcagcagcaaccttatggtggaggttaccggtaagattcgagccaatcacggttacccattttacttatcatggtaaaaagagaaaacatcaaagaacagaacacaatcagtttgacttggatttgtaaattttatggtcggttcaggtaagttggggtttggtcagtcatattattggattaatacctcagcttcatcagttattttgctttttctttacaaaaaataattctcgaccaaattgagttttgttaggaattttgtaacgggtaaagagagagacagagaggcacaaccttcactcggggtttgctatatacatatgtattttgatattatacgtctttttgtaatacattgtccacttcacgtaacaaataacaataaaagaattatgtcaatgtatataggttttggtaacgtgaagtatataaatcacggaaaagtcaaaagaaaactgcaaaatatctgaaaagaaacgaataaacggtggaatgatgactttttttttttggtaacaaaaactaaattgtaaaaaacataccacgtaatgcacgtattaccgattgaagtgaatagtcctcggaagaattttcattccgtataccaatgtctgaaaaagaagaaaaactaaacaagtactaaactgatgcaactcacacaagtcataattgtgtgaattttcatttaggttcactaaaccagagtttataccaaacaaaaccgtactaaactgatgtaactcacacaagtcacaattggtcgtcaagagttttttcatgagcattaaataaaagaatcaaaagaatatccatatatccatcattttaattcattacaattcattttttttcagatagaaaaaaggataacgaaaatttcacaaaagcataacgaaaaataccaaccacaccaacctttcccatgatgtaaaaagaaagaaaaaaaaattcagtattgccatgacgacaaaaaaaggacaaaaacaaaaaaaataaaaacaataaagaaagctgaaagtttctgaagtctctctgcaacatttaatagatgcgacagtaaacataagaacaccaaacaaaaacgtgatcagcgacggcaacgaagacggcgaagaatacggcggacacgaggattcccaacgatcagattctttgacattccacggcggcttagatatcagcttctccgatccgctctctctgtttgtgtaaatcatggtgatcgcggctgcttcctctttttccctcggtacttcgccattcttcgagatctctcttcattttgtttcatatgtattgttcattgactaatctgaagttagtgcatggctgacagagacgaattaaaattaacttctttttttcattaatggcgaaagcatttgggagattctttttggttgacttgttttgatatttaatcgaattggtttgtttagctcgatcgaaatttgttttttggttcgtgggttatctctgtcgtcgaattgttttcttcaatctttatgctttttggcgtttagcctgaaattagtttcatttttctctgctttgaatctaaacgagacctcagacaattatttctgtgtcaagttttgttttttttttaattattttttgtttttttaggaattaaatgctaatgtcattgttagagatctttaaatctgatattagtaattctaaaggtctctccttttgcttcttcttccctgaaaagttcaatttttgtttttttttgtttttctgttaaaatttgggagcagtgaacaatcttggtatgtatttatcaggtccatctcattgccatcaatcttacacggatgagttctcttcctccataccttacaaaagaaccagcaatgcaagaaatcgtgtgtttgatggatgtggctctgctaatctctctgttttaaggtatttgtcaataatgaagaaacgtgtgtccattgttttgattttggagtgaatttgattgaagtgtaaatcttatcatctttgtgattgtcatgtaatgtgttttcctctattcagttccagatgcaagattcctttttttggatcagcatttcatgtatcatccggtggacatgatctcggcctcacgaaagtttcggttgctgctgattattctgattcgg

SEQ ID NO: 138356 - DNA, 3198 bp, Arabidopsis thaliana landsberg
gttcatgaatgcaataatactcatcttgtatttccaacccagaaccttggtccgccttttgggatgacgcattgacggactaggtaagcgtttgattcatgagtttagtgccatcaaaagcctcaaaacctttatctttggtcagtccctcattgtgtatatctctgcatctttccgattatgttcttcatgtggtactcttgttcccttgtttatgtgtggacctgaccaatctgtttttaatttggctagattcgacgaaaaagcttgagcttgattggcccaagcggtttgaaatcattcaaggtattgcttgcggacttctttatcttcaccgcgactcatgtcttagggttgtacaccgagatatgaaggtcagcaacatccttttagacgaggaaatgaacccaaaaatatcagattttggattggctcggatgtttcaaggaacccaacatcaagccaacactcgcagggttgttggaacgctgtatgtatctctgcctcctctatagatagataacaagcgtttacttgtttaaataatcaacctgaggaatttttgtcaaaatgaacagcggatacatgtctccagagtatgcttggacaggcatgttctctgagaaatccgacatctacgcatttggagttctgctattggaaatcataaccggcaagaggatttcaagtttcaccattggagaggaaggcaaaactcttcttgaatttgtaagccaatgccctctatatcttccttgaatgtgagtataaatcaaaatgtttctaataggactgtgttcatcgaatttgaaggcatgggattcttggtgcgaaatcggtggatcggatttactggatcaagatatctctagctcgggttctgaatccgaagtagcgagatgtgttcagattggtttgctctgtattcaacaacaagccggggatagacccaacattgcacaagtaatgtcaatgcttacaaccacaatggatcttccgaaaccaaaacaacccgtattcgcaatgcaagtccaagagagtgattcagagtctaagactatgtactctgtcaataatataacacaaactgctatagttggtcgataaaagcaatgatcacacatgtctacaaaagaatctcattgtaaattttagaggttttaatattcaaaaaaaggtgaccttggttattgtaaaacaacaaaacaaaaaccatttaatcccttatgcacgagggatagagacagagatattacttcaacagtacggcacaaatctccaaaggcacgacgaatatttgtgttatttgagttttgacttaatcttcccaagccaatacaaatcgagagtgtggcttgtttctcacggcctttgaattcttttttatctctaaagttgttgtctgtcttttatcatcaattgtgtgttgttgacattgtttctcagccaaagtttgagactttggatcgaatcacttatgcccagatgatctcagcatgattaatcacaatttctttttaaaaaattgtttagtcttgcactatttaaggtttgaccgcttctacaataagatatgcactgaatgtgttcgacgaaatgactgagtgagatttaactttcaaatattttgacttcgtgcggtttcttttttcaacagatttaccaaagagacatgttgaagcgactcgagaaagtaggtacattgaattgctcttaattgagagaactgtaagtaaactaaaatttgtgtactgtgttattattattaagctggcttatctaatagtggttttgtcattatatcactcttaggagattattcgagaaatggaaagcttatgtaacatccaggtaaattctgcaaatgggtcctgtttaattgtgttaatctctttcatggaatggaaggtgacaagtgtgaaagcttaaaagtatttttcagaggttggagaaaaagttgacttctttttagacttaatgcaattggaatgtttcaatgttttattgtttattctgtttaatattagaaaggaacatattgcattactgtaccagagagagagctgaactttgaataagtcaagttttgtgaacaaaagcttggtcaacttattaggtgtcttaagtagaagcagaccccatgaatttttatgtatatacatgaaacttgaggaagattgttctctcaattctttgagttcaccaaaataacgttttttttttgtcaacatgcgtattgttgcatgcttgctcttgataacagccttattctcaagctatggctatgcagctattaccacgtcaagtcctttgtcgataggggtaactttgagctctcctggtggatcatatgagcttggtttcttcagttctaacaactctgggaatcagtatgttggaatctggttcaagaaagtcactcctcgggttattgtttgggtggctaacagagaaaagccagtctctagtactatggcgaatctcacaatcagcagcaatggaagtcttatcttgcttgatagcaaaaaagatctggtgtggtcatctggaggagatcccacatctaacaagtgtcgtgctgagcttttagacaccggaaatcttgtcgtcgtagataatgttactggaaattatttgtggcaaagttttgagcatcttggtgatacaatgctacctcttacatctctcatgtacgatattcctaacaacaagaaacgtgtgctgacttcttggaagagtgagaccgatccatcgcctggggagtttgtagctgagattacaccacaagtaccctcgcaaggccttataaggaaaggctcgtcaccttattggagaagcggtccatgggcgggaacaaggttcactgggataccagaaatggatgcatcgtatgtgaatccattgggaatggtccaagatgaagtcaacggcacaggagttttcgctttttgtgttctgagaaatttcaatttgtcatacatcaagctaacgccagaaggatcattgaggattacacggaataatggaaccgactggatcaagcactttgagggtccgctaacctcgtgtgatctatatggtagatgtggaccttttggcttgtgtgtgagatccggtactccaatgtgccaatgcttaaaagggttcgaaccaaaatcagatgaggagtggagaagtgggaattggagtcgtggatgt

SEQ ID NO: 138357 - DNA, 4774 bp, Arabidopsis thaliana landsberg
atctagccaatatgaaggttctgggtcgacttctattcctggtgcatcggttgcgtcaatgttcgaatccatggccgttacgggatctacgatcacgcaggtcgaacttgacagctcgatacttggtttcgctatactttcgacaagaattgttcgtctcaggtcaggattcgtgttcgaggctagggcggctaaagcgtctgctgtagagttgtcatttcagggaattttgaccagcgcgaactggtcgaattgtttagacagaccgtggactaatgaaagattagctcgcattctttcatttttggcttcaaactctccgctgaactggctaactacgagctgagagtcactgaaggctttgatgtgcctggctccaagacgtttcgcaaggcaaagtcctaccagaagtgcttcgtactctacttcgttgttcgatgctttgaattggactcgaagtgactgttctaggatctccccggttggtgattggagtaaaattccgagatcgaaaccttgtaatgatgattagccatctgcgtaaagtatccaattctcgtctaggacctcgtcgatcacatccggatatagctcggtcataatatctcataggacctgcgacttgaggctagagcgatatcggtactccacggcgtactcgcttagctcgatggcccatatcgagattcgcctggattgattcggactgagaagtgctgattgcagtggttgatcggcgaaaaccactatggtatgcgactggaagctaggccaaagctttcgagcggacggtattactaccaatgttagcttatccaaggtcggatatctagtctcggcgtcattcagggccttactggtgtaaaagataggtttctcattcccacggtcatatctcaccaataccccactcaccgccaaacttgacagcgagacttagagatatagggtttctccgacttcgggtttggctaagatcgccccactcatgaggtaggatttgagctcttggaaagcggattcacacttatcgtccaaatgaaaatccttgttgccacgtagaagtttgtagaagggaagacatatatccatcgagcgggcgatgaagcgatttaaggctgcgatacgacctgtcaacctctgtacctccctcttgttctgaggggatggcaatccgattattgcatcgatctgctttgggttagcttcgattcctcgttcggtgactatgtatcctaagaattcgcctgatgtcactccgaacgtgcacttagtaggatttagcttcatccggtacttgttgaggatatcgaagcacgcggtgaggtgcttgatatgatcttcggctcgtaaagatttcaccagcatatcgacgatgtagacttccatcgtgaccccaagcagtttggcgaacatctcgttgactagtcgttggtaagtcgccccaacgttctttcaccaaagggcatgactatgtagcaatatattccgcgatccgtgatgaaggccgtcttttcacagtcgtctttatgcatcaggatctgattgaatcccgagaaggcgtccatgaaggacaaaagctgatttcctcgtgtcgcctcgactaggcgatctatgtgtggcagtggataactgtctttagggcaagccctgtttaggtcggtgtaatccacgcagactctccacttaccattcttctttttgaccacgactgggttggccagccattctggatattgtacttctttaatcaggccggcttttaggagccgctcgacctcgtcttggacggctttggcgcggtctgaccccagccgccttcgcttttggcgaactggtttgaaggttggatccgtattgagcttatgacaggttacctccggggcgattcctgtcatatccttcgtagaccaagcaaaagatgacgacctcgatttcaggaaggcgatcagctcttcctttatctctccttctagctcgcttccgataccgaccgtccgagatggatccgactcgtcgatgttgacctggataatcctgcaacttggcgccttcattgattcgcgagctggtcgctccgacggcgcagctcgctcttcgtcctttaattgctatatccttctttcgctgcttcttctcgatcacgtaacacttctcgtttgttctggggggacggtagtccgattattgcatcgatctgctttgggttggcttcaattcctcgttcggtgactatgtatcccaagaattctcctgacgttactccgaaagtgcacttcgtgggattcagcttcatctggtacttgtctagaatatcgaaacacgcggtaaggtgtttgatatgatctgtcgcctgtagagactttaccaacatgtcatcaatgtaaacctccattgtgactcctagtagttcggcgaacatttcgttcactaaacgttgataggtcgcccccgcattctttaaaccaaacggcatcactatgtagcaatacgtcccgcgatcagtgatgaaagccgttttctcacaatcgtccttgtgcatcaagatttaattgtaccccgagaaggcatccatgaaagataaaagctgatttccagacgttgcctcgactaggcgaactggtttgaaggttggatccgtattgagcttatgacaggttacctccggggcgattcctgtcatatccttcgtagaccaagcaaaagatgacgacctcgatttcaggaaggcgatcagctcttcctttatctctccttctagctcgcatccgataccgaccgtccgagatggatccgactcgtcgatgttgacctggataattgttataggaaaactgaagtcaagctatagcgttcaggggttaagctggcgagctggaaatgtgaagtcagggatgttaagcaaagcacgtgttgtgagctggcgagctggaaatgtgaagtcagggatgttaagcaaagcacgtgtgttgtgagctggcgagctggcaatccaaatggacgttatcggcgatcgttattaacgtggttaacgtttactttctttacctttttgtataagagcaacatgttatgctcatgctttcattatcgaataatctggttgtaatctctctctagagacttctagatttccctcatcgttttaccggagctctcgtcgagtctcttgtaggtgagaagttgatatcgcgtctctttacgaacgttgtatcaagtgtgttaatcggagtactctattttcatctctctgttctattgatttcaaactctgtttattcatttctggtttacgttaacaataatcctgcaacttggcgccttcattgattcgcgagctggtcgctccgacggcgcagctcgctcttcgtcctttaattgctatatccttctttcgctgcttcttctcgatcacgtaacatgtccgtgagacctaagatggtgagagaagcagagttgcatgctcagaaagacaaagaaaagaattgatcgacaccaagaacacagctgacacaacaatttacagcatagagaagagtcttggtgaatacagagagaagatcccaagtgaaatcgccaaggagattgaagatgctgtggcagatctaaggagcgcttcctctggggatgatctcaacgagatcaaggccaagattgaggcggcaaacaaagctgtttctaagattggggagcacatgtctggtggttctggtggaggctctgcaccaggaggaggatctgagggaggcagtgatcaagctccagaggcagagtacgaggaagtgaaaaagtgaggagatttggtaaattcttgccacttgggttttaagagattaggtttagatcatggtgggttctatgtccaaggaacttttgccttttagaacaacgagcagtggatatgtttctggaataagcttttgtcagggaactaaacttaatgtttttttgctaaaaaacctttgttatgtaatgtgatggttaaagagaagaagttttcaaaattttgtcactttatactttatagtttattttcattggattggatattatctttctttaagcttataagttttcaaagaagcggtcacaaaactagcccgagaagaagctaccacaaaactagcgatgtaagaaccaacgacgacacagctggctagctcattgtttggttcttattctttggaacccaccaccacgccaaaacttatacggaacaactacaaccactacagtggttccgaagtttttatcacttgacttgtttgtagcactcaccggagagacccgctaaaggagccagaggtttcaataatctcattgtgaaacgtgcggataactttcgttggggaatttgtaatttacgcaattaccctctaatttattttaatttttatgaaataattagggctgatttaatcgagatcccatttcttttgttggcttacttctctcgaatttacgcaggaagatcattagcagagaattctcatctgattcagtccatggctgccacggctcttttccgatcgattcgccgacgcgacgtcgtctccgcgcctctttccgtttacaaatccgtatgtttttcactctcgttgattgcgtctttttggtggtattattgatagatcgagaaattttttgtgattcgtttagtttcgtctttcgacttcatgatttacccatctgagctctgcttcgcttcgccggaaattttcaggaaatgatatatatatccatttgcggattttggtgtgttatgtgtttaatc

SEQ ID NO: 138358 - DNA, 565 bp, Arabidopsis thaliana landsberg
atgtaccacattcatggagtcttacacgtgtcatccatacctctctgtcttcttcttcttctgttcttcattcctttttcctacttcgtcgattttccatttcaatttcttcttcagccggcgattaagcttcccaataagacaatctccgaccgccgcaacatcacgaaggattcttcaccgtgtgaactttacgcagtctttcctctttcgtagacgctaaagaagttgaaattgatctgatctcgtttaggtaaaaactttttctttcttcatctatagaatcaatcgttcacctaaattctgattcttatatatccaagatcttaattgcagcagatctaccttcgattcgattcttctccttcctgatatcgcttcattgttcaaattcggcacaaaatggtacggatcaccattttcttatctttcaattagcattaatcgcatttcatttttgtactaatgaaattagattagatcttcgatgagattttttttatttattgagcttgtttcactttgatttggttccatggagtatttaactctgcgatgctcattt

SEQ ID NO: 138359 - DNA, 693 bp, Arabidopsis thaliana landsberg
cctcagcggtagccttagctcttctggctacggcggagaaccgtcggatcaatctgatatcggcggtgcgaagatgaaagggcttttcaagtctaagccacgcactcctgctgaccttgttcgacaaacccgcgatctccttctcttctccgatcgatctacctctttgcctgacctccgagattccaaacgcgacgaaaaggttccatttttatttatattctccaataaaagatgattctttcaatgtgtgcaaattcttccatgaattgttgaattcttcttggtgtttggttttggtatcttcattgcaataatgtcatttctctctatgccatttgtgctccaattgaattaatggtatgtggttgcagatggcggaattaagccggaatatccgtgacatgaagtcgattctctacgggaacagcgaagcagagcctgtggcagaagcttgtgcacagttgactcaagaattctttaaagaggatactctacgtctcttgattacttgtctccctaaacttaacttggaggtaacatttctccgtataggaaagacatcatttttgagatacattggatgattgaatagcgaacaatctgtccccttttttattagacgaggaaggatgctacaaaagttgtagcaaatctacagaggcaacaggttaattcacggttggttgtttc

SEQ ID NO: 138360 - DNA, 415 bp, Arabidopsis thaliana landsberg; identical to SEQ ID NO: 43729
  unsure (1)..(415): unsure at all n locations

SEQ ID NO: 138361 - DNA, 903 bp, Arabidopsis thaliana landsberg
aaccagattcggacatctcgtcgaaaatggcgtgctcaattggtaacgctttcaggtgttcttctgatacgctgcgttttgctccccgacaacaatgcagcagccgcctaaaccctaatccttcctctttcctctcctttaattcctccccaattctcgcacaggtatcgagtatatatatatatttattctaatgtccaaagcacacttttccagtaacgccttttgcatattcaaactgaattttgattttcaaattctggattattttaaagaatttgggtgcttcttcttcgtcactttcccgacggactatacgagctagaacaaaaatggctgcgtcggaggcttccattaacgggagcaacaggatgctggtaataaaactctaggatttcaattttcagatttttttgagtttgatttgaaagtgaaagatgtgaatttgattctggtgtttcaggtctttgtgccaccacatcctttgatcaaacactggatctctgttctgagaaatgaacaaactccttgtcctgttttcagtgagtagataagattcttatgagtatttctgcgatttaaccagtgtttgttgttaaagaactgaattttacatccattttttttttttttttttttgattcgttggacaatctttagctcttagattggtgttatctgctacattgcgtttgaatatgagtttttttaggtttgctactagtataagtctgtgttgatctttaaagcttgagtttttttaattatctagggaatgcaatagctgaactagggagattactcatgtatgaagcatcacgagagtggctggtgcgtagaatttcacatctctattattcttgaattcttcctacccgttttttgcttattgttttttgtttt

SEQ ID NO: 138362 - DNA, 706 bp, Arabidopsis thaliana landsberg
ttcagccaaggaaatctctgcaacaactgcaagcgacctggtcactttgcaagagactgttctaatgtttccgtctgtaacaactgtggtcttccagggtatatatgtcctccctaaattgattcgtgaatttcctctgtttatatgcttttgagttatgtttttaaactctctctgcaggcacattgcagcagaatgcactgcggaatcacgttgttggaactgtagagaaccgggccacgtagcctcaaactgttcaaacgaaggaatctgccactcctgtggtaaatctggacatcgagccagagactgctctaattcggattctcgtgcaggagacttaagactctgcaacaactgcttcaaacagggacatcttgccgctgactgcacaaatgacaaggcgtgcaagaactgcaggacttcaggtcacatagctcgcgattgcaggaacgatccagtttgtaacatctgcagtatctcggggcatgttgctagacactgcccaaaaggtgacagcaattactctgacagaggaagcagggttcgagatggtggtatgcaaagaggtggtttgagcagaatgagcagagacagagaaggcgttagtgctatgataatatgtcacaattgtggtggccgaggacacagggcgtacgagtgtccgtctgctcgagtcgctgaccgtggattccgccggtactga

SEQ ID NO: 138363 - DNA, 507 bp, Arabidopsis thaliana landsberg
actcgacgctgaaagcgaatatcttgttcaggtaataaaacataactttggaatcaaaactcatatgactcaaaaacatagaaaaaatcttactcctatcctaattttctgaatctgtttgcaggatgcgatggactcgttaatggcgggaagaacggtgttggtgatagctcataggttatcgacggtcaagactgcagactgtgtggcggttatatcagatggtgaggtggctgagaaaggcactcatgatgagcttctcagccttaatggaatctacacaaatcttgtcaagaggcagcttcagagttcttcctctgttaccaccttgtgagataatatcattcttctgactacaacaacaaaaagaagaaatcatcattccattcgaagactaaatttgtataatttgagtttgaaccctttcaatgcactagagagttctctgacataaaattgtaatgagacatttcaattcagttatctaataaaaataaatatgagcca

SEQ ID NO: 138364 - DNA, 366 bp, Arabidopsis thaliana landsberg
tccaaagtccaaacacagcataaaagtagctctattgactttttttcttcctccaaactctttttacgtcaagcaatggaggatcttgatccaacctacatccaagcaccagagcatagatcagattcgaatttcatccctaaccaaccagaagaaatacccgtgattgatctctcgcgcctcgatgaccccgaagatgtccaaaacgttatctcagagatcggtgatgcttgtgaaaaatggggattttttcaggtgcttaatcatggtgtgccttctgacgcaaggcaacgtgtggagaagactgtgaagatgtttttcgatttgcctatggaagagaagataaaggtgaagagagacgatgtg

SEQ ID NO: 138365 - DNA, 333 bp, Arabidopsis thaliana landsberg
ttctcaacttttatgatatgtttgtgtaactgtaacatactggcataatcttagaacatgaattataattaataggctagtcttgttgtaatgcattggcaaaaccacaccttttatatttatattgatcagaatcggagattttaagcatcaatttacattctttggaaggaaagaaactcaagattgcataatgcttcatcaagaccagcctctgctttaatactttaaatcatgaacttcattcggtgtcgccttgacccgctatcgagagaccaacgaattgtgcctccaaacgtctcctatctagctacttagtttggagtgttccaa

SEQ ID NO: 138366 - DNA, 1021 bp, Arabidopsis thaliana landsberg; identical to SEQ ID NO: 27857

SEQ ID NO: 138367 - DNA, 277 bp, Arabidopsis thaliana landsberg
taacaccctacgaaggtgttcataatcatccttgtgagaagctcatggagactcttagccctctccttatgcaacttcagttcctctcaagagtttctgatctgtaattattgaatgttaattagtggtgtaatacattaattatgctttaatctctccattgaccctcaatctccaaagagacaaatgtatagaataaatctcataacatacatgctttaggtttattgagacattgatctatgtttgctttaatttgattcgtctaattgtccct

SEQ ID NO: 138368 - DNA, 819 bp, Arabidopsis thaliana landsberg
aaaacagcaaaaattgaagtctactcgtcgtagtagtcgtcgtcttccactaattccgtggtttttttatcgaagacttttgaataaagtacatttgcagagtctgtcaataaccctttcttcacggtattgctctcaagccgcgtactggtaggctccaaaattatcccttctttatggtttttggaacctgggttctccgattttgaggtaatccttatgtgggttctttctgatttcgtgttttgttttattaaaaggacttctatgtttttttgggggtttatgaaaagttcggtttttgcaggttgttgaaatctttgagtagatttttgtggaacatctgactctcatggcgaagttatgttgcttcggttcttcagactacgatgtatgtaatctcaaatcttgtcttttttttcttttctcttgggccaataagtggttaagatggtactatgtcttgttgagtttaagagatgtcttaaacattttgtgtctaatgttgaacaattatgagatatgaatttgtctttgttggttggtgtagcttgtggttgggagggcatcgactagttctggaaaagggagaaataacgacggcgagattaaattcggttacagcttagtgaaagggaaagctaatcatccaatggaggattatcatgtgtctaaattcgtgaaaatagacggtaacgagctcggtttgtttgcaatctacgatggtcatttgggtgaacgtgttcctgacatatctacagaagcatttgttctccaatatcctcaaagaggtgtgtagaaattttcactattatatag

SEQ ID NO: 138369 - DNA, 1229 bp, Arabidopsis thaliana landsberg; identical to SEQ ID NO: 26122

SEQ ID NO: 138370 - DNA, 3313 bp, Arabidopsis thaliana landsberg
atcgtttcgagaatgcagaaaagaagaacgtcttagaaagtctctgagaccgaggaaccatcgtgttagagttggtgtgaggaaagaccatcgttctgactcgggtttgagccaacatgctgatggtggtagtccgatacatggtgttagagtgagtagagagtctaagttcgcacggaaggtttcaaaacgcagaaatcgagttcaccatggtgatagaatgaaccatgtcagtcttcttaattaatacatcacaatggaggaattacctgcaactgtcaatgatctcctctaagctttataattcctcttcttgaaagttgaccagctgcatgggtcaatttttataaaccaatctctctgtgtttttggaccttttcattatgtttaattcttgcttcttcggtttaataagtattgtaatcaaaataataccaaatatttagttttgttatgacttatgagggcaaaaccaaaacatgaatgagaatctttagagtgctcgcaaaatcttgaatcaagaatcatatttatggtaatgggctcctcaatattgcttcagggacaacagctagaatgtgtgatgtacctaaaggaccacaaaaaaagaacacaagtttcagcaatttgttttcattggtcaacacatcaattgttcacaaaactacaaaacaatctaactgaggttttactaacatgaatcatgtaaatatgataggttgctcgatttgtgcaaacacaaacaataagaaaactataagacttaaggaatttcatcacacacaaaaatacaatttatttttctataatctataatgttttgctttcattccgattatacccttgataatgatgattaggtgagggtaatttcgttatttacaattaaactcacataattacaaaataatgttgccttgccctgagataaacatcaccaaaaaatgttttttttttctttcttagagccaacaatttgttttcaaaaaattattatttttggcagctcagcaaaattatttaattctttctgtcagttcatcaaataatttaaatattttgtccatgtgataataatatgtagcgcagagagtaaaaataaataaattcatttacagaattgttttgtaaccaattagatagcagtactttaatatctgaggctattttcgtcattttcaaattatggtgtgtttttttggagggagtgggaaaaaaaaaatcgatacatgaatgacgtgacctccattgatttcggcgaacgagcttcttcttcttccctctctctctctctttggctccatctcttacagtaactgtctcttggaaccatttcctcttcactagtatcttctaacaatgtctgctactaggtcacagagatcatccacgatctcgccggctcgtcctcgtagatcgccggcgactattccgatgaaacgtccggaaactccttcttcctctcacttttctgcttctccggttacttcttctagtccattactacgttctagtcctagtccgtctacttcctccgccgccgcctctagtacggctgttgcttccacgaaactgaaggagaatattacagtcacgattcggtttcgtcctctcaggttaggttaatttgattagcaaaatccgttttttttgttttttttacttcagttttgtttggtttattgacatgtttttggtgaatttgaaaatagtccacgagaggtcaataatggagatgagattgcgtggtatgcagatggagactatactattaggaatgagtataatccatctctttgttatggatttggttagtcaaattttacaattcataagattgttgaactctttagatgaattattttcttttgtttcgaattgattaagtgtattttgcagatagagtatttggtccaccaacaactactcggcgtgtttatgacattgctgctcaacaagttgttagtggggcaatgtcagggattaatggtatgtttcatcttaactagttgttcttctggttctaaaagagaagatttcttatgcgtttggacaatttgatgttggtagggcttcaagttaggtgctttttaaattcattagcttgaaaaatgcatcctttccttgcccatgtgcaggtactgtgtttgcttatggagttactagcagtgggaagactcatacaatgcatgtaagttactaggctgaaaaatatctttatgtctcttattaggtgttaaagtaagaaagatatccaacaaagtgtttctcttgtgcacatccacttttgtgacacatgtgccttgtagaccttggctaatgatgtattttgcatttagggggagcaaaggtcacctggaataattccgttggctgtaaaggatgtatttagcattattcaggaggtgataggttactctttagttctgttttcttaaaaggatttttctactctattctttagctaattttgtttcagctatccagacaccagaacgggaatttcttcttcgtgtttcgtatctagagatatacaatgaggtaggctcttactctgtttatttgcatggcctgcttgtaatttaaactgttgtaagtttccatggacatggtatccatggcatcaatttgatattgcttagaagcttagaagaatgctataggatttagccctcaaatgtgattctgtgtccaacctacgactgtgagtatgctcaagtaattgatttcaggaaggaattccatttcaattatacatgtaactgtaaactcatgaactgcgaagagacaattggctgtttgttctgaagcagaactagatttttcagtttctcattgattcctagtacaaccacctggtgcatgatttgagggtcttttgaattattcttacaggtcatcaatgacttactagatccaacagggcaaaatctaagaatacgagaggattctcaggtaactggtggattatgtcgcagaaaacctgatcaaatcctaatgtggggcttgcgcatttcatttatccaagcttcatttgtatcttaagtttcagtattattagtgtgatgtgtttatgttgatagggcacatatgttgaaggtataaaagatgaggttgtcttatcccctgcccatgctctatccctaatagcatctggagaaggtataagatcctgaattaaatacctgtttaccttcagcgtaagctcatctttcggttaacatagtttcataattatgtccccaaaacacagtttcctcattaacaatatctacaaatcatgtgttttaaggtcataagtcatattctttta

SEQ ID NO: 138371 - DNA, 1230 bp, Arabidopsis thaliana landsberg
  unsure (1)..(1230): unsure at all n locations
ggaccttcctcattcctcctcttagctttagccactttttaaccctagtttttcccgccgccaccatcccccatggcttccgaggcgaatcagcttcagcaagcgcaactcgcgatggttctcggctccgattccgcgcccttcgagacgctaatctctcacctcatgtcttcttccaacgagcaacgttcctccgccgagtctcttttcaatctcgctaaacaaagcaaccccgataccctcgctttgaagcttgctcatcttcttcagctttctcctcatcccgaaggtcgtgctatggccgccgtccttctccggaagttgttaacacgcgacgatgcttatctatggcctcgtctctccctctccactcaatcttccctcaaatcttcgatgttgtattgtattcaacatgaggaggctaaatcgatctctaagaagatttgcgatacagtctctgaacttgcatccgggattttaccggagaatggatggccggagttgcttccgtttgtattccagtgtgttacttctgttacccctaaattgcaggaatcggcgtttttaatcttggctcaattgtcgcagtacgttggggagactcttacccctcacatcaaggaactccatggcgtgtttcttcagtgcttgagtagtaattctactagctccgatgttaaaatcggcgctctgaacgctcgtattagtttcgttcagtgtctggccaactcnnnnnnnnnnnnnnnnnnnnnnnnnnnnnnnnnnnnnntgatcaggacgttgaccgaatctctgaacaatgggaatgaagcaactgcacaggaggcacttgagcttttgagtgaattggctggtaccgagccacggttccttagacggcaagttgttgacatagttggttcgatgcttcagattgcagaggctgattccctcgaggagagtacacgtcatcttgcgattgagtttttggttactctggctgaggcgcgtgagcgtgcccctggtatggtcaggaagcttcctcagtttattgacaggttgtttgctgttcttatgaagatgctcgaggatattgaggacgatcctgcttggtacagcgctgagactgaggatgaagatgctggcgagacaagcaactacagcatgggtcaagagtgtttggatcggttagcaatttctctgggaggaaacaccattgttccggttgcatatcagcagttttctgcttac

SEQ ID NO: 138372 - DNA, 501 bp, Arabidopsis thaliana landsberg; identical to SEQ ID NO: 15812

SEQ ID NO: 138373 - DNA, 390 bp, Arabidopsis thaliana landsberg; identical to SEQ ID NO: 37846

SEQ ID NO: 138374 - DNA, 299 bp, Arabidopsis thaliana landsberg
aataattagtatgtcttaatgttggttgcagttgatagagaagaacccggagatggcaatagtgtggttttggaaagccatcaacactggagacagagtagacagtgccctcaaggacatggctgttgtaatgaaacaacttgaccgttctgaagaagctattgaagctatcaaatctttccgtcctcgttgttccaagaattcccaagattcccttgacaccgtcctcatcgacttatacaaggtcttactatgacagaacacgctaacatactctatttgtgaattcagtatataaa

SEQ ID NO: 138375 - DNA, 1589 bp, Arabidopsis thaliana landsberg
cggcaacactaacaaaatttactactcaatctcattttacaaagtcattatttcatacccttcctttattacaacaataatacaaagacaaaatcaagattaagaacaacacacaaaaaaaagaacatgtcagaggctcagcgatcgttccaatccagtcctctgccccaaacttgaacagctactacacctccttacacaagtgtccacaccatcacacgtgtcatgttcttctgccgagtcctgatcaggcggttcttgcatgcccaagtccttatccgagaacagctggttactccggcacaagggacatgttacgtatgagctcagccacgtgtcaacgcaatctacgtggaacacgtgaccacaatgtggtatcactttaactgtttcaccttcttcgaaatcgctcaagcagataacgcaatcttcgttccgctgcttcgctgctttcgtgtaacggtacactggcagagatcgaacggcctgaaatgtcccaatcttgccggttaacataagaaccgagaaagataattaaagaaatggatttacctgagaatcaagacccctccggaaactatacggccgtgatacgacgccggatgtggaaaggcgacgtggagacatcctagaggatcttgttcttggcatggaagaaatatcaaccgttgaacttgaactgtctgcgaagtggcggaagtaaactgaaaagaaacccatgaagaagagagcagccaagaggataaagatggtgagagccatagtggagtctaatgccgaaggtggctgtggtggtggcgttggagtcaatggtgatgatgtgacgttttggacggtttttgtgagctcttgttcgccaccacaagcttggtagagctggagaagcttgcgtaggtgcttggtctccatcactgaagtctattaagaaacaaaatgaaattctcattttcaatttttattacttgacaatgtaaaatgactcataacattaacgtacacgtatgcacatgttagtatttaaatattagtttaactatatgaataaactgatatatgtgtactcatatttaagaaaacgacgtaaatgaatgttaatggaacgaaaattgggttcattttttttattcacctcacctaagtttagccaataataatgaaacaattattgggtggtaaattttttttatctcctctaaatttgaccaattgagagagagtaaaaaaaaattacatttaaatatagctaatcaagaagcttattatggtatgatcctattggcaaacgatataaagtatcaaacataagaaattcactttatggagtatctaatgaagaggaacatattatgacattaggaactcggaagatgtcatggagaaaactgaattgtccggaaaaccattatcctataggtgaaggggtatgcatcgatgaggttttgtattacattgctggacaagcaaagactgtgaagatagcttgctttgatgttagaaatgaaaattttagtttttttaagacagattctagtattatgaagttattggttccatcgtcgcctactaaactgataaattacaagggtaaa

SEQ ID NO: 138376 - DNA, 1508 bp, Arabidopsis thaliana landsberg
cttgagtgcttcatagtttctctcggaattgagtttgattctcgggatagcttcagaactagaatcaggggtttagataatgctatagtgcctgctagttatgacgatataatggttgcttaagaatatctgttaagttatatatcttatcggggatggaattttttatggttaccggatcatggtttactttgattggtatactgcatgtgaactcaagtgtatcagcttttccatctaggacgcgctcttttggctttggggagaaaacaggaagctgttcttgttttggagcaagggtataaaagtgcgttgcagcagacagcagatgtgaagcagttacttgaattagaagaactcttaaaagatgcaagacgagaaattgatgggattttaaaaagtcatgccaccgagtctccgcaagagacccctgcctatcatagtgagaagtctgatgaaaaaagtgacaagctggacaaccatgaatcaggagcaagtagcaatgggaactcacatgagtcatctagcgaattgggcgagcaatcaaagatagtaagcttttcaaaagttgcatccaaggctagcaagcaatctgatggtaattccgacttatgtaacggatcagtgtacaaggaaaaagagaatggaaagtgtggcagccaaatcaatggttattatgaatcatgtaaaccttgtaatggttctgatttgcatgataatttagctgaaagttccgatcggttcggggagctatcgattaatggaaacaagataagtattaagtctagcaaaatgagccataaagctgaggcacgttgcggaattagtgatgaatccaggaaaaataagaagtacaccatagcaagaatatcgggaacccattccataagtgtggattttcgactttctagaggcattgcacaggtatagcaatacacagaaaaaaaggaaaagaaaagagctataaggtatagcttccaaatttttgatgactgagcttctgttttgtcaacaggtgaatgaaggaaactatacgaaagctatttctatttttgataaggtgatttggtgatctttatctctggcgagtgtctcttgcttatttttttctctgattatcttcttttcggtggttgtttagggaaaacattattgggtcaatttttttactatttagtttatctatgtgcaggtgctgaaagaagaaccaacttaccctgaggcacttataggaagagggacagcttatgcattccaacgagagcttgaaagtgctatagctgattttactaaggtattcatatatttgacaagagttgttaccacagtggggtaagttcaccaattctgcttctatgatgatgatggtcaggctatccaatctaacccagcaacaagtgaggcctggaagcggagaggacaggcttgtgctgctctggggaatatgttgaggttagtgattccattcgctgcttcttttcttatttagagctaaagcataacaataa

SEQ ID NO: 138377 - DNA, 528 bp, Arabidopsis thaliana landsberg
cacaaacatttttcttgaattcagagtttttctgatcaaaagctccctctctctctcaccatggatccgagactacaacatgctgctgaaaccggaagcatcaatgacttttatgctctgattgaggagaatccttacattcttgataacatcaatgccgtgccatttgttaacactccgctccatgtagctgcagcttctgacaacattccatttgccatggagatgctgaatcttaagccatcgtttgccagaaagctgaacacaagtggctacagtccattgcatcttgctgtggaaaaagatcatagagagtttataacatggctgctttggcgtgatcccggacttgttcgcgttaaagggagagaaggaatcacacctttccatctcttagcgattagaggagacgtaaatcttgtagcagagtgtctcaagtattgccctgtatgtattcaagatgtgagtgtgaatggccataacgctcttcctttgctgtgatgaatgatagatttgaaattcttcaag

SEQ ID NO: 138378 - DNA, 447 bp, Arabidopsis thaliana landsberg
  unsure (1)..(447): unsure at all n locations
agtgctcttgtttatatccatggctgaagtctttggatattatcaacttttnnnnnnnnnnnnnnnnnnnnnnnnnnnnnnnnnnnnnnnnnnnnnnnnnnnnnnnnnnnnnnnnnnnnnnnnnnnnnnnnagctacacttggtggaggtatgtatcttccggctgagacatctgaatctactgctactatggtattagactatgtgaattcgcttttgtaacctttggctgtttttttttggtgcagctccaaggtactgataatttattagagaccttatgaattccatgaagccctgaagcctcaagcctgagttggtatcggtttacgcgctgaatcaactgagttggaatggctatgttgtgagccattttgttctctatgttggtttctctgttgttaatttgatacaatgttaattaataactcaacagaaatctttatt

SEQ ID NO: 138379 - DNA, 606 bp, Arabidopsis thaliana landsberg
gagttttctgaatgttaaggtacataacagtttgacttgacaccataagcagattttttaactgttccttttccatttcgtcttctcaatgattttgcaatgtgagcaggaagttcattataaccagcatggtttgttgcttctggaggggcaaggcatttatcgcttgggtgataactggtacgcaacactgtatttaataaacgaaattgtgaatataattgataactttccagcaacacaccacatgcacaaccaagaacaatagttttctacatcggtcatgtaaagtgaacagaagcatgttccaaaagaaaactgcaaacacagctatattccacagaatagaagaaatgattataacttttatgtgatcttcttgtctttaaattaggtatccagttcaggctggtgatgtcatatggatggctccttttgtccctcaatggtaagagactgttgtcacacaacatgaaaaattctactctcttccatgaaagttttgcaagaatacaactttctattggaactgtgcattgattttacctgaagatttattcgaccacacaatctcagatactgtcgttgtttcaggtatgctgcact

SEQ ID NO: 138380 - DNA, 1060 bp, Arabidopsis thaliana landsberg; identical to SEQ ID NO: 12856

SEQ ID NO: 138381 - DNA, 661 bp, Arabidopsis thaliana landsberg
gaagtactttaccaacgaagaatgcctcaagtcacacataagatcctgtcatcagcacatcaactgtgagatatgtggttctaagcatttgaaaaagaacatcaagagacatctacggactcatgatgaagattcctcaccaggagaaatcaagtgtgaagttgagggttgctcttcgactttctccaaggtaaagaaacatcctgagctacttcaaacttatatagtccaaaacaagtttcgtttccactttattcaacatcactaattacattacgattatttctcaggcttctaatcttcagaaacacatgaaagcagtgcacgatgatatacgtccctttgtttgtggctttcccggttgtggcatgagatttgcttacaaacatgtcagaaacaagcacgagaattccgggtatcacgtatatacctgcgtaagttcatccaacctacatactatcgtgtttttcttacaaactcaaaagactagaatctcatctaaaactgaatgtggtttcagggtgattttgtcgaaactgatgaagatttcacttcaagaccgagaggtggactaaagaggaagcaagttactgcggaaatgctggtgcgaaagagagtcatgcctcctcggtttgatgcagaagaacacgaaacttgctag

SEQ ID NO: 138382 - DNA, 790 bp, Arabidopsis thaliana landsberg
taagcttggaaaggtttaaactagtttctctctgattgcttctggttggtagtaatcaatttactgagtccgttccttcttcttaggatttacataatcttgattccaaatcacaaagtgctgagattgttgacaatactgcgtcctgcttgggagatgtgtctaacttacctagtatggaagatgacatttttacgccaaagactgagtttgaagatggttatatagatgatgaaattgatccagctttgaaggaactgcttgataggtaagtggttctttttcaaactcctacctgaagtattcgttttgggctgaaataataattgatagcagtcacctctccaaatataccttctacaaacctcggcttctagactaaatatgaagatctacatcgaattgtgcggccattaagtgaaactaaattaaattattgaaccttatgttaatatgttaatacagagaggtagaggattttgctcggagattgaactctagttgggttctatcgataggacaagaaaggcagcctgtgaacttttccataaatggcaacggaacttcaagacgattgacaggtacatgctatccctttttcctggttaatctttacatttatggtaatagtgtagcacaaggtgctgttgaactgaactacctatcggttttagaaataggacacacttgagtcttcaacacagctttagatgactgatgatagatggtttggtttgcatgcgttttgaactttgaaggtcctgctgcaggacacaagtgaagctgaaaa

SEQ ID NO: 138383 - DNA, 1911 bp, Arabidopsis thaliana landsberg
aaattgaagaacgattgatacttgattacaaaacttttgtctggtaatgttttcaggtggataattatgtaaagagtgggatgattattggtttaggatctggagaagcttcagattttgctatacgttatttgggtcaacaacttggttctggttctttacataatgttgttggtgtaccaatgtaagtcttttgcttctctctctgatgtttatctactatgaatccaataaaaaatcaatcttttgtttgttcagttgttgaatttccctattcattagttcttcgataatgattttgttgttggtgtaccaatgtgagtcttttgattctgattctgctgctggttatcttctatgactccaaataaagtatcaatctttttgtttgttcagttgttgatctctctatattcaatcttttatgttacgagttgagttttgataggcttcatgatgatttgtcctgaccctttttcaggtctgctcgaagtgcgagtgaagcagcaaagtatggaatccccttggaatattaccgggatggtgttcaggtagctgcttctctgtgttttctaaagcggtttgatttacttctgcatctaggggtaatgtttgcagtgtgacacttttgtagattgattttgcatttcatgatgctgatgctgtagaagagaatacgcttattgcagttattggacggcggagaagttcacaggaagatgactatattctgaaacaaaaggtgtatgcagtttcgtgtaatttttgcagtctttgaatacacattgcttagctttgggctgacaaaagagagattttacaatacagtctattgtaaaagtagctgatgaggcagtcttcatgataaaggaagaacaatacaaagccggtcttgaaggttctatccctgttttagttcaatctgtaagtaaatttctactgatgaacttcgttttaatcccttggtaatatgattcaagacttttattccttgaactttgattgcagcttaattggttggccatagctgaggagatagatgacttgtatctaggcgatgcagaggtgtgaatctgcttctttcataaatgctttctcgggcttttggttctatcgattgtgtcaagccttgtttgagtcattgtattttacttggtggaaaaggtgtggagaagagcttctgttgaaaatgaaggccctcttggaggagactttcctatagttaccagtgatggtcacaacattcttgatgttatatttacaactccgattcgaagcctcggtaaaagcttatactgtaaccattgaaacttgtgcaatggtctctattgttgatggatgcaaaatcctgcagctgacttggctacaagccttgataagattgatggggttgtggaccatggactaattatcaaaactcggttagtttctccaaattaagcagtcaggtttagtatgtcattggtcagtagtaagaatctgttttctacttttggcattacagatgcacggtggtgattgcagaagaaactgttgtaagaagtgttaccttgcagaccagtgcattggagggtggtgtacgaacctatggacagactttgcaaaagtagttcgtctcacacattaccgaaaacggtgatccattttgccagtcaatttataagtcagttcatagagcaatgccgtaacttctacaagttctttttctataatcagttcattccaaacaacaatcaaggtataaattgattgtactcattatataattctgtcgtcatcttatatgttggaaaaattcttaagattatatgatagcctacgttacagggtcagtgatgtagtataccacaaattttccatgaaaatatcattaaataattatatttggtggtaggaaacatccatgaaccc

SEQ ID NO: 138384 - DNA, 2768 bp, Arabidopsis thaliana landsberg
tggcttctgtcggtaaaaggctttcacgtgaaaaggatacatggttgagctcctgtccagatactttgaagattaatatggggttcctgcagcgttgtattttccctcgttgcacatttagcatggcagattctgtgtactgcgcgatgtttgtaaatatgcttcactcgcttggaacacccttttttaacactgtcaaccacattgatgtcctgatatgtaaaacgctgcaaccaatgatctgctgctgtactgaatatgaagttggaagactggggaggtttttgtttgagaccttgaagattgcataccactggaaggtaactattgaatattattattctttgacaatcaaagtatagaatcggggttttctttctaacctagttactaatgctgttgttgtttctaatcttttctcagagtaaagaatcagtctatgaacatgagtgcggaaacatgccagggtttgctgtttattatagatacccgaacagccagcgtgtcacatttggacaatttgtgaaggtttgaaattctgatccctgacttgtatatctattacttttagtcgtataaactttttaacttgtctcaagttttaggtgatataaactctagaactgtcttctacagtatttagctatcacgtgttctgcttcaattaatggtaacaaagtcttgttccttctgtgtttcatgtctgtttcatctgttgatctgaaaggtacattggaaatggagtggaagaatcacacgacttttgatccagtgtctggagtctaatgagtatatggagattcgtaatgcccttattatgttaacaaaaatatctggtgttttcccagttactcggaaaactgggataaaccttgagaaacgggcaagtacctcttgacgagctattcttatgaatctgctttcaattagtgtgatttctatctttccctgtgttttttttgtgaaaagattaatctttcctttctttggtggtttggtctttcaggtagccaagattaaaaatgatgagcgagaggaccttaaggtcttagcaactggtgttggggctgctctgtctgcaagaaaagtgagtgctaaccatagcaatttcatgttcagtgttttatacaatttcactgaatgtcgtttatttgcagccacattgggttacagacgaagaatttagcatgggcttccttgaactaaaggctccgccagtacatactccaaaacatgcttcttcccagaatggcttgttagttggtgtctcccaaggtgaaccaactggggaaagagctactgttaaccagcagcctgagtctggtggattgggcaaggaccagatgttgaaaactaaacctctagatggaagaacggaaagtataccttcaaaatctgatcaaggacatctaaaatcaaagggaggcaatccattggattcccaaccatccatatctaagaagtcaatggaacaaaaggaaacagatgaaacacccagaatatctgacgagaatcctgtcaaacctgcttcaaaatattctgaagccgaggtatggccatgctattttttctcttttatttcttaggttaccaatccctactttatttgtgaaaccaaattttgtcactagtatgtgttcacagaaattatgtaggaaagttatcctgcccattctatcttatttgtttggtagagccaattctactttcttgttaattattttctaaaggactgatttaggggaagtaatgcttagaatttatattttggggatacctgatttaagggtagacataaggaatgtgtttaacctatcacgtgggacctgggttgtgagtgagagctctaaggtcaattgtttaatatgatgcaatatgctacaatctacactcttcgccttcaccctttttatgttggaaactggtagctgaaaaaattcagctaatcagctattcaggaagttttggggatcaaactttgtattatgtataattatttttggctggcagttaaaagcttcctctaaacgaggtgcgtcagtgaacaaatctgcaaagcaagattttggaaaagatgatggaaagtccggtaaagctattggaagaacatccacagctgacaaagatcttaattatctggagagcaggcaatcaggtttgaccaaagctctttccagcacagcagccaatggtagcatagctactgggtcgtccaaaggtttgatctcacccacaaaactattagatattcgtagaagctaatgtaagttgaaggtattctgactttaatttctgaagcagtaaaagatgatggcgctgaagctttggatgcacaaaagcaatcttctcggactgttcattcccctaggcatgaaattgtcacttctgtgagatccagtgataggttacaaaaacgagctaatgctgttgaagatagtgaaaggataagtaaacgtcgtaaaggagatgctgagcacaaagagcatgacagtgagcctcgatcgagtgaccgagatagatcagtcgaggcccgattggatttaaacaaaacagttactgatgaccaaagcacccatagggatcaagatagatcaaaggataagggttatgaaagacaggatcgagaccacagagaaagagtcgatcgttctgataaacctcgtggagatgatgttgagaaagcacgagacaaatccttggaacgtcatggtagagaacgctcagttgagaagggtctagataaaggaacaactaggagttatgataga

SEQ ID NO: 138385 - DNA, 2429 bp, Arabidopsis thaliana landsberg
ggtttcgaaataatgactactacattcgaatttctgcaaccaagaatccacggatttgcaacttgttgtagtagtaatagtctattgtactcgaaagcttcgagatttttcaacgatcgttgtagggtttatcgccaaaatccgaatcggtttgtctccaattcaatcacgcttcctctgcagaagaaacaagttacagtgttgagaaatcacgaaaggtttaatctttgggatgggttttcaagaaagaagagtagattagttgtgaattgtcaagaagatgatcagaacgagagttctagtgaggaggaagaaagcagtcagagtactccggcgaagtcggagaggaaaagagagaagaaagaagataaggtgtggtggtcaaaggggaagaaatggcagtggcagccaataatccaagcgcaagggattggagttttgttgttgcaattgagtattgttatgtttgtgatgcgattgcttcgacctggtatacctttacctggttcggagcctcgaattcagacgacttttgtgagtgtaccgtatagtgagttcttaagtaaagttaacagtaaccaggtgcagaaagtggaggttgatggggttcaagttttgtttaagttaagagatgatgggaagtggcaagagagtgaaactagtaggttgtctcagtcgtctgaatcgttgttaagaactgtggctcctacgaaaagggttgtgtattccactactaggccgggtgatatcaaaacaccgtatgagaagatgcttgggaataatgtggaatttggatcgcctgagaagcgttctggtggcttcttcaactctgcattggtagagtttcatttttactatttttgctactccttgttgatgatgctttatagttttgcaatgaatggtgattgtgctataaaataggttgggtcttttcaaaagtttctatttttgtttgttgcagatagctcttttctacatagcggtacttgctgggcttattcgattccctgttagcttctccacggtttgcatctctactatactttaatgttgttgtttaaaatgttgaatttcctaaagaactatgggtgtacacagagttcaaccggccagcttaggacccgaaaggctggtggtcctgatgggggaaaagtctctggtggaggtgaaacaatcacttttgcggatgttgcaggtgttgatgaagcaaaggaagagctagaagaaatcgtagtaggtttttcagtccttaaagacgctgcacatgcttattgatgatcagattgtttttcatagctttattctcggtttggtaattgtcttttacacatgggttaatcaatgcaggaatttcttaggaatcctgacaagtatgtccggctaggtgcacgtcctccgcgtggtgtcctattggtgagttatatcatttgatttcactttattcttatattacgtatatatcatggtttaacgtttggttacaagagctctcctgtagaatgatatgcctttaattcctttcttttccaggttggtcttcccggaacagggaaaacccttcttgcaaaggctgttgctggggaagctgaagtccccttcataagttgctctgcaagtgagtttgtagagctgtatgttggaatgggtgcctcacgtgtaagggatctttttgcacgggccaagaaggaagctccatcgattatatttattgatgaggttagaataggtagtcgatgtcagattacctccggtctgttaaacctctgggcatcttaaacaagattttctatttgcctttcatactccagatagatgctgtggcaaaaagccgtgatggtaaattcagaatggggagcaacgatgaaagggagcaaactttaaatcagttgctcactgtaagtctgctatcatgcacctttcctgtgtaagtagcattcttgatctttccatgacccattcacatgttggaaactttctgcaggagatggatggttttgacagcaattctgcggtaatcgttctcggagctacaaatcgtgccgatgtcttagacccggccctgcgtcgtcctgggagatttgatcgtgttgttacggttggtagaatggattagctctgcctatttgtaaatgtttatgcagtttaataaggttatttcaaaggcactgatgcatttttcaggtggaaacgccagacaaaattggaagagaatccattttgagagtacatgtgtcaaagaaagagcttcctttgggagatgatgtcaacctcggtagtattgcctcaatgaccactggtttcacggggtaagcttttgtatattatcaatgatttgaagtttattctgttatacttttttgggtgtatatctcgtaaactcttttgtcctattttgcagggcagatcttgcaaacttggtaaatgag

SEQ ID NO: 138386 - DNA, 1232 bp, Arabidopsis thaliana landsberg; identical to SEQ ID NO: 28989

SEQ ID NO: 138387 - DNA, 588 bp, Arabidopsis thaliana landsberg
gcaggaaagtccactctattaattcttcttgcgggagatttagttccaacagagggtgaaatgaaaaaacccagaagctgaggattggcaggtattctcagcattttgttgaccttttaacaatgggggaaacaccggttcagtatctccttcgtcttcatcctgaccaagagggatttagcaagcaagaggcagtgcgagcgaagctaggcaagtttgggctaccaagtcacaatcacttatctccaattgcgaaattgtctggaggacaaaaggctagggttgtgttcacctcgatctcaatgtcaaaaccacacattttgcttctggacgagcctacaaatcacttagacatgcagagtatagatgccttggcggatgcactagatgagttcacaggtggagttgtgttggtgagtcacgactcgagactcatatcacgtgtatgtgcggaagaggagaagagtcaaatttgggttgtagaagacggaacagtgaatttcttcccaggcacatttgaagagtacaaagaagatctccaaagagaaatcaaagcagaagttgatgagtgaagttttgttgttagct

SEQ ID NO: 138388 - DNA, 1050 bp, Arabidopsis thaliana landsberg
gtgaaatagtgcctccaggtgctggtcacaaaaggatactgcttagtatatcttctttgatagccattagtgctgctgcagccattgtggttggtgtaatagccatcacggtacttaatctgagagtgcgcgcatcaacggtttcaagatcagcagtaccgctcacgttctcaggcggagatgacttcagtcgatctcccactactgatagcaactcagggaagctggtgatgttctctggtgaacctgatttcagcactggaacacatgctctgcttaacaaagactgtgagcttggtcgaggtggatttggagcggtgtacagaacagttatcagagatgggtatcctgtagctatcaagaagctcactgtctcgagtcttgtcaagtctcaggacgaattcgaaagagaggtgaagaaacttggaaaactcaggcattcgaatctggttaaactcgaaggatattactggacaacttctctccagcttctgatctatgagtttctctctggtgggagtttatacaaacagttgcacgaagcaccaggaggtaatagttcgctttcttggaatgatcggttcaacattatccttggtacagcgaaatgcttagcttacttgcaccaatcaaacatcatccactacaacatcaaatcgagcaacgtgttgctagacagctctggtgagcctaaagtaggagactacggattagcgaggctgttacctatgctagataggtacgtgctgagtagcaagatacagagtgcgttgggatacatggctccagagtttgcttgtagaacggtgaaaataacagagaaatgtgatgtttatggatttggagtcttggtccttgaagtggttacaggtaaaaagcctgtggagtatatggaagatgatgttgtggttttgtgtgatatggtgagagaagctcttgaagatggaagagcagatgaatgtattgacccaaggctgcaagggaagtttccggtagaagaagcggttgcagtgataaagctagggcttatttgcgcttccaggttattaa

SEQ ID NO: 138389 - DNA, 564 bp, Arabidopsis thaliana landsberg; identical to SEQ ID NO: 41661

SEQ ID NO: 138390 - DNA, 2436 bp, Arabidopsis thaliana landsberg
agggaagtgtacataaaacttttacaaagatcaaagtttggtatcctgaatctgcacagttcatgaaatgaaatttagttcatataacattgatatcacgcaacctcacctttttaccaacttctatttctgcattttagtccctcaattttttccttaattctcttttcatttcgactcacttgactctcgttttcctggttgtaactacaattttagggtgagaaaatgtcaatggttgcttgtggatggcggcacacaatatcagtttcctactctggagcattgtatacttatggatggagcaaatatggacagctaggacatggagacttggaggatcaccttattcctcacaaactggaagcactgagcaacagttttatctcccaggtttcacttaggccttataaatctgtcttgaaatacaaatttgtacatctgaaatatccaacatatgggatagcaataatatgtttttcgaaaactttctgaaaactattacctactgaagaagactggcttcattgtatatacttctgttggttttcttcttctgttcgacatcttttggacttactgttcgtttcttttccagatttcgggaggttggagacatacaatggcattgacttcagatggaaaactatatggatggggttggaataaggtctagaatgtcttgctttttttttttttttttctggcctatatttcgtagaaatgtatagaacacctattttcatctacacattcactgatatttgcatttagttgctttatgctgttaaggagtgatatgcattcacttagatgttattttaagaaaacaacaatgcatatattgggtaactttagtaactcatcttgaataaaacaaacttctaattgtctctcttttagcctgcagtttggacaagtaggagtcggcaataatttagatcagtgttctcctgtgcaagtgcgatttcccgatgatcaggcatgttatccctaaaaaagtttaacgagaaagctcgtcccaatgttttaccggctatataatcatattaataagttcatgtctcaattcgctgttttcttttccaatgcacacatattgtggaatttcacagaaagtagttcaagtctcatgtggatggagacataccttggctgtcactgaaagaaataacgtgtttgcttggggtagaggtacaaatggacagctcggcattggagagtcggttgacaggtaaaagtgtgatcatctaatcgctcatgaatcaatgttttccacttaacatatcttggtgttacgaacagaatatgaaaattggccagtaagatcgttgtttccaccaaaatcattgcttttcaatcccactcactacctatcttgataatgtgaaatggatatttggtttggtgtttataggaactttcccaagattatagaggcactcagcgtcgatggagcaagtggacaacatatagaatcttctaatatcgatccatcttcaggtatttaaacaataccactagttaaaacgatttctgtaaacgactcaacaagtgattaaatgattcaacttttgcattgctttgttaccagggaaaagctgggtgtcgcctgcagagagatatgcagttgttcctgatgaaacggtaagccttaattttgttaattctactaaactttatatccaatacgtaaactacaatgaaagcaaatggcacaattatatcggcttagaaccagattttactgattaatcattgctgcacaattataccttgctctgtcaagatcgtggattgttttcaaggatgaaatctatgtgtgtgattttgaatttggttgtgtgttagggcctaacggatggttcaagcaaaggtaatggaggtgatatcagtgttccacaaactgatgtcaagcgtgtacgaatttgagcctgagtcaattccgttttttttttacttccggttcttccgttggattcgaaggtttttcagtgatctcttttgggttgaggtttgtactaagagtacgtctgtctagtttgggattgtactttttgttgttgttgttagtttgtaacttgtgatgcttccctccccctagctctcttattacatgggcgttgtaaactgtgtgtactactactactagtctctagggtatgtactttttttttcctcaccataataataccttctggttctatatctttcatttcttaaaaagttttctgttttttccttcaaccattatacaacttatgttttaagagaattttctttttgtcttatttttttaccgcctatgtttgaattcaaatatgatatgattgatagtgacccgctgagttttagagtatttgaattttggaaaaaaaaacaattttatcaatcaagatcaaaacttaagaagaacagtgatcacagattaactag

SEQ ID NO: 138391 - DNA, 2298 bp, Arabidopsis thaliana landsberg
caggtgatggcttcgcagaaggagatgcagagacaactatcaaatgctgccactggccctatcggaaaagaaagtaaaagactagaagttgcgttagggagaatgattgagaaatccagcaagtcaaatgctgatgctctatgggcccgcatccaggaggagactgttaagaatgaaaaggcattacgtgaccatgcccagcaaattgtgaatgcaacgacaaacttcatgagcaaggagttaaatgccatgtttgagaaaacgataaagaaagaattggctgcaattggtccagccctagcacgttcagtagtaccagttattgaaaaaactgtatcttctgcaatcacagagtcctttcaggtaagattttacgagaaatttagagctaatttttgagaaggttcattgttcttaaaagaaagctgctttctcttttgtacagagaggaataggtgacaaagcagttaatcagcttgaaaaatctgttaatataaagcttgaagcaaccgtagctaggcaaattcaagcccaatttcagacctctggcaagcaagccctccaggtaaacttgaggttcacctagctttgtggtagtttatagaagtgtctataagtctccaactgcatacatagtttaacggaaagggaggttatctcttatatatatttcctgccgtttataaacttcaggaaggtcttaggtcaagtgtggagtcctcagtcataccttcctttgagaaggcatgcaaggccatgtttgaccaaatagactcagccttccagaaaggtattgctgagcatacaaatgcagcccagcaacggtttgactctggacactcccagcttgctcatactctaaaggtacgatggaaaatcattcttcttacagctctgttatggttgcaaaatccaatcatttctttcttctctctaaagctgcttgctcgttttacaggaatcaattacttctgcgtcgtcagttgctcaagccttaagtcgtgagttagccgagacccaaaggaatctcttagctctcgcagctgctggagcaaattctggtgggtctaattccttggttactcaactaagtggcggacctttgggtgctcttcttgaaaaggtttgcacatctctagaactaatcactaaccataaatcttgtgtttgtttagtgcatgagcattttagttactcttggtggctttttcgctgcttagcaatcatagttgaggcggttaactagagaagagaactaacagcttagaaggaagtttaggcagaagaattgagcattctggattggtctaggatctgccttgggcttaggagagtttatggtgctcacccctagggttctctatctttggttcttggcttaagtttattctctgttcatcttttgtaattgagtcagagagcatataattagagaaccatttctgctcttatccgaatcctaatctgatgtcattttctgagttttgactatcgcaacatatgtcctttcaggttgaagcacctatggacccaacaacagaactatcgaggttgatatctgaacggaagtacgaagaatctttcacttcggccctacagagaagcgatgtctctatagtatcatggctttgctcacaggtgaaatttttgtttggattttgtgcatcataagatctcatacataacccatcagttatacataagatcccatgagattgattgtgccaatacaggtggatctacgtggattactggcgatgaatccgcttccactgagccaaggcgtgcttctttcactgctgcagcagctagcctgtgacattagcaaggacacatcccgtaagctggcttggatgactgatgtggttgcagccataaacccatcagaccagatgattgcggtccacgctcggccaatctttgaacaggtatatcagattctgcaccatcaccgcaacgcaccgggcagcgatgtctcagccatcagactgataatgcacgtgatcaactccatgcttatgggttgcaaatgatatctcttatctcgttctctcttcttgttcgttgcttatataaaacataggaatacaacaatcactactcttctctgtatctctctacatttgttagatttttgtttcatttttggtttgaattttgtttttcttgttttttccatccttcttttaaatgtaaaatctggttgttttatatacgtttactattcactcttcttcacaagaatatcttatgtgtaaaagccaaatcaatgtttggattaaagcagtaactttacca

SEQ ID NO: 138392 - DNA, 2187 bp, Arabidopsis thaliana landsberg
  unsure (1)..(2187): unsure at all n locations
atgaaaaaatataaatagaaattttgtagcatctctggggtcagctttttcttaatgttttcttttttacgcgaggaaatgcaaccttgaaaccctagaaaactcattctcaactacgactaaatcgatttcgcaaactttgacctacctttctttcacgataaacccagatcgcttaaattccttgaatttcttcttctgagagttttaggaaaaaatgtcgtctttgagcagagagttagttttcttaattctccagttcttagatgaggagaagttcaaggaatctgttcacaagtaagtttgtgctttgtcgtttttgtgtgcttgtttggtttctctgcgtaattttgggtataatttggaattggttgatgtgtaggctagagcaagaatctggcttcttctttaacattaagtactttgaagagaaagctcttgctggagagtgggatgaagtggagaagtatctttctggtttcactaaagtcgatgataatcgatactctatgaaaatcttctttgagattaggaagcacaagtatctcgaagctctagatcggtgatgatttctcttcttgtgcggtcggatatttagactagtgttgttgatttgatacatttgtgtgtttttattacagaaatgacagagcaaaagctgttgatatattacccaaagacttgaaagttttcgctacatttaacgaggagctctacaaggagattactcagctgcttactctggagaattttaggtttctttttttttttactttgccatcgatattattgaagttttggaaggtggctacgatcatgctgaagagtgcgtttttttcttagggaaaacgagcaaccgccgaaatatggtgatactaaatctgcaaggtctataatgtatactgagttgaagaaattgattgaggcgaatcctctgtttcgagagaagctagccttccccagtttcaaagcttctcgcctgcgaactttgatcaatcaaaggtgaactaggaggagtcataattctttcctttttttatagagattagttaaagtgtatgacaagtgtgtttgggacattgcagcttaaactggcagcatcagctatgtaaaaatccaaggcctaatcctgacatcaagaccttgctcttggatcactcttgctcaccatcaaacggtgctcgtgcactcactcctgtcaatcttccagttgctgctgttgcaagaccttcaaactttgttccttcttggagtgcatggtggagtaggatcacttacttaacttccacccattctagtatataacttaatgttcatattttgagggttgatgaaacaactgtatctgtgcagccctttcaatctaatcctgctccggctcctaatgccaatgctttagctggatggatggcaaacccaaatccttcttcatcagttccatctggtgttgtcgctgcttccccatttcctatgcagccaagtcaaggtataatttatgtcacaacttacaagtgtctggatattatggtatctttcgtttttttttcttacttgtgatattagagtttttaggaaatgaattttaagacctgaagttctattgctgtatttcgtctcaacagttaatgagctgaaacaccctcgggcaccgtctaactctctaggattaatggattatcaaagtgctgatcacgagcaactcatgaaacgcttacggtctgcacaaacatccaacgaggtaattgccttcaggttttccttgtttttgaaacgcttagtgcttacctagcaaacaaaactcttgttgcttttggaatgtgcgctttgatgttgagtagatggctctacttttcaaatcacaggtcacatatcctgctcattctcatccccntgcgtcacttgatgacctccctagaaatgtagtgagtacaattcgccaagggtcggtggtgataagcatggattttcacccttctcatcacactttgctcgctggttagtccattgctaccatgaaaagcttagtagagttgagatttttatttggctcttgttataacatgtctgttactcgtagttggttgttcaagcggcgaagtcaccttgtgggaagttggatccagagaaaaggttgtcacagaacctttcaagatatggaatatggcggcttgttctgtgatcttccag

SEQ ID NO: 138393 - DNA, 319 bp, Arabidopsis thaliana landsberg
gtgggtgatttcaaaagtctggaagaagtggtgtctaagctgacagagaatctgaatctgaccgagtctcagattgcgagtatttggaagtcattgattaaggcagaagaagaagctcaacaagttccaccaccaccaccaccaccgagtgctgcagatgtaagtagtaaatcaacgaggaagaagatgaagaaacaagcctctaagctgcagagtaaacttcttctcacttaattcatccctttgtttcatgtgttcttcattctcaacaaaagcttgtgtttgtgttaaaattgaaaaatttcttgcacaatccctg

SEQ ID NO: 138394 - DNA, 515 bp, Arabidopsis thaliana landsberg
cacaacaaacacaaaaatcaaaaggggtcatttactatcttttaagagacgacatatatagttctcgaccaagaaaagaaaagggggtgacctgagttcttcaacacataacataatggccggagttttcaaaacggttacgtttcttgttttggttttcgctgccgttgttgtcttcgcggaggactacgatgttggtgatgatacggaatggacgagacctatggaccccgagttctatactacttgggctaccggtaaaactttccgtgtaggcgacgagctcggtgagttttattgttcttatagctgaaatatgtctttgtttttcttgttcttataacagtcatagttatgggatcgtgcatggatcatgtcggtgttgttctgtctttctttctatattcttatgaacatattttagctaaaaaagggattaattgagtttccaccgactgatgttgatattcttattacagaatttgatttcgctgctgggaggcatgatgtggcag

SEQ ID NO: 138395 - DNA, 290 bp, Arabidopsis thaliana landsberg
gcaggtgcgctcatgtcttctgtgtacgaagagaaaaaggatgatgatgggttcctctatgtcacttacagcggagaaaacacatttggatttggatctccataatagagacctcttgctggatatttcattttactcctctctattttcaccaaatatttcatcttcttattaattactaagcaagcaagccacctatgtacttattctctaaggacctttggtcgggcgttaatatgtacagaaaacataaaataatgtatataatcttctttcaaggatctaaaaac

SEQ ID NO: 138396 - DNA, 632 bp, Arabidopsis thaliana landsberg
agaagggtttaagttagggcttttgaagtaaaccaattttgtgcgtctcccttttcttcttctcttcccaatttcaccgcctctctctatcgccggaaattaaccatgaaacgcggcggaagaagctacgtaacttcacctccatcattctccaacgacgctaaaaagcttctcgtctgcacaggaaacactgtctctgttttcagcgccgccactggcttacaggtaccaaaaatttaattcttcttcgattttgttagggtttctattcgaatcattgattgatacatttctgttttagattacttcgcttgaaggtcatacagctccagtaacaactctaattgttgttcctgcatcaagtcctgctcaaaaaatcctttgttattgttggactgcttctcttgatggtactattcgtcattgggatttctctggacctgagctattgaaaactattgatgctcagcttccgatttactctatggtgagtataaaaaaagtttgatactttgattaggttttgtgagtgttttgtttgatgaaatgaatctatgtgttttgtgtgttctaggttataccatctcttttgagcgaacctcaacaaattgataaacgtcgtgagttgtctg

SEQ ID NO: 138397 - DNA, 1089 bp, Arabidopsis thaliana landsberg
cttagaatcgccgtttggtttttaaccagagagattatctaccaaggaacgatgattattgaaagagctcgagttccgttgagccgatggcaacaagcggccgtggcgatgggatctgctctcggtgcgttggttgatcctcgtagagcggatctaatcgctgctctcggcgaaactaccggtaaaccagcttttgaaatggttcttgagagaatgaagaagagcgaagaaggaagagtacgtttttcaaatcactcaatttctctcttattgttgatcaaatcattgattttgcttaagaatgattgatttagaaattgttcgatttagtaattctggagtaagcaatgagtgatgttaaattgattaacatttttacttgatgttggttatattgttgagtaagcaatggtgttttgatctttggtggtatctttactttgaaggctatattattggagcgtcctcgagttgtgtcagagcaagtaggtcatgcttgggatctaccagaaaacacatttggagctgcatatgctaaattcatgggatctagaaacttctctcccgatgatcgtccgcccgtaagattcatggagacggatgaattggcttacgtagcgacacgggcacgcgaagttcacgacttatggcacactctgtttggccttcctacgaatcttatcggcgagtcgtctttgaaagttatcgagtttgagcaaatgtatcttccgatgtgtatgctttctgtgattggaggtactgtgaggttcaacgaaaagcaaagatcaatgttcttgaagcattaccttccttgggctgttcgtgctggaagacaatgcactgacctcatgtgtgtgtactatgagcgtcactttagtgaagacttggagcaagttcgtagaaaatggggaatcatccctgctcctcaacatcctaaatgacggttctagtttaatctgttttcgaatcacttagttatgccaaatctcttataaatgtgtagtggattggattaaaagttgtactcgcatttgatggttaataagagacaagttgggaagtttttgattcaaacattttttcagcaaa

SEQ ID NO: 138398 - DNA, 952 bp, Arabidopsis thaliana landsberg
cctaaccaaagcagcttccaagcatctagagaaaacagaatctacaatacttgtccttagtaagcaaaaatgtgtgcattagtacctccattgtttccaaactttgggtggccatcaacgggagagtacgacagctactacctcgccggagatatcctcaacaacggcgggtttcttgattttccgggaccggaggagacttatggagctgttacagcggtgactcaacatcagaatagctttggtgtttctgtttcgtcggagggaaatgaaatagacaacaatccggtggtcgtcaagaagcttaatcacaatgctagtgagcgtgaccgtcgcaggaaaattaactctttgttctcatctctccgttcatgtcttcctgcctctggccaatcggtaagaagctactccgactcattgattagacctgttatagtttatgcatctatacaatttagaagaagaatactgcgttaaaccttttttctttcctttcttgcagaagaagctaagcattcctgcgacggtttctcgaagcttgaagtacataccagagctgcaagagcaagtgaagaagctaataaaaaagaaggaagagctcttggtgcaaatttcaggtcaaataaacactgaatgttacgttaagcagccaccaaaggccgtcgcgaattatatctcgaccgtttctgcgactaggcttggtgacaacgaagtgatggtccaaatctcatcgtccaagattcataacttttcgatatctaatgttttaagtgggttagaagaagataggtttgttcttgtggacatgtcatcttcaaggtctcaaggagaaaggcttttctacactttgcatttacaagtggagaagattgaaaattacaagctgaattgcgaagagttaagtcagaggatgttgtacttgtatgaggaatgtggaaactcatatatatga

SEQ ID NO: 138399 - DNA, 268 bp, Arabidopsis thaliana landsberg; identical to SEQ ID NO: 50331

SEQ ID NO: 138400 - DNA, 808 bp, Arabidopsis thaliana landsberg
atggatctagctttgtctattgcaagagatatctcaggggctttgatggagctgcactcaatggatataattcaccgtgacattaaaagcgaaaacgttttgatcgatctggacaatcaaagtgcaaatggagaacccattgtgaagctttgtgattttgatagagctgttccgcttaggtctcacttgcacgggtgctgtattgcccatgtgggaatacctcctcctaatatctgtgtcggcacaccacgttggatgtcccctgaagtcttcagagcaatgcacgaacaaaacttttatggacttgtacgttcctccaaacactgactctcttgttcgtcaacgtttatctttactccttttctcttatgaggttgcttttgttttcgcaggaagtggatatctggtcatttggttgcttaatcttcgagttgttgacactacaaaatccttattttgatttatctgagcttcagattcatgaatcgctacaggtttgtctcactctcacttacatgatcgaaatcttcttaacatcatgagtttaataagtttgttctatcttactcttaaccagaatggcaaaagaccaaagctaccaaagaaactagagacactgatctctgaaacagaggaagaagaatcaacgaacaagctctctgaagtgtttgatctaaccgaatctgacttagacacaatgagatttctgattgacgtgtttcaccagtgcactgaggagtctccttcagaccgtctaaacgcaggagacctccatgaaatgattctttcacggaaaaagagagagtaa

SEQ ID NO: 138401 - DNA, 613 bp, Arabidopsis thaliana landsberg; identical to SEQ ID NO: 53111
  unsure (1)..(613): unsure at all n locations

SEQ ID NO: 138402 - DNA, 2104 bp, Arabidopsis thaliana landsberg
aaatatttcgtcttctcaaaatccaattcttcatcatattataagttcccccaaccggaagagaaattcaaagatcagaaaacggtgaaagatgcgacgacgaccaggaattggaggattacaaaaggccgcagctgctagggtattgatcctaaacccaatttcattgttttctctcgaatcagatttgattgaatttgggcttttaattctctatacatcaaaaacaggatcagtaccggttactaggagaaaatgtagccaagttacggactgatatgatgaaagaacagctctccacgttccgttcccagcttgaagagttcgctcgtaaacacaaggtcgttatttgttgattcttttttatattttgttgttgttgtgtttgctgttgttttgtcatcgtcttgatttcgtaataagaacatgtagtttaataacattttcctgaatttgataaaattgtggtgaaaagaggcataattttttctttggttgcagaatgacattcgtaagaatcctgccttcagggctcagttccatgaaatgtgtgctaacattggtgtggatcctcttgcttctaacaagggtttctgggctgagctccttggtattggtgacttctactatgaacttggtatgtttgctctctctttctagtgccactgaagaagatgcttctgatttttggttagctatgagtcttaagggatataaaatctcttgtgtacttttttctcttgttttgaattggacatgccctctgtgatattagaaagcagggatgtaacaattttcgtgaattcattaaataggagttcagattattgaagtttgcatgcttacaagatcacataatggaggtttgatcagcttgcaagagctctgcaaccatcttcgtcagagaaggaagaaagaccgtgaagctgtgactgaagatgattgtcttcgagctattagcaagctaaaggtttctatctaacttgtgtttttcttttttctttcagatttttaatcaatgggaaaattttgaactgttcttgctggtatcttgggattttctcctcaggtattgggtagcggatttgaggttatcactattggcaagaaaaagcttgtccgttcagtacccacagagctgaacaaagaccataaccagattttggagttggctcaggttataatcatatgagatacatatttccacaaaagaaaacaactattacatgtgttacattatatcttagtagttctacttgaagtaactcaaggatttctgttgctttccgcacagggccaaggctttgtgattgtggaagaggtacaaagacgcctctcatggacatctggtcgcgttatagatgctctcgaaactttgttagaggtatgcatttgcaattcattgcttcaattggattatgtgcttcaatacttctattatactgatagatgcaatgcaacctatgcgagtcctgaaaccttgcaattctattattcattttcaggagggccttgccatgatcgacaatggccataaagacggaaagtgtcggtactggtttccctgtgtttcttcggtttactcatccatcggatctgatacttaaatggtacatgctcagttgttttgcttgttttatacagtattaaatacagtcacactcgttacatataaattacgaagaaatcttttcagtatattactgaaattttcttgtacatgtatcactctgtaaaaaaaatatttatgcttggttgttggagatttcggtttcttctatccagtcagagtttggctcactccatgacctaggtctcaccccaagctggaaataaaacaccatctccaatgcctcaaagaccttactctcatccagaacattgttccatgctccactcacgatgcagtaattgttgttatacggtgctcgatgatgttccgcatgctgtctccgtgaaacaagtaaccccatgtcctgcaacgcgaccacgagaggtggaagcttgctcttggttccatgtgcccaagcatggaccaactggcaaagcaatacacagaatgcaaacatgcttacaaagccatgatccacatggtcatcaaaag

SEQ ID NO: 138403 - DNA, 1761 bp, Arabidopsis thaliana landsberg
taaaacgtcacccctgacgtcacatcctctagaacaccacgtgtttgtcttaaacacgacgagtaattacacatttggtcaaactcaaaccaacaaaacactttttaaacaaggctaaattggtcaaacgcatggcaacgaatctcaggcgttttttcgttttctttattattgacttatttttatttttattttattttgcttctttgaaatcttccccggcaaggcaaagcaaacgagtggacgtttttgaagattcgttaatttttctctctctctttataatataagaagtcgcctactacgtagaaccaaaagagagacaaaaatacactttcattgctgtcttaactctaacggagttaactaacgtcgacattatgctagagggagatgagaaacagagccgagctctggattttaatcgactcgaggttttgtcattactaggtcgtggagctaaaggagttgtgtttcttgtccgcgacgacgacgctaaattgcttgctttaaaagttatacttaaggaagccatcgagaagaaaaagaagggtagagaaagtgaagatgatgagtataaacgcgtgagtttcgagcaaggagtattaagcagattcgaccatcctctctttccgtctcttcacggtgttttagctaccgataaagtcatcggttatgcgatcgattattgtccgggacagaatctcaattctttgaggaaaatgcaatcggaaagtatgttttccgacgagattatcaggtaaatttgttgttgtttgacctaaatctttcatgtatacgtcttttttttttttgtcaaccacacatttgtcttagattctgttgttgatttactcattttcttgtctcgatttcagattttacgcggcggagcttgtattagcacttgactatttacataatcaaggaattgtgtatagagatttgaagccagacaatgtgatgatccaagaaaatggacatttaatgcttatagatttcgatctttctacaaatctagctccaagaacgccgcaaccgtcaccgtcactgtctaaaccatcgccgacgatgaagagaaagaaacgtctcttccgcttcaccagtttctgcaactcaggaatctcgccgcaagaatctatctcggttcactcatcatctacattggccgtgtcagattcttcaggtgagaagtcaaattctttcgtcggaacagaggaatacgttgcgccggaggttataagcggggacggtcacgattttgccgtcgattggtggtcgttaggggttgttttatatgagatgttgtatggagcgacgccgtttagaggatcgaaccggaaagagacattttaccggattttatctaaaccgccgaatctaaatggtgaaacgacgtcgttgcgtgatttgattagcagattgttggagaaagatcctagccgtaggattaacgttgaggaaattaaaggtcacgatttcttcagtggagtagtttgggaaaaggtgattttggtttctagaccgccgtatatcccggcgccggacgacggtggtgataagggcaacgatgtaaatacgtagatggatgtggtgtatatcgtccaagagatttttgctgcatgagtagaacgtgagaatcagagtggtgataacaataaaaatgctaatatgaaaattaaagataagaatagtggggaatgggttaaggggttgaataataatcacaatttagaaagtgataacaattttttggtattt

SEQ ID NO: 138404 - DNA, 2017 bp, Arabidopsis thaliana landsberg
agaccgaacacgaagaaacaaaaattcaacaaaaacaaagacaaagtttcgttttagcttaaaggttccagatttcgaaaaagctctctttttttttctccttcgtgttacacaaccatttctaggtaatgttttgatttcgaaagagctctctttataatgattttcatttgtgattctggaaatcaaatcgttctattgaaattggggattttttttcgattagggtttgtttggttcctgttaaattatcaaacgttcctgcatttaattgatttttggtcttctaatatattggagcttcttcttgttgttacagatatcattttggtgattaagttatttaagaaatggctgatcatttgagtttatgtaccgatcgtctcataacatctgagagcttggactcagagaaagattcagattcttcaggagaaagttcttaccggcctcaaggcacagacttggcttcttcatctgtgaatgaaactgaggttcctagagagtactacgcggttgcggatgaggaagaacctcttctccaatctgttgagtgtcgtatttgccaagaggaagatagtactaagaaccttgaagctccttgtgcttgtaatggtagtttaaaggtaaacacgttggatctcattgttctttgttttttattggttagagaaaattttcttattgagttttgatttatgcagtatgctcaccgcaagtgtgttcagcgttggtgtaatgagaaaggcgacataacctgtgaaatatgtcaccaggttaatcatcactctgctgctaaatgttgtatcttatctaactgctattgacactaagagaataccaattacaactaaaatgctctcttttttttaacagccttatcaacatggatacactgcacctccgcctcctcctcctgatgaaactataattcacatcgggtaaatttgcttaaacatagagagttatgacttgttgaattgttgtacaagtggattatctgtaaccagttataacaaaattaataataccttgtgaagaacttatcaagttaacaaagtagtgagtgacctgtgttgtgtgcagtgacgattgggagaacggagttccgttggacttgaccgacccgcgcattctggcaatggcggctgcagaacgtcatttcttggaagcagactatgatgaatattctgagaataactcaagcggagctgccttttgtcgctctgctgctctcatcgtaagctctcagttgagaagatgttttcttaccatgatttaatactaaatgcctgcactctaacttctgtaatggcagctaatggcacttttactgttacgagatgcgctaaatctcacaacgaacccagacgacgaggacgatccaactgccttcttctctgtatgttcatctttacttactttcactacttctttataccgtcactgactacacttgtttgtttcaatagctattccttcttcgtgctgctggttttctcctcccatgttacatcatggcatgggccatcggtatactacaacgtcgaagacaaagacaggtgtgtacacggaaaaaactctctgtatcaaactctgttatattgtaagatactcaatctaacagatgagacaatgtactgcttttgtttgtaatcaggaagcagcggctctagctgccgcagaagttactttcatgatacacggtggtgggcctcaacgcagaggactgcactttgctgtagcaccgcagccgccgatatccaatgtcccaacaccagtttgatccttaccggcaatgattctccgttaaggctattagataaaaccttgaacttggttataagaactctacctacttatgcttcttcaaatgttattatcttcctcttatgtttgtgttatctgaatctgttaaatgtctacttcggctctcaaatgttttacaaagagctctcacggtatactatgtacagtcttattattatcatatgattatataagtattatattttta

SEQ ID NO: 138405 - DNA, 243 bp, Arabidopsis thaliana landsberg
ccctataatccaccgcgatcttgaaccttcgtgagtcacactgtccatatcagtggtttctgtctcttatatgtgcagttactgacagcaaactctttctgttttcgttctgacattggtaaaactatatttgcagaaacattctgcgggatgattcagggcatctgaaagttgcagactttggagtaagcaagcttgttactgttaaagaagacaagccttttacatgtcaagacatttctt

SEQ ID NO: 138406 - DNA, 1359 bp, Arabidopsis thaliana landsberg
tatacatactcggatcagtcgtcaaaagctttggaatttgatacttttgatttttcgagaatcttgaaaatcagtcatgggttctggaaaagagcgtgacactttcgtctacctcgctaagctctctgagcaagctgagcgttatgaaggtaaggaatcttcttcttcttcttctcactcgaatcaggtctttttgatagcttcttgagctcgatttctgtttgattttactggactttgatatcatcgaacgggtttcaatcgtttggtttgattgagagtttacgaatggggaacttcttatcaaggaattagattcaaaagtcttgatttttagcagatgggtattgaaaaatgtgaattctttttttcacagaaatggtggaatcaatgaaaagtgttgcgaaattgaatgttgatctgacggtggaagagaggaacttactctctgtgggttacaagaacgtgattggttcaaggagagcttcgtggaggatcttctcgtcgattgaacaaaaggaagcagtgaaagggaatgatgttaatgtaaagaggatcaaagagtatatggagaaggttgagttagagctttctaacatatgcattgatattatgtctgtcttagatgagcatctcattccttcggcttccgagggtgaatctactgtcttcttcaacaagatgtaagctctataatgcttctttacatggtgtttaacttaaggttgtgtgtctgaagattttgttttggtttttgtaggaaaggtgactattaccgctatcttgctgagttcaaatcatggaacgagaggaaagaggctgctgatcagtctttgaaagcctatgaggtgttcttatagtgatttgtagtgttattgatcactggacattcttggtttttcgttactttacttttgagtttttgtttgtttctttcctttacagattgctactactgctgctgaggctaagctccctccaacacaccctatcagattgggtttggctttgaatttctctgtcttctactacgagatcatgaacgcacctgaaaggtttacagattgttaattatactactaagataagaaaaaagactcattgttttggagatttgagatttttttttcttgctcttttctcttcagggcatgtcaccttgctaagcaggcgttcgatgaagctatctcagagcttgacactctgaacgaggaatcctacaaagatagcaccttaataatgcaactccttagggacaatctgaccttgtggacttctgacatctcagaagaaggaggtaatgatcatcactttggacctaagcacactctttaaatatgatgttttgatgtcttacac

SEQ ID NO: 138407 - DNA, 1059 bp, Arabidopsis thaliana landsberg
aaaattgtaaccaagaaaataaaattaaggatggctttgagcggcggcgatgatcaggtacctcctggaggtcctatgacagtttcaacacgtctgattgatgccggatcgacgatcatgcagcggcgattaccggtgaagcagatgaacactcatgtctctacttttgcgatatatggtggtgacatgtcccggctaatagggactcaccactatgtccaccgcgtcaacgacgagttccttcagtgtgctgtttacgcctctgaccgctccgatgcacctctaatcggtactctttttttcataccgttttttcttgttaatcacatcgaatgccaattatgaaaacttatagcaaagttgtgttaacaggaattgaatatgtaatatccgaccgattatatgaaactttgtctgaggatgagcaaaagctttggcactctcatgcatatgaggttaagtcaggctcgtgggcttatccacgattgcctgaggttgtggctgctccggagctcaagaacatagccaaaacgtacggaaagttttggtgcacctggcagatagaccgaggtatgtctcctcatctaaatactggtccgaaaccggatccggacagattttatgtaaaccgcttctatcagttagtataccgattaatcgtatggttaaacaattagttatccggactcagaggttaactaattcaaacattaatcagaatcatagaaattctagaagtgggttcgattttgtccggtttagtttgatccgaccaatcattggttatttatgtgtgtttctgtaggtgacaagttaccaatgggtgcacccaaactaatgatgtcacctcagggggtggggcaaggggtactaaggccagagttggtgaagagaagagatgagaagtacaacatttcgacagatgatttgaaacacacgagagcggagattgctgaaccggagtggatcaatccgatggctgactactgaaagcaacatggtaagtgttttgtactcgatattgcgactgtcgaaatgaaccgtcacgcgcaattcccg

SEQ ID NO: 138408 - DNA, 1867 bp, Arabidopsis thaliana landsberg
gataaagagagtggagaggtagagagtgagcattcaggtcttaaggaaagagtgagagtagcttttgagcggattcagagcgctgtgaaaccaatccctctctcagcttcttagtagctttttaaagtcatcgttgaggtatcttaaatcatcatagagttttatccatctgatgatgtttctgttcccatgtttagtaatagtgaatgatcaagtctaatggatgttatttaagaaggtgtttattgagaaactttgctactaccctactgtgataatgatcaagtcttatggatgttatcaactatgagtttttaacttttttaggttttttcataaatcattttgctgattcgtgcttttcccatatgcatttttctatcattatgctgatctaggatatggaagcaaaagctttgtggtgcatcaagttaagaggtttctaaagttaaaaaagtactaggcttcttccagattctttgtaagacatattagtgagccttgcttttgatatttgcagtttcatgaatacacggtgtcgtttgatgcgtttctaccaagcctctaaagtacaaggcaggtctgattgagctaaagtaaggtagaagagagattgtaatgagcacattttctattatttttccacgtacaaagtatacattattcacatcagtgaatgtctcttgacctctatgttttggcaagatgtctagtgcatcaagatattaagaccaaatctctacaatattaaaatgcttaatttttttttttgtagattaaagtttcttttttaattttatttataaaagcttctacgttctaccgtatccaaatatgcatcaatatctgcagagactgcagtttcatataggcgggaaaagcaaatgcaaaaaacaaatcgaacctgacccaactaaaatcaaaggctctcttttttttttttcatttctttccaaattgtcattttcagtttcttcgaatccagacacaacaaatccgaacctgactaaaactgaaaactatgtcagcctacgagtacccgaggctctctcgttccgacattatcacggcgctcaaggatgctcaaatcgctagcgttacagagaccgatctcaaaaccccaacttccgactttgtctccgagctttacaccagaattcttatctatctcgacgccctcgacgagtatgtactcctcaaaaccctagttcctctcttagctcttcactcaattttaccctcgattttgaaactcttcgtctagtttcgagctaggtcatcgaattctgtcagaaattatgttaaatattgaatctttgggattttctatttttgattgtatgaactgctaagtaattttgaaaaccctattttttgtttcaatttgggggaatttctgatgatgcttcttttttgaattgcgtttttcgacattgtagagaagagaaagggcaagttgattttgaggctttggagcaattggagaatccaggtcatcatgccacttcaatgcaagctatgaagctttattgcaaagtgaaagatatgttagaaatgcttgattgtccattaccaattagtttcaaggatctcttacgccctgaatcatcccgaacggagtttttcatcagcgcacttttgaactatggtctatacaagtatgtctttcatgctattagttcttctctgtagtatctatttcgatgcaccaagaagttaaaatagagagttcttatttgtcccacatgatcttctttaatctttttttcgtaccagagactcgaaaatggatcttataagaccaaaggcagaagagttgggtctccttcatgagcagcgaaagcagtgtgaggcaaaggttgctcag

SEQ ID NO: 138409 - DNA, 374 bp, Arabidopsis thaliana landsberg
atataagattttagggatttggaaaaaatcttgagctatggaggcgaatgcggcggtggacggaacggggaatccgatccctacgtcggcggttttaacagcttcggcgaagcatataggaatcaggtgtatgccggaaaacatggcgttcctgaaatgtaagaagaatgatcctaacccagagaaatgcctcgagaagggacgtgacgtcactcgctgtgttcttggcctgtacgtttcttctacttcattctcgtttcaatttctctacaagttcttaatttagctgatcttagtcatataacaatttttgggctccttctgttaaaacttgatgaagattgaggataatgtcacattgtagaattaggggt

SEQ ID NO: 138410 - DNA, 1668 bp, Arabidopsis thaliana landsberg
gtttcgggttgtataatgaaaacgccggctcgtcgatcgaagcgggttaatcaggaggaatcggagacaaatgttacaacccgagtagtcctacggacacgaaagaccaactgttccaagacacgagcggctcgggtcagacccgattacccactgacccgcaccacctccgagtccgagatgaagttaatgcctccggagttctttcagatcgacgcacttgatcttgcgccacgtttgcttggcaagttcatgaggagagacaatgttgtgcttcgaattacagaggtcagactcagacacacgtttctgtttttttccagagaaaggatttagggttttaatttgggactgtttgatactctgattagatcattggtgcttactaagctaatgcaaaattaatggtattggtgcatcttgaaatactatgattgtaatatgcaacgatttaaccttgttcctcctttggtaggtagaagcttatagaccaaatgattcagcttgccatggacgatttggtgttaccccacggaccgcaccagttgtgagtttcttctttttacttgttagcatttagttacatacatacaagttgtgacttcctctgaaatgtggtttctttttttagtttggaccaggaggacatgcttatgtttatctatgttatggtcttcatatgatgctcaatattgttgctgataaagaaggagtcggagctgctgttttgatacggtcttgttctcctgtttccggtaaataatctgctcacatcggcaccggaactctgctcattatactctgtcttgtttgaggctcaaagttgtttgggttgttggcctatcgcaagtgttgaattttcatatcttttgcatgtttttactttatttattcatcaatggcattgcaggaatggagactatacaggagcgtcgtggcctgaaaaccgacaaacctgttcttttaaatggaccaggaaaggttagagcttcacaatgcatttcatatgttctttaatagttaaggaaaaaagttgaaagtatctccgatggttagatcttgaaataaacaatgagtattcttggtcaatcctcttgcattatcagctttttatctgtgcctctcgcaggttggtcaagcgcttggactctcaacagagtggtctcatcatccactttattctcctggttagtaggtcacagaccaaaatagttaatgaagtaagaccatgtctctctcaaacagtgtttaagcttttgtactaaaaatatatggacacaggaggactggagcttctggatggaggagaagatgtggagaaagtaatggttggtcctcgcgttgggatagattacgcattgcctgaacatgtgaatgccttgtggagatttgctgttgcagacactccatggataagtgctcctaagaacactcttaaacctctctaacttcaactcaaaactcctttgtacctcttctttgtaaatagacatctgcatgtcatattaactctttggtgtgtgtgttgtataaactattttgccaaagattgtgatttgggttttttggtttataaagaaaaaacaattggggcaatgttgtaaagattggaaactggaggtatatttaagctccccgaaactttctttatttattcttttgccctcc

SEQ ID NO: 138411 - DNA, 449 bp, Arabidopsis thaliana landsberg
acacttgtctcgactctgaatcactagaaacacaaccaagcttccttttctccttttgtagtaagcttggaagtgtcttggaacacaagtttgatgtcaacaatgagggttttaagtcattggaggagttggaagcgtataagatggtcgtcgaggcttgctcgatggaatgtgcgtccgagaatgagatatgttcggatgaattgacgtttgttgacaaattctgtagccatgagagcacggtgtcggaatctttgaccgatgagacccttgaggagcaagttgagatccaaccgttgaagtttgaggatgtgattgttttagagaaagaagaagaaaccatgaaatgtgaaaaggaagaagtagaagaacaaaaagtcaagcataaaagtgacgttgtcctcgataacagagaagagccgacaaaagaagaatccaaagctcaaaaa

SEQ ID NO: 138412 - DNA, 2917 bp, Arabidopsis thaliana landsberg
atggggaagagcgaaaagacgtcgttggggcgatcacttgtgaagcaccacaaccatatgatacaagaatccaaagacaaaggcaagtactacaagaatctacagaagaaagttctcgaatctgtgactgaggtcagtgacatcgacgccatcattgagcaagctgaggaggcagagcgtctttacaccattaatcacagctcctccacacctttgtctatcaatctgtatgcttctcttcttctaaattcctcttttttattgtcctttgattgattaggtatttgtggttctgtttgtataaatttaatatggtaatgagattaaagaacaattacatgtcctcttgatgttcttatggtgtgctgtttctctaatgtttttggtgaaacagagacacaaagtctagctcaagtgttatagcagctgaagaatggagagagcaacagaagatagaggaggctttacacgccagtagtcttcaagtacctcgaaggtatgtggtttttattctctttagctttattcttcctttctatcatagctctaagacaacgtttttttttgtctatcttcatctccagacctccgtggacacctgaaatgtcagtggaagaacttgatgctaatgaaaaacaagcttttctaaattggcgccggatgcttgtgaggttagctttttttgttctaccccatcttaattttacttcttcggtgtgttataaacaaatcaatatctgtcaccaaattgtttgttggtgatgataaaatttaggcagcttctgtcacatagttttgttcaaatggtaaaagctgatgctgtagttgataaaatgcatgtattttgagcaaatattctacctttgtatcgtactgagaaggtcgaaatgggataagctgagaagatctcattcttgtatccatttcccagttttgttgtggaaactgaaaatctcagttttgttgttattggtataatgtgctgtgtataagtttatctcatgtaggatagtgtttgctaaagccggaacttttatagaatcgagttgtgttcaagatatctttcgtatataaaccaaactagagtttatagatgtttgaccctaatcaatcttttggattgggaagtttataggtgttacgcatgcttacatgttctcctgtattttggtttagccttgaggaaaatgaaaagctagtgttgactccattcgaaaagaaccttgacatctggagacagctttggagagtgcttgaacgcagtgatttggtaagtctttgtcaataatgtattaaccttctcaataagttcaatttctgcgttttagttaattgcaaaacagttttgattacttatacttgtccttttttcagattgttatggtagttgatgctagagatccactgttttaccgctgccctgatcttgaggtaatgcattttctcccagcttgaaactccacttggcaccgtattcctgattcatatttacttaaagattcatcgtgacacaggcatatgctcaagaaattgatgagcataaaaaaataatgcttctagtgaacaaggcggatcttttacctactgatgtcaggttagccaatcctcctggccttaatactttgcctccaaccttttttgtattctaaccgattggtttaacttttgacttgtagggagaaatgggcagaatatttccgcctccccaccattctgtttgttttctggtcagccatagctgctacagctaccctagaaggtaaagtcttgaaagagcaatggagacaacccgataacttgcagaagacagatgatccagacattatgatatatggcagagacgagctgttgagtcgtttgcaatttgaggctcaagagattgtcaaagtaaggaattctagagcagcatccgtatcatcacagtcatggactggtgaatatcaacgtgatcaagccgtggttggatttgttgggtacccaaatgttggaaagagttctacaatcaatgcattggtgggtcagaagcgaacaggtgtcacctctaccccaggaaaaacaaagcatttccagactttgatcatctctgatgagcttatgctatgcgattgccctggtttagtcttcccttcgttctcaagctcaagatatgaaatgattgcttctggtgtacttccgattgaccggatgacggagcaccgtgaagctattcaggtggtggctgacaaggtccctcgccgtgtaattgagagtgtgtacaacatttctcttcctaaacccaaaacctatgagcgtcagtcccgcccgcctcatgctgcagagctcttaaaaagttactgtgcttctcgtggctatgttgcctcgagtggactaccggatgaaacgaaagctgcaaggctgattctgaaagattacattggaggtaagctgccacattatgcaatgccacctggaatgccccaagctgatgaaccggacatagaagacactcaagaactggaggatattctcgaaggttcagagtccgatgactctgcagtaggagatgagacagaaaacgagcaagttcctggtattgatgatgtgctagatgatctgagctcgtttgatcttgccaatgggcttaagtcttcaaagaaagtgacagcaaagaagcaaaccgcgtcacataaacagcacaaaaagccacagaggaaaaaggatcggacttggagggttcaaaacacagaagatggagatggaatgccttctgttaaagttttccagaaaccagctaacacaggtcctcttacgatgcggtgattatcaaattgtagtccatccaagcaaagatggcaaccgaagctacttaaagttttttttttttttttcaaaaaatgtaacagcagttgaacctgtcgcagtagttctcgagtgtctt

SEQ ID NO: 138413 - DNA, 1647 bp, Arabidopsis thaliana landsberg
ttaatccgctgtaagcatgtgatccaacaaccgggtgaacccgaacgctccgggtctgacgggcctttgtaccgatccatgtgagagttcaagatttgctcggaaggctcacgtcgcaggagaagatccgcaacctcgtcaacaatgctgccgccgtaccacgtctcggtattggaggctatgagtggtggtccaaggctctccacggcatttccgacgttggtccaggcgctaagttcggtggtgcttttcccggtgccaccagcttcgctcaggtcatcaccaccgcagcttctttcaaccagtctctatgggaagagatcggacgggtgagaataatttaagaatattatgctttaaaatacattttttaaaaaaggaagagaatataaaatttatgatttttctacgtgaaaaaacgacattgaaatggacattgtagaagactagaagtcatacagtagagtttgtagtgggacgctctatattttttttttatataaaattataaatcttgaatattatgattttcatttgaattatatctgactacgacatgagtctatcaaataagtccgaaacgtaagttagaaaaaatccaaaaaccgataatattttcctttagacatcaaatgcaaaaccaatatataaatttatatgggtactaccaaacttttattttgtaatgtttttgataaattacttagtgtgtatatatgctgtactgatatccacgatacttccatagttaatatgatgatgggcaagctagctataaccagtgaatataagagaatactttttaacatatggtttatatatcaagtatatttatttctttcaacaaaagcaaaggtgtgtggagaatatcttaatattgacatgatttaaaatgaataaaaggtggtgtctgatgaggcaagagctatgtacaatggtggcgtggccggtctgacatattggagtccgaatgtgaatatcttgagggacccgcggtggggccgaggccaagaaactcccggagaagatcctatcgttgccgcaaaatatgccgccagctacgtccggggacttcagggtactgctgccggtaaccgccttaaagtcgccgcatgttgcaaacattacactgcttatgatcttgataattggaatggcgtcgaccgtttccacttcaacgctaaggtaaatcttcttcacatattatatatatctaatatcgtatatagtaagaaaatattttgcaatttattatcaaatttatataaccaattttgcatgttttgtttcaaagtttgtatgcatgtttcatttcaaaattatatttttgcaattcattttgaggctaacttcttattgtttggtcgaaaaatgccaaaaatctttgaaatttagatattagacattgttatatatttgtaatttgtgtggaaataaaagagaacccgtgagtctctattttcttacaatttaagtggtttttcatttcaataaaaatttcaaatttcatttcgttatcaagaaatataaaacaaaatacgtattgaattttctgcttaaacatataaatatacttgctcgaattagaaagctctactttatgtcgttttctgttatttatagctccacgtaaccaattggatgtga

SEQ ID NO: 138414 - DNA, 212 bp, Arabidopsis thaliana landsberg
cgtttatcctctactacaatggcgaaaaccctagacaaatctaagaagcgcaaactcgtgaaatccaaatccacgaatttcgataagaaacagaagattaacaaacaacaacaacaaccagaatcctcaacgccatattcaagttcaagctccagctctgattctagcgattccgaatcagacaacgaattcgacccagaagagctccgtga

SEQ ID NO: 138415 - DNA, 1368 bp, Arabidopsis thaliana landsberg
tcgccaccggcgatctcgtccgtgaagagcttgcattttcttgacctctctctcaaaaggtgcgacctttttttttctttcccattttctgttactgtgattctgatggagattctcttctttgttcgattttggatccatatagtctgaaattgaatgtttagctaatcggactttcattattggatctgaaaatttccgtctatctctcgatagatctagtgagctaagtccatttgaaagtgtttctaactacatttgatcagtatcataacagatctattcatatatattaaagtcaatggctttgttttgtttgttatctgtatgcataattgttaaacaatctcttgttacttgatgcagctatcggagattgtaaatcagggaaaattggtttctgatgagatcattgtagacttattgtccaaaagacttgaggctggtgaagctagaggtgaatcagggtttatccttgatggctttcctcgtaccatgagacaagctgtaagtattattcgttttaagcaatttttgataatcaatctccattatcatttctaacagtggattgtcttttggttcaggaaatactgggagatgtaactgacatcgatttggtggtgaatttgaagcttcctgaggaagttttggttgacaaatgccttggaaggagaacatgtagtcaatgtggcaagggttttaatgtagctcacatcaacttaaagggtgagaatggaagacctggaattagtatggatccacttctccctccacatcaatgtatgtcaaagcttgtcactcgagctgatgatactgaagaggtggtgaaagcaagacttcgtatatacaatgaaacggtaagcccctctattgtccttttccattgctagtttatgaacaatcaggtgttaattagtgcctttttgtatttttctatatgcagagccagcctcttgaagaatactaccgtaccaagggaaagcttatggagtttgacttacctggaggcatcccagagtcatggccaaggctattggaagctttaaggcttgacgattacgaggagaaacagtctgtcgcagcataagttcactatcaaatcccggtatttaaaattctttgcatgtggaatacatatgcgtaatcaattttgtgttggaaataaaagtaaaaagaaaaccttagattgtttttcacctcaatagaaataatcatacacacttgcgcaaactattatttttccaccagccggggattttggctccatgagagaaatatgatgtatcatgattgtttgagattgctagtgacattacaggaatgtatcaatacttctacaccacttgttatgcattgagtttaatc

SEQ ID NO: 138416 - DNA, 1384 bp, Arabidopsis thaliana landsberg
taagaatcagacagaagttgcagagaaaagagaattaattgattggtgtaatggagaaggcagttcatttatccaccaaaaatggacccaaggttccaggagagccaacgaagaccggaacctccatggttgacacggcagcttcagccgtacaaagcttcgctccgattaaccaaatccaccaacatctctgcgcgtacgcttctgaaattgttaatcttctcttttcattttatctttaaacaagaaataaagaagaggatcggaagaatgagggataatcataacagtataaaacctacaccacattttttcgtttaatagatctgtcaaattcttgtagtttagatttaaaaaacattgtattgatatcttacgtaaatcaagttaatcaaattttcttgaatttttaatcgatgtgaacacgtgtggagttgtgtacatgcatgcagaatgaaacttaactatttcatatgagtttgtttgcatcagtaaaaagatgaactatatatatcctctcctttttgcgcttgtcataggtttcatttctatgcatatgacatgacccgacaagtggaggcacaccatttctgtggtcacatcaacgaagacatgcgccagtgtctgatctacgacggtcctgatgccaacgctcgtctgatcggtctggagtacattgtgacagagaagctctttatgacattgcctgacgatgagaagaagctttggcacactcacgagtgggaagttaaaggaggcttcttgttcatgcccggtgttcccgaagctattcaacggcaagatctcgaaaaagtcgccaagacttatgggaaagtttaccatttctggcaagtcgatttggggcatcagcttcccattggcttgcctaatatcatgatggctgttactcgagacggacaactttatccggaaatgatcaagggtacgtagatttgtcatttataggttatgcttagtcaaatatgcttttatgaaagttaacatgaacattttgaaatgttcaatgggtgaccgcagagacggaaaagcaatttggagtatcgatagacaaggagcgagagtcaagggcttatatgaagggtccagaccatgggatccatcccttggcaaatggaggaggcaaaggcctgaagttggagttgcgagaggttgacataaagccggttgagtccgttccaagagtcttcgtttaagttatacttaaatagacaacttaagaagaataaataaataagcgatcgagcttttcttttgtatagccctcctcgaatcatgtgtataagatgtaaaatacacttgaagtagtatattatggtgtcgtctagtggttttaaatattacgtcttcatgactccagttcatt

SEQ ID NO: 138417 - DNA, 2977 bp, Arabidopsis thaliana landsberg
ctcttccttgccttttcttctctccacttatctctctctctttttctcatcggcctttgccatggcagatataatcggcagcgaacttgtgacggagctcgtgaggcagctctatgccgtttctaaaaaaccctcagatgcagaggcatcgccaaaatctcgccaccatgatcgatggttttcaaccaacgatcaaggagatccaatacagcggcgtcgagctcacacctgatcgccaggctcagttgcgcatgttctcggaaaccttagacacgtgtaggaagctcaccgagaaagctcttaaatgcagccggtggaacatggttagacagctactccatgttaggaaaatggagaatcttcagagtaaagtgtctagctttctcaacggtcaattgttagtccatgttctcgctgatgttcatcatgttcgagccgattctgaattccggttcgatcggattgataggaaggttgatagtttgaatgagaagcttggttctatgaaactcaggggaagtgaatcgttgcgtgaggcgttgaagacggccgaggctaccgttgagatggtgacaaccgatggtgctgatttgggggtgggattggatttgggaaagaggaaggtgaaggagatgttgtttaaatccattgatggggaaagacttattggtatctctgggatgagtggttcagggaaaaccactcttgccaaagagcttgcccgggacgaggaggttcgaggtaatgacttttctttgctggcctctgattccatatcgtttgttaatttgcttggtacatctgtgtgatctctatcgcagtggctttgtggtgtttctaaatggtatattttgttggtttatcttgatgatcatgcttctattgttttgttgtatagttgagttgctaaaattgctttcatttactgcttttatacaggccactttgggaacaaggttttgtttctgactgtgtcacaatctcccaatcttgaggagcttagagcccatatatggggatttcttactagttatgaggctggggttggtgctactcttccagaatcgaggaagctagtgatccttgatgatgtttggacaagggaatctctggaccagctgatgttcgaaaatattcctggaaccacaactcttgtggtctcacggtctaaactcgcagattctagagccacttatgatgtagagttactcaatgaacatgaagcaacggccctgttctgtctctctgttttcaatcagaaatcagtgccttcagggttcagccaaagtttggtcaagcaggtaattggtctgctttaggtgacacatgcatagtagcaatgttcttttttgctttcagtactcatattgtattgactctgtttggtaggttgttggggagtgtaaaggtctacctttgtctctgaaagtcattggtgcttcattgaaagaacgacctgaaaaatattgggaaggtgcagtggagaggctatcaagaggtgaacctgctgatgaaactcatgagagtagagtgtttgctcaaatcgaagcaactctagaaaatcttgaccctaaaaccagagattgtttcttggttctcggtgctttccctgaagataagaagatccctcttgatgttctcatcaacgtgttggttgagttgcatgatctcgaggatgcaactgcttttgctgttattgttgatttagcaaacaggaatctccttactcttgtgaaagatccaaggtacggttggttataaaactctttatgatctgatctcttgtagccactttcaacggttttattcgttcttagctaatgtaattaccatcgataaattttcaggtttggacatatgtacactagctactatgatatatttgtcacgcagcatgatgttctaagagatgtagcacttcgtcttagcaatcatgggaaagtaaataacagagagcggttattgatgccaaaaagagagtcaatgcttccgagagaatgggagaggaacaatgatgagccatacaaagccagagtagtttccattcacacaggtaaggatttgttacacgaccatcttctaatgaataatttggtttgttactagaataataaagttttgatgtggatttctgttttattttacaggagaaatgactgagatggattggtttgacatggaactccctaaggctgaagttttgatactacacttctcttctgacaagtatgtattgcctcctttcattgctaagatgggcaagcttagggcgctcgtgatcatcaacaatggtatgtctcctgcgcgtctacatgacttctccaactttaccaatttggccaaactcaagagtctctggcttcagagggttcatgtccctgaactctctagcagtacagtgcccttgcaaaacctccacaagctgtctctcatattctgcaagatcaacactagtcttgatcagacagagctagacattgcccaaatcttcccaaaattgtctgatcttacaatagatcattgtgatgatcttctggaactaccttcgaccatctgtggaatcacctctctcaattccatcagcataacaaattgtccccgcatcaaggaattgcctaagaatctgagtaagctaaaagcccttcagcttctgaggctatacgcttgccatgagctgaattctctgcctgtggaaatctgtgaactgccaagactaaagtatgttgacatttctcaatgtgtcagcctgagttctcttccggaaaagataggaaaggtaaagacacttgagaaaatcgacacgagggaatgcagcttatcgagcataccaaactctgtggttttattgacttctctacgccatgtaatatgcgatagagaggctttatggatgtgggaaaaggtccagaaggcggttgcaggacttcgtgttgaagctgcggaaaaatctttcagcagggattggctcgacgattag

SEQ ID NO: 138418 - DNA, 1653 bp, Arabidopsis thaliana landsberg
atcatttctttttcttcttcctctgctttcttcctaaagcctactccttttcaatggcgacgttaggctttaacacaaggcgaatccagacaccatcacttccgagaatccctaaaccctcttcttttactaaacccatcaaaacccatcatctcttctcctccgaaactctgatgaaacgctgccgtttcgtctctagatcgttacctgagagctcactgtcgattacaaaagaacaagaggtagctaatgaagtagaagaagatgatccaacttcagagctgagctatctggatcctgaatccgatgcggatagcatcaaagagtgggaattggatttctgctcgaggcctattcttgattccagagggaaaaagatttgggagcttgtggtttgtgatgcttcactctcccttcaagtcactaaatacttccccaataacgtcattaatagtattactctcaaagacgccattgttaccatcactcaagacttgggtgttcctcttcctgagaagattcgcttcttcaggtacaaaagaaggagtattcttgttcttagtaaatagaaatgtaatctaatggtgaagttggtatttgcaggtcacagatgcaaaccattatcacaaaagcttgcaaagagcttgccataaaggcagtgcctagtaaacgggtgagtaacattttttttggtttacatgttttatttctgtgttagaagaacaagttgataaacaaaactaaatctctgcattacagtgtctgtctctgtttctgtggttgcaagaacgttatgacactgtgtacacgcgtcatcccggtttccaaaagggatcattgcctcttctgtctctcgacaatccctttccaatgaatcttccggagaacttgtttggggagaaatgggcatttgttcaattaccttactcagctgttagagaggagatctcagattttgatgagaagtttgtgtttggtgctagcttagacttggatttacttggcattgaagtggatgagaatactctgattcctggtctctctgttgctacttcacgtgccaaacctctagcaggtaactgtccggtttcttgctagaccatcttttggaacaagttagtgtcttgttgttatgtggtttttgatccttagtttatttacctgatcattatagcttggatgaatgggcttgaagtatgttcgattgaagcagacagttccaaaggatgtttgattctatcagttgggatcgctacaaggtatgtctacgcgacctataagaagacccctgtcactactgatgaagctgaagcttgggaatctgcaaagaaaacaagtggaggtttgcattttcttgcaattcaagatgacttagattctgatgactgtgttggcttttggcttcttattgatttgccaccaccccctgtttgatttcccttttgataaatgtttataccatattttgccatttagtaacagatttctcacatgcttgaatttgaacaaattgttacatgagtctgcaaaaactatggacctaggaagtgagtaaggtacaggggacgaccaatcgagtcttaacaagatcatagctaccttcacaacacaagtaatatctacacagtttggcactttccatcttactgataa

SEQ ID NO: 138419 - DNA, 1565 bp, Arabidopsis thaliana landsberg
tttctctctcattttacgaacaagaaaaaaagaagaacctttagccacctttgagatcaaaagatgaacatcgctcacactatcttcggcgttttcggtagcaactcatttcctcaacctctctctctgtctttctatcttcttcgtctttcttccatgagaaatcactgagagtactactaatccgtttttgtcgtttttctactttttacaggaaatgcaactgctctgtttcttttcttggctccttcgtacgtatcacttctctcttctatagtgaaccgatttatgattcgttcgatttcttgttgttctgttctggaaaaaaaaaactcaagattcttttttgttcgtgaatgaaattaggataacattcaagagaatcatcaagaacaaatccactgaacaattctctggtatcccttatccaatgactctcctcaactgtctcctctctgcttggtaaacaaaattccctcttttacgtttttaatcttccattagagtatagctctgtttcttacttcctctgtttctgcgtttctctgtttttttcaggtatggacttccctttgtgtcaaaagacaacacacttgtgagcacaatcaatggcacaggagcagtgatcgaaacagtctacgtgttaatctttcttttctacgcaccaaagaaggagaaaattaagatctttggtatcttctcttgcgttttggctgtattcgcaacagtagctctcgtctctctctttgctcttcaaggaaacggtagaaaactcttttgtggtctcgcagctactgttttctccatcatcatgtacgcttctccactctccatcatggtaagcaaactcaggattggatctttttaaagttctactctttacttttggattcattttgttaaattttgtgtttggttcattgatttacagagattggtggtaaagacgaagagtgtagagtttatgccattctttttgtcactctttgtcttcctctgtggtacttcgtggttcgtctatggtctaatcggtcgtgacccttttgttgcagtaagttacaatttctccttcttgtgttgttttctctggtaaatatcaaaactttgtttctaactttgggtttttgttgttgcgaagatcccaaatgggtttggatgtgcattagggacactgcaattgatactatacttcatctactgtggaaacaaaggagagaaatctgcagatgctcagaaagatgagaagtcagtggagatgaaagatgatgagaagaagcagaatgtggttaatggaaagcaagaccttcaagtttaaaagagcttttgaggatgatttggttatgtgatttcgtattaactctgcttaactagagttttccttttcgtttcgttggaatgtaaaaaaaatgatgctgaaaaatgtaacgtttcctagtttcgtactgatacactagtgattgatgaagaatgacgataccttttgtgagttttatggatctaatgagcttttgagcttaagagttaaaactgataagcctaatagtaagtgagaaccttagcaaatt

SEQ ID NO: 138420 - DNA, 244 bp, Arabidopsis thaliana landsberg
accaaaaccccacaaagcttggaaagagccacaaataggtcaaagaatgggtgaagacaagaagacggcaagggagacggtggaggaggaaccacttagcccatgttcacggctgttcaattcgccggattttaactgtgcaataatcgttacaatgggatctaaagttaaaggagacacaccagccatcatccacggccttgaacacaccctcgtaaaccaccctcgcttctctagcatttta

SEQ ID NO: 138421 - DNA, 795 bp, Arabidopsis thaliana landsberg
caataatctcagcttgaatcacactgacgaaggcatcttcctgcgattatggcgtcgccggcaggtgaaacagcagcggttgttgagggcggagatgggcagcagcaacgacaagctggtgggtttgggcagacaattaccggaatcataagaatcgccgtcttctgttactttgcttctaagttcttttctcccaaacaaaaacctgcggatccttccaagcctactcatctcatgtccaatctatttcagaggggcgagcccatagtaatcttctggttaattgtgttgattacttgcttattcgttaatatatgcaatttcattcgtttctctcttcttccaaaacaaaaaaaaaaacgtttctttttggttcgaaacttcgaatcagagtttttcaacttctgggtggtttagggtttttccgttttgtgtttttgtttgtcaggatatgtggttttatctttcggagcatgagaaattcaatgacttcggcaatgaaggtgcgcttatttggcatgagacaaacataccttatgctgtgtggaaaccagagagcactaggaccttgtcaatgacgtactatccttccgaggtaatagaagtttggttttttttcatatgcttccttcgagattaatatatttgctgcattgaattaaagatgtttgttgttccaggcactgaagaataatggaagtctgtatgctcatgtcttctttgctcgatctggttatcctatagatcttagtgatcctgaataccagcctctcaactgctttggcaggactcacc

SEQ ID NO: 138422 - DNA, 393 bp, Arabidopsis thaliana landsberg
cttcttctctcttcttcaccctctcatctctctagctccatagagaattgacggattcatcattcatcacctcatcaaaagctcagtaacgcagatctgacgaacctcgaggccggttcatgatctaagatcagatctggaatcgaaaacaacgaatatatacataactacaaagaattcaatcgaattaaacgaatcaattatcagatccagctacgagaagccataatttaccagatcttcaaccgatcttcggagctcaaccgcgacgatccgtcttctgacgaggaatcaaccggagcctctggatctcttcgtataagacgccgatctgtagatcggaaggagatcagtgacgatcttcatcggaaaacctccgagaggactatatag

SEQ ID NO: 138423 - DNA, 931 bp, Arabidopsis thaliana landsberg
ttctcttctattccagttcgttctttttcttcctcctatttacttcttctttggtttcaagttttgatttttatgttgtgtttcttaaccttataggagaatcgaattgagctttcttgatgcaatgtttgttggtgataattcggtttttcttataatatattgtgtgtatcaatctttgttgtgaaggtataatgaaacctttgatggagttctattggcttatgatgctactgtgaaaagcaaacaagctaaaatccttacaggacttcatccttactttggcgtcagggttaacactagactactcttatttgatcctaagcccaagagttttgtaggttagaagatctctattaaactttgtattgatctctgctactttttagtttcttgttagtgagcctttatgtgtttatggttggtgattttctcttctttgtttttatgcagaagggaaaattgtgaagatttctccagagtcaatccatgttattggtcttggtttttctgctgctgtcattacagacgttgatatccgggaagagttcaaatacagagtggtatgtatgactgataggtcttgaatgttactgtattcctttcttccgactttgttaaaacagactataaccttttctctctattcagagagatggtgaaggttctttcgtgagcagatcgcataaacggcatgcactaaagcttggaactatgttgcgccttcaagtccaaaggttaaacttttagcttctctgctctactgtttttttcttgtcaggatagttttctaggttaatgtattgtgattatttcttgcagttttgatgaagaggttatgcatatagctggatctctacttccggaaaacacaggatgcgttaagtggctcgaaaagaagtctgatgtagctttgccttcggataggtta

SEQ ID NO: 138424 - DNA, 822 bp, Arabidopsis thaliana landsberg
gtcgaacaaaagcagctgaaggttggttttctcctattgttatctcagcattcaccgggccggtgacattaatttttcttgtctaacatttctatttttcttactttttccgaatcagggatctctgtacctgataattcccagggacagagtgacaaggacacttcaatccctgagacagacgagaaaggtataagcttgcctacatttggttttgagtctaagttagtttgttaggttctagtttatcattaaatttgtatttgcatcagtatctccacccgagaaaaaattagagaagccagttgagcgcaaaaaagtagagaaaccaattgagcgcaaacaagtagagaagccagttgagcgcaaaaaagcagagaagccaattgagctcaaacaagtagagaagccagttgagcgcaaacaagtagagaagccagttgagcgcaaacaagtagagaagccagttgagcgcaaacaagtagagaagccaattgagcgcaaaagaccaacaaagcttcatgttgatttacctgataaagaaacatgttcagataagcaaaggtatgagttttataataatgggctgatgtttttctagatatatatatcctcaatgaatgtattattgcctttgctgagattaattatgtaattagaaagatttgttgttcttgttttacttgcatatatatgtatacttttttaaatgggtgaagagttgcaagaactgtattattgggtgggcttgctaatgctgagatggcagatgaagttcatagttcagtcaaagagattggcactgtgtgctctgacagatat

SEQ ID NO: 138425 - DNA, 143 bp, Arabidopsis thaliana landsberg
gttttgcctttcctaagatcatcgagagagaagaaaagggaaaacaaaggatcttccatgggcgatcgctgagaagatccgcaagaacaaacacatcaaattccttgaaatcaggaatcttattcgatagtctatttgagccc

SEQ ID NO: 138426 - DNA, 2680 bp, Arabidopsis thaliana landsberg
ttcatctcctcttcctctggtctttttttcttttgttgcgacttttcttcttcttcttcctcaggaacttaagtttctgagtccatgaagatgccagtaagtacgtttctccctttctttaattcttatttttgatttttttgtctaatgagtttggcttaatctctgtctgcaattctatgattctctcagttaaattttggtaaagaaaatcatatgaaatcgagatagcttctaggattcttacctcagttctgtgttatttgtttgtaatcgagacctctctgcagccaaatctagaaatctgtctttagattcctctgttttttttttgtacttacaggctctgttacttggatcttcatgtcagtgtgttctgattgatgtttttcttatgaccgatgcttctgtttagtttcatagtttgaagtttatgaactcttatctctgtttatgaggttttccaagaggagaacttatcagattcccctgaatttcttccatggaaaccgaaaatataggagagttcatgtttttaatcagatatgattcttgtcaaactcaatttacgtttagctttcccggaatttcctttacgcaaacgttttttgtttcccttcacatatgactatcgttagtcatcacatataagatttgctaacatcatcagttttgatctaattttgtcgaatttagactgattttctcaagttgtaatgcaggtggcattggtctggctactggcattcactattctactgatcagtggggaaggcaataatgccatctgcaaggagaattttaagttagaccctagacctcatagtgtttcgatcctcgagtttggtgctgtgggagatgggaaaacgttgaacacacttgcgtttcaaaatgctgtcttttatctaaagtctttcgctgataaaggtggtgctcagctttatgttccaccagggaaatggctcaccggaagcttcaatctcacaagccatctcactctcttcttggagaaaggagcaacaattcttgcatcaccggtatgagtgacctctctagcaaatcttgtaaagctaaatagtgttctttaggtatctatagctctttaagaagtgtttggtagacaagttttttgtaacacggtctctcaattgttgtctaatgtgctaggatccgtcgcattgggacgttgtcagtcctctaccgtcctatggtcgcggaattgaacttcctggaaagcggtacagaagtttgatcaatggagacaatctaatagacgtagtcatcaccggtaaacaacaaaatcatgccatcattaccttaagtttctggcttgacaacattaagactcaaagcttctttattttttggtaggtgaaaatgggacatttgacggtcaaggtgcggcatggtgggagtggcttgagtccgggtccttgaactatagccgacctcatatcatcgaattcgtctcctctaaacacatcctcatatcgaatctaaccttcttaaacgcgcccgcaatcaacattcaccctgtttattgcagtcagattcatatccgcaaagttttgatcgaaacatccgttgattctcccacgttcttggagttgcccaggtatataccatttcctcattcttttccatcactacaaaatgttaccgtttgaaagctaatttcttgaaccgtttttcttcaagattcttcggacaatgtttgtatcgaggactcaacaatcaacgttggccacgacgcggtttctctcaagagtggttgggaccaatacggtatacactacggccgtccaaccaccgctgttcatattcggaatctcagattaaagtctcccaccggtgctggaatctccttcgggagcgagatgtcaggcggagtctcggatgtgaccgttgagcgtcttaacatacacagctcactcataggtgtagccttcagaaccaccagaggcagaggaggatacatccgtaatatcacaatctccgacgtcgatctcacaagcgttgacacagccatagtagccaacggacacaccgggtcacacccggatgataaattcgaccgggacgcactcccagtcgtgacacacattgttatgcggaatttcaccggagttgatataggagtagccgggaatctcaccgggatcggagaatctcccttcacgtcgatatgcctcgcggatattcatttacaaacgcgatcagaagaatcttggatatgctccaacgtctctggtttctcagacgacgtatcaccggagccttgtcaagaactcatgagttctccttcgtcttgcttcgccggtggtagcatatacgagggtgatgcgacggctcagtcgtattacagttggtaattatagtaaaataaaatggtgatgaagaagaagaagaagaaaaagaagaagagagtgcatgaggttacgatacgattggattttcgaattttttttgtcaataagttcataaaatttgttgtcagagagcgagaggaagaagataaaaaaagaaaaattacgttttaaggtggtgagtttcaagaacagagcgagcttttctattgtattaatgtacagcttccatttctttcattcatggtgtaacaaaattcatctttttttctttctgtgaagaagaaaataaaaaattatatgtgaaatgatta

SEQ ID NO: 138427 - DNA, 469 bp, Arabidopsis thaliana landsberg
aagtacgaggtggttctactagttggtctcgggattggagccacaccaatgatcagtatcgtcaaagacattgttaataacatcaaggccaaggaacaagcccaactaaaccgaatggagaatggaacaagcgaaccacaacgaagtaagaaagagagtttcaggacccgtagagcttacttctattgggttacgcgtgagcaaggctctttcgattggttcaagaacataatgaacgaagtcgcggaacgagatgccaaccgcgtcatcgaaatgcataactattgtacaagtgtctatgaagaaggtgacgctcgttccgcacttatacatatgcttcaatcactaaaccatgcaaagaacggcgtcgacattgtctctggaacaagagttatgtcccatttcgctaaacctaattggagaaatgtttacaagcgtatagctatggatcatcctaacaccaaagttg

SEQ ID NO: 138428 - DNA, 245 bp, Arabidopsis thaliana landsberg
gaaaccaaatttgctgaccttggagcagattctctcgacacggtatccattcactcaagtggcaattaacacaacttcttaattttcttgatactgatcaactgagtgtttttcttcaggttgagatagtaatgggtttagaggaagagtttaacatccaaatggccgaagagaaagcacagaagattgccacagttgagcaagctgctgaactcattgaagagctcatcaacgagaagaagtaa

SEQ ID NO: 138429 - DNA, 705 bp, Arabidopsis thaliana landsberg
ctcacaagtggttgggaaaaagataaaaatgatatcttgagtgtccacgtgtcaccattttctatccaaatcactccaagtaagtcatactttggcgccctctgtcacccatgtggaatttagccactatctctctccctcccatgtttatcctgcgctgacttcccctcacccgtcatctccgccggtttgatctggaattaggtgagggctttgtccactacctcattggtttatttgaagtgtgatcgctccttcttgctttgtttttagatttctgttcttgttctttgatgtaatttatgtttttatggtcttgttctctatgctttgttaaagttgtgtgttatggccattgataaaatgcagttatgtgttactttttactgaaacagacatcatctgagacccagttgagctagcaacaatgtcctccatgcgatattagcaactgttcagggtttataagtctcttgcagccagtttgattaattatgccctcgtgtatatttgcttctgaatttataaattggtctctggtagttccttgttgcaaattctaattttgatatgtgatttgttcagatttggacattgttgcttgatccatatcagagaaggaagttggtgatcggatgattgcacggttgcaacagttgacgaaatttgacaacttgcagtgacagcaacgtgctttaaagaact

SEQ ID NO: 138430 - DNA, 698 bp, Arabidopsis thaliana landsberg
ctgaaaaatgtcgggaacttgttggacaagaagctgcatcaaagagtggacagtttacattcttgaattgctttgatatgagttcagggactttagcatgtgcagttaaagaaggtgtgaagctttatttctacaatataagatctattcatgtagagaaggccaggaacgtcgctattgagaaagccttgcacgaggcattggataatggcatgcttgcaaaagaagcagccaaagaggggcagagagcaggtgaaaaagcggctaaactggcgacgcggcaagcgaaacgtatcataggaccaatagtagcagctgggtgggatttctttgaagcgctttactttggagggactttaactgaagggttcttgcgtggtactggaactatggttggtgcttactcaggagggtacgtaggtgagcagagatttggtagattcggttatcttgtgggaagtaccttagggaattgggttggcgcacgggttggacttatggtttatgatgttgtgaatggggtaaacttcttctatgagacttatcaatctggagaaatatatgaggatcagtctacaaatgaaagtcccgaggaccggtctacatatgaaagtcgtgaggacccgtctacatatgaaagtcctgaggacaggtctacttatgaaattcgtgaggaccagtctacatataaagtctga

SEQ ID NO: 138431 - DNA, 205 bp, Arabidopsis thaliana landsberg
cccgttcaccgaaaaatgcgccggcgatgatgaaagtgacgtagacggaattacggcgcatgataagtttgtaaaagccttcgaaagcgcctttctgatttctccgagcagcgtactccatgattgattggttgttttcaggtatctgatctctctacgtattttagggttagagaaagcgatctacgacaatggcgagacgaag

SEQ ID NO: 138432 - DNA, 1724 bp, Arabidopsis thaliana landsberg
caacactacaaacaagaaacacatactctctctcaattcatatttcctcacttttgatcagtgtgatcacgtagagtgccttgaaggagaagaaagaaacaaaaacaaaggaaaatgggatacctttttcaagaaaccttaagctctaaccctaaaactccaattgttgttgatgatgataacgagttggctttgatggccgtgagacttgccaacgccgccgcctttcctatggttctcaaagccgccctcgagcttggtgtctttgacactctctacgccgcagcctctcgcaccgactcattcctctcaccctatgaaatagcaagtaagctaccaactacacctcgtaaccctgaagcgccggttttgttggaccgcatgcttcgtctactcgctagctactccatggtcaagtgtggtaaggccttatccggaaagggcgagagggtctacagagccgagccgatttgcaggttcttcttgaaggataacattcaagatattggatcccttgcttctcaagtcatcgtcaatttcgacagcgtcttccttaatacctggtaagtttttatttcattgatgttgagttcttcaataagtcactaatatacgcaaatgaatcttaccatatcgatacgggatttttgcagggcacagttgaaagatgtggtgctagaaggaggagatgcgtttggtcgcgcacatggtggtatgaaactctttgactatatgggtacagatgagagattcagcaagctctttaaccagaccggattcacaatcgcggtcgttaagaaggcccttgaagtctatgaaggcttcaaaggtgtgaaagttttagttgatgttggaggaggagttggtaacactcttggtgttgttacttctaaatattccaatattaagggtatcaactttgatctaacctgtgccttggcacaagcaccttcttatcccggtgtggagcatgttgccggagatatgtttgtggatgtcccaaccggagatgccatgatcttgaaagtaagcttaacaacttattacttacatgttttggaagtaacttattacttatatgttttggaagtgtctacatgctattagaattttatactaattttaaatatgtttttacagcgtatacttcatgattggaccgacgaagattgtgtcaagattcttaagaattgttggaaatcactacctgaaaacggtaaagtggttgttatagaattagtcactcctgatgaggcagagaatggtgacatcaatgcgaacattgcctttgacatggacatgttaatgttcacccaatgttctggtggaaaagagcgatcaagagctgagtttgaagctttagctgcagcttctggcttcacccattgcaagttcgtttgccaagcttatcactgctggattattgaattctgtaaataaaatgtgtgatacaaatctaaatcgtcgtttctagtatttttcttttttgttgatatgtgaatatcgttgttatttcttattttcatatttgtttgaaatggtcatgcatgtctttgtcttcaagcaatctagcaataaaaataaggttttataatttctcattgtactctccgagtcacatgaaatattcattcatgtccttttgaatatatagctcacaagtcacaagtgcatattcattactccacggtcggctactttcattttgtttccttcctctttca

SEQ ID NO: 138433 - DNA, 824 bp, Arabidopsis thaliana landsberg
  unsure (1)..(824): unsure at all n locations
ctccatttggaaatccagatcatgctctagagccctagtttagatctcgaaggaagacaatgggacggatcttcgagtacttcgtcgtgtgcggacttggtccagagatgcgaaccgtggatggagatcttggattccatggaatgcaaacattctacttgcctgctcttcttgaccagttccctcctactgatcaatctccttaccctgcccctcctcctcagcttcctactgttaagtttttcacaacatcttttgtaattctcgtcgagattaggattttgattgggtttaggtccatgctggtaatttctttgttgttaaacnnnnnnnnnnnnnnnnnnnnnngttgtctagttgttaggtttcttctgtatttgctaaacgaagcatttcgaagttattaactggagataaacgtgctgaattggattgatgttttctaggtacctctaattaggtctctagattagttaagttggaatattaaagttgaattgccttctaccaataaggagcttttgaaatttctctcaaagtgtggttatatttctttgcttttggtcttgtgcttgtagtttgcttttgatgctccatggtgaaatgagtcatctgtttaagagtttaacttgcttgattaggttaagccttttaagagtttgttttctttcgttagataagactagatatattaaacaagcggatttttatgattacgcttcattttcttttggacagtgtgttcttcctgctggggtggagttccattcttctggttttgtttccagtgaccctgcaagtttcccacggagctatcccatagt

SEQ ID NO: 138434 - DNA, 1317 bp, Arabidopsis thaliana landsberg
  unsure (1)..(1317): unsure at all n locations
tcctcaatcacaacaccatcactctccgtcgaaccaatctccgatggattcgatttcatccccataggtatcnccggtttcagcgtcgatacttactcagaatccttcaagctcaacggatccgaaaccctaactctcctaatcgagaaattcaaatccacagattcaccaatcgattgcttaatctacgattcgtttcttccttggggacttgaagttgctagatctatggaactttcagctgcttctttcttcactaataatctcactgtttgttctgtgttgcgtaaattctctaacggtgactttcctcttcccgctgatcctaattcggcgccgtttcgtatccgtggcttaccgtctttgagctacgatgagttaccttcgtttgtgggacgtcattggttgactcatcctgagcatggcagagttcttctgaatcagtttcctaaccatgaaaatgctgattggttattcgttaatggctttgaagggttagaagaaacacaagtaagagttttgattctactataaagtttgaaactttatgttacattgttgaattgaaattagaactgttgttttgattaggattgtgaaaatggtgagtctgatgcaatgaaggcgacgttgatcggaccgatgattccatcggcttatcttgatgatcggatggaagatgataaagactatggtgcgagtctgttgaaaccgatatcgaaggagtgtatggagtggcttgagactaagcaggctcagtcagtagcatttgtttcgtttggttcgtttgggattctctttgagaagcaacttgcagaggtagctattgcgctacaagaatcggatttgaacttcttgtgggtgattaaagaagctcatatagcgaaattgcctgaagggtttgtggaatcgactaaagatagagccttgttggtttcttggtgtaaccagcttgaggttttagctcatgaatcgataggttgctttttgactcattgtggttggaactctacgttggaagggttgagtttgggagttccgatggttggtgtgcctcagtggagtgatcagatgaatgatgctaagtttgtggaggaagtttggaaagttgggtatagagcgaaagaggaagctggggaagtaatcgtgaagagtgaagaattggtgaggtgtttgaaaggagtgatggaaggagagagtagtgtgaagattagagagagttcgaagaagtggaaagatttggctgtgaaggcaatgagtgaaggaggaagctctgatcgaagcattaacgagcttatagagagtttagggaagtaa

SEQ ID NO: 138435 - DNA, 861 bp, Arabidopsis thaliana landsberg
gccacaaatattgagtatgatgagcataaaggacgcattgctattggacgactacacgcaggggtactgcgcaaaggaatggatgtcagggtaacattttgattatcttgaacttattgctttgttatgggacagaaataatgtgggatcatagaaaaaatatcaccttaagctagtcaatctctcaagtctttacaccttgtagagcaggtggcctctgccaatatagcgtgtaaaagatagctaaatggtaagcaggacaagatattctcggacaaagtttctattaagtttcctaggtttctaattcattaaattttgtgatgaaatacgtccaagacgtaattgaatgggggatggtaccaaaaccttaagaatcagcgagaatattatacaaactcaccaacttcttgcagtacttatatggtttatagtagacttactgtggtataactttacaggtgtgcacttctgaagattcctgtagatttgcaagagttagtgagctttttgtatatgaaaaattctacagagtacctactgattcagtggaagctggaaagatttgcgctgtatgtggcatagtcaacattcaggtacacacgtatatgccaatagataatttgatgccaaatgtgagagactgttgtaactctggtggataatttctgccacttatcatttttctttttgttgctaattgagttgtaacaatagatttccttgtttaccctaaatttgcagattggggagactattgctgataaagtacatgggaagcctctacctacaatcaaagtagaagagccaactgtgaaaatgtccttctctgtaaacacctctccattttctggtcgtgag

SEQ ID NO: 138436 - DNA, 1337 bp, Arabidopsis thaliana landsberg
gccctttcataaccttgtaaaccattaagaggctttgctcaattacaagaagaagaaaaaatgcctgtcgacgggaaactcgtctgcgtcaccggagccggcggctacattgcttcttggatcgttaagttactcttagagagaggctacaccgttagaggaaccgtaaggaacccaactgatcccaagaacaaccatctcagagagcttcaaggagccaaggaaagactcactcttcacagtgcagatcttctcgactacgaagctctctgtgccacaatcgacggttgcgatggcgttttccacactgcctctccgatgaccgacgatcccgtaagtagacaattctattaatcggttgagtggtattagtatagtactcatgttttcttagttttcattttctgaattaatgtaactaattaggagacaatgttggagccggcggtgaacggagccaagttcgtgattgacgcagcggctaaagccaaggtcaagcgcgtggttttcacgtcatcaattggtgcagtttacatgaaccctaaccgtgacactcaagccattgttgacgaaaactgctggagtgatcttgatttctgcaaaaacactaaggtattgttttttatctatgttataagttttcgagatgcgctgctaagtctttaacaaagagtgttctgcaataaaatcgagcatgcggctagaattaggtctttagccttaaaatcttggttacttttggaattctaaatttcctttttgttttatcttccttctagaattggtattgctacgggaagatgttggcggaacaatcggcgtgggagacggccaaagcaaaaggtgtggacttagtggtgctaaatccggttttggttctcggaccaccgctccagtcagcgatcaacgctagtctagtccatattctcaagtacctcaccggctcagccaagacctacgctaacttgactcaggtctacgtggacgtccgtgacgtggcactaggccatgttctggtctacgaagcaccctccgcctcaggccgttacatcctcgccgagaccgcacttcaccgcggagaggttgttgagattctggccaaattcttcccggagtatccacttcccaccaagtaagtcaagtttggctcttttgcactctttggtctgtaaatatcagagtcatcacgatttagttttagtcggtctaatatatacaaccttggatgtacgatcgatcccagttttgtttgtgacacaccacgcaatgtatgacttgaagaacttgaacatatctattcagaaaaattataaatatttagttaggataaaacccac

SEQ ID NO: 138437 - DNA, 1282 bp, Arabidopsis thaliana landsberg
agctataaccggttgggacgagaagctgaggagactgatgcagaggagatcattgagatggctggtaaagccactttatctgagcagcagaagcaagttcaagagaacattcactaccaagttgaaaaattctgctctttgatggatggaatccttcttcctgatgttaggaggaacgagtcggggtcacaatcaacaaaccctcgtcctcctcgtagaagtggtcttactttcgccattggtagtaataatgcttttccacatgcagatcagccccgtaagtgttttactttacttgaatcgatttgtgaacttcttactcaatatttttctttcaacttaattagtattctcactgattcttcttcagcacagttgttcccgagacaaagcctttgaaactcgctgacgtctcacagagattaatggatcaaatgggctacaccctcgagatcaaaccgtctgtaatacctcacaaagacgctggtcaaggttgttttatcaaaggcgaagcagatgttggaactgtcttagccttttaccctggagttatttattctcctgctttctacaggtacattcccgggtacccgaaggttgattcacagaactcgtatctcatcaccaggtatgatgggactgtgataaatgctcaaccttggggtcttgggggagaatcaagggaagcctggaacgggtcctacactcctgcggtcaaaacaaacactaaaaccgcagaaaacggttcagacaggttatggaaagcgttgagcaagcctctcgaaggttcgggtaaaggaaaagaggttcttgagaggagaaatccgttggcttttggtcacttagctaaccacccggcgaaagaaatgactccaaacgttatgatatgtccttatgacttccccttgatggcgaaagatctgcggccttacattccgaatatatcttttggggattctggagaaataaagatgaagagatttggaagcttctggttcaagacagggagtaaagacgggttagaagccccggttctgaagacactggtgttagtggcaacgaggtcgttgtgtaatgaggaactattactgaattacaggctgagcaactctaagagacgaccagattggtatactccggttaacgaagaggaagatcggagaagatggagctaaagttctcttttatgttttaatgaaacttgaaaggctctgtttcaaaacatgctcctcggttttctttggactattagtgcgacgtcgttttctgagtgtttcactat

SEQ ID NO: 138438 - DNA, 204 bp, Arabidopsis thaliana landsberg
ttttgtataaatatatagttgattgcgtgtgaataaattggtttttgttttcttcatagcacatcttatcccagaatcctagtcaacgattcagccaaaaaacaatgtcaacgagttttattttttatcgccgtccaaaattttgagccaaaaaacaaagtcaacgacaaaagtggtcatgaatatcgtctcacgattgactga

SEQ ID NO: 138439 - DNA, 2160 bp, Arabidopsis thaliana landsberg
gatgttattggtgctgcagagacaggatctggaaagacacgtgcttttgggttgcccatactgcaacgcctcttagacgagcgggaaaaggttggtaaattgtatgcattgaagggagaagaagcacagaaatatgctgcagatggctatttacgagctctaatcatcactccaactagggaacttgctcttcaggtatccttgactattaccacattgcttcttttttttttttttccttctgacatgcttctttgttgacttgtgggtgggtcatgaggaagttctgagatacaattccaacttttcccttattccaggtgacggagcatcttgagaatgctgccaagaatcttagcgtcaaggtcgttcctattgttggtgggatgttttcagagaagcaggaaagacgtttaaaagagaaacctgaaatagttgttgcaactccaggaaggttatgggaacttatgtccgctggagaaaagcatcttgtagaggtatgcaatgcataaacggagagtaaaaagaatcatgtgcttccattagtccggtatcttgcttttacattaacagattttgatgtagttattggatttatgcgtagatgcagtaatcagtttgtaatctaataccattttcctgaagttgagtatgtctgctaattaaggcacgtgtaaaattgttattactgttatatagctattcttagacactaaattgttctgtcgttttctaatcatctttggcagctgcattccttgtcgttctttgtgttggacgaggctgatcgcatggttgaaagaggtcatttcagggagctgcagtctatactcgacttgcttccagtgacagataaaccaaatgaagggaaaacgcaaactgtgaagagtaatgacacagttttaaacgtcccgaagaagaaaagacaaacttttgttttctcagccaccatagcgctgtcttcggatttccgtaaaaagctaaagcgtggctcctcaaagtcaaagcaatcatcatctggtgaagtgaattctattgaggttttatctgaacgagctggaatgagagataatgttgccatcattgatctgacaactacatctattttggcaccaaagattgaagaatcttttattaagtaagtactatttaacctatatccctccgaagcttttaatttgactgggtaataagtaagctttcattgcttggaggacaccatgcttctactcattatttgcttgcaaaacatccagaaatctttgatgctacttattcttttggtctatctcggtgttcttagtatatttatcttataacaaactacaggtgcgaagagaaggaaaaagacgcatacttgtattatattttgagcgtccatggacaagggcggacaattgttttctgcacatcagtgactgatttgcggcatatctctgggcttttaaagattcttggacttgatgtttgcacactcttctcagaaatgaagcagcgagctcggttgaaggttgaactttctattgcttagttatttgtcatcatgactccttttgctacaatattttgttgtgtcctgagttcaagggggtttcggaaacacacgtatttgcttactagtgttacttagcatattttcctttcctcactctttatatgtcacagtcaatcgaccgtttccgtgcgagcgaaaatggaatactcatagcaacagatcttgtagcaaggggtattgatattaagaatgtccgaactattattcactacaaacttccacattcggcagaagtaagcttcaaccgtctctaagttttctagtttttgattgataacaattttacaagctctgagccttttatccatataggtgtatgtacatagatgtgggaggactgctagagcattcgcagatggatgcagtatagctttgattgagccaaatgagacgtccaagttttacacgttatgcaagtcattctctatggtatatatatttacactcccaaaccaaagctttgatatcctcaaaagttagtttatcataaagaaaaacactgatttgggtaatgctaaagtaggtatttttacaaacgtttgaccactttcatgctgaatgttcctttgtttgtgcttacaggaaagcgtaaagatattcccttt

SEQ ID NO: 138440 - DNA, 1799 bp, Arabidopsis thaliana landsberg
atgaaacattttgcagctgcaaaggtgaaagaagagccgattcgcctccaagatatttcctcaacaccagatgttaaggaaaatcctgcaaatgcctccttgatggaggagactgagcttatttgtctcagtgatgttactgcaacatcaggcgccatggaacattctgaagttattctaaaggaaagagaagaactgattcacctccaagatatttctgtaacaccagattttaaggaaaatcctgcaaatgcctccttattggaggagactgagcttatctgtctcaatgatgttacttcaccattacgcgccgtggaacattctgcagttcttttaaaggataaagtagagccgattcgcctccaagatggtggttctttaacaccagattttatggaaaattctgcaaatgcctccatattggaagagactgagcttatttgcgtcaatgatgttacttcaacatcacgcaccatgggacattcttcagttgttttaaaggagaatgaagagccgattcgcttccaagatagttctttaacaccagattttaaggaaaatcctgcaagtaccttcttagtggaggagactgagcttatctgcctcaatgatgttacttcaccatcacgcgccatggaacattccacagtttttatagaggagaaagaagagctggttcgcctccaaaatattacattaacacaggattttatggaaaatccggcaaattcctccttaagggaagaaactgagcttatttgcctcaatgatgttacttcaacatcagaggttgctgaaactcctgaagatgtcttagagggaattgaacttatgtcaatccatgatatatctctagacgaggtttctgaatcagtcactacgaatcaaacctctgttgagatgtcaaaggagagggacactcaccaagctgatattacctctctggaatctgaatatatagttgtaccatctccaaattccatgcctgaaaattcaaccgataattgtaagtttaaacttccatttaaatgcaagactcttatgtgttttcttctccagctttgcatgtatgatggctatgaactgtaaattaaagatatatagtgcttaaattatacactagtaggtatgggtttctgataaagaaaatgaattttcatatcaggtgtatcagataaaaaggaaatgaaagagacatctcttaggatctcttcattgtctgaaatggctccacgggacgtcacttctcacacagaagcagctcttgagtcagaatcttcttccttcaactcaatgtcagtggcagcagaaacaaaccaatattcaggtgaattactggatcttgcagatgcatacaatatcgttgtaggaaacgaaggtcactatgatagtaatggaagacaacaaatagagaattggatgaagaaagatacgtctagagttagcgaagaccttaaagcacttcttactcaaatatcagcttctcgtgggatagagtttttgtcacctagagatgtaagccccaagatttctgttaacagtagcgatcaagagacaaagaacctagatcatgatatgcagctgctacttcaaaagagaatgcttgaaaggaacgagagtaacttatcgttggaaggagtttctgtgactgaaatcgagggtgaaagtgagggtgatcggttgaaaagacaggttgattatgataggaaactgctgactggtttatataaagaattggaggaagaaagaagcgcttcagcggttgctacaaatcaagcaatggctatgataacgag

SEQ ID NO: 138441 - DNA, 450 bp, Arabidopsis thaliana landsberg
cttaaaccccattttatattttagtcggagctccggtgaaataaaatggcggcaaagattattggtggatgctgctcatggcgacgcttttacaggaagagaacatcatctcgatttctgattttctctgttcgagcctctagttccatggatgacatggacaccgtctacaagcaattgggtatgtctctgttgagtttttaggagaagcaaaatagtaaatttggaactggttttaggaaatttgttctatacagattaaagttgagagctttatgattttggaaagttggtatatatttgttgagattttgaaaattttgtctcaggattgttttcactaaagaagaagattaaagatgttgttcttaaggctgagatgtttgcaccggatgctcttgagcttgaagaagagcagtggataaagcaagaagaaacaatgcgttactt

SEQ ID NO: 138442 - DNA, 1486 bp, Arabidopsis thaliana landsberg
ttgcaggctgtgaatggagaagtgccaaaggaggagaaagaagaggaagatggggaattcataaaagttgagaaggaagcttttgatgccaaggatgatgcggagaaagcagatcatgttcctgttgaagagcaaaaggaagttattgaaagaagctcgagtggttcacagagagaactacatgaatcacaagaaaaggcaaaagaactagagctcgaattggaaagagttgcaggggaactaaaacggtatgaatctgaaaatacccatttgaaggatgagcttttgtctgcgaaagagaagttagaagaaacggaaaagaagcatggagatcttgaagttgtccaaaagaagcagcaagagaaaattgttgaaggggaagagagacacagctcacagttaaagtccttggaagatgctttgcagtcacatgatgcgaaagataaggaactaactgaagttaaggaagcttttgatgcgttgggcatagaactcgagagctcacgaaagaagttgatagagttggaggaggggctaaaacgttcagctgaagaggctcagaaatttgaagagctgcataagcaaagtgcttctcatgctgactctgagtcgcagaaggctttggaattttcggagctgcttaaatcgacaaaagagagtgccaaggaaatggaggaaaaaatggcgtccctgcaacaagaaatcaaggagctcaatgagaagatgtctgaaaacgaaaaggttgaagctgccttaaagagtagtgcgggagaattagctgcagtgcaagaggaattggcactttcaaaatctcgtttgttagagacggaacaaaaagtgtcttccacagaagccctcattgatgaactgactcaggaacttgagcagaagaaagcttccgaatctcggttcaaggaagagttatccgttctccaagatttggatgctcagaccaaaggtcttcaggctaaactttctgaacaggaaggtattaattcaaagcttgcggaagaactcaaggagaaggaacttctggaatccttatcaaaagaccaagaagagaagctgagaactgcaaatgagaagttggctgaagttttgaaagaaaaagaagcgcttgaagcaaatgtagcagaggtcacaagtaatgtagcaacagtaacagaggtctgcaatgaactagaagagaaactgaagacctcagatgagaatttctccaaaacagatgctcttctttctcaagctttgtcaaacaactctgagcttgaacagaaactgaaatcgctggaggagcttcattctgaagcgggatctgcagcagcagctgctacccagaagaaccttgagctagaggatgttgttcggtcctctagtcaagcagcagaagaagccaaatcacagataaaagagctggagacaaagttcactgcagctgaacaaaagaacgcggagcttgagcagcaactgattttattgcagctgacaa

SEQ ID NO: 138443 - DNA, 609 bp, Arabidopsis thaliana landsberg
accgctgagaaacaacaaaaggaggtaatatctctctcataaccaaaccaaacatggaggtttactctaacaatctctgcgtactctaatgctttctttatggttttcagatttccaagtctggtgcaagacctttagagaagacacgcttgcagaagaacccaaaggtttactaagtttttcactttttgaatcccggaagatatattctggtctcattgctttcttttgtttaacaggcaggagtgattgatgccaaaacgcggagggactctcttaatccgaaagcaaaacctgtgcagggttctcttccaatgcggaccgtatcgaaaagctctttagacaaagtgttatgatagttatatccatccggtattaatctgatcttctggcaaagatcgccaccaatgttgttccatcagtcttggggtatagagccaatgatcttgtattcttgttgttatatagaaaagtctctagttaccagtatttagtcgtggaaggagtaataagagtaataagagatagttatattttacagtttcctatgtatgtgtatagaacccaatgataatgttgttctgataatagaagtggattgattcaatc

SEQ ID NO: 138444 - DNA, 1512 bp, Arabidopsis thaliana landsberg
atggtggagggcataccaaagagatggaaggtgctaagtggccaaaacaaatggaaaggcctgcttgatccacttgacccggatcttcgccgctacatcattcactacggcgagatgtctcaggttggttacgatgcctttaactgggaccgtaagtccagatacgccggtgattgttattactccaagaaccgactgtttgctcgaaccggcttccttaaagccaaccctttcaggtaccatactcccacaatgtttcatctttgattcgacgatgtaagcttacccatgatagattttcaggtacaaagtgactaagtacatctacgcaacagcttccataaagttaccaatctctttcatcgtaaagtctttgtcaaaggatgcatctcgcgtgcagactaactggatgggttacattgcggttgctacagaccagggaaaagcgatgttagggaggagagacattgttgttgcatggagaggaactctacagccatatgaatgggctaatgatttcgattttccgcttgagccagctatctcggttttcccagtaactgaccccaaagataaccctcgtattggaagtggctggctcgacatctataccgcttctgattctcgctcaccttatgacacgactagtgcacaagaacaggtcctcacctttctcttttatcatcgcattcacttcagtgacaggttcaagttatcaaggccgaaatgggttgagctcaaaacgtggcggggcgacccattacaacgtcaacaacactacttccatttctccttctttctcctaatggcatcgtgtcttggttttggttttaggtacaaggagagctcaagaggttgctagaactttacaaggatgaagaaataagcatcaccttcacaggccatagcttgggcgcagttatgtcagttctatcagctgcagatcttgtctatggcaaaaagaataatatcaatataaatcttcaaaaaaagcaagttcctatcacagtttttgctttcgggagtcctcggattggagaccataacttcaaaaacgtagtcgactcactccaaccactaaacattttaagaatagtaaatgttccagatgtcgcaccacattatccactcttactgtactcagaaattggcgaggtgttagagatcaatactttgaactcaacatacctgaaacggtctctgaacttcaggaactaccataacctggagatatacctgcacggcatggcagggatgcaagatacagacggggtattcaagctggagattggccgggatatttcgttggtcaataaaggattggatgctctaaaggacgagtacttagtgccaagtacctggaggtgtctggcaaacaaagggatgcttcaaatggatgatgggacatggaagctggatgtccacaggagagatcatgatgatgatgttaatgctgatgacaatgaccactcctcaactagtaaccaactacaagagctaaatacagattag

SEQ ID NO: 138445 - DNA, 1048 bp, Arabidopsis thaliana landsberg
ctctccctctcgccgtggatagacatggagagcttaccaacgacggtctcagggaaatcagaccggcgtggttggtcttccaagtctcagaacacctccaagccctctcttatcttggccttcttctcttgtcttgcttggctctacgtcgctggccggtacgtcgcttttttcttccatttccgtctgatttttttcttgttgagtaatatcaaatctcactgattctagatgtgttcttcggaatgcatcccggaattgaatgaggattgtaatcgtcatggaacactgtcttcatagttgttgatagatctcgcagatgctagattcttccgtttttctacaatttttcgccgatttgttaccattctagatttctgtaatttcagatataactgtattgcaatgtgtattttgggtttgagttccattacagtaaatagtcgtacaatctaccaataacgagctcaatttcgatccctggatcttattaactgatactgatctctataatggtgttgtttcttacgtttaggttatggcaagatgcgcagtacagagcagcactcaatactgtgcttaagatgaattatgatcaggttggtctttcttgaatagaagaaactagtatccatttaaacgcgtcattttcactaatcaaatgttttgtctttaatgttgatcatgttcttgtggagtatagaggcctaaggttcttacggtggaggacaaacttgtggtccttggatgcaagtaagctgaatttcttactcaataagatgtttttttgttctgcatatactaacacacaatgtaactgttttatagagatcttgagaggagaattgttgaaactgaaatggagttggcacaggcaaagagtcaaggctatcttaaaaaacagaaaagtgtctcttcttcagggaagaaaatgctagctgttattggagtttacacaggctttggaagtcacttgaagcgcaataaatttagaggctcttggatgccacgaggtagaattatcacccctactttgtatggtcattta

SEQ ID NO: 138446 - DNA, 343 bp, Arabidopsis thaliana landsberg
atggtttccatcaaggtaagaaacagtctaacccaagtttacaccttttaatctgttatagctgctcatatactaacctgttccgtttttttgtttgcttcgattactgaaggaacgtatgggtcagttagtagatgcacaaaaagaagtatccattacttcagaagcgtcagagagggaacttgaacttgaagcacaactcgtcgaggcacgcagcattattcaagaacaggtattttaaaacatatccttctttgatttctctggtcttatgattatctctagaaacattacaaatttacaaaatcttctgatgcaggaatctataatgtccaaacattta

SEQ ID NO: 138447 - DNA, 2398 bp, Arabidopsis thaliana landsberg
ctcttaactcctctccttccgacggctctaagaaacagaaacaacatcaacaaccaccaatagtacacttcctcacacacttcctctgagtttctctacttaggtactttagtaaactctcgaagcaatggtttagagcagcaaaagtctccaatctccctctctggcggtatcaccggcgtattggaattacctcctccagcttcgtcgtcttcttcttcttcttactcacagtaccataagctaggctcgccagagcttcgtcctcttccccctttaccaaagctccaatctttcactcccgtttacaaaagcactgaacagttaaaccctaaaagacaagactttgacggagacgataacgaaaacgatgagtttttctctccgagaggatcttcagggcgtaaacagagcccgacccgtgtctctgatgttgatcagattgacaacaggagtatcaacggctcaggctcgaactcgtgttcgccgactaattttgcgccgtcgttgaatgcttctccgggaacaagtttgaaacctaagtcaattagtcctcctgtctcgctgcacagtcagataagctcaaacaacggcattccgaagcggctttgtccagcgaggccacctccaccacctcctccgccgccacaggtctcggaggttccggctactatgtcgcattcccttcctggtgatgattctgacccagagaagaaagtggagaccatgaaaccaaagttgaagactttacattgggataaagttagagcaagctcgagccgtgttatggtgtgggaccaaatcaaatcaaactcctttcagtaagacataacgaatctgaattaaagacttgatctatccttttgcatacacgactaagatatgattcttttgtgtttttgcagagtgaatgaagaaatgatagagacattgttcaaggtgaatgatccaacttcgagaacaagagatggcgttgttcaatccgtgagtcaggagaatcggtttcttgatccaagaaagtcacacaacattgctattttgttgagagctcttaatgtaactgctgatgaagtatgtgaagctcttatagaaggtgagtaatttccaatctgttgttgcttaggttactcgcacttactgcaacattgcattggtttgatgattcctcaaattggtctgtgattattgaagcttgacttgtttgacttagttgatgtctaatcactttcttgttcatgaatcaggtaactcggatacgcttggacccgagcttctcgaatgcttgcttaagatggctcctactaaagaagaagaggacaagcttaaggagcttaaagatgatgatgatggatctccttccaagataggacctgcagagaaattcctcaaagcattgttgaacattcctttcgccttcaagaggattgatgcaatgctttacattgtcaagttcgaatcagaaatcgagtaccttaacagatccttcgacactctcgaggtaaaactctacttgtccacctcataagtgtatgtctgctgatcaaacagatcattcatatgcatttgatcaaactctcaggctgctactggtgagttaaagaacacgcggatgttcttgaagcttttagaagccgtgctcaagactgggaaccggatgaatataggaaccaatagaggggacgcacatgctttcaagctcgacacgctcttaaaactgggagatatcaaaagcgcggatgggaaaaccaccttattgcattttgtggttcaagagatcataaaatttgaaggagctcgggttccttttactccgagtcaaagccatataggcgataacatggccgagcaatccgcattccaagatgacctagagctcaagaaactcgggttgcaagtcgtttcaggtctcagctctcagctgattaacgtcaagaaagcagcggcaatggattcaaattccctcatcaacgaaacagcggaaatcgccagaggaatagcgaaagtcaaggaagtaatcacggagctaaagcaagaaacaggtgtagagagattcttggagtcaatgaactcgttcttgaacaaaggtgagaaagagatcacagagttacaatctcatggagacaatgtcatgaagatggttaaagaagtaacagagtatttccacgggaactcggaaactcatccttttcgcattttcgctgtggtcagagactttctgacgattcttgatcaagtgtgtaaagaagttggacgcgtaaacgagagaacggtgtatggatccatgccactacattcgccatcgaaccagaccgccacgcctctgtttccggtggttatcaataacaactcacggctaagtccatcgggttctctagacgacgacgatggctcgttctaa

SEQ ID NO: 138448 - DNA, 426 bp, Arabidopsis thaliana landsberg
aaaacatcaaatcatgagtgggcaagagaatcatgatcatggccggatctcttctacgcccgccgccgcgtcggagccttccaaggctgctgctcactcctctgactacgctccttaccctaagctcgatcctaccgacgtcactcctcctcctcctcagcctattcccaccggtgccgccgcaaccaccatgccagcggaatccaatccttacgtttctccttcccctgccccaaggagtgagttcttcttctctctatccgatttcgcatcctaatccaatttctgcctttgattgattgattgatcttggtttggggacagatacgatggattcggtgaaggatacgttagggaaatgggggaaaatggctgccgacgccaccaagaaggcggaggatctcgccggaaatttttggcagcact

SEQ ID NO: 138449 - DNA, 1346 bp, Arabidopsis thaliana landsberg
tgttcctgaaatgggattaaacgagcaacaaaatgttccaagtcagaggaagatcatagtttttatagtcttagcttttataccaatagctctgtttcgactctgttttaataatccattctcctccattaaagacacctctcttcaagactctgcagctaacgttgtgatcactagcttctcttcatcttctcaaggtaattattcaacttcttcaatattgtgtatatccaaaaactgaatggatttttttaactttaggcttgttgtctaaatctgcagaagaagaaagccaagagagttttgatcatatacaagatgaacctttatgcgattatacgcaagggaactgggtcagagacgagattggtccactctacaatggttcaacatgtggaacaatcaaggatggtcagaattgtttccgccatggtagacctgattccggttatctttactggaaatggaaaccaaacgaatgcgatataccgagattcgactcgaaccggtttcttgatcttatgagagataagcatctagcttttatcggtgattccatggctagaaatcagcttgagtctcttttatgcttgctctctaccgtctctagccctgatctcgtctatagaaacggagaagacaataaattcagaagatggcgtttcgagtcacacaacgtcactgtctcggtttactggtccccgtttttggtggccggtttagagaaatcgggaaacttggaccacaatgtattgcacatagaccgcgtggatgagagatggggcaatgatttagaacgttttgatacggtcgtagtctctgtgggacattggtttctgcatccggcggtttactacgagtctggttcggttttgggatgtcattcttgtgaaacaagtaactgtaccgaggtagggttttatgatgtatttagaaaagcgataagaacaacgttgagagcggttgctggaagtggtcgtgaggtgatcttgacgacattttcgccatcacattttgaaggacggccttgggacagtctcggcgcatgtaacatgaccaagccgtacgaagggaaggttttagaaggtctggacttggacatgcgcaaaatagaaattgaggaatatacggcggctgcggctgaggtgaggttagaggtgttggacgtgacggctatgtcggtactgagaccagacggacatcctggtccgtacatgtacgcggacccgttcaagaacggtgtaccggagagaattcctaatgattgtttgcattggtgtctacctggtcctgtcgacacgtggaacgagatcatgatcgagatgttgcggcgatggaaggtttaa

SEQ ID NO: 138450 - DNA, 1230 bp, Arabidopsis thaliana landsberg
aaaccaattggtttgttgtctctactagacgaggaatcaaattttccaaaagcaactgatttgacctttgccaacaagctcaagcaacatttgaagaccaactcttgcttcaaaggagagagaggtcgagccttcagagttaatcattatgctggagaggtcagttgattcctttagctcaaaagccagactctgcatactgattaggttttatacggaactgattttgtgcaacttttcgtgtacttatggcggttttgttggaatggtgattttgtttacaggttctctatgatacaaatggctttttggagaagaacagggatccgttacctgctgatcttatcaatcttttatcatcatgcgactgccagttgctgaaattgttttcaactaaaatgcgtggcaaatcgcaaaagccacttatgttatcggactccacgaaccaaactgttggaacaaagttcaaggtaaagaagcttgaatcctgctgttttgaataagttgcaatcttccgcgtgtcatattgcatatctcatgttaaactatctctacagggtcaacttttcaaattgatgaacaagttagagaacacaagtcctcacttcattcgatgcataaagccgaattcaaagcagcttcccagagtttatgaagaggatcttgtcttacaacagcttagatgttgtggcgtgttggaagttgttagaatatcaagatctggatatcctactcgtttgacacatcaagagtttgcaggaagatatggtttcttattgtcagacaaaaaggtcgctcaggatcctctgagcgtatcaattgctgttctgaaacaatatgacgttcatcctgaaatgtatcaagtgggttacacaaaattgtacctccgaactggacaagtaagcgattctttaagcagagatttagaggctttttcctgatgttgtcgatacaattcttatgtactcttcttcaaattttcatagattgggatctttgaggatcggaggaaaaaggtttttcaaggcatagtgggcttacaaaagcatttccgtggtcacttgtctcgtgcatacttccaaaatatgcggaaagtaacattggttcttcagtcatatatacgaggtgaaaatgcccgaagattgtttgacactgaagcaaaaatccatgcggattctgtttctgaagcaagcacagatgagttgagtgcagtcatacacttgcaatctg

SEQ ID NO: 138451 - DNA, 1304 bp, Arabidopsis thaliana landsberg
cttttacaaacacacaaaaaaacaagaactagctaaaaggcaaaacactaaccacgcgctccgcaatggctatcacacgtgcctcctttgcgatttgcatcctcctctctttggctaccattgctactgctgattattacgctccctcatctcctccggtttacacttcaccggttaataaacccacgcttccacctccggtttacactccaccggttcacaaacctacccttccacctcctgtttacactccacctgtccacaagcctacactctcacctccggtttacactaagccaactctaccacctccggcttacactccaccggtttacaataagccaacgctcccagctcctgtctacactccgcctgtttataagcctacactctcccctccggtttacactaagccaactctcttacctccggttttcaagcctacactctctcctccagtttacactaagccaactctctcacctacggtttacaagccaacactctctcctccggttaacaataagccaagtctctcgcctccggtttacaagccaacactctctcctccggtttacactaagccaactctccctcctccggtctacaaaaagtctccaatctattctcctccacctccatttgcaccaaaaccaacctacactccacccaccaaaccatacgtcccagagatcattaaagccgttggaggcatcatcttatgcaaaaacggctacgaaacctaccctattcaaggtataaaaaacataataatatacagacttcatgatttaatatctttaattattacaacatttttggtttcataaccttgaaattcgaggtcgaggaccgtatactcgggacaacgcggttaataatacaatatggcatggcctaaatcatccatcctaaatggactaggaaataccggaaattacgaatttactaattagaaaatttggttgattaatttcatgtacgtaggagcgaaagcaaagattgtgtgctcggagagggggtcatacgagaagagtaagaacgaggttgtcatctacagtgatccaactgactttaagggatacttccacgtggtgttaacccacatcaagaacctatctaactgccgtgtcaagctctacacatctcccgtcgagacttgcaagaacccaaccaatgtcaacaagggtctcaccggagttcccttctcgatgtactccgacaagaacttgaagctcttcaacgttggtcctttctacttcaccgccggttccaaggctgctcccgccactcccagatactga

SEQ ID NO: 138452 - DNA, 1092 bp, Arabidopsis thaliana landsberg
cccattcttaattatactcaacacacattatatttttctgatcatatcattctttcagtccatctatataaccaattcttgatttatacttaaaacacacattatacatctttctcatcatagtttgtatcaatttcctagagtaaactacctaaaggaaaaaaaaaatctattttgggaatcatatactaaaaatggaaggaagagatatgttaagttgggagcaaaagacattgctaagcgagcttatcaatggatttgatgcggccaaaaagcttcaggcacgacttagagaagctccgtcgccgtcgtcatcattttcatcaccggcgacggctgttgctgagactaacgagattctggtgaagcagatagtttcttcctacgagagatctcttcttctgctaaactggtcatcctcaccgagcgtacaacttattccgacgccggttactgtagtcccggtggcaaatcccggcagtgttccagaatctccggcatcgataaacggaagtccgagaagtgaagagtttgccgatggaggaggttctagcgagagtcatcatcgccaagattacattttcaattcaaagaaaaggtaacaaattgttgatatcttttttcacaattcaccaaattgaatttaaaaatctcattttttctagaaactaatttgaaatttgggtaatttttgcagaaagatgttaccaaagtggtcagaaaaagtgagaataagcccagagagaggcttagaaggacctcaagatgatgtctttagctggagaaaatatggtcaaaaagacattttaggcgccaaattcccaaggagttattacagatgcacacatcgtagcacacaaaactgttgggcaacgaaacaagtccagagatcagacggggatgctacggttttcgaagtgacgtacagaggaacacacacttgttcgcaggcgatcacaagaacaccaccattagcctcgccggagaagcgacaagacaccagagtcaaaccagccattacccaaaagccaaaggatattctcgagagtcttaaatccaacttaaccgttcgaaccgatgggcttgatgatg

SEQ ID NO: 138453 - DNA, 1354 bp, Arabidopsis thaliana landsberg
gtcgattatgaatctgatgagagaagttgaacttcaagagaaggaggcagaaaaggcaaaggaagatgctagtataggaggctttgatactcttgacaagggggaggagctgaagaagatgctggaacatgcgaaggaggcaaatgacatggtgactttttgttactaatattttactgatacgtgtgttaactgtggttaggttttaattggggaactaatcatttgtatgttacaggctgctggagaagtttatggggagaggtcaattttgaccactgaagttaatgagcttgaaaatcgcttgatcagcttatcagaagaacgagacaactctctctctgttcttgatgaggtccgtgcaggccacacgattagatcctacttgatttactcagtatttctgttttgttcatttgcagctccattaacctttaacaatacacgctactaatatctgttgtttcacactgtaagattttgctgattgtgtttcttttgtttttacttttagatgcgtgtagatcttgaaataagactagcgacagctttggggataaaaaatgctgctgagcaagaaaaacaggaaaaagaagggtctgcacgcaaggcatttgctgaacaagaagcgatcatggagagagttgtccaagaatccaagcttctacagcaggaggcagaggaaaactccaaggtaacaacactaccttgagattgtcatgaatgaatggttctgaatctgatttcacaacttcttaacttatcttgatctctttcttcagctgcgagagttccttatggatcatggtcgaattgttgattccttacagtaagtcttcttccttgctactagcaattcacatttatctcctcgtgaatcattaggataagaggctgtgaactatggagtaaatgatcggacccacgaaccaatttagcaattttcttcgcagttgtatgataatcaagaatctgttgatatatttgttgtttaaatgttcagaatcttatggtgaatcttgtctgctattgatcttaactattcttttaccctcttggtacttccttgaacagaggagaaatctctgtgatctgtcaagacatccgacacttgaaagagaaattcgacaaccgagtgccattgagccaatcaatctcctcaagccagactagctgtaaactggcttcttccgcctcatccatgaagagcttattgacggagaagcctttggaagcatcttatgaaacacctgaagcctcgagcaataacaagagcccaaaagcttctgttaatgaacgtaaggagcttctggatgacggctgggacttctttgacaaagagacagagctctaa

SEQ ID NO: 138454 - DNA, 3119 bp, Arabidopsis thaliana landsberg
  unsure (1)..(3119): unsure at all n locations
tttcttaaagaatcaaactttagaatctatgggtcatgattgaatcgaaaaaaccctaacctgacagagacgagcagcgagtgaagcagctttcttagcagcatcaagctctttctcgtaagccatcgatgaaacaactctgagagtaacaaatgaaggagaagaagacttgcgtccgaatacagaaacgagacggttcgatgaatttctaggtctcgaattcgttcttactgctacaaatgattgaagcggagccttcgctgttcgaaaacaatttatagacatcattcgcttttcaagaagataaatatatgtcttcacattttctgattgcagagacaattattattacttttttgaatttcccatttacaccagtgtacttatttattctctgaacttaaaccctaaactttattttagatcaagaaaggccatatttgctctgttggtttaggggtccatgtggcaccaattgaaagaacaagtacaaacggtgaaaatcataaaaataaaaaactttagtgatcttcgtagattggttgttgagttttgggctaatcgcacgtggatgttgtggttgaaacataagtgaatttataggtggtgaagatacaaaaaggcttcttgatgaatgaagaagcccaataaaaacggttctgggttaatatattttgagggaatcaaaagcccaaataattttcttcagacaagagctacagctttgccacgttgtccacatgaatcatgttgaaatttggtctatgattttgggttatggataaatcattaatgacgcagagacaagactaaaaaagatttctagattgatgatggcgtgtgagagagcaaaatacgttttgattatttgccggcgcaagcaaagggtcacgttccactaactntcaagattcaacanaacccactttctataagtttatatgttcatttttttctgctaaagtatttttatatgttcatatttctcttttgcgccatctttttataatttaatcttcctacagaagataatctccaacaaaagttttttcttacaagaaagattccgagaagtcttttgtgttttcaacaaactccaggttgatatatacttgccacttgtgtaactgtatcttttattcttgattttgattggtttcttctccaaagattggatttctgaaggttcttgtgctgcagggttttttcaatgaacatgagcaataaacgtaatcagcaaccttcgtatattgctgatcatttcagcagtttggatcaggtctcataaacttacttagttatttcttgattttagtctctttcatagtgatgaatttcttgtgaactttgctttttaggtgataacttctctgagagaagctggacttgaatcttcaaatctgattctaggaattgactttaccaagagcaatgagtggacaggtaattatttgatttgataaaaaatgctacacatgtttacgaaaagattcaatggttttggttaatgttctgaattttcattgcagggagatattcattcaatagaaaaagccttcatgccattggtaaaagacagaatccatatgagaaagcaatatcgattattggtcgtactttgtctccctttgatgaagatgatcttataccttgtttcggttttggcgatggttagtttcttatttcttgctttcaagatgaatgaataagataaaccaaagttcttaatggttttatgttttcttcttcctgcagtaacaacgcgagatcaatatgtattcagcttttatcccgagaacaaaagctgcgacggattggaaaacgcagttaaaagatatagagagatcgtcccacatttgaagatgtccggtatttttgaactttcaaaaatggagcagttttgttctctcttatcgtaaagattaatcagtgtattcttccctcacaggtcctacctcgtttgcaccggttattgatgctgccatcaacatagttgagcagaacaatatgcaataccatgttctcgtcattatcgcagatggtcaggtcacaagaaatccagatgtgccgcttggtcgacttagtccacaggaagaagctactatgaactcgataatggcagcgaggtaaaactattcaataagctcatattcatgatcagacttcatatgtatactaatgatgtttgatataaattttccagccattacccattgtcgatagtcttggttggagtaggagatggaccatgggacacaatgaaacaattcgatgacaatattcctcaccgtgaattcgataacttccaggtaatataataaaaccctgaatagctctgttttgttcctgaaacatgaatcatgaaaaactgtgttttgttccacagtttgtaaacttcacgaagataatgtcagagcacaaagatgcggctaagaaggaggctgctttcgcactcgcagctctcatggagatcccttttcaatacaaggctacattaagtctcaagtaaatgcaataaaaattttaccgttggaaactacttgtatcactcactgtttatggtcttattgcattagattctttgccaactaaaccaacctttgattgtgcttatgaacagtagaaaaccagtgcgcagttcccatcagcaccacaagccactcccgccaccaccagaggttatagagcgtgacaatgctgttagatcggtgccaaatcagatgacagaaactgcagagaaaagtgacagactcgctccttccacagtgccggtaaatactctattatttctgcctttgtttctgttcttttgtcaatgagtatactcagtttctctgatactgagatttacattccttttgtttttcaaaaaggtatgcccgatttgcttgacgaatccaaaggacatggcttttagctgcggtcacacggtatgtgaaaatttcaaaggaacaattatactcttacttgttctatgaactgtactgcttctagatcgattttgtgacatctccgatacttttttatttcaaataaagacatgcaaggaatgcggagttgttatcacaacatgcccactatgcagacaaccaataacaacaaggataaggctgtacact

SEQ ID NO: 138455 - DNA, 2748 bp, Arabidopsis thaliana landsberg
atgtctaggtacaagttaattaaagaggttggtgatggaacttttggtagtgtttggcgagctataaataagcagacgggtgaagtcgtaagttactttcttggagagctatctattactggtagaatgttctgtacttggtttttaactaagtgaaattttctatgagcaggttgcaattaagaaaatgaaaaagaagtactactcttgggatgaatgtattaatctgagagaagttaaggtattgaactgcctttgtttaaatgcttttttttttcttgtttactgtatgtgtacttattcctccttttccctcctattagtcgctcaggagaatgaatcatccaaacattgtgaagttgaaggaagtcatccgggaaaatgatattttatactttgtgtttgagtacatggtatacttctttctactttttgcttaatcttattgccaacactttttctttgctttaaatcttcttccctttcatactctgtcaggagtgcaatctttaccagcttatgaaggatcgccctaagcattttgcagaatctgatatccgaaattggtgcttccaggtcttccaaggcctttcttatatgcatcagcgtggatacttccaccgtgatcttaagccaggtaattaatagccttgagtttccaatcaagatcagcacatgtgcgatcgagatggactgttttgtatctctgtttcagggttgttcatcacagtcaatttcaattagtttgtcaatgaaacatgtgcatattttttttctggcgtagaaaatctattggtcacgaaagatgtcattaagattgctgatcttggcctggctcgggagatcgactcgagtccaccttatacagaatatgtctctacacgctggtaagatttactctcctgattactccgttgaaattacagaagtatatatatatatatatatatatatatatatatatatatatatattaactcaggtatccatatactgatggtgattggcgcatgtgttgatttgtgccatatctttttcttattcaccctaattctgttctgaacgttccacaggtacagggcacctgaagtactgctacaatcatatgtatacacgtcaaaagttggttagtcttcccaatataccaataacagaagtttcttttgaagatagtgcagtgcggtgcttaacaatggttaattttaattgtgtttcatatatgtgggcgatgggtgctattatggcggagctgttgtctcttcgccctctctttcctggagctaggtatttgtcaatggttgattgaatttgttctaattagacaatgtttcagatttaaatgctaaaccataatccttgcagtgaagcagatgagatatacaaaatctgcagtgttataggcagcccaactgaagagacctggttggaggggctgaaccttgccagcgttatcaattaccaattccctcaggtattttttactctatcttttacatatctaggaaagaaagcatcactgattttatatataaggttactataaacaatctgtttctcatcttgtagtttcccggtgtacatctatcaagtgtgatgccatatgctagtgcggatgcggttaaccttattgagcgcctttgctcgtgggatccctgcaatagaccgactactgcagaggctctgcaacatccgttcttcgcaggtaagcctaggaaggtttttgattggacaatatgcgacaactgttataggctatactccttatctacgcgcgttctcatatggcagagttgcttttatgtcgcaccagctcttgcgtccaagccttctgttgcaagaactcctccggctggtaatttcattgtttgtgactaccaatgtcaggttatatgtgttttgagattgttacaatccattttttttgtttatgtcatatagtcgggcctaggggatcattcgagcaccaatcagttaaacggcacccagtgtctcttgccaatgctaagccattcaatagctatgtttccccaaagtcaaatgccgcttttggcagtggtgtccagcggaaacttgatatggttaatcaagatgggacgagaaacactaaacccgtgagaagttctgtcagagactccaaatacagaccacccggaaaaaagagtcctcgtaagtaaaaaaagctataaacccacctttttttctttaacatgtacaatcgttgttttacttcatctaacaaaacaaatccattcaattggagataatgcagcagcagcatcattgaacaagaaccgggtcactcgtagtagtgtatccgagactgctgataaactcgcaaacatgaccattggagcaactggatctcgaagacactctgtgtctgtggttggacagcatcaacagctgaaaccacctccgatgaaggcaggttgggtaggagaaacacgtgacatgttccttagaccaacacaacccaccaccaatgcctactctaggaaagtcgccggatgacccctaaaccaatagtaactcaagcatgcctcttctgagcaaatattttactttataaactctctaataatcttatacatcatcagaaaaaacaagtctccttttttctttttttttcgacggcgcgtctttgcctcgtcaatggttctgcttttgttttcttttcttaatttctgtattgttaaggtttgttttttgcgtgtgtgacaatttggtttgcaataaagatcgacttgg

SEQ ID NO: 138456 - DNA, 866 bp, Arabidopsis thaliana landsberg
caagtcggcgaatgtattggctgttttgggtgctgtagcaagcgaagcccttgatttgactggattatatttcagcggcaagcctaaaattgttaagaagaaggctagccaacttagtcatgctaacactgcaaggtaattgtgttgatgatatggtctgctacttatattcaaccagaaatttggttttgttttgtaacctgctatatattattttacacactggagctatttgttacctttctcgctgtaatagagataagtactgcagggaaccttctctgcgtgatctaagagcttactctgcggaactttcaaggggtgagagtgcaaatgatatacttagtgctcttgctaatcgagagaaagagatgaagctaacccaacaaaaaaaagacgagggaactaattcttcagctcctcgttaccaaagtggtgttctgcgtactaactgtatcgattgcttggatcgaacaaatgtagcacagtatgcatatggtttggctgctttaggccggcagctgcatgcaatgggtttgagcgatacacctaagatcgaccctgacagtagcatagctgctgcacttatggatatgtaccagagcatgggagatgcccttgcacaacaatatggcggctcagctgctcataacactgtaataatactatttatcaccttcgaccacctcttaacaaaacaatatttgcaatgcttattcagtaacgttgtttaatggattataggttttcccagaaaggcaggggaaatggaaggccacgacacagtctagagagtttctcaagtctatcaaacgatactacagcaatacctacactgatggcgaaaagcaagacgccataaactt

SEQ ID NO: 138457 - DNA, 3062 bp, Arabidopsis thaliana landsberg
atgctgagcttatcactgagtaatcatgttcctccattaacgctcttgagccatgaacgaagaatcctcaagctccaaagtcgatcgtctattctctttcaccaactcttccacactaagttccttctcctgtcgaattcttcctctttgtcttcttcacatggagttgttgctatttcggcatctccgtcttcagtcgcagttccggaattagaagacgaggaccacttcgatgacgaattacgtcgtctattggcgctcgtaccggaggagatacgccagacactgaaggagcaccctgaaattagtgaactcatagagatagtgttggatttaggtcgtaaacctctggcgcgattcccttcaggtgactttgttatctccgacgatgctgttagagttaaagatctggaattcgctgtttctcaggttggtgagtgttcttctctggtgatattttcgtctgatgaaacatctatataattgatgcttaataagaccatgaaactgctcaggttggtgagtttactaatgataatcgagctggaatcagccggacgttgcatcggattagtgcgataaggaatcggaaaggagaaattattggattaacttgccgtgttggtcgatctgttagaggaagcgctaatttgctgcgtgatcttgttcaagatgggaactcattgttgcttattggtcctccaggtgtggggaaaactacaatgattaggtttgtgttagtttcttcctacattgatctgcttgctcatagttcctttagatcatggatttgatatgtagtcatcattttgctatttcagggaggtagcacgaatgctaggaaatgactatgagaagagagtaatgattgttgatacttccaatgagattggtggtgatggtgatatacctcatccagggatcggtaatgctaggcggatgcaagtccctaactctgacatacaaacacaggttggttagtagtttagattgagctttgtgtatttaagtgtggttggagaatggttatatgtgtttcactttacttaccttcaggtgctgattgaggcagtagaaaacgatatgccccaagtaattgtgattgatgagattggaactaaacttgaagcgatagctgcaagtactatagcagaacgtggaatccagttagtcgccactgctcatggagccactatcgagaatttgattaagaatccttcattagaccttctggttggaagtgtacaggttagtcatcatatgtttgcataccgttcaatcccaagattggtcgtagtttggagattctagtttgacattattttgatgagaatctcttgcaaattgttattctagcataattcaatgccaacatagcactgcatttcttatccaaaaattggtttaggagatatgtttccgtttccgcacgtgcatcttgatatattagctaaacaagagatgacgaggcacaggaactgcgtagaagatttgaattgagtgagatcatgttgtggtagctcaaatggtcaatgtttttggacaaaatattttctgttgactcgttgttcagccctgtaaagatgcattctataataacttttatttcagacatattgatggagactttttggcagagtgtaactcttggagatgaggaagcgaccagaagaggtggccagaagactgtccttgaaagaaaaggtccttcaacatttaactgtggtgcagaaatagtttcaaagactgaagttcgagttcatcgtagtcttgaagcaactgttgatgctatcctcgcaggtagattctgtcttttttaagttggaactgtaggtagatccaaggtccagatacataaatccggcatatattttgattcaacacctttttaagattctggcttcagtgaacttttttcttttggctcatcccctggctaaaaggtcgcttaccaaacgttgaaatccgcaaaataaagtctcatggagtggaagtgattatggagaaggaacctttcatcgacgagaagactgtggataagaaacatgaagaggaaacattagatgtttcgaagctcaccaaggaggaaactgtctctgaagtccttcaaactaaggagataactgaagcagaatcttcagagaaagatacattgatgtatctatatgtctatggggtaaaattataatgacttttgcagattctccagtttttaatagtctgatgctatctctgttaatttccaatattaatacacttattcgtcaatttctcccacccagattgcagaatcaactgttcttcaggcaatcaaacaactagagatggaaactgcggtagagttaactgacgacattagtgaagcagaagccttactcgcgttgcaagcaaagatcaggaagaatccccggattaaatcatttgctacatctcacggtatacctgtttatgtaacaaaggtaaaaaaataactaagaatgtcttgttcttcaaggtttttagtatcagcttccttaccaaaagaagcactttttcttgcagactaactcaggtatccaagtggccaaggcgatacgggcattactaacagattacgaagacggactcggagagtttggatcagaagatcgtctaaaactatctgaaaaaatggacgccttagaagtaactaaagagctagtcaaaaaaattctttgatagtaccacagttcactattgcttaacattgatttgtttatatgcaggaagcgagattagcgatagagcggatagtgataccgaaaaaggaaacaaccgatttactcccgaggccacctaggattgtgtctcttcaaggaaagctagtcaggaagtataatttacgatcagaaagaaaatggagaggggatgagatgtatctacggattctcccttatagcacggaagaagatagagacgaccgtgaagatgaaggagagtttggagaagcgaacggggaagagcttgacgagttaggtttcgccaccggcgagtctaatgactcaccctctggcatcgataggttacctctattgcctgattag

SEQ ID NO: 138458 - DNA, 2779 bp, Arabidopsis thaliana landsberg
gaaccgaagtgcttctattattagagttcacgattcattgctgagaaatgtattgagaaaggagaattaccttaagctttatagttaccactatcttatcaatgggttttccgcggttcttactcgaaaacaggtacttacattgtcttggaaacagtatatgaatgtctaaatgttagtgtttgttcattgttatgagctcttgagtttgaaaactggtttgttttttctttaggctgatagacttgcagctagagaagaagtggaaaatgtggttctggactttctggtcgagaaagcaactactcacacaccacagttcttaggtttgcctcgtggagcttggctccgtgatggaggctctgaatatgcaggagaaggagttgttataggctttattgatactggaattgatcccactcatcctagtttcagtgacaaaatctcggggcatacatattcggtccctcctcactttactggcgtctgtgaagttaccattggtttcccgcccggttcttgcaataggaaactcattggagcacgccattttgctgagtctgctctcagtagaggagtcttgaattcatctcaggatgatgcttcaccatttgatggtgaagggcatggcacgtaagtgtatattatccactcagatgctgattaactaattgaccacccaagttgttatgtctgatattggttgatttgttcaggcacacagcttctgttgcagctgggaatcacgggatcccggtggtagttgcgggtcatcgccttggaaatgctagcgggatggctcctcgtgctcagtaagtcaataccacggaatgatgttcactatggaaacaattcatatagaaactaaaagtcttgtcttttcttgttagtattgctatctacaaggcattgtataagaggtttggaggctttgctgcagatatcattgcagccatagatcaggtaactaaaaatgttacttttgtaacagaaactttgataaacagtttttcttatgtttgacatggttatggatgttttcttttgcaggcggctcaagatggagttgacataataaacttatcaatcacaccaaatagacgtcctcctggtatcgctacgttctttaacccaatcgatatggcattgctttcagctgtgaaagccgggatctttgtagtgcaagcagctggaaacacaggaccagctcctaagagcatgtcttccttcagtccatggatcttcacagtaggagctacatctcatgatagagtatatagtaactcgataatcctcggaaataatgtcactattcctggtgttggactcgcatgtaagtccattttggattatagcttagcttcttcttgcttgattaccatctagacctgacctaaccggtttctcatgttttattagctggtacaagaataatgcataaacttgttttagctacacatgcgcttcgcaatggtacaactgttatggatgctatatatgttggggaatgccaagattcaagtagcttcgatcagaagctggtgcaaggaaagatccttgtctgtagttatacagtacgattcattctcggtgtctcaaccatcaaacaagcattacttacagctaagaacttaacagcagcaggccttgtcttctatatagatccttctgccaccggttttcagatgacttcaagtccaatggatataccgggaattctaatatcctccccccaagattctcaggtataatcaaagtcttaaaatgtgaagtagtgtattaaactctgaacaagaatgtaacttagctcttcctatggtctacatgcaggctttactccggtattacaattcttctctgttgagggaaaatggttcagggaagattgttgggtctgcgtctgttgctaaaattgttggtggcatgaggcctacctatggcattacagctcccaaggtcatgtatttctctgctaggggacctgacccagaagatgattctttcgttgatgctgatataatgaaacccaacttagtagctcccggaaacgcgatatggggagcttggagtcctcttggcattggtacaaatgattttcaaggtacacataccctcatttctctttatcagattactcattatgtgtttctagtagtctttttgagatcttgaattggcgatatttaggtgaacgttttgcgatggaatcggggacaagcatgtctgctccacatgtaaccgggattgcggcgctcatcaagcagaagttcccacatttcactcctgcagccattgcatccgcactttcaacaacggcttctctatcagacagaaagggtgagcatataatggcgcaacgcactgtcttaaaccccgacattagtcagtcccctgcaacaccgtttgatatgggtagcggatttgttaatgcaactgcagctcttgaccctggtttgatttttgacataggtaaatactttcttgaacccccaatgttcatattattttaccttgagcatatgaaaaaggagatcaatcactgatatgaaatgtggctgcaaatgtaggttacaatgaatacatgaagtttctctgtggtatcaacggatcatctccagtcgttctcaactacaccggtgaaagctgctcgtcatacaactcttcccttgcagcctctgacttgaccctaccctcagtcacaatagctaaactcgttgggactcgagccgtcctaagatgggtgactaatatcgcaaccacggctacaatcgcaacataa

SEQ ID NO: 138459 - DNA, 521 bp, Arabidopsis thaliana landsberg
aaaaggcttaggctttgcattagatggtttcaagaactcgagttagattatgcatttgagcaagagaagttgaagaacgctatggagatgaatgagaagcattgcgccgatttgggtgagtttgttacaaatttgagtttttaaaagttgcttcttcttatgaacatttgggattttgtaagaacttatattgtgcatgcatttgtttgcagaggttaatttgaaaagtaaaggaagaggagctaaatatggtaattgatgaactgaggaagaactttgcatctgttcaggtgcaacttgccaaagaacaaacagagaaattggtaagagaactgctagtttcagttataagtatgtttcattttctgcggttttctaaacttggtattcttttgtgtaaggctgcaaatgaatctcttggaaaagagagagaagcaagaattgctgttgaaagtttgcaagctgccattacagaagagctagcaaagacgcaaggagagcttcaaacagctaaccagagg

SEQ ID NO: 138460 - DNA, 1294 bp, Arabidopsis thaliana landsberg
gctttctctctctttctctatcttcgccggcgaaaccagtagggttgctcaattcgttggtagagtactgtggcaatgaagaaaggagcgaagagaaagggtgtttcgaaagcaggtcgcaaagctgctgttgcggagactcagaacgatgaggtgatagaggagacgacgaagacgacgcaggaggagagtcaacagcatgaggaagaagtcgtcgacgaggtgaaggagaatggggaagaagaggaggctaagggagatcaagaggaagaagaggatgcgaaacctgattccttagaggaggatgaggagaatcaggaagatgaggtcaaagctgaggaagtaaaggaagaagttgagaagaaacctgttgctcgtcgtggtggtaaacgaaagagggctacgaagaaggatactgagattaaagatgagaagaaacctgttccgaaagctaagaaaccgagagcggccaaagtaagggaagagcctgtctacttcgaggagaagcgtagtctggtatgcttttgttaaccttagcttgagatattatgtaattataattaggattcagcacttatgcaatatggggttagttatgctaatttgatgactcgaaattctctgtgaaaacaacaatgagatacgtttttggacctgtatgttcatcttatagcttaacttataatgtggatctgtttagtgttcttggttgcaagaacgatacacaagatataactttgttggtggctttatctatgagagcaattgtgcgccattatacttattgtgtcaaatatagtatgtcattccaaatgagtggtgtggtgttatctcattatcaaaaatatcttcaatacttcagtatttttaagttctaataaaagaggttgtttttctggtcttatttcttctgtgtatgttgcaaattaacatgtgcgcttgttttgtgtgtttcaggaggatttgtggaaggttgcatttccagtgggaactgaggtatattgtttttgtggaatttggcttcaacatcagagctactgtttccattgatagtccttgcttatgtttgttacattgtgatggcagtgggatcaattagatgcactttatgaattcaattgggatttccaaaatcttgaagtaagttgtttggattacgttctctattgtttagttgacatgttttccggggtggacgagagtctaatattttcttcatttgtatgtcaggaagcattggaggaaggaggaaagctctatgggaagaaggtttatgtctttggctgtacagaac

SEQ ID NO: 138461 - DNA, 2134 bp, Arabidopsis thaliana landsberg
aaagtaaatgggaaacgacgactgagactcttcttctccttctccttcttcttctacttatttcatcgtttcatttcttaggtttctgatttcatcacaacctctggatttgatttttgattcggaggtatataaaaaaatgtttagtggggtttgcgattcgatgaactagggtttgtaatttcactatcttcttcttctcttcgatcgtttactcatcgggtgagaaggaagcgtctttcatgtgttcttccgtgtaatcgactgttttattgggcttagtagctctaggtaaaccttaatttcttcttcttcagtacttgattcatcggatctgcgtttttcttatgttttttcttctgggttttggctcagagtcatgatctgtagctttatctctgttaggaccttaaagttataaactttgatttttctgtaatgggtattgattctactaatgaaagttttcgaatcttatggtaaatagttaacctagttggtttcttcgttttgactagctcgtttgtcttaatttgggtatgtgcatggtctttgagagcgaaagtagtttttttttgtttcaaggttcttgttttcatttttgaagcaagtctttcatatttgatatgttaattttgatgatagtaagatcattttactgatggctagtgctgttaatgagactttgtttccagtttttgagctaatgcttcttgtttgtgtttatctttgagtctaaagattttatttgtgtgtacttgcagtttggtcaaagaattcgtaacaagtgaatcttagattgggaagatgctagaaggagcaaagttcaacgtgcttgctgttgggaatcatcacaacaacgacaacaattactatgcttttacgcaagagttttatcaaaaacttaatgaaggttcaaacatgtccatggagagtatgcagacgagtaacgctggaggatctgtctcaatgtctgtggataacagtagcgttggtccagcgatgctcttattgaccaccgggtttgaagcctgaagcattactactctcggttggcaaagcgtgtttcgccgggaagagtaccccatgcgttgaaagatgatgctttggctcaagcactgatggataccaggtatccaactgaagggctgacgaactatgatgagtggacgattgatctgaggaaactcaacatgggtcctgcctttgctcaaggggcttttggtaaattatacaaagggacatacaacggtgaagatgtagctatcaaaatacttgagcggccagagaacagcccagaaaaggcacagttcatggaacaacagtttcagcaagaggtgtctatgcttgctaatttgaagcacccaaacattgtgaggttcattggtgcatgtcgcaagccaatggtgtggtgtatagtgactgaatacgccaaaggaggttcagtgaggcagtttttgactaggagacagaaccgagccgtccctttgaagttagctgttaaacaggctttggatgttgctaggggtatggcttatgtccatggacgcaacttcatacacagagatctcaagtcagataaccttctcatctcagcagataagtccatcaagattgcagattttggtgttgcaagaattgaagttcaaaccgaaggaatgacaccagaaactggaacttacagatggatggctccgtaagtttccaaagggacacatgatctttttaacgcactttatcattcttgccttctgcaagttacattaatagaaaaatatgtttcttttgatgcagagagatgatacagcatagagcctacaatcaaaaagtggatgtgtatagtttcgggattgtgctgtgggagttaatcacaggactcttaccgttccagaacatgacagctgtacaggcagcgtttgcggttgtaaacagaggagtgcgtccaacagtcccaaacgattgtctcccggtgctgagtgacattatgactcgatgttgggatgctaatccagaagtccgtccatgttttgtggaggttgtgaagctgcttgaagctgcagaaacagagataatgacgacagcgagaaaagcccgtttcagatgttgcttgagccagccgatgacgattgactaa

SEQ ID NO: 138462 - DNA, 1157 bp, Arabidopsis thaliana landsberg
gggaaatattgaatgaattgattgtaaattataagatttttttaattgttttccttgaaaagaggatcctaatcttagggaaaatggaatttcgacaatcactgcaaataaaacagatatcatttgataatagaaaagactggtatgccccaaaaaggaattttggttcacatccttagtgggaataatcaaacgattctgttcatacattcgcaaaattaagcgtttcgtaattagtgaactatattttttgtcataatccgcattttccaagaaaatatagcgatttctatttaatctatttaaaccatgatcataagcaagtacataaatatactcccgaaaaaaaagtggatatagaaaactctgttgccgagccccatcgaactctaaatatccttgaaatttatccatttggattgaaattcgatttgaactgaaggtaaagtctttattttcttgagttctgaaatgacacatagtgcgatacagtcaaaataaggtattagactacgaaagctatagatatagatacctcataaacaggtagactgctaaccggattctctatctttaataggtttctgttcgttatattatagaataacaaaacaagattattagaaatcctttatttttttaacctaatcgctcttttgattttggaaatatatatattttttatcaatatactgcttcttttacacactccaacctaatccaaatggactagttaaaacaataattaggactcatgaaaaaattgataataacacgcaagaaaaaaatgccttcccatacccgtattaggcactaatctatttttaacatttaattagttggggtaatttttcaaattacgaatggaagctcgtttctttttttttcctggaataaggaaaactggtttttttatccatccatttatatttattcacttgacccaaattggaattcttttttttttttcgacatcaaaataagattgtaccgatcaggaaagcaaaaaaaatgttatctgaattctcccttgatacgacatgctattttttccattcattcctttcaggatcagtcgtggtcttacaaactctaccgcagatctggacgaatccttttcttcatacaaatgtgtaaaagatgctagtcgcacttaa

SEQ ID NO: 138463 - DNA, 806 bp, Arabidopsis thaliana landsberg
gaaggtcgtgagaaaagaaaaacacttctcaatctttctacagtcttcttcttccaaaagaacaccatgtacgctctttatcttctttctcccgcctttttcctgtgttacagagatgtgattacatgtgtatatagcttctcttttcctctattgaactatctgaatatattactcatctgcttcgattttttctcgctcttcttcagcttccttcgtaatgtcagagaaccagtccgaagaagtccagcaaatcgagaagctctatgagttcagtgagcgtctcaatgcctccaaggacaagtctcaggttcatctcaatttttcaactagggttttaattgaaataaaatcgagcactccctgtgttgtaaatgggttttgctttggattcgaattaggctggtttagttttggatcattttacctgatttgctttctcgtttgtagaatgttgaggattatgaggggatcattaagatgtccaagactagtatgaaggcaaagcagcttgcgtcgcagctaattcctcgctacttcaagttcttccctagtctctctactgaggctttcgatgcgcatatggactgtatcgatgatggagatcttggggtatgtaccttgaaccagttcaaagctagcttcttactggattatactaaaaacgtttggtttgagttaaacatgtgtttctttttgcgtgtaggtacgtgttcaagccatccgtgggctcccgctgttttgtaaggatacgccagatattttatctaagattgttgatgttcttgttcaactcttgaatacag

SEQ ID NO: 138464 - DNA, 2267 bp, Arabidopsis thaliana landsberg
aaaactgcaaaattgaaattagggtttatactttaaagcagtcaccaaatccagccaccatctcttgctgaagccatgggacgctctcgagttcaagttaacaaagctcacaagactcgtttctcctctaaatcttctcgtaatctccatagaaccaaccttcaaggtaaaccccttaaatcctcaacaattcatctctttcaatctccacatactgaaaatcgcgtttgaatggaatcagatagtggccggattgggaaatcggatagtaactatgttaaaggagctaaagctgctcgtgttcaacgtggtaagatgcttagagagcagaagagagcagcagttttgaaggagaagagagcatcaggaggaattaacagtgctcctcgtgttatcgtgagtttttacatgtttgtgtgtttgtttgttgcaatgttccacttatgatattttctaatgatgataggttttgtttcctctctctgcttctgtggaattgaattcacttggtgaagatgttttgaagttgttatcttctgatggttctggaattgcttcttcgacagttgcatcttctgagtataagctacgagcaactgtatgtgtattcctaagatttgtttatatagatatatgaatatttgtgtgatcaatgttgtgactatatatattacaggtgttaaaggcgcctcatggggatcttctgacatgtatggaaatggccaaggtatgtgaattgtcttgtattcgtttgttggttctttcagtgagcagagtttgttataggtgtttactgattttttttggtactggtattaggttgctgatttgatggcttttgttgcatctgcaagtgctccgtgggaagagaatagctctaacttcatagattctttcggaagtcagtgtctttctgagtttagatcaattgggctaccaagcactactgtgttgatccgtgtaagttctttctgctctatattagtagcgaccaggtttctgatttcttgaaattttgcttgaagttgagcttaacaagttcgttttgtatgattgcaggatttgcccagtgatgtgaaaaagaaaaatgagatgaaaaagatgtgtgcctctcaacttgcttctgaatttcctgaggattgtaagttttatccagcagataccagagatgagttgcataaggtaaatgtttatgactgataattttttatattattttactgagtggttttcaatagttttaatgttcttaattagtagaacatttctgggcttgtttgcagtttatgtggttattcaaggcacaaaggcttactgtgcctcactggcgaagtcaacgatcatacattgtggctcgcaaggtgtgtgatttatgcttatataagttcattacatttaatctgactctgagaagaaaagggttttatagaaagtagaatatctctgtaatgttgaatggtgcatttaggctgggatgctggtggatgatgaaagctcaggaaagtgcactctacttctctctggttacttgcgtgctcgcaaactgtctgtaaatcaactggtaatcaagccattctgctatctatatcatgccttgtgctatacccatggatcccttgttaatttattttctcaaattaggtccatgtttctggcgttggggattttcaattctccaaaattgaagtgctgaaggatccatttcctttgaatgaaaggaaaaatcagaattccatggaattagatgattcacatgatgaagaggtatattatatataatattttctttacaaatcaacaaactattactttagaaaagatacattaagttgaatccttcagatatagttataggaaaagaggttatatagtttgttggaatgctgtcataatatcatattacacttaatttcattcttaaaaataggatgttattttgctttcataatgctattttcacagctttcttctctttgtaaattcactttattttttgtacctgtgtttgatttgaccaggtattgaagtctctggttcctgatcccatgaaacaagagcctttagtaattgaaaacactccagatcctttagcaggggaacaggtaagtctgattagttctctaaaaaatgaaggtggcagttggctcgtgttgttatctgttctgggaagtcacttgtgcaattcttcctttgtgtagacatggccaacagaggaagaaatggctgaggctgacaaaaatcagaagcagggcaggctaaagaagaag

SEQ ID NO: 138465 - DNA, 410 bp, Arabidopsis thaliana landsberg
tcaccatccctgaacaggatgagtgggtttatagcgacggtaaatcgacaacatgtgttgctttcatccttgcaatgtacaaagctgctggtatattcgaccctctcgctgatcacattcaagtcactgaattcactgtgagtttctctttttttcttttcaatatcaaatctttccattaacattactcatgaacgtttatcttctttcgtattttcagatccgagatgcgtacactctgaagttatttgagtctaaccagactcggttaccgagttggtgcaacaccgaggaagggaagcttgacttctgtcaaattctaggtgaatacagaatggagttacctggttataacaccatttacccatatccaaacatgaaccagaattgtccttctttacctcctaatt

SEQ ID NO: 138466 - DNA, 1180 bp, Arabidopsis thaliana landsberg
ctgtccggcagagacgattattgcttgcagcaaagctcaaatccgaggaacgatctgttgttgatcttgacgatgacacagcttcagaagcaagtagcaacctgagtggaatgagcgcctatactttggggtacatccttgcatttgtcttactctcgcagtctttatttatgtggaatttttctcagctgatcttacagatttcaatctaaaacagagctgaattaggtattgatcgtttttagaaacaggagctcatgttcgttttttttgtctcatgacttcaacatgttttctgattgtctcctcctcgattaaccagcatctgattatatgcatgaacattccaacatatataattttgtattggtaaagtgataagtttccgggtgggactttagtgcatgattgtttagcctgctagttgagagctgacgattcaaaaggagatttaggcacgttctgcattttctttggttttgattaagcatttgaagggacaagcgtgttgacaagtcgtaacgtaaaagttgtagggcattgggtagagaatgaagacttttctcaggaatcaatttctctataatgtagttgttttgtgggttaaatagggaaacagttactaactagtttggaccttaacttacaagttcttgtttcctctatgctattattccaggacaaggagaggttctgctgcttcagtcagctcaagcaacgctactagcagggcaagagatttgaggcgccagagaaagagtgggaaaatccgtgctggcaggtatatatatagacatctcttatgcaaattgataggtaccaatgatgagcaaaaatgtaaatgaatttggggtaaaaatgcagtgcgggtgaggagatggctcttgttgatcatttgaaaggtatgcgtatgaccgatggaggaaagcgagagctgaagtcgttgttgatatgtctggtaacacttggtgaaatggagtctgcacagaagttgcaacagactgcagagaatttccaggtctcccaagtagcagctgtagagctagcacacgatacagtgtccagcgagagcgtagatgaagaagtttattgctttgaacgttacgctcagaagacgagatccacagcacgagattcagatgcctttagctggatgcttaaggtcttcataagcccatga

SEQ ID NO: 138467 - DNA, 639 bp, Arabidopsis thaliana landsberg
caacatgggtggaaacaataagcctaaaggtggaaaagagagtaaccaagtcaagggtaaagctggtggtggcggtggaggaggtcagaatcatggacatggtcagccaatgcaattgaatcctcaacagattcaacagatgatgatgatgaaggctgctcacggtggtggtggtggtggtcagatgaagatgccgcctatggcagctaaggatcagaagaagtcagttaagtttgctgatgatgaagacgatgagtttagtgaagatgattatgatgatgatgatttcagtgaagatgattatgatgatgatgagttcgatgatgatgaagatgatgatgatgagatgggtcatggtcatggacatggaggaggtgggggtaatcacatgcctcctaataagatgatgatgcctaacaagatgatgcctcagatgggtggtcatcatggtaatggtggtggacctaagggtcccaatgagataatgatgatgatgaatgggttcaaaggcggaggcggtggaggaaagaaaggcggtggtggcgggtttgagattccgatgcagatgaagggaatgggtgagggtaaaaatggaaaggatggtaaaaagggtaaaggaggagagaagggtaagaaaga

SEQ ID NO: 138468 - DNA, 1021 bp, Arabidopsis thaliana landsberg
ctcgaggaagaaaggttcttcagagcgatcccagcgacgcatggagcggtcatgagatcctgttacgagaaaatcaccacggttactgatagcaaggcaccaaatctctgcatgatgtccttcaagcgttaacaaatgctcgaatttgtcagcatcccaatacttgacgaggcggtctttcccaatgctgaacagataatgggtattccgaacaaattttacacccatgacactgtaaaacaaagtcgcgtgtcagttaagctccacaatcttttaatgattccaaggagtctttaacacaaaatataatatttgcggtaataatcaacattttactagccaagtaaatctgttgggaagatactggaaaaggaaaggggttttctgcttatatatcatgtcatgcaattagtcatactgttttcttacacaaaattataatattcaaggaaaaactgggtccacattattgagtacgttatgccattttcagaaatatggtacgaattatggaagtacctgtcaccatgagcaaagatagacttatgacaatcaccaaaatccaaaccccaaattttcaaatttttgtcctgagaaccagtaacaatcaactctccatctgatgagatgtcaatgcacatcacaggcaacttgtggccatataaggagaggtagaattttagggaatccatgtagaaaacctgaaaccaatataaggtacataagttagtgttacatacgtcaatgtaaatgataatacgatagatacgattataagaatgtggttagcgtatcatttatatgacgtaatgaaaattattattttctcatttacatatgccataaacagaaaatctaccttcactgtggaatcaagcagtgcaactgctatgtgtttagcatccgggctgatagcaacagcaagtacatcgtcattcatcttcatggacttaacatttgaaacagtgagtttcttggtcgcctgcaggttatcaaacacaatatgttttgatcgaatcat

SEQ ID NO: 138469 - DNA, 1645 bp, Arabidopsis thaliana landsberg
cttgaagagattctttttatatttcattccttatacttacctggttttgtagtatctggagattggcaacaatgtctgaactcaaagagcgtttgcttcctccaagacctgcttcggctattaaccttagaggtgatgcaggctctcgtccttctccttcagggagacaaccactccttggagttgatgttttgggtctcaagaagcgtggacaaggccttaagtcgtggattcgtgttgatacttctgccaattctcaggtcattgaggttgataagttcactatgatgcgtagatgtgatttaccagcacgggatttaaggctgctcgatcctttgtttgtgtatccgtcaactattcttggtagagagaaggctattgttgttaacttagagcagatccgttgtattattactgcggatgaggttttgctcttgaattcccttgacaactatgtccttcgctatgttgttgagctgcagcagagactaaaggcaagttctgttactgaggtttggaatcaggacagtctcgaattgagcaggaggaggagtaggagtttagacaatgtgtttcagaactcatcccctgattatttacctttcgagttcagggctcttgaagttgcccttgaagctgcttgtaccttccttgattcccaggtcagtgattgattcacaacttattgttatttagtatgctcagcattgagaatagattttccctttgtaggcttcagagttagagattgaggcatacccattattggatgagcttacctcaaagatcagtactctaaacttggagcgtgctcgtagactaaagagcagacttgtagcattgacgagacgagttcagaaggttcgggatgagattgaacagctaatggacgatgatggggatatggcagaaatgtatctaacagagaagaagaagagaatggaaggatctttatatggtgatcaatctttacgggtttatggaacaaatgattgtttttctctgtctgcgccagtttctcctgtttcttctcctcctgagtcccgtagacttgagaaaagcttgagcattgcaaggagccggcatgacagtgctaggagctcagaagacgcaaccgagaatatagaggagctagagatgttgctggaagcatactttgttgtcattgatagcactctcaacaagctaacctcggtaactaaaaacctcgccttttcatcatcttgttttaacagcttttaaaagcggtttaatcacctgcaactctctttactcttcagttaaaggagtacatcgatgataccgaagatttcatcaacattcaattggtataccttgaaatcttgatcttttttagatatcttatttgcttagaaaaccttaagaatctgcagaaaatttctggaatttgcaggataacgtacggaatcagctgatccaattcgagctgctgctaactactgccacattcgttgtagccatcttcggggttgtagccgggatctttgggatgaattttgagatagacttctttgaaaagcctggtgctttcaaatgggttttagccattactggagtgtgtggccttgttgtatttttggcattcctctggttctacaaacgtagaagactcatgcctctgtga

SEQ ID NO: 138470 - DNA, 5467 bp, Arabidopsis thaliana landsberg
atggatttggctgagggttggaagtacaggagtcgattgtggtatggtgttggccttccctctaaacccagttcacttggtggtggtggcagaggttcagactcctggaaatctactttagaaaaagatgctcatggaaactggattgaacttccattggttaaaaaatctgtatccatgcttcaagctttgctattagatgagtctggactcggaggtggccttggaataggtggaggatctggtacggggatgggagggatgacagccctctaccagttgctggacagtgatcagcctttcttatgtatgctgcggatggtgcttctgtctatgagggaggaagactatggcgaagataatatgttgatgagaaatctaagttctgaacgctcctcagggaattcagttacattagatagtggttctcagatgtctatgcgacaatcccgatcagctttattgtggaggtaaactcaatgaaatattttgtttctctcttcgtggacaattagatatccatctgcttagatactttgtttcagcatttttgcaccatcgtaatctggtgcggacactatgatgctctgagttcagttgtgtccattagtcgtttgtgggtcattcacgatgatgactacatctcatatagtattttctattggattatttgcacagaagtttataacatggtatctaatgcttaatcttttagttccacaatggatatttggcctgggtctgctgtttattaggagaagtttgacttttttttccttatcccacagtgtgctatctcctatcataaacatgccaatatccgattcaaagaggcagagagtactggttactgcatgtgttctctattctgaggttagtcttccataatcagattggcatgtttaatgatattctggtctcaaatctcatgctgcgattggaaagttgtcatctgtgtgtatatatattgtctttcttctgatgccgtcaagtgtccttcgtgtatacatattgtctttcttcgctttctgattccagaacaaatctgtgtaggtatggcatgctatcagcagagacagaagaccacttcgtaagcagtatatagaggctattgtaccaccatttattgcagtcctccggagatggcgaccacttttggcgggcattcatgaacttgccactgctgatggtatgaatccccttgtcgttgatgatcgtgccttggctgctgatgcgctccccgttgaggtagcttaaagctgtttgcattccctcagttgctttcatagttatatgtttctagattggccactgtttatttctagtcgatgagataccaatattgttatgcttgagttattagattgagctatccaaatttgtctgtttagggtgctctttctatggttactccggagtgggctgctgcttttgcttcaccgcctgctgcaatggctctggcaatgatagctgcaggggcagctggttgggaagcaccaccacctcctacaccttcacatcttaggcgagactcttcaatgcttgagcgtaagactgcgaaacttcagaccttttcaagcttccagaaaccactggagcctccaaacaacaatgcaccacctcgaccaagagacaaagctgctgcaaaggcggcagctttggcagccgcacgagatcttgaacggaatgcaaagattggttcaggaagaggtctgagcgctgttgcaatggcaacatctgcacagcggaggaatatcggtgacatggagcgtttacagagatggaacacttctgaagctatgggagtggcgtggatggaatgtctccaaccagtggatacaaaatcagtttatggaaaagattttaatgctttgtcctacaaatttattgctgtacttgttgcgagttttgcattagcacgtaacatgcaaagatcagaggtttgttttccacctatgtcacattttattggttttgtgagcatactggagtctcatttttggttcaacttctcaccagattgataggcgtatgcaagatgatatcatagcggcaaaccgtctatgcttgggaagccgtgcttggcgaaaactaattcgttacttggcagagatgcgatgcttttttgggccttttggagatggaatatgcagtcctgaacgcgtaagccatgtttaaaaaaagaaaaattgaaacatgttaagaaaattcttagtaatgtgatatcatttaacatgcaggttttctggaaacttgattctatggaaagcttttcgaggatgagacagtctataaggaggaattattctgggactgatcatcacggggcagcagcagattatgacgatcagacagaaacaaaaagtgataatggtagcaagggttctcaatcaaatcctcctgttgttgctgctgaagtaatattaatggaaatagcgtatgaagaggatgaacatggagagggtgatcagcttgatgtcaaaggtaatgctgaagaacataaaagggatgaagggagaatatctgggtcacatgagcatgcatccagaacttcagcaggaaacagtgatcctcgaacatcaaatgaccttgaaatggtccgagattcttcagtagtagcacctggctttgttcccagtgaacttgatgaaaggatccttcttgaacttccaacatctatggtccggccactaagggttgtgaaaggaacctttcaagtatgttagaccaacctgaatgttttggattttctacaagtagctaacatgaaaagagaggaaaaattggatataatcaactagattagttagattggttagatccaagtgaagtcaagaattgtggcatgtagacatcatagaaaaccagaaattggcttatgtttccaaatatgcttttcttgtatgacatttggattgctgattatacctgctgtgcatttctcagattacaacaaggagaataaattttattgttgacaacagagaaagccagaatttggctgatcactcagatgagtcccaatcaggtgatcaagaaaaggatcgtagttggccaatgtcttctcttcatcagatttatagccggaggtaaagtttcatcatcaaaattctgggaggggaatattcctattcactagtcactacttcattttaatattttcagatgatttatctgcttagtatctagaacttttatctttatctaaccaagatatggaattttcatctaaaagaaaatcaggaatggtttatagtttatacctattgttgttcaatgcactccctgacagagtgaaatgaaaattttgaagcactttgattgcccacaaacccaacaccaacaagtcatttagatgaaaatttcatatcttggttgctgaatattacttttttcggttaagttttactctttctgtaggagttgtgtttcatttttattcgggattagtgatatgactgatgatcgatttctttgttttttttctttctcagatatctcctgagaaggagtgccctggaactttttatggttgaccgttcaaacttcttctttgattttggggtatctgcatctaaaactctttctacgtatgatatatttatctctctgaccttgtaaatctccgcatgctgtaatcaattacttttcccaatttgcttgttttacatcatagaatactgagggaagaagaaatgcatatcgagctatcgtgcaagcaaggcctcctcacttaaacaatatttacctagcaactcaggtttctgttttatccttactatcttattttctttaacttttgaattactcttggttcatatttttcttcaatgggggattgataacgcaaatgactaggctgagctacttttcgttctgtactgcaaacttacaaatattgttacctttttagaggccggaacagcttttgagaagaactcagttaatggagcgctgggctagatgggaggtaccaactacactgcacactcacgcttgtcatgcaatttttatccttatccaagaataacatctaatacagaaagatctacatctggataatatctgcagatcagcaattttgaatacttaatgcagcttaacacgttggctggccgtagttacaatgacattactcaggtagatcttgtgctcttttacgttttcctggtgaacttgtcaatgcccttacttgcttgatagatagatatgttattctttgcagtatcctgttttcccgtggattatttctgacaacagttcagaaagtctggacctttcaaatccatctaccttcagagatctttccaaggtggaatcctttgcagtttgtttccaattttacgttcttagtctgcatatgatggatcataaacctagagaatcttgttttgatgtgggtctgtatatgttcagccaattggtgcattgaacccagagcggctcaaaaaatttcaagagcggtattctagcttcgaagatccagttattcccaaattccactatggctcacattactcgagtgctggagcagtaatttctcttctctataatatcctgccacaattactgccattcccagtttaaagtttgtgttccctgaatcgtggacagaaaacaatggatactgtttttatgctactagatggagtttgtacacttttcgacattttatcatttatttcatgtgcgcaggtgttgtattatcttgccagagttgaacctttcacaaccctatcaattcaacttcaaggtggaaagtttgatcatgcagaccgcatgttttcagactttccaggcacttggaatggagttcttgaagacatgagtgatgtgaaagaattggtacgtattggtctccataaaacatcgaatggattaattattcgcctcttccttaacaagtcaagagcctacccttatttagccactaaattacaggttccagagttgttttacctccctgaggtgctgaccaacgaaaattcgattgactttggtacaacacagttgggagaaaagcttggtattgtgattcttttccttgtcatagccaaaatttatgcgtggcatggtgagaattttgttatctgatgcggtttttttatctattagatgctgtaaaacttcctccttgggccaaaaacccagtggattttgtacacaagcaacgaagggctcttgagagcgagcatgtatctgctcatttgcatgaatggattgatctcatatttgggtaggttttcacccttgaactgatgatatactgtcagcacatttttccataacttagtttctccttttacttagtgtgttcagcaaaatattcacaagtgtctttgtaagccactaaattgttttttcattcaggtataagcaacgtggcaaagaagctataatggcaaataacgttttcttctacattacctacgaggggactgttgatattgataagatcgcggacccg

SEQ ID NO: 138471 - DNA, 1466 bp, Arabidopsis thaliana landsberg
atgttgattaatgatatagatgatgaatattgattatatcttttgttttgtgtgtagggagctggtggtccggaggaagaggagaaccggtggccgccatggttgaaacctttgcttaaagagcaattctttgttcattgcaagtttcatggagactctcataagagtgaatgcaatatgtattgcttagactgcaccaatggcccactttgctctctttgtcttgctcatcacaaggatcatcgcaccattcaggtaatgtcttgatcttgattgttattttatacttgtgtctcttgcttcttgttgaggttttgagattgtcttgattggtttttggcagataaggagatcttcttatcatgatgttataagggtgaatgagatacaaaagtatcttgatataggtgggatccaaacctatgtgatcaatagtgctaaagtcgtcttcctgaatgagaggcctcagcctaggcctgggaaaggagtgaccaatacctgcaaggtttgctatcgtagcctcgttgatgatagcttccgcttctgctctcttggctgcaaggtacatttccaatactaccaaatagaataaactctggtatttggttgacacttctgattccctctttacacgtttcatatagcaaatcaggtctcacacagcttcacctaacatttgcttgcattttaggtaaattcaattcctttttaaccgcatgaagaaaagatcaaaacttttgaaatgggtcatcctgaaatctgatatatgttttacagtttcacctaacttctccttgcatttcagtaaactcttttctgatacttactttctctatgtttttgggaaatgaaatcaagattgctggaacatcaagaggctttgaaaagggaagggagaacctgctaatggaaacagaggattcaagtagcagcattgcaattgggaagaacattacaaatctccagagtttcagcccatcaacacctccacttactacatctagtaactgcagaatcgtcaagcgaagaaagggaattcctcaccgatctccaatgggataagaaccgagataagaaagaagctagtttcttcatcagattacacacaaaggttttagctaatacagaggcttcttctgtctcttatctttcctcgtataccaaaagaaatggtcttttgcttgtgttagcaaaaaaagaaaggccttaagttaggttttgttgtcctactacttgggcaaatatgtgaatatgtaatgtgctttgtatatgatgcaaaaagggtagaaatggaaatataggggttttagtgggctaaaagtaagaataaaaacaaaattagtttttgggttttcatttatgtatgcattgtgtaaatttggtttggttaggtgcatacatggatcttgaataatgaataataacaataaattaataatgagaatacctacctttgtgtatttttt

SEQ ID NO: 138472 - DNA, 5576 bp, Arabidopsis thaliana landsberg
tctttctttagtgtttccaacttaaccctctctcttttcttgcaaacttttgctcggaattctatgctttgctgatctattgttttctctctgcaaaagtaatgagaagctttttgctatgttaagctttagatctgctattatttgttcctgtgagtcttttatatcttgtgtggtttctttgagaccttaagcagccattgtcacaagctgagctctctttctttctctctagttcaagattctaactttggagcaagtaagcaagtcagagagaggacaaattagctgaaatgctggagattgaaagccctacgagtctctgtttccgtacaaacactacttgtaatgctctgcttcgagagcttcaggtttttctttcaccctcttcttctctgtttcttggaaaatttagggtttcttgataatgatgcttcaaggacaaatttagggtctttataggtaaagtcttctcctttttttctgtcaactataggtttaagggttactgtgaattttggtacctcttcttagtttctgagacttctcttgacctgtttttctacaagtatctgatttttatgtttggagtatctatatatttcatggtttaatggcaaaatttgttggtttggagcagaaaatatgggttgatattggtgagagtgatgctgagaaagaccggatgctaatggaattggagaaggaatgtcttgaaatctacagaagaaaagtggacgaggctgctaattccaaggcacagcttcatcagtcattggtatcaattgaagctgaaattgcttctttactggctgctcttggagtgttcaacagccactcaccggtatgagctagtctacttggtttctttttattggtaatgaaaggaaagtttccatcttttttgtttttaaaatgtgtttttatggttacagatgaaagcaaaggaaggttcaaaatcattgaaagaaaaacttgctgctgtgaggccaatgcttgaggacttaagattgcaaaaagatgaaagaatgaagcaatttgtggatataaaagcacaaattgagaagatgagtggtgaaatatctggatacagtgaccaactcaacaaaacgatggtcggctctttggctcttgatgaacacgacctgactcttcggaagcttaacgagtatcaaacacatctccgctcgctccagaaagagaaggtaaggaagttttcatgaatacaataagaagatgaactcagattttactttgttaagtcaagctgcttgcttactcatatgttcttgttttttatgcagtcggatcgtctgaacaaggttttggactatgtgaatgaggtgcacactctatgtggtgttcttggagtcgactttggtcaaactgttagtgaggttcatccgagcttacataggactgaccatgagcagtctacaaacatttctgatgatacattggatggtctacaccacatgattcataagctgaaaaccgaaaggagcgttcggtttcaaaaggtagataaacatgcctgcaatgctattcttctctttgtaactgattatcattttgatgccttagcattttcgcctttgagtgtgcagttaaaggatgtagcgggttcactttttgagctatggaatctaatggacacatctcaagaagaaagaacgaaatttgcaagtgtcagttatgttgtaagatcatcagaatctgatatcactgagccaaatatcctctctagtgaaacaattgaacaggttaggacacagctcttttcttttcccaacttttaattgccattaatgttattcaggatctctgagttcttgtttctcccttggacttcaggtgtctgcagaagtagactgttttaataagctgaaagctagcagaatgaaggagcttgtgatgaaaagaaggactgagttagagaatctttgcagattggctcacattgaggctgacacaagcacatcgcttgagaaatcaactgctttgattgattctggtactaaaagtgatagagcttatcttcttcttctcagaaatatgagtagcttattttcttgctaatatatttcctcatgtttcttcaggattagtggacccttcagagcttcttacaaatattgaattgcatataaacaaaatcaaagaagaagcacatagccggaaagaaataatcgataggattgaccgctggttatctgcgtgcgaagaggaaaactggctagaagaatacaatcaggtaaattttccttgtaggcaaataggtttgttggaggatgtaactgagaaattccttccttggttttaggatgaaacccggtatagtgccggaagaggtggacatgtaaacctcaagcatgcagaacgcgcccggatcacagtaaacaagatcccatgtatgttcttgtagtttccaccaaatattcttatgagatctttagcttattgttgcattgttttattgttttctgtagcaatggttgacaatctcatcaagaaaacacttctatgggaggacgaaacacggaaatcatttctatatgatggtgtaagttaaagtaactttatagtaaacacagccacaaggtctatcctttaaatatggttactggtttcctccaggttcgattggtatccatacttgaagattataaattgacaaggaaacaacaggaagaggaaaagagacgataccgggtttgtcaaaaagctctcttttacataacccttgaagatttgtaatactgcttgcctttttaaacaattttatttcattttctctgcaggatcaaaagaagatgcaggatctgttaataaagcggagggaatcaatttatggatcaaaaccgagtccaagaagaagcaacagtgtaagaaagaccaacggatacaatggggatgcatctgtgcctcctacgccccgcagaaactcagctggagcaacaaataacgacataatgaccaccccaagatcatactcaagccatcgccaaaacggatatttcaaggaagtaagaagactgtcaacagctcctttgaactttgtggcaataccaaaggaagactctgtctctacatacacttcggtttgcggctctgaaccagattcaccgttatataactaagtctcattaggcagcagttggttcaaccacaagaacttgagatggagtaggagttgggagttagatgaatgtaatcaaaaggaggagttactgatacagatcaagtaaccgtagacaattagtggtcgtatgtgtgtgactttgagttgacttgtgacggatacttcagggtaatagaagagtagaaaatggatgttatgttgagttgttaatttgttatagtagcttcaaaatatttcttttaatttcatcttttctttggtatgttgttcaatttgtgtggatgtgtcatgtgtgtatattttatacagattacttactctcctagaattccttttctctaacacttcctagttccatccaacacattgatttggtttcggatcggtttgttcgtcggattcgggttgtagtgaaattatatctttagatattttggttctgttcggttttgagatcggttattacggtttggttcaaatcgaaatcgaattcttataaatacggattaacacgattttgatgatttcgctggcaaagaaaaaaagaaagaaaggaaaaagacactttttgctcggaggtttgagacttgagagacactagggtttaagcaattgatctctcgtgctatttctcctaggttcctaatcttcgacagtacgtctctcgtttcctttgtttcgtaatcattgtttgttattgtttttaaaatagttgcttcttattctcaactagcataattgtttttgggaatgtggtgggacttttagaggttcgattaggttagggtgtgtaacgttttgtgtttgtgatcatgttatgcagaacttgtggaggaagttattatcgttttgatgcaaaaatcttgtttgaatttttttcaaatgcttgaaggacttgctatatgtgttacatgtgccacagtattttatctttggggggagagcattaaagagtttagtagtctcatcccaatcctttttgcatatttgaatgttttttttttaataaatcaatcaatcaatgtatgattgcttttgggatggtgcaggagatttgaacattttaacagtattacccgcgttattgacttaaaaaagttaggtatgtttctcttagtatggaattcaaagcctacttcattctgtattggtttcagcctttcaggttacaatgtgaaccagttattgtattatttttgtgttttcagatgatttgcttaaagaaaaaacaacgaatcttcttgttttggtatccggaagagttgcatctgcaacaacctttaactccaaagatggtgatcttttgggtgttgtttttgagaatacggtaagattgttttttttgtaaagttggcaatcatgtgtgcttaaattctctggtttggtggtgtgtagtcataagtcataacacatatactgtcttcgggccaaagtggtttatgagaacaagttggaagatggtggtttgataaacaagtctgtaaatcttcttctacaacgaaaggagactccttggtatctggtaaaatacaactcatttgctatttcttgcccccccccccccacccacgacttaagcctgccttcttgatttgttgtctctctctctctgtgtgtctcacacacacaattaggaagacagtacgggtcgggtgaatgtagtgggagctgaaggtgctctaggttttaatgaaattgtaagaccgtatgaagtaaaatcacttggtgaatccttcaaaagtctttgttcacccaaagaaggctctaaggttctttgttccttcattgttttctccttctctgttttgttccctagaaaacctctaattccttgtgttgaaagttgaaaccaacaacgtgatgtttttctttaggttatctttgggcaggctcttaaagttggtacctctttgacttttgttggtgaggtaaaggaagtgttccttttgacttgtttctttattcaggaaatgtggatcctgcaagagtggcgttttagcggttagttcagttacatttttttccctcttctgttgtactgttgtataggctgttagagacaaagctggtaatctcatgattcaaaaatccaaggaacagtctttaatagtgtttagtgaagagagctcctttgatgagatggttaataacatgaagtcacagtcagagtaaggacagactcatgtttttttgttatacacttactttgggaggtgaggtgatgaatcatattttgttgtgttatttttgcaggctttgtgtaatactcgccaagatcttcggatctattgctgtggctatagccgtcgtgtacggtgtggattatgcaagaaaggttttgttaccattcgtgtggaagaaaaagcatttaggtgacagcagttcacagaatggtagctcagacagcgaagataccgacatcagtgatttctag

SEQ ID NO: 138473 - DNA, 497 bp, Arabidopsis thaliana landsberg
atgaggtttgatcttgtgcagcttgtagcttgtaaagctgaagcctttttgcggcttcatcagataaaggattcagatttgtgtatatccagcattccgagattggatcatcaccatactcaaccacctgagaaactatttggtatagtatgtgatgcttatgtgctctgtgttcaagctcaagttgatatggcgttaggaaggtgagcttcgaaatgcttaaacttcgaatggtgtttttgattctttattagtagtcttgtttggttcttgggtgagtgagtagagatgttaggtttgttgcagatttgagaatgcgattgtaaaggtggagagagccatgacgattgatcatagcaatagtcccgaggtagtatcggtcttaaacaatgtgaagaatgtggcgaaagctcgtacccgaggaaacgagctttttagttcggggagatactcggaagcgagtgtggcttatggggacggactcaagatggatgctt

SEQ ID NO: 138474 - DNA, 1623 bp, Arabidopsis thaliana landsberg
gtcatctccaccgctctaaattctaatctatccacaccagctctgtctatgaactttgcttggctcatctcctttatctccagtttctcctgagctctgctttttgtaagtaatcatcagagaagctcaattctgtacttgtatgatcctcaattaggcctttgaattcatgacttgttttctagagattaggttcatgtgaaatcatacggccgccaaatttaggtttttctcttttagttcttgaggtatacaatgggaatttatagctgcagcgcagtgttgagcttcggcttgaaatgtccattagttattgcaaggcataggctttaccatcgcatgtttagacgaaacccattacttgtagaatcccatcttaataggctctgtagttgcaaatgtaatgcgagtctggccattggcgaagttgtggagaaggaagatgcagagcaaagccgtagttttaattgggctgatgttggtctgaatctgacagaagaacaagacgaggcaatcactcggattcctattaagatgtcaaaacgttgtcaagcgcttatgcggcaaattatttgcttctcccccgaaaagggaagcttttgcgatttgttgggtgcttggcttaggaggatgaaccccattagagctgactggctttctattcttaaagagttgaagaatcttgactctccgttttatatcaaggtacttgctttcctccttccatgctcgattgatctttcatatgtatctaactcatgctaatttgctatccgagtttatctattgtcaccttcttgattacgtttaaatcattcagtcgtgttacctgcatctccttaggtggctgaattttcgctgctccaagattcctttgaagcgaatgcccgtgattataccaagatcatccattattatgggaagctaaaccaagtagaagacgctgaaagaactcttctttccatgaaaaatcgaggctttcttattgatcaggtgacccttactgcaatggttcagttgtacagcaaggcaggctgtcataaattggctgaagaaactttcaacgagatcaaattgcttggggaaccactagactaccgatcctatggttcaatgattatggcctacatcagagctggtgtccccgagaaaggagagtctctacttagagaaatggactcccaagagatatgtgcgggaagagaggtttacaaggcattgttgagagattactctatgggcggagacgcggaaggagctaagcgggtttttgatgcagttcaaattgcaggtattactcctgatgtaaagctatgtggactgctcataaacgcatacagtgtctcgggtcaaagccagaatgctcgtttggcgtttgagaatatgagaaaagcgggaatcaaagctactgataagtgtgtggctcttgtattggctgcatatgagaaggaagaaaagctaaatgaagcgttaggattcttggtagagcttgagaaagactctataatgttagggaaagaagcttctgctgtgttggctcagtggtttaagaagcttggtgttgttgaagaagttgaattacttcttagggagttttcatctagccagtctcaacccctctaa

SEQ ID NO: 138475 - DNA, 294 bp, Arabidopsis thaliana landsberg
caagaaacgaattgtctctaaaaagaagaagatggcgaaaaatagctgtttggccaaaatcactgccggagttgccgttggcggcgctcttggcggcgcagtaggtacgctttcgatttcctttacattctggaaaaaaaaaacctaaaccctagaattacaatctaatcgccttttaaatgtatccgattttgggaatttgggcacgggttttggctatggagatgatattaagacttgtttttgttgtgttcaggtgctgtctatggaacttacgaggcgattagagtcaag

SEQ ID NO: 138476 - DNA, 2299 bp, Arabidopsis thaliana landsberg
ccatctccttcctccgatcttcgtctccaattcggaatcttcctatcacaatttcaaggctcctttaacccttgatcatcaccgattcaatcaattcggaatcacaattttaaatcgagagaatttcaatttctcttgtaaaaccctaaattatgtacagcaatttcaaggaacaagcgatcgagtacgtgaagcaagcggttcatgaagacaatgctgggaattacaataaagctttccctctatacatgaacgcgcttgagtacttcaaaactcatctcaagtatgagaagaaccctaagatcagagaagctattacccagaaattcaccgagtatctccgtcgtgctgaggagatccgtgctgttctcgatgaaggtggatcgggtccaggatctaacggtgatgcagccgtcgcaacgaggcccaaaactaagcctaaagatggagaaggtggtggtaaagatggagaagatcctgaacaatcaaagcttcgagctgggttaaactctgcgattgttagagagaaacctaatatcaagtggtcagatgttgctgggcttgaaagtgctaaacaagctctgcaggaagctgtgattttgcctgtcaagtttccacagttcttcactggtaaatttgtgtaatctggagctattcattgaagttttgaaaccgttctctttgtaaagttgtgagctttatctgttgttttgttacttcttaggaaagagacggccttggagagcttttctgttgtatgggcctcctggaacaggaaaatcgtatttggctaaggctgttgccactgaagctgactctaccttttttaggtaacgtatgtttaaaagtgtttgaatttctgaaagtatataggaagaggatggtgtagtgtcttaactctttcattatagcttgagaccatagtcaaatacttatggatttgaatagttgctatggatgataagcgtattgaagtagtttgggattagtttaagtagggtggtctttggttttgtttgtgtttgaattctaacggtgtactacaagttcggatagaaatattaaggaaaggtttgatgttcctttatagtttatatgcaaattctgctctatgctagaatagatgtatgagtctctgctatctgtacatgttatacataagcagctgcaacccgattttaaaggcctggtagaatctaaatagcatattagagaaccaaggcggatcgatttaattaggcaagaatgctgatcctttggtttaagggtgccagaatttctaatttcaatgttgtttgcacgaggtacttgggtttttaattaggtatggctatgtactttatgttggttgtttttctatgtcagtttgtttttacagtgtttatacttggaaacatgttatagcttaagaaaagttgtttcctttttacttcccaaccttcagcgtgtcttcatcagaccttgtctcgaagtggatgggtgaaagtgagaagctagtatcaaaccttttcgagatggcccgtgaaagtgctccctcgattatttttgttgatgagatagattctttgtgtggtacacgtggagaaggaaacgagagtgaagcttcaagacgtatcaaaacagagcttctagtgcagatgcaggtgcatagcttatccgaactaaactccatgttttttagttgtagctgaaatttccgtctctgactcatctctttatcttttagggtgttggacacaatgatgagaaagtacttgtacttgcagcaaccaatacaccctatgctcttgatcaggtgaaagtcataacacggcttggttctctattttctttgccagttaaatattgttttgttaacaccatgttaatttcaggctatccggcgacgttttgacaagcgtatctatattcctctcccagaggccaaggctcggcagcacatgttcaaagtataattcatttgcttcaagtttctcaagtaaaaatcattcaagggagacaaaaccagtttactaatgagatctgttttgtaaatgcaggtccacttgggagatacacctcataatttaactgaacctgattttgaatatttaggccaaaagacagaagggttttctggttcagatgtgtctgtttgtgtacgtaacttggcctgagttatttcttattgtccttaatttccccctatgttgctatagatagataagcctttgtcttgagaatctttttggctacatgcagataaatgatgttctgtttgaacctgttcgtaaaacacaagatggtatgttgtttttca

SEQ ID NO: 138477 - DNA, 1909 bp, Arabidopsis thaliana landsberg
  unsure (1)..(1909): unsure at all n locations
atatggaatttcagaaagaattagcagtagctactcaacctgcagttgatgttaaagttgttggaggggagccttctggtaaggaaacactaaaagaggtaaagggaaaagctaagagacaaagggaaaataaattcaaaggtactcttgctcaggggatggataaagagagtgcaattgataagagagacgtcggagcttctccaggaggaaacttgatcgaagctaagaaagctattgacggttctgtagaagccaaaactggcttgactgaagacaagagacgcaaaaggaagagaccaacaaaacaggttagagattcaaacaagaaacttaggcaagatgtagtagctggtgctgatacaacagaacagggaatggaagagaggaaagagcagccggttgaccctgagaaaagagaaatggatgggcctgggaaagtaaagattggtggattgatcttcatgtgcaatacaaaaactagacccgattgttttcggttcagtgtaatgggtgtacaagagaaaaggaaggattttgtcatgggtatcaagcctgggcttaagctttttctttatgattatgatctcaaactcctctatggaatttttgaagcatcctctgctggtggtatgaaacttgagcgcaatgcttttggtggatcctttcctgctcaggtaacattgtgtgtcacccatgtttgttagccgttttccatttgtacaacttgtctcgaagatgatatcagttttctttcgtcggaatttatttaacttacggatctagatgatgatattctttggattcaggtgcgctttaaggtttttagtgattgcatcccattggctgaaagccaattcaagaaagcaatcatagagaactacaataataaaaacaagttcaaaacagaattgactcataagcaggtgaccttcatattttcatcattttctctaatttatatcttactattaacacgtcttaatcactctgttcgtctcttctattatggtgttcttaaaggtatttaagcttaaaaagctttttcggccagctgcgatccctgcacaagttacccacacccagcaaatccctgttcctcgtgatactgacaggaaaagatctgatagagaccggtatgcccctggtagcagtaggggtcacccaacacgcaaacatgaaagaagacgtgcttcacctcctccacgcagagaagaacaaccgcgtgatttatatcttagtgaaagggagtatcgaacatatggcntgagaggaggagaaacaacccagcattaccaaattccacctccagaatcctcttcttcttaccacattgtcaaccgagaccgtgttcatttggattcttaccgttcatctatggaccatgaccggcttttgagacaagcagagattgagaggcatgaccgtagggaagttcgtcaccctcatttgtctgagagagactaccagacgtatgatcatcttacttctagacgggaaatcttggttcgaaactcgcctgacccaccagattcagcggttactctggattcctacaggagagatccgtattacatttgtgagcgccatgctcttgaaagaccaccaaggacatacatggtttctccaggtagacaagatgatgacctgtattcccggtatgtaacaccggattcattggctgagtactaccgatcatcacaaagatacccaagcgtaactgaacctgagcttccgccttcgttagtaacatcccggtatgcttattctcggtctttgccttattctcaccgctgaaatcagaatgtgtaattctcctattcctttgaatttatctgatgtttaatgtatcttggatatggatactaaagagttgctgccaaagggttcgacttaaatttggtcgtta

SEQ ID NO: 138478 - DNA, 2439 bp, Arabidopsis thaliana landsberg
caaggttgcaacagaatctcaggaaacatcaactccgacattgttagctccttgtgctggtcattctttggtaagtttattaactttttcgttttgtttttgttattatcgttttgctttcctgcccagaaatattcaggagaggggtttcagctaaagcaaagttttcttctcatgaaagtcacttgctatattagtttgtaataaagaagactctagctatacattattcacttaccttctttgcttgttttgtagatagcatgggacaacaagctgctgtctatcggtggtcacacaaaggatccctcagaatctatgcaaggttagcgtttatatacctttgaagacgataatttgcacatatttataagatttttctggaatctcaatgattacatatcactttctactgtttcctgtcacagtgaaggtctttgatccccataccattacatggtcaatgttaaagacatatggaaaaccaccggtatatcttcacttctctcatgttgtctcatttgctttcctgtcacctttgtatgaaaatattacagttttatacaaaaaaaattttggccgtcaaaagacaaaaaaataaaagttgttttcttccttaccctcccataatatcttcagggttaaggtgcatctaaatccagaatttctccttgctaatttggaagtcaaatatgcattttggttacttaaatttagactttcttataattatctcttgcttttaggtttcacgtggaggccagtcagttacaatggtgggtaaaaccttggtgatatttggcgggcaagatgcaaagagatcacttctgaacgatttgcatatacttgacctagacacgatgacctgggatgagatagatgccgtgtaagattttatgatgtttctgcattttgttctctttcgaagaagtcaaacccatttaagattagatatataaccagaatatgaatatgttagaaatcgacctcctacctcctttagtatcttagtcgttattgaaagattagcaattcaggatttaaattggtgtcaaattgcaggggtgtatctccatctccgaggtctgatcatgctgctgcagtgcatgcagaacggttccttcttatctttggtggcggctcacatgcaacctgtttcgatgacctgcatgtccttgatttgcaaactgtaagttaagctaagagtctattctttcagctgctctcaaacatgctttgtcagcctctgatataattgtcacatatagatggagtggtcaagaccagcacagcaaggtgatgcaccaactccaagagctggacatgctggcgtgacaattggggagaactggtttattgttggtggcggtgataacaagagtggtatgttaatgcactttttccttggaaattttctcttcccaaccgttctgtttatcaccccctagaacaaaagatatttgcttgggtttttttttttgtgtgtgtggggtgactaattttgtgacaaattactgcaggggcatcggagagtgttgtactaaacatgtcaactcttgcatggtcggtcgttgcttcagttcaaggacgtgtacctcttgctagcgaggtacttaaataaacagactttatccatattaattcccagatagctatacaaataaacacggtagaagccttttcaagacttcgaaaaaagtcaagtcatgcttatttcatttccatcgtcctttcctttgctactgacagggattaagtttagtggtgagttcatacaatggtgaagatgtactagtcgcttttggtggatacaatggacgttacaataacgaagtagggactgtgatctgaacccataagttcatttctcttaatttggcatttagttctgcttctaattcttatctggcattagattaatcttcttaaaccaagccacaaatcaacattgcaaacaaagactctggaagcgcctttgccaggtagtctttctgctgttaataatgccacaaccagagacattgagtctgaggttgaggtgagccaagaaggcagggtacgggaaattgtcatggacaatgttaaccctggatcaaaggtatcttcttgtcaaatttccctccttaatatattttgcatagcaccaccttttgatttgtttgagagaattgaagcatcttatgcatatatgctgtggtagtgattgtgtcgacacagaatatagttactccagtccggatcatcaccttctcgcactcttattatgttttgggtgattaatccccaggttgaaggaaacagcgaacacattattgcgactattaaatctgagaaggaagagctggaggcatcactgaacaaagagaggatgcagactctccaactaaggcaagagttaggagaagcagaattacgaaacacagatttgtacaaggtact

SEQ ID NO: 138479 - DNA, 1226 bp, Arabidopsis thaliana landsberg
atgtcgatcgattcattaacacagtccctgtctgtagactcgatccttgggagttaccttgtaagtcattcatatcaccgagtgtcgtccttctcactgttcaatcgaatcatccgctactttctgattttagcgttttctcgttttggtatggtaggccagtcaaggatcaaactgaaagatgtggcttggtgtttcttcagacctaaggagaacaaatatggcagaggtgatcagcagatgagaaaaacgaaatctgggttttggaagagtactggcagaccaaagcctatcatgcgtaatcgccaacagatcggtgagaaaaagattttgatgttttacacgagtaaggaatccaaatccgattgggttatacacgagtaccacggtttctctcataaccaggtactctctgttttttttttgtgttacttactattgctgcgattctgagtttttttatcgaatttttgcagatgatgatgacatacacactctgtaaagttatgtttaatggtggcatgagagagaagtcttcctcttctcagtcttcttctggtgttagtggaattgagcagagtcgtcgtgactctttaatccctcagcttgtcagcaattctgaggtgggttcatctcaaaacttcttttctgttttaaatctgacaacgacttcttttgcgttctccccctttttcagggatcctcacttcacagagaagatccaagtcagtttggtgatgtgctgcaagaagctccaatcgaggatgctaaactgaccgaggaattggtaaaatggctgatgaatgatgaggatgatgctcaaatcgaggatgctataccgattgaggaatgggaaacatggttgaatgatattgatgatgctaaggagaagagtatcatgtttatgcatgataatcgaagtgattacagacctccaaactcattaactggtgtcttcagtgatgatgttagcagtgatgataatgattctgatttgctaactccaaaaacagtaagcaaatttctacttttgtacctttataatcctctgttttcgtatttcaccttacaaagctcaagtttttgtttcattcatttgacagaactctattcaaacttcgagcacttgtgatagttttggtagctcaaatcatcgcatagaccagatcaaagacctgcaagaatctcctacctcaacaatcaacttagtgtcactaactcaagag

SEQ ID NO: 138480 - DNA, 720 bp, Arabidopsis thaliana landsberg
agaatagagagagtcctcaactttctgatattgacaaggagggtattactaatgatgaaaagtacatgctccggaaaattggcttgaaaatgaagcctttccttttactaggtaggtcattgtttttcctctttttccaattgaaagcagtctgttcccgtctttcatgtaaatactcgtggtaaatgagtagtaactgtcatggactcatctctttgacatggtttatgtaaacttcctgttctgacgtatcttgttgtgttctcaaggtagaagaggcgtctttgatggaacaatagagaacatgcatcttcactggaagtatagggaacttgtgaagatcatttgtaatgaatatagcattgaagctgctcacaaagtagcagaaatcttggaagcagaaagtggtggcatactagttgctgtggagatggttagtaagggctatgcaatcattgtgtatcgtggaaagaattatgagcggcctcaatgtctacgacctcaaacacttctcagtaagagagaggcgctgaagcggtctgtggaggcacaacgtcgaaaggtaaagaaccaatcataaaaaatccatgacatgacaatattgtcctgtaaataatatcttatctggaaacttcaaattacttttatgacttcctcgcttgcatgttgaattaattttctgctcaaattaatgcagtcattgaagctacatgtgatgag

SEQ ID NO: 138481 - DNA, 714 bp, Arabidopsis thaliana landsberg
ggagacataacaaagtttcagttcttaaaaataggttttagatggtttgtcagtaaatgattcatctgtaacaatcacaatctggtttttaattatacacgagaacattgaaattgaaacaatctttttcttaaccgaaatccggtacgatatcgggacggttaaaaattgataaatggaattggcttttaaagaccggtttacgggagaagaagacttttgtgtcaaaaactcgcgaatgcttgagcttttttcttgacatggcgagtttcgtgaaattcgaacccatatttggagaagtcgtacccgaacgttcggatccgggttcgggtctactccggcgatgtctcttccacgtctacgcttccgattcgtataacttaacagttcatgtcactgacttcatctccggtgtctggacgacgatcctctccgtctcgcagctagacgatatggttcgtttactctttcttatcctctttttgctcaatcaatcttttctctccgtttctgaagttgattaaccattgatttgctgaatctcaatggcacttgaggttttactcacgttggattttttaaaaaaacttgatttgaaacagagggatactgttgggattggtggttcgtggtctgagttcgtcgattatactgttgcttccttgaaatccgacaatgtgaagcttctcttgggagaaacttcagtttcaaatg

SEQ ID NO: 138482 - DNA, 1183 bp, Arabidopsis thaliana landsberg
acaacacaaaactgaataacaaccggaaacttgagcaacaaaacttccgacgctaagagaaatggcaacgtcctctgttctgtccaccttcgctgcggcggcaattacgttgcaactactcttatctcctgcttcagcttcccctcacatgaaatacattgacgccatctgcgatcgttcccatgaccaagctttctgcgttaaaactttgactaccaatccccctacagctgctcccattggcctggtatgatctctattatttgtttgcattttcttattcctgcttgttttcaaatcagcaacacaaatatttttatatatgaaaaagttgaaatgtttcagtttctttaggttaaattatttcacctaaaacagaaattgacgtgtttagaatcacacattgtaaattaaaagatacttagagtaacgtataagaattctgatctggtccacttattaccagtttattttttagttggaagccaaaaagattaagggtttgaaacaatacaaacattaagatctctaaacatatgttgtttattgtaaacgaattgttttttctttgacatctcaatccttaatgggaatgatcattatcgtagtttatgctaaaaaatgaaatcttatacagcttccattgtcggaggctgtgatcaacttggccatatcccacgcggagaagacagcgattttcgtagatgagactgcgaagaaagatccaacggtgaaggttgcatttacagagtgccacaaggcctacttggccgtggcagctgatctcaagagtgcaaatgtgaagctcaaggcatcccccgacacggctaactacgacgtcagggcttccagtgacaacatgaggcgcgtgaatgaattggttgggaaaaacactgacaaggcttcaaccacgctcaaggaaatgacagtgcagatggagaaactccttgatcttgcagctggagccgccgatgccgttgatgacgacgatgagaacatgcgccttcgcgtctaatggatgttaaaccgagcgggtttcgttttttttggttcataatacaaatggaaataagtaaatgaatatgtatacatcacatagaaactgtgttatggtaaattagtaattcagtttttgaaataatgtggttaagttttgcatctcttactaattttgtatctatct

SEQ ID NO: 138483 - DNA, 2468 bp, Arabidopsis thaliana landsberg
atggaagctacactgttttcttcaccgccttcgatttcaccactccgattccatccactggttctttctcaaagagccatcattcccaagaagaagaagatgacgatgagagtctctgctgcggcgtcatcaggaaaagatcattactgtggaggaggaagattggtggacgagaacatgatcgttcttaggaaacgtatccacgagatgaagatggtcgagcgtaactacgagcctccttctcactggatggattgggagaaacgtttttacaatagctacgactctgttatctgcgactccgttggtcttcttcagagcttcctcatgaactctcgacccactgttgcaatcgcgacgctgcttttcctcctcgtcagcgttcccgcttcctccacggggagcgcgtttcgccttcttgatcttttgcattggcttctcgcagccgcaacatcagcccacgtggctcgatctcatatttttcttcatcttgtgagtcgccgacaaattctctttatatatttaattatgtgcatatatagatatgtaaaccaccatattcttttattatttatcattttttctaaatatttttttacattcgctactgaataaaaacgtacgatttaattgcagttaaagtacggtaaagatcaactaataacggaaaatatatatatatatatattagttactattaaaactgcattgtactgtgcggttttattatcattcaaaatttaaaagtttaaaaaaataagatatgtataaattaattatcgttatttatgctttttcattttgtgggataagtatattttcttgatatgtcaatgcgatgaaacaatactaataaaacacatctaattataaaagtgtttcttgataacttaaatgaggtttataattatacattcggatatgtttggtcaaatatactacgtaatcatcatgttgtgtttttgtttttaataggatcatcatgttgtggttgataatttcattttgtgaacggtgtctatagtttttctggctcccattcatatttttaaacgttactctataattaattacgtacaaacaaaaattaagggtgcgtcagtaaaaagaaaagaaaagacagaatattttgggaatcatggggaaagtgaagcaccgatttggtaaatgtaaataaatgttgggttagtttatgtaaataaagacaaaatatgggaccgaaacaaaaaacgaattcaggtctgtgtaacctcgaaagtgagaccgttgtcgcccacaaaacacaaaccctatcttttcttcttcttcttcttcgttcagtcttcactttcttttcttttctccgccaccacacaaatacattcttcattctttgtaactttcacgctattcttcctcaatatattcattcgacctcctctcttcattcttaatttctcaaaaatcttatctttctccctcatttttcccgtcgagggttccttaatctccttcctaggaacgtttcatcgatttcatatttgctttccttaatccacaacgtttcttccttcgtttttttctgcaattttgttttcctttacaccaaattcatctcttagtcttgtccaattttcgattttttttccgacaatcctgattgtttgtttttttatctgtcgggatttcgaatggcgcttgcgtatgatcctctcttcattacatcggacaaatctttgtccgcctttgatgttgcctcttcaccgcctcagcccatgaatttaacacaagacgagctcaaacgtatcgccgcttacaaagccgtggaattcgtcgagtccggcatggttctcggtctcggaaccggctccaccgccaaacacgccgtcgaccgaatcggcgagcttctccgtcaaggcaaactcgagaacatcgttggtataccaacgtctaagaagacgcaggagcaggctctgtctctcggcatccctctctctgatctcgacgcacaccctgtcatcgatctctccatcgacggcgcagacgaggtcgacccttttctcaacctggtgaaaggcagaggagggtctctgcttcgagagaagatgatcgaaggagcttctaagaagtttgtggtgattgttgacgagtccaagatggtgaagcatattggtggaagcaagcttgctcttccggtggagatagtgcccttttgctggaaattcacggcggagaagctccggagtctgctggaaggatacgggtgtgaagcgaatcttcgtttgggagagaaagggaaggcctttgtgacagacaatgggaattacatagtggatatgcatgtggaagaggatatgggagatttgggagcagtgagtgatgcgattctgaggctaccgggagtagtggagcatgggatgtttctggatatggcttctactgttatcattgcaggtgagcttggtgttaagatcaagaacaaacactga

SEQ ID NO: 138484 - DNA, 652 bp, Arabidopsis thaliana landsberg
atttttataacgttttgaatttcataaacctagtggctagtgatatgatactctcaagaaacctacccacctaaaaagagagaaaaacaaaacaaaagaatagtaaggcactaaacactaaaactaccacttctcttgtatcgccgacaaagctttgttcagtggcaaagatgatgaatcatttgcttttggctcttttccttgttggaaccatcgccttaccagatagaggaactcaacaattgaccaacgatggcctcaccggcgcgaggcgagagatactctctttcttagaccaaagacttgcagtggtgtacccagtgatccagagattcaagtcactcatcactctcgacccttataacgtgaccaagacatggattggttcagacatctgcagttatagaggcttccactgtgacaatcctcctcacaacaaaaccgcagttactgttgcttccatcgatttcaatggctttcagctctctgctccatccatcgaaggatttatcgatcaattcgctgacctagctctgtttcatgttaactcaaacaattttggaggtacggtgccttccaagatagtcaacctccggtatctctatgaactcgacatcagcaacaatagattcaccggtcagtttccgacaga

SEQ ID NO: 138485 - DNA, 677 bp, Arabidopsis thaliana landsberg
ctcgagttctctaaaaagaagaagaaagggaagctaccaagagaagcaagacaagcgttgctcgattggtggaatgttcataataaatggccttaccctactgtaagtgtctttctgattccaccgtaacctagcatacactcattaatttatttcttcgacatattaatatccgcctctcgaatgtgtataggaaggcgacaaaatagctctggctgaagaaacaggtttggatcaaaaacaaatcaacaattggtttataaaccaaaggaaacgccattggaagccttcggagaacatgccgtttgatatgatggacgattctaatgaaacattctttaccgaggaatgaaaagagagacatgggattgtgcattgtataatttttacactgttttcccaagaaaagaaaacagtaaaaagcttttggtaaatgggacatcatcgcgaatgaatggaaccagttagccaaaacggtcaagggcgtggcgtaacgagacattgtattggaaatagtggcaatattatgtcactaatcttccaatggtccaaaatgatagatttcttatttgtattgaaccttacttagatagctgatgtgtcaactaaataatttattttcatccttatactacttgtatcaatgtctctaattgatcaattgttgcttgctattc

SEQ ID NO: 138486 - DNA, 819 bp, Arabidopsis thaliana landsberg
aggatttgcagttggtttattaagctatgtggtaataattctttactttctttttttccattaatttggtgtataatatactaatttatttttactgactttgtgttaactctgttgccttcagataccagtttacattgcagaaataacaccaaaacatgttcgaggagcgtttgtatttgctaatcaggtaaactaaagaataattagagaataaattcttataaccataaaataaaaaagatatatattatactaatgttcttaaaatttgttcaaatgtcgttacagctgatgcagagttgtggattgtctttattctacgtcattggaaattttgttcattggcgtaacttggccttaatcggtaagcttcttcctaatcctttttttctttctagcaggttagttatgaaattttcatcaagaagtgatttaagtttatcggtttctgtctctcaggtctcattccatgtgcgttgcaagttgtgactttgttctttattccagagtcccctagactactggtacgtttagccctttttaagttttgatcttttttaaaaaaagtgtgaagtaaaactcaatatggtttacaatggtgtatagggaaaatggggacatgaaaaagaatgtagagcttcattgcaaagtcttcgcggagatgatgcagatatctctgaagaagccaacactatcaaagtattgcaacttttcacacatctctctgtttttaaattgtgttgttttcaataaaacatgactaatgaacaaatcattggaaatgtcaactataggaaaccatgatcttgtttgatg

SEQ ID NO: 138487 - DNA, 249 bp, Arabidopsis thaliana landsberg
ccaaaatgtctcgcaattagattctttccaagttcttctgtaaatcccaagtcccgctcttttcctctttatccttttcaccagcttcgctactaagacaacaaatctttccctctctctctcgcctgatcgatcttcaaagagtaagaaaaatgcaggaacaagcgactagctctttagctgcaagctctttaccatcaagcagcgagaggtcatcaagctctgctccacatttggagatcaaagaag

SEQ ID NO: 138488 - DNA, 322 bp, Arabidopsis thaliana landsberg
ctacagaacgtgtatgaaccaatggcaggtgcgttccatacaatgtaccattagattatgattcatttatcgcctagagtgatgttgtagaggagcaccgagaaactaatgtaagtttaacagagaatgtacttcatcggctgcattggtacactatttgattataatatttttgaccactcaaatgcatctttataatcagctatatgaagaaatccaaactcaaatcaatatccggattaaagcgggaagtttaaacgaaaacaaacacaaatattctcgctgtattaatacttactgcttcaatttacagaaaacatga

SEQ ID NO: 138489 - DNA, 1254 bp, Arabidopsis thaliana landsberg
ttcttcttcttcttcttaatctcagattcttgtctgaaaactttctctttcattttctctcaatttaacactttcaagatgccgatcaacaaagacccatcaacacctcctcctgttatcggaaaaatcggtccttacactgtctttatgactcctcctgcgactcctaaaccacctgaatctccctccgctgtgtctcagaagcctgtgatggcaccaccggttcttcctccgccgcagcagtttaaatcggtggcttcttctgaccaggacggctcagttttggggttctttaaaaacgccgtcacaaaggttcaaaatggtgagaaatctgataaacaattaactgattttcagctcaaagtttcctcatttttagatcttgaatttgagattgatttttccgataccctttgattgattgattaggaaattgaactcaaaaatgatataaatcgttgtaaagtttctatctttgtgaagtgattggaaagtactaatgttacatgaattctagcttttcatactgtttatgtgatttggtcctaaaagcaattagattgtgaatttgacattcatgttgtgtgtgtgtgttctaatccatttgactacagcacattcaagtgtggatgatcatttggtgaggtggtttgggttaaaccaatctaagtatcagtgggctttggatgagtactacgaaagcaaagaatcagtaagtttttttttgagtctctatatgtttcctttgagtctctatatgtttagtttcttgttcttgcgggtcctgtatcgttctttgtactagtttctatcgataatcgattcctttagtccgattgattcatcagctttttgtttcatgtacattttgcgtaagcttagaagtaaagctagtttaagtgtttttttgctctttgcttctaggctaatgaacataacaatatacaaccaatgaaattgatacaacatatttgaagcttgatattcactcaatatcagttgtaaaaattgttcattggtatttggtagtcaaaaatgtcattgattggttttagagttactactctctttagtcattgatttgcttatgttcctcaagtaaatcttgtagttaacacatatcttttgaatcgaacgcaggatatgaagaccgtgaaagcaaaggagatgccggggaaagtacagagtgtataagcaaccatgtataaactcatttcccctttggccaattctaaaatctgtttttctgagaga

SEQ ID NO: 138490 - DNA, 1876 bp, Arabidopsis thaliana landsberg
gaacccatcactgttctgtccctcaggtatatttctacatgcatctatggatatctgtgtttatgtgtatgtgatatatgttctgtattgatcccttttcactccctttatgacgcagctctggaacaacagaagggagtcaaaagtatgttccgtttactcgccatagcgcgcaaaatactcttcagattttccgattatcagcggcttacagatcaaggtctgttttcatttcttgtctattcttttccattaaaaagttcttcattatctcataaattcctactatgctttcttttaaaggttttatccaataagggaaggagggaggattcttgagtttatatacgccgggaaggaatttaagacgctaggaggattgacagtaggaacggccacaacacattactatgcgagcgaagagtttaaaactaagcaagagacaacaaaatccttcacttgtagcccacaagaggtcatctcaggaggtgatttcggtcagtgcacgtattgtcatctcctacttggtctccattactccagccaagtagagtttgtcgcctctgctttttcttacaccattgtccaagctttctcctttttcgaagaaatctggagagagatatgtgctgacatcaaggaaggtaatcttagctcaagaatcactctgcccaagatgagaaaagctgtattggctctgatcagaccaaacccgtctcttgcttctcatatcgaggagatctgcttagagctggaaacaaatctcggatggttcggtttgatttcaaagctttggccaaatgcaaaatttatctcctcaatcatgacgggttctatgctgccgtacctgaataagctgaggcattacgctggcggtttgcccctggtgagcgcagattacgggtcaaccgagagctggattggtgtgaacgttgatcctcatcttcccccagaagacgtgagctttgctgtgattcccacttttagttacttcgagtttataccactttacaggcggcagaatcaatcagacatatgcattgacggtgactttgtcgaagataaacctgtgccgctctctcaagtcaaactcgggcaggagtatgaacttgttctaaccactttcacaggtaaagaaaaacctcctctgcattttccatagccaattgttataatcaacgagctttttgcgtcatctgtttcaccacttactctgttttatcgctctgttcaggtctttataggtacagattaggagacgtagttgaagtgaccagttttcacaaaggcacaccgaagctaagtttcatatacagaagaaaactcatcttaaccatcaacattgacaaaaacacagagaaggatcttcagagagttgttgacaaggcgtctcagcttctgagccgatccacacgagctgaagtcgttgactttacaagccacgcagacgttatagctcgtcctggtcactatgtaatctactgggaaatcagaggagaagcagatgataaggctcttgaagaatgttgcagagagatggatactgcttttgtggactatggttatgtagtgtcgaggcgcatgaactcgatcggaccgcttgagctacgagttgtggaacgaggaacgtttgggaaagtggcggaaaggtgcgttgggaaatgcggtggcttgaaccagtttaagactcctaggtgtacgaccaattctgttatgcttgacatacttaatgattctactatcaagagatttcgcagttcagcttatgactagaaacctgattactaaatttagttttgtgtttttatctttgtgattccatggcggctgtgttagtgtactcagttttgaccatttacaatgaagaataaaagga

SEQ ID NO: 138491 - DNA, 97 bp, Arabidopsis thaliana landsberg
atggtgggagaatcggaaggagtggcggcgagagcagcttctttctcggaagccatgacggcggaggcaggtgagaaatgagatgatagaatcgaaa

SEQ ID NO: 138492 - DNA, 1804 bp, Arabidopsis thaliana landsberg
gtttacatttcattcagctaaatatttgtaattcttggatcatgaatgattaaccatcttagtttgattggtgaaagtataccatagctgcttaggatccgtttggctttgttatttgctcagattctgaaaggaggggtttaaagtttcaagcttttcattccgctgaatcagtccttgtatttggacggcttgatctgttatctgctctcgtgggtggggcatgaacagaacggtggtctcgggagctgttgaatcgagtttctcattgactgatgctgttggcacggaagctctaaatatgcagaggagcagtggcatcaataataatatgcgtatcccaacatcaccgatgtctttctcctcgaatagcgttaacataccgggttcattggttcttgatggctctgctgcttcaatgcaacacttacctcagcagcagcagcagcaactactacaacagcaaacaggacaaggttctgttccaatgagggagaacaattattcccatgtggataagaaacccagattagaagtgaagcaagaagatatgttgcagcagcagattttacagcagttgatccagcgtcaggaccccacggggaggaatccgcagatgcaagctttgcttcagcagcagagactgaggcaacatcagcagatgcttcaatccatgtcaccctctcagagactccaacttcagcaacagcagcagctgagacagcagttacagcaacaaggaacccaacagattcctcctaatgtacgtccttatgaagttggcgtctgtgctcggaaattgatgatgtacttgtatcatctgcagcaacggcctgctgtaagctaatcctaacctatggacttccagttatttcatcacatctatgcacccatcgctgatacctcttttctaggaaaattgcattacctattggaggaaatttgtggcagaatacttttcacctcgtgcaaagcagagattgtgcttgtcacagtacgaaagtgctgggcaccatgcgcttggcatgttcccacaggcagctccggtcagtttatttttagctctgggtgttttgattttttatgatatcagtgttctgcatccctgtatctttagccatacacacggtttctccacctgtactatttatgaatttcacttcattgatttctcaattgataagtccatcatcttctcattgtgtttgcaggatatgtggcagtgtgatctttgcggcaccaagtctggaaagggatttggtaagttagttgcaaatttcattcttgtgtgtacttatatatctgtgccttcacttgagcacaatgaagcaacttacacatgctaattggtctctttttattgtttataactattaagtcaaaatagtagctaactgtcacttctcgtgttaatccgcagaggcaacgtttgatgtgcttgccagactaattgaaatcaaatttgcaagtggtattattgatgagctgttatatctggatcaccctcgagaaaacagatttcccaatggactgatgatgttagaatatagaaaagcagttcaggaaactgtacacgagcagtttcgtgttgtccgtgagggccatcttcgcatcatattttctcaagatttgaaggtatctagaacaattctctggttccaaattgtgtaaagcgatgaaaaaataggcaccagtatgctaatgcttagttaatcttgactttgcttctatctagatactttcttgggagttttgcgctcggcgtcatgaagagcttcttcttcgcagacttataactccacag

SEQ ID NO: 138493 - DNA, 636 bp, Arabidopsis thaliana landsberg
cagattacgaagcagaagaggatgatagaatccttgattcagacccaacaggccaggccttgtcccgctctcaacaatgggataacaacattgctgcgaaagttgctgaattcacggcaacgtttgagaagcaagcactagcttttaacataataactcgaaagagagctatgggagaattcagatctgaggaaaggttgatggtagaacaagctttgctacaagatgaaaggaaagcgttgattgaactgaaagcagaaatggatagggagaaggctggccgggaggctcaggaggctaagctgcggatggcagctttagctcaagctggacagtctcaatctcatgctgagataatggctcgtaacccattaagggctaatgcggttggaaatcagggcagcaatattcagcttagccacgagatgggagaacagggacgtaacatgaaccctgatgagatgatgaatggatggggaaacaacagtcagagagaggacaaggaaccttcagaagatttcttgaatgatgaggagaatgagaatggagagacaggggaacaagaaaactggcgtgaagcaggagaatttgatttgaatagccggtaaatgaccaaggtgaagactatttgcagtc

SEQ ID NO: 138494 - DNA, 1132 bp, Arabidopsis thaliana landsberg
tgctactgatgtaaggtcaagagatggtctaaaagggaagaattttacggtctcttacctcgttgattcattgggtttatctaaaaagctcgctgaatccatctcaaggaaagttagctttgaggacaaggtcaatcctgattctgttctaagtctgtttagaagttacgggttcacagattctcagatctctaccatcattacggattatccgttattgcttgtagcggatgctaagaaagcacttggtcgcaagcttcagattctgcagtctagaggagcttcaagctctgagatcactgagattgtttctacagtaccgagaatcttaggaaagaaatctattactgtatactatgatgctgtcaaagacattatagtagccgatacgagttcgagttatgaactcccacagggttctcaggggaataaaatccgaaatgtatcggctttgagagaattaggcatgccttctcggttgttattacccttgctcgtctccaaatcgcagcctgtgtgtggaaaagaaaattttgatgcatcccttaagaaggttgttgagatggggtttgatcccaccaccactaagtttgttttagctttgcggatgctttaccaaatgagcgagaaaacgattgaagaaaaagttgtagtctttagaagtttaggttttactgtggatgatgtgtgggaaatcttcaagaagactccttctgttttgaaagtctccaagaagaagatattgaagtcggctgaaacgtttctagacctaggatatagcagagctgagtttctgatgatggttaagcgttatcctccttgcattgaatattctgtagagtctgttaaaaagaagaatgagtttctggtgaagaagatgaaatggccacgaaacgccttggttttgcaccctcaggtgtttggatacagcatggagaagaggattataccaaggtgtaacatactcgaagctctcttgtcgaaaggactgctcagaaagggaagtgaactacctgcagtgtcctctgttttgtcgtgtaccgatgaaggatttttagacaggtatgtgatgaagcacaacgagctggtgcctacgttgatggctatattcaccaaaggtcgtgtttcatag

SEQ ID NO: 138495 - DNA, 1673 bp, Arabidopsis thaliana landsberg
atggaaactaagctttcaattgccaagaaaatctttgacatagagaaagaccagactttgaactcaagcaccttccagaaattcttctctgaaaacgaggtatgcttcaaaatctgatattgtttccttgatatctcttgagaattgtctgcatagaacttatgcctccaaaggccacgtcagcgttccattggcttacggatttttgttatctttgaaagggctggttgaaaccatatgcagctttctgcttccttcgtgacttttttgagacttcagatcatagtcagtgggggaccttttctgactatacagacgacaaggtataatttgcttttatgttgttcaagtttaagttgtgatcgaattagttcaagctttccagatgtatttcatatagtttcagtaatttctcacatctccaaataacatttgccacagcttgaaaaattgatatccaaggacaacttgcactataacactatatgcttccactactacattcagtaccatttacatgtacaagtaagtatgttctgatttatctagttatattccattcttgtatttactggatgtttcatctaaagtgtgttctggttccattttcaaaagttgtcagcagcagcagaatatgcaaggaagaaaggagttgtgctgaaaggagacctacctattggcgttgacagaaacagtgttgatacgtgggtttacaggaatctgtttcgcatgaatacgtcaactggagcacctccagactattttgacaaaaatggtcagaactggggatttcctacttataactgggaggaaatgtcaaaagacaactatgcctggtggcgtgctcgcctaacacaggttggaattattgtccttaccagccacatcctttgtagatctgaaggctgaccacattgcatacttgctttgcagatggggaaatatttcacagcatacaggattgatcatatattgggattcttcagaatctgggagcttccagctcatgctatgactggtttagtggggaagttccgtccatctattcctttaagtcaggtacacaagctacatgcttacagttaaaaaaaacttggctttgagagttacttgataataaaactgctgctgatgcaggaagagttggaaaaggagggaatatgggattttgaccgcttaagcaagccctatatccagaagaagtttcttgaggttagttttccatcacattttttatgatctgcctctgtcacagcttagttagtttgtgagttttcaatctcattacctatttgttgataatatgtcattgttctgttccttcaggagaaatttggagatttttggccttttattgcatcaaactttcttaatgaaactcagaaggacatgtatgaggttggtaaaaatcctcatttagagatcgttttcctttggagaaccaagtcttacctttttctgtccaaaactctgtggtgttttttgctaagtggatgtattaaatctttcttaattggtttcctttaattgtactctagttcaaggaggactgcaacacagagaagaagattgcagcaaagctgaagtcattggctgagaagtctttaagctagaaaatgaggacaaagttcgacgtgatgtctttgacattttacgggtaaactttcatgcat

SEQ ID NO: 138496 - DNA, 8750 bp, Arabidopsis thaliana landsberg
tttttggatcatacgaagaagaaatcggcgggagaagctatgtcgaggctatgggcgagatttgcgggattgttcagtagcaagagttttatcggagtagacaagactggtaacaagtacttttccagaatggaggagattgacggattcggcgagtattgttcttccaacctcttatttccttaaaaaatctttttttttgtttgatttatgttggaatttggttattgcgtgaaatttatgtatctcttaaatttgtcaagttgctgaatttctttggttttctccgtacgatttgatgaatcagctgtctttgcatatcgcgagttgcagtgaagcaaatggatttagaaaaattaatatcgtattgttttaaagaacattgtctgcttcttttcatacatgaaaagattcagctaagtgtgatcatgtaaaatgaaactaacagaggttatttagatgatcaaaacgaatattaagactcttgtagaatccatttgtagagtaatatattctgatgtgcttctttctactatccagtgaaggagaaaagatgggtcaagtttagacgagaggaggacccaacctctattcctggtaactcttctttaaaacataaaatgggttgttatatacgaccatatattcatttacttgagtgatgtcagatctgaaataagcacatctataagatatatggcatgtatacacgaatctagttacatttttgtttgatcaatgttgtagttgaatggatttgttggctgaatgggcagcgaaaaagggctcctactcctgaggtaagataaactcctttttaaccagaattatttgtggtcagcatagtgttcttaccatggaagtttttcattgcatacagactggctatgcttggcctttgatattggtgtttgttattggttcaggaaatgattgaacttgaagcaaggcgtgagcgtgtaaagcttaatgttgctcgtaggtgtttcagcttataaatacattttctaaacttatatccttttaaacgtcttaaaattattatttccttgtgtcattgatccttactgcaaacagtttatgactttgaggacttgattttatgaacttcgaagttgtgaatgaacaaagtcaagaattatttctgtttctgtgttagcaagtcaagaaatccgtatgcaaattttccatttaatatgtcgctcaagttcaaggcaaaacatttatcgtttttcttttgcctttatttaaaagtcaagttctcaagaaggaagaggaggagaagaaagccagagtaggcaccggacgcaaaatcaccattggtaattaacattagagcccagaaaatttgtttcatttatgaattggtagcttaatgttcggtctccttgtgtaaaggtaaagttgatggtccagatttgacaagctttgttcgccaatttccaccagattcaaaaggtattacattttctctgccaatagattaattgagtcaccatagatgctgatgactaacttcttaggaatcccttgtgtaaatttgatagagattatgatggatatgcgtttatatttttgtggtgtttgacccatgaaatggtgtccattggctgatgattataatagttttgtgaaagaaacatcttttgaatgttccccatataaccattatgattgcggtagcttaaaagggcaacaaaattgttctcatgcaccataatatatcgtataagtcatttgatgattcaagggctgaggttactacagttgctagatttcttataaccttaaaagagattatggttcgaccataaagtcgtgaaagtaagactgacagttaagtttatttcctttttttgttaatgctttaaggtggtgaaccagaggaagctagtgaagaagcagataaatcaaggtgagtcatcatgattcataatatctccgcactaatcatatatgtgttaaatcttcttacattctattttttcctggatgcaaagcacaacatctttcagaagactaacataaccacatgttctcacattgctttacagggccaaggaacatgaacccgagatagtttctgcagaaccacccgaaccaaagtaagtctagccaacttgacattgttaatcctaaagttcagattctagctcacggatacgaaacatgactcgttctttctgatagttacagactgctactatgctgaaactgttctctatgaacataagttatgtattgtgtttggtatgctttaaattaaactaatgttaatgttgatgttgatgatgatgcaggacaacagagccatcaggatctggatcatcatttaggcccgggacatggcagccaccatcctaaacacatctctcttcacgcagatgacaaaccaacatactattcaattattttgtttgttgtactctacacaaccgattggtttgagccttacagatgagccataagaccagagagcttttcaagaccctaaaattgtgtcctttcacgctgtcattgaggacttagaagagtcaaaatgagaagccatcttcttatactttgttttgtttagggtgtttgtctcttggcataatgcttgagacttttagcctgccttgtccttcatagctgaagaggagcctagctaccttttgtttctcttcgttgacttgaataaaacagtttgattgaataacagttattcattttcatgtcatgatggtagtggatataagaaaaaacaaatacatagaataattattttaatgtttcagaggagaaatcctacttggcttgtgccagactcataacccaatcaaaacttcgtattaccaaaataagtgtagttctaaattttattctggtttaggctgtagttataaattactcattttagtttgtgaatataaaattactttctgcaaaagaaaatattctcatctttcgacgaaaagccaattattcgaatgttctcacgttggtctgtagctgtaaactttatagtttatataataaggtgttctactgttcttatataatttgcaagaacaaataatattaaatgcaaataaaaaatagtcaacggtccaaagtggatcataagccgtccgttcggtcgtctgaacttcatccaacggttaaaagaaatatacctgacgtggccttgggccattgtatattagtagtgagtgtgcccttggaaggttctgtaaaatgttttattcgcctctatcagaagcttgacgaaatctcttctccgtctctctctctctttccctcgtccattccacgatcttcttccaatctcaaatctcccattttctagtgtttcattttgatccttcttccttcctctggagatttctcaaatctcttcaactattttgatttgccgccatgtatcgacgcgccacttccggcgtgcgttctgcctccgcaaggctttcttcttccctctccaggatcgcctctagcgagacagcttcggtttcggctccatctgcgtcgtcgcttcgcaatcagacgaaccgatctaagagtttctcctcggctctccgctcctttcgagtttgctctgcttccacgcggtggagccatggtgggagctggggatcgcctgctagccttcgcgctcaagctaggaattccactccggttatggagaaatttgaacggaaatacgcaaccatgggtatgtctgtttgctttctctgacgttctaagaatgattgctcttaacttgtgtgacaagaatctgtgtttaccgcatatctgcttagatcgatttttcgctttaaaatgatgatctactgattctgatatgttctgattcaaagtaaaactagctagatgaacatttgatttgctcttgcattttggtttatgatttgtagatttagtctactaaatttcttttttgtatattctaaaaggacaagcaaattcatgtgttatgtgtcaattgaattatgattttaatgtttgatgtgaaaaacgcagcttctgagcattcctacaaggatattttgacaagtcttcctaaacctggtggtggagagtatggaaagtactactcgttaccagctttaaacgatccaagaattggtatgtttcctcgtgcctctatctgttttgtatgtaatggatttctggtgaagttaatacctttttgtgataatgcagataagctgccattttctgtaaggatactattggaatcagcgattcgtaactgtgacaactatcaagtcacaaaggatgacgttgagaaaatccttgactgggagaatacatctactaagcaggttgaaattgccttcaagccagcccgtgttatcttacaggtttgtagcatattttttctgtacttctacactgaaaacccctccaggcctctaagactggtacagattaagtcagcatatgctaacttgtatttttttgcccaggacttcactggagtaccagttctagttgatcttgcttctatgagggatgcagtgaagaatcttggtagtgatcctagcaagatcaaccccttggttagtgaagtttcttattgctttacggctgtaatatgtttaatccagcacttctcatatttacctgtatatatctaggttcctgttgatcttgtcgttgatcactcgatccaagttgactttgcaaggtcagaagatgccgcacagaaaaatttggagcttgaattcaaaaggaacaaagaaagatttacgttccttaagtggggttcaacagccttccaaaacatgctggtcgttcctcctgggtctgggattgtccatcaggtacaagataacatgtgatgacagtaaattctggttgccttgttgaaaattttgaacaggttttctgaaacataagtgtgattagagtattagcctgtttaatctgtttggtagactactagatttcaaggggtgcatgaatttcataatgctgtcgaatggttctgttatgatagcttgttattatttaatactgcaggtcaacttggaataccttggacgtgttgttttcaactcgaaaggatttctctaccctgatagcgttgttggaaccgactcccacacaaccatgattgatggattaggagtcgctgggtggggtgttggaggaattgaggcagaggcagcaatgcttggtcaggtgagctcatttcgtctgtacaccttcactttttatttgtaagtgtcaaatttgctttgccactcatcttagtcatatggtacttcaaaaacttatcagcccatgagcatggtgttacctggcgtggtcgggtttaagttggatggaaagttgaaggaaggggttactgctactgatttagttctcactgtgacccaaatattgaggaagcatggtgttgtcggcaagtttgttgaattttatggtgagaaccatggctgcgtaactttttatttctgatggactattatttggtcagtatccatgttttaacttatttctttcaatacgaaggtgaggggatgagtgaactttcactggctgatagagccacaattgcaaatatgtctcccgagtatggagcaactatgggtttcttcccagtggatcatgttacactggagtacctgaagttgacaggaagaagcgatgaaactgtgaatcctctctctctctctctctcactttctctacttttttattctttcttttttggtaaagtaaatcatcatgcctaaaatgtgctttaagtttcaagttctggtacttgtggtttacatgtgctgaggctgactattgctgcataatctgtttcaagacattttaaggagctatctgtagacttaggttgttatggtctacagtttgcattatcacgtggcctattttttctgtatcgtatcctgtttcctctggtttctgtgactcacatgatcgccaacttggtttatttaggtgtcaatgatagaatcatatttgcgcgcaaacaatatgtttgttgactacaacgaggtatggacattcttaatcagtttactgtattttatttattttgacaagattctcaactccaaatatctgtacattattgcagcctcagcaagaaagagcatacacatcttatctgcagttagatttgggacatgttgaaccatgtatttctggtcctaaaaggtatattcacttcgttttgatatttagaactttctgatccatcgccgtacctccctaaggtttcactaattactttattttctgttcaacaggcctcatgaccgagtgcctctgaaagatatgaaggctgactggcatgcatgccttgacaatcctgttggattcaaggtgagatgcaagttgtatttacaacaaaaatcattaaacaaccaatgacgttgatttgtttttttttttttggataagttgtaagactttgctttttgtttcaagggttttgcagtgccaaaagaaaaacaagaagaagttgtgaagttctcatacaacggacaacctgctgagatcaagcatggtagtgttgttattgcggcaattactagttgtacaaacacgtcaaaccctagtgtcatgatcggagcagcactcgttgcaaaaaaagcttcagatcttggcctgaaggtgagtttccaccttttctcttttccctgagatcactgggttctgaatcctgtttttactgtaagtgacgtttcaattcaggtaaaaccatgggttaagacaagtcttgctccagggtctagagttgtcgagaaatatttggatcgaaggtctgttggagtcaacgctgtttccatctggatatcttatctgatcacggaacatacatactgaacgtttactttctctgcagtgggctccgagagtccttgaccaagcaaggattcgaaattgtcggctacggctgcacaacatgcattgggaattctggcaaccttgacccagaagttgcatctgctatagaaggaactggtaacaacatcttcatcaatacgaacatactctaaaattgtcagaacatgttttttttttgttctcttagcatctccttctgccattttcattttcttttcatctggaatcctcgtcaattgtgtttctccaccaataaattagtgcccctatatcgtcaaactgaagctcactttttggttggtccattgtgcttcctccgtgtcacagatatcatcccagctgctgtgctgtctggaaaccgaaactttgaaggtcgtgttcatccacaaacaagagcaaactatcttgcgtcaccaccattagttgttgcttatgcccttgctggaacggtttgtactttccaactttggatatccttaattggtgtggcatcatagttcatcaccaacaagattgagtagttattcgctaagtagtctcatcaatcttgaatttgtttctatatattgatctctacgattacaggtggacattgattttgagaaagagcctataggaaccagaagtgatggaaaaagtgtgtacctgagggatgtatggccaagcaatgaggaagttgctcaggtacattggtgacatgcttagaggataagctattcacttttaaatgttccttgctaacattcctgatactcttccataggttgttcaatatagcgtgctaccaagcatgttcaagagctcgtacgaaacaataacagagggaaaccccttgtggaatgaactctctgcaccgagttccacgttatattcttgggatccaaactccacgtacattcatgaacctccgtatttcaagaatatgaccgcaaatccacctggtcctcgtgaagtgaaggatgcttactgcttgttgaactttggggacagtgtaacaacagaccacatctctccagcaggaaacattcaaaaaactagtcctgctgcaaagtttctaatggaccgtggtgtgatttcggaagatttcaactcatatggaagtcgaaggggaaacgacgaggttatggctcgtggtacatttgccaatatccgtattgttaacaagctcttgaaaggagaagttggccccaacactgttcacattccgactggagagaagcttagcgttttcgatgcagcaagtgtaagttgaatcgtcagacagcttcaacacatatatatagatccttctttaagtccctaactcatttcacatatgctttcagaaatacaagaccgctgaacaggatacgatcatcctggctggtgctgagtatggaagtggtagctctcgggattgggctgcaaagggtcccttgcttttggtaagctttacattgtttacaacagttgtcagattgtggctatgtcttgtgatcgtaacagttaagcacaaattagggagtgaaagctgtaattgccaagagctttgagagaatccatcgcagcaacctggctggtatggggatcattcctctgtgtttcaaggctggggaggacgcggaaacccttggactcactggtcatgaacgctacacagtccaccttcctacaaaagttagtgacattagacccggtcaagacgtcactgtaaccactgacagtggcaaatcctttgtctgcaccctgcgttttgatacagaggtaaactggttatatagcaaacaaattcagtaaaatcaaaacttcatttgatctgagacttgtttttgtggggacgtgcacaggtggaattggcatactatgatcacggcggtattctaccatacgtcatccggagtttgagcgccaagtga

SEQ ID NO: 138497 - DNA, 2825 bp, Arabidopsis thaliana landsberg
ggtggatcattgttcggcgtaagcctcactgctgtccgttcttctagcggcagcaaccgaagcaacggagtactataactacggaagtgctcttgataagaccttcttgttctttgaggctcaacgatcagggaagttgccagctgctcaacgtgtcaaatggcgtggcccttctggtctcaaggatggtcttgctcaaggagtaagtccatatacacacaatgcttgcagtatagttggttaatacaatggatctcttaatacattccaaaattgatacttcctgataaataccatcgtatgaattgcaaaactagtatcaaaattaccacttcttcaactagaacatgttggctagtgtggtttgtattggttctgttcttgtatcaccatctataggttcaaacagaaaacttgttgtttggaaaaaataacacttattggcatacaatatttttttaaaaccttaaatctacaaggtattgttgtcacttgtcatcagtacaaagatttaatttgtatgaaaccttgaagtactaattccaataaagaaaatatatgaagtaataaaatgatattgaggtttgtgtatgtatgaatgaataggtgagcctggagggaggatattatgatgctggagaccatgtgaaattcggtttaccaatggctttcgcagtgacgatgctatcgtgggcagcggttgataaccggaaagagctatccagttcgaaccagatgcaacagacattatggtcaatcagatggggtactgattacttcatcaaggctcatcctcaaccaaatgttctatggggtcaagttggagatggagaatcagaccattactgttgggaacgtcccgaggacatgaccacttcaagaacagcttataagcttgacccgtaccaccctggctcggacctagccggtgaaaccgctgctgctttagccgctgcttccttggctttcaagccatttaactcctcttactctgctcttctcttatctcatgccaaagaggttcgtttgttttttgttcaactcctcttactttggtttatgaatccggttcggtttagattctcaacatttttgaaactttgtttttgtatattttagctcttctcatttgctgacaagtacagaggactatacacaaattctatcccaaatgcaaaagctttctacatgtcatctggttactcggtatatatattctctcaacactttcattctctaatccttccattgaatcttgttccactactaaaatgtctctcttgtgtatttctttgaaggatgagcttctttgggctgcagcttggctacaccgcgccaccggggatcagtattacttgaagtatgctatggacaattccggttacatgggaggaactggctggggggtgaaagagttctcttgggataacaaatacgccggtgttcaaatccttctctccaaggtaaactatagttttgttaaagaatgttcttcacggtttcaaaaatactactaatcatggtacttgtttgatttgtgtgtgtatagatcttgttagaagggaaaggcggtatatatacttcgacattgaagcaatatcaaaccaaagctgactacttcgcttgtgcttgcctcaagaagaatggtggctacaacattcaaacaactcctggtggtttaatgtatgttagagagtggaacaatctgcaatatgcatccgcggctgcgtatcttctcgcggtttattcagattatctctctgcagcaaatgctaaactcaactgccctgatggtttggtgcaacctcaggggcttcttgactttgctagatctcaggtaatgatcaaatcctcccaagaaaccgaaaatttttctcgttcttttcaatccggtaaccgaggttttcctttgcaggctgattacattcttggaaagaaccgtcaaggaatgagttatgtagttggatatggaccgaaatatccaatccgtgttcatcataaaggctcttcaatcccttcaatatttgctcaacgttcttctgtgagttgtgtacaaggttttgactcttggtatagaaggtctcagggtgatcctaatgttatttatggagctcttgttggtggacctgacgagaatgataactattccgatgaccgctcaaattacgagcaatcagaaccaacattgtcaggaacagctccacttgttggcctattcgctaaactctatggaggaagtttaggtaactaaacaataaaccttgagctcaaagtctttagctttacccttatggaatcataaagtaatgtaatgaacattttgtaggatcttatggaggaggatcatataaaccttatgaaactacaaaaccagcaggtttgatcttttttacttgcagcttccaatgcaactttttctacagtgtctgattctcatttcctctaaaactgtcacagcttcatcttacaaagcaacaccaacaacatacagtccaaagcaatcaggtgcacaaatcgagtttcttcattccataactagcaactggatagccgggaacacaagatactataggcacaaagtgatcatcaaaaacaattctcaaaaaccaatatcagatctcaagcttaagattgaagatctctcaggacctatctggggtttaaacccaacgggacagaagtatacttaccagcttcctcaatggcaaaagactttgagagcaggacaagcttatgattttgtctatgtacaaggtggccctcaagctaaagtcttagttttgagttacaactagtgagaaaacaacactttcttcaatcttttt

SEQ ID NO: 138498 - DNA, 3518 bp, Arabidopsis thaliana landsberg
atgagtagaggaagatctttcatcttttattttgttttatttctcttctttggatcatcggctctgtattctcaggtcaccggtgatctagccggtgacagacaagcccttctcgatttcctcaacaacatcattcacccacggtctctagcgtggaacacaagcagcccggtatgcaccacgtggccaggggtcacatgcgacatagacggcacacgtgtcactgcccttcacttgcccggagcaagtcttctaggagtgatcccacctggtactatcagccgtctatcggagcttcagatcctcagtcttcgatccaacggcctacgagggccgttcccaattgatttcttgcagcttaagaaactcaaagcaattagtctcgggaacaacagattctctggcccattaccatccgattacgccacgtggacgaatctcactgttcttgatctgtacagtaaccggattaacggtagtattcccgcgggatttgctaatcttaccggactcgtctcgcttaacctagctaaaaactcattctccggtgagattccggatcttaatctccccggtctacgcagacttaacttttccaacaacaatctcaccggatcaatcccaaattctctgaaaagattcgggaactcggctttttccggcaacaacttagtcttcgaaaatgcccctcctccggcggtagtttcattcaaagagcaaaagaaaaacggcatctatatctctgaacccgcgattctcgggatagcgattagcgtttgcttcgtgatattctttgtaatcgcggttgtgataatcgtttgctatgtgaaaaggcagaggaagtcagagacagaaccaaaaccagataagttgaaactagctaagaagatgccaagtgagaaggaagtttctaaattaggaaaagagaagaatattgaagacatggaggataagagcgaaattaacaaagtaatgttctttgaaggaagtaatctggcttttaacttggaagacttgttgatagcttctgcagagtttctagggaagggcgtttttgggatgacgtataaggcggttctagaagattccaaggttatcgctgttaagcggttgaaagacatagtagtgtcccggaaggattttaaacatcaaatggagattgtaggaaacattaagcacgagaacgttgctcccttaagagcttacgtgtgttccaaggaagaaaagcttatggtgtatgattatgactctaacggcagtctctctcttcgtcttcatggtacgttctacatttttcatatttttgcaaaggcaatactttctataacatataaaggcaaacaaacagttgaaaccttatttgataatattggtttcttgcatctgaagaaagttttttttttccctgcaggcaagaacgcagacgagggtcacgtcccgttgaactgggagacgcgattgagattcatgatcggagtagcaaaaggattaggtcacatacatacacaaaacctcgcacatggaaacatcaaatcttctaacgtcttcatgaactcggaaggatatgggtgtatatcggaagccggtttacctctgttaaccaacccggttgtgagggcagattcatcagccagatcggtactacgttaccgtgcgccagaagtaaccgacacgaggagatctacgccagaatcagacatatacagttttggaatattgatgctggagactctaaccggaagatcgattatggatgatagaaaggaagggatagatctagtggtatgggtgaatgacgttatttcaaaacaatggacaggtgaagtgtttgatttggagcttgtgaaaactcctaacgttgaagcaaagttgcttcagatgttgcagttaggaacaagttgtacggctatggttccggcaaagagaccggatatggtgaaagtggttgagactttggaagagattgagagagactgattaataaattgtagaatttttattttacgggttttggcatttatgatttataattatgtcagtggcagatatataaattttagctccatttctttacatttagataatttacaaactaaaacggtgtttagcatttagatgtagcataggaggacttaattactcaaccattaatataattccgtaagttttataatcttgaacatttaaacattgactctattgatagaatttatttgtaggttttgaaatggttttgttgaagtttggattttatcttttataatgttgaaaaatgaaaacaaatgtggtttcgtattattgaaacaaatatattatgaattttaacaacacaaaatctaagattatgaaggtaaaatagtacaaattggtataattacgaatttacatggccgtgataaattctaaaattagtatgcaactaccgaaaacaaaaaggaacaattatgtttttggattaatggcaataatagggagaataatgtgtccaagctggacataagaagctaaaaaacagcctaataacctctcttttcgactacacacaatttgaaacaatagcagttttttcacattcacaagtttcgatttccatttccaaaagcatcaattattgtggggcaaaaatgagttgttccgagatatgcgggtcgaccataaagtagaaaataattgttcaataaaatgccaaaagaatctctcattattctcattacctcatctatcgctctgcctagcttttcttttgatttcttctttttcattttcctctcttctttgttcttccctctctaaaatccttctcccaaaaatcaaggagttgagagagggaagaactttaacaaaagaatttaagaactgaagaaggaggaataaacatcgaaatgtcgggctcgaggcttttcttcggagtttctacaattgtatcgataattttcgccattttgttgccgatggcacatgctcaatccgcagctcctgctccggctccaacaagcgacggtgagttgatataattatcatcaatggttaactacagaggtttcttgaaaattttcagatgtgtgaatatcttaaatgtctctatacatgcatgctcacaaaattatctagttaatctatgccttttgtcataagatataataaaagagtagttaattagttatctcttaaccaatgaatatgtagttctactctctaatgctttagataaaacaatgccatgtccataagattcggatttctctagtaattaactggaaatgttatatcaaataaccataaagctgtaacgtaaaattgctgatttctttattagatattacaattatatctgttcggatggttaattatggaacaacatattgcaggaacaacgatagaccaaggcatagcatatgtccttatgttggtggctttggtcctcacatatctcatccattgatcctcttgttaatttaattttggtctctatttagtttaattatatttttgcatcttgattataactaaatagagac

SEQ ID NO: 138499 - DNA, 1489 bp, Arabidopsis thaliana landsberg
agtttttcccattgaagaagatcgagtgaaattcgaagagcgaatcaaagaggaagaagaagaaggaggaggtatagcaatgggggtcgattattacaaggttcttcaggtggatcggaatgcgaaagacgacgacttgaagaaagcttatcgcaaactcgccatgaagtggcatccagacaagaaccctaacaacaaaaaagacgccgaagccaaattcaagcagatctctgaagcttacgatgtaaattaacgatatgcgttttctctattcagagagattcccatattttgcttgaatttgagcaattgtgtagtttgtcaattcactatggttacttctctggcaattaagtaatcttgatttgcttgtagaattgtgtttgatagattccttatgctgttggattttgtaaggttttgagtgatcctcaaaagagagccatctatgatcaatatggagaagaaggtctaacaagccaggctccgcctcccggagcaggcggcgggttttcggatggaggggcttcgttccggttcaacggtagaagcgcagatgatatcttctcggagttctttggcttcacaagaccatttggtgactcacgtggtgcaggtccctctaatgggttccggttcgcggaagacgttttctcgtcgaatgttgttccaccgaggaaagctgcccctattgagagacaacttccttgtagtttggaagatctctacaaaggagtcagtaagaagatgaagatctctcgggacgtcctcgattcaagcgggtcagttttttttcagctacattgtcatgaattgagtttaagaatcaccttcttatggatttagttccaaaacattgatttgcttaggaatttttaccttaaggagctttggagctggataaatacatgaaagatgtagtgctagaaattagtcattagccattggatagattatgttggactcattagagttgttttttttgtagctatgatgttgttgttatcggtaatgcaagttgaaagtgtattctttgttgcaatgcaggagacccacaacagttgaggagatcttgacgatagaaatcaagccagggtggaagaaagggacgaagattaccttcccggagaaaggaaacgagcagcgaggaatcataccatcagatcttgtattcatagttgatgagaagccgcatgctgtgttcaagcgagacgggaatgaccttgtgatgacacagaagatccctcttgtggaagccctcacgggatacactgctcaggtctcgactctggatggaagatcagtaacggttccaattaacaacgtgatcagcccttcttatgaagaggtggtgaaaggtgaaggcatgccaatccctaaagacccatcaaagaaagggaacttgagaatcaagttcactgttaagttcccatcgaggctaacaacagagcagaaatctggaatcaaacgaatgttttcgtcttcctag

SEQ ID NO: 138500 - DNA, 1750 bp, Arabidopsis thaliana landsberg
ctcagagcaacaaaaccctagctatatttctcgatatcggagaaaagatccggcgaagatgtcaggtggcttagatatgtcacttgatgatatcatcaaatctaatcgaaaacctactggatctcgcggccgaggaggcattggaggtggcaataacaccggtggtcgcggtggttccggttctaattccggtccgtctcgtcggtttgctaaccgcgtaggagccagaacggcgccgtattcaagggtcagcccattgattttatatctctccctttaccttctcttccttcaagaatcagagaattccttttagggtttttgtgaaataaaaaaaagctgagatctgttttcgtttcttctttgacgaataaaacagccgattcaacaacaacaagctcatgatgcgatgtggcaaaacgacgtcttcgcgactgatgcgtctgtggcggcggcttttgggcatcatcagactgctgttgttggtggtggctcgtctatcgagactggaactaagctttacatttcaaacttagactatggtgtctccaacgaagatatcaaggtttgtgctttagaagtttattatagttccagccttacttatgagaaaaattgtggttttgtttctgatcttgagatggttttgcttctaggagcttttctctgaggttggtgatcttaagcgatatgggatccactatgataggagtggaagatcaaaggtacttacttgataagctttattgtgcttcagagatttgtttattgaatcgtcttgtcatgattaaacttaatgatgctttcaggggactgctgaagttgttttctcgaggcgtggggatgcattggcagctgtcaagcgttacaacaatgttcagttggatggaaaactgatgaagatagagattgttgggactaatctttctgctccagctcttcccattcttgctacagctcagattccttttcctactaatgggatacttggcaactttaatgagaactttaatggcaatttcaatggcaacttcaatggaaacttcaggtttgtcttgtttccacactttgttcaatatggaaacttcatagtatcatttgctagggtctatcaatctattgctaagtcagttagtatcttgatgaaatacttatgttttgttcttctgttaagatggcctatgttttgttcttgagttagtatattgacgaaatgcttttttggttaggccaagtatatcctgataggtagattacacgaaccttgtactcctattaaatattttggataacctgttatgcaacagaggcagaggaagaggcggttttatggggcgtcctcgtggtggtggttttggcggtggtaatttcagaggtggcaggggagctagaggacgtggtggtcgtggcagtggtggaagaggacgtgatgaaaacgtatctgcagaggatcttgatgctgaattggacaagtaccacaaagaggcaatggaaacaaattagaaaggggagattaaacctattgcatgtctacatgtattccttcctttagtgccgatatgcttttgtattagtatgatctttagattgaatgtcaatgggtctgacattttcgagctttagcttttgttttttcttctcttggtgagcttcttagctttttgcagttgagttcagagaaacaagcattgtgtgtaccgtggaactcaaaactcttctaaaatatcaattcaaaacacaattctatcta

SEQ ID NO: 138501 - DNA, 1799 bp, Arabidopsis thaliana landsberg
tttcagctcgcactctgatggtacgggaagcacagcagagaatttcaacgagaacgatgaggattatgtcaagtctagtgtattggaagctggtaatcctggttaaatctgtatttataccattagttctctctattcttcttgtgttttgattctaatcatcgatgttctcttgttggttttgtatataagttgaggtaaaaagtggaccagatggtttcatggtgaagatgaaggatgggaggcaacttcgatgtgtccacaataatcctcaaggagggaatcttccaaattatgctccacattctgcaattgtgctgaaaatggaagatggaactggtcttcttctccccattatcgtctgtatgtgatatcaaaactcattcttttgtttatgtgtgttgagatttccaatttgccttgtgttttgaatctcctttctttgttttttgtttaaagcagtgcaaatgcctagtgtgttacttatggcagcagagtcaaatgttcaaatagtagggcttctgttattctttgcgttatgcttctgtttgaatcagtcaagagttgtgaagagagggtttatggattttttttggttactgcttgtaggcaaggcccactatgtatcaagtggtgaaggacatggtagacaaaatgggttatgaggtacgcctttcggtttttctgttttctctatcctgttattttccctttagcaatacaaattcttatgtgagtaacgttaccaaacaccaactttttctgcaggttaggcttgttagagttaccacaagagttcacgaggcatatttcgcagagttatacctttcaaaggtttgtaacttctggcatagaaatgcatcttccattcattttttcaaaaagttgtcccgaaactcgttatccattactagtatctcacttccatctgttttaaacttttactaaatctgctatgaatggaattgcaggtgggggataagtcggattgtgtcagcttcgatcttcgtccttctgatgcaattaatatagctgttagatgcaaggtatagttatattaccatatgctcaattctttcttttgtaggggcacagtcacacagaggcctctccatgagatcatcttaaccggatacaaactacgtgatcactatgaaaaatggttttaatcctcactctttaggtacctattcaagtcaacaagtatctagcttatagtgatggaatgagagtcatcgattccggaaagctatcaaagcaaacacctgcttctgatggtttattgtttactgaactagaccggtaacgcttgtgaatttagtcatctgaaaccctttgctggcgaatttgaaaattacaaaacttaaaaacattatgttttccttgtgtaggccaaatggtcagccttgttttgatacaaaagagttcgatctagtaaggaacatgatgcaagctgttgatgaagaacggtatgatgaagccggtaagcttagtctctctcaccctccctatttggtagtgatcttggtcctgatcaactactagaattttcttaggttcttgtgtcaagaagaaccaatgttgaatatcttgtttggttttgcttttgtagctgagtggagagacaagcttggcaagtttcaggcaaaacgcaaattaaggaaatacacatgacaggtataatttcttttaacggctcatccaatccaatggactatacacaaaaacaaaatgagtaagttttgctctgttttttcttaatgcagctcgcagacgggagtgtttttaatacataattt

SEQ ID NO: 138502 - DNA, 525 bp, Arabidopsis thaliana landsberg
gaactttgtaaaacacttggtggaattgcaagctctggtacgtaggaaaaagcttttcgctgaagcacatggtgattccggagcagccaagtgtgatttaagtttccatggaacaaagattgaggacctttgtcttgaatttgcattgcctggctacacggattatgatctcgctccctattctgcaaatgatatggtacttattgttttagttttgtgaataaatctatttctcaagatacttgaacatgtagatttatacctgctttactcctctttctaggtaaatttggataacctcgaggaatatatcaagggtattgtcaatgccacagtatgtaatgggatccaaaaacaagtggaagcatttcggtctggatttaatcaggtaaattctttagctttactcttaccaatagatttaactatagattaaatcactccttcttttatgcatccttaaacaggttttctctattgaacatcttcggatattcaacgaagaggagctggaaactatgctgt

SEQ ID NO: 138503 - DNA, 3635 bp, Arabidopsis thaliana landsberg
acacccaaagaaggttggcatcaagcatgttaaggtgactagaatacatttttttcttagtgtttgtatcgtctgcaccagtgttagccgagtgctttatcctctttttcctgtttgtagattgcatgcaggggtcgtgatgctgtgcctgataatgtctctgtaaacacctttgtcaacgaggtacttgtttcataagttcagttctcttcttgactgacgaataagttcaattcacgtgaagtttatttcctcctcttgcgttttaattgaagctcataattatagctcatttgaggacactgtcttcaggttctgcagttcgtccttaatcaaaaacacgcaaagaagtatgtcctcgtccactgtacacatgggcataatcggacagggttcatgatagttcattatctcatgcgctctatgccaacgatgaacgttacacaggttcaattctttctttcacatttgtacttgttcactcgttttattaatcctctttagaatggagattcttacctctgtgtggcctttggcaggcattgaagttgttttctgatgcccgcccacctgggatttataaaccggattatattgatgctttatacactttttatcacgaaataaagcctgaaagtgttacttgcccaccaactcctgaatggaagaggtctgccgagcttgatcttaatggtgaagctgttcaagatgatgatgatgatgattctccgcctgaccctgttcaagtaagcgtggtgcaagcaagtgcttattctttaataagctcttatgtttaaccctcatattacagaattatccgttccaatgaatatcatgcatgcattgttaagctcttacccttgtgaatacagagctcataattttacgaacggctactttttatttttttttagcttcatagctatggtttctaggtcatttatttactacataatgatcttggaaaacaacagtatcatctaaacaaagataaactgttctaaagattatctatttgtgcatgttgatgggtgcagttgagtctttcaaagctgacaaatttcattaagtgtcaatctcactttgcttgagttttctaatgagtctcttgctgatactgcctttctttactgttttgttgtttcaggaaatcaatcaggagaatgtgaagatgtcaaatgatgacattttgggtgatgaaataccccattatcaggaggaagcttaccggcaattctgttataaaatgcttatgatgaatgttggggtatgatatcaacactgcttatatgttttcctagttttgttcttctctatctatgttctcctatggaatattatgttgagcccaaatgttgtttccagcatgtatgtttcattaaaagcatgctaaatgtttttttagactaatgcaataatactaatcttcattgattggaaataatgtgagatattagtcatttgatggattaaaatttctctgatccagggaagaggatttatgcaattcccaggttcgcaccctgtatcattagacaggtcagaatctctgctttacttttggtattgcgtacaaagaggatttagcaagtgtatgttctgaattccagaggttcattagtcctagtttctcaatgtagttaaatctttacgatttttgcatacacagggagagtttgcaacttttgaggcagcgatactattatgcgacatggaaggcagatggaacacgttatatgatgctcttaactatagatgggtgctatttgatagataggagctttaagtttcggagggtacagatgcgttttccctgtaagcactcacgtgaggtcagtaattttctgtcattgcttttgtgttgatatctaaaacttgtgaattccctgacttatttggttttgggtggtagggaatttctgataaagtgcatcactacactttgcttgatggagagatggtcatagataccccgacaggtgagcaaggggaggcaaggaggaggtatctcgtatatgatatggtagcaatcaatggtgaatcagttgtagaggttggaactgtcgatccattatattatcaatttctttggaatgagttcagtagcacgagatcttagcattcattgttttccatcatgtcactgtcatttctactcggtatcaaccagtattatagatgctaaagacaacttacagttgatttaaatatctaccagcggactttttgtgaaagatggaacatgttcgtgcgtgaggtgatcggacctcgagcagctgagaagctcagaagtcattgctacagatatgaccttgagccttttgcggtgagtttgcattttctgttccatgccatattttccttctcctttatataaatttgttggtaaaatttcattgttgcccaggtacggatgaagggtttctggttactttctactgttgagaagctgttgaagaataccattccatcgctttcgcatgaagcagatggcttaatatttcaggtaaccaagagatgtttatatttcaggtcttagtcaatattttttcctgaacgcagacagacacaaatttaagagattagtataatttgtttccctggataaagtaggaagattgcattacttgagcatgacttacatttggtttattagggttgggatgatccgtatgttccacgaacccataaaggtctactgaagtggaagtatgcagaaatgaactcagtagactttctgtatgagatgggtgaggaagaggggcgtggtttcctcttcttgcatgaaagagggaagaaaaagcttatggaaggatattcagttgagtttagagatgattcggacccgtcaagttacaatgggaagattgtagaatgtgcttgggataaggataagaaagtttggtttagcatgaggatcagagttgacaaaactacaccaaatgatatcaacactgctcgtaaggtcagttgaaggattttctatatatttaggtattgcttttgtcaaatggttatattctctacatgatttctaatgtgatgttgtaacacaataggtgataaagagcataaatgataacatcactgaggaggttttgcttcaggaaataagagagatcattcgtctcccaatgtacgctgaccgcattcgaaatgatagtcaagctgcccgccgccggtagagattacatttttcaattttgtttagtagtaatacactagaaccaactaataattgttttgggcggtttctcttctctcacacttgtacagctaaataatctacatggttatacacattacatctagtttgtttcccaacggaatttgaaactagaattatttcattgataatcctcaatacgtgatatggaattattaactatgatacatatccaacggtgttatgactataacgacgacatattttaggccaaacacgtcaagatggcttctcctagcacgtgcccttcaattgcgatcagcaatctctctttcgtcacctagctcatattcagaacaactatttataaaaaaaaagtactacatatcattcaaatcagataggaaaataataaaacgatgtagtaccgtgtgaccaatcttgggtttatcatcgagagcaaaaagct

SEQ ID NO: 138504 - DNA, 1802 bp, Arabidopsis thaliana landsberg
gtgggtttgcttcatatcttctggggttaaaccataagacatatgtgttgtctggtgtgaacttggaaggtaactctccaaagagtgtgaaagaacctggccttggttggatgactgcttatctctttgttgtctgtttcatcggtctttttgtcctaatccctctccgaaaggttatgattgttgaccttaaattaacatatccgagtggtttagctactgcggttctcatcaatggcttccacacacaaggagatgcacaggccaagtaagttcattaacctattttacaaaaagtgatattgttacataagtttcctaatctttaattggaatcgatttgcaggaaacaagtgcgtggtttcatgaaatacttctcatttagtttcttgtggggtttcttccagtggtttttctctggtattgaagattgtggctttgctcaattcccaacctttggtttgaaagcttggaaacaaacgtaagcattaattatacaaaaacaaaacaaaaatatttcagtgaaacgagttcttgaatcatataataactaaaaacttttttttggtaggttcttctttgatttcagcatgacatttgtgggagcaggaatgatttgttcacatttggttaacctttctttgcttttaggagctatcctctcttatggcttaatgtggcctcttcttgataaacttaagggctcttggttccctgataatctcgacgaacacaacatgaagagcatttacggctacaaagtcttcttatccgtagctctaatcctcggcgacggtctttacactttcgttaagatcctctttgtgaccattgccaatgtcaacgcaagattgaagaacaaacctaatgatctagatgacgtaggtcacaagaaacaacggaaagatctcaaggaagatgagaatttcctcagagataaaatcccaatgtggttcgcagtttccggatatcttacattcgctgcggtctcaaccgtcgtggttcctctgatatttcctcagctcaaatggtattacgttattgtagcttacattttcgcgccttctctggccttctgtaacgcttatggagctggacttacagacattaacatggcttataactacggcaaaattggtctttttgtcatcgcggctgtgacgggaagagagaacggagttgtagccggactcgccggttgtggactgatcaaatccgttgtttcggtttcttgtattttgatgcaagatttcaagacggctcattacacgatgacgtcacctaaggctatgtttgctagccaaatgattggaacggtcgttggatgcatcgtgacgccgttaagtttctttttgttctacaaagcgttcgacattggaaaccctaacggagaattcaaggctccttacgctttgatttacagaaatatggcgattcttggggtgcaaggcttctctgctctgcctcttcactgtctccaaatgtgttacgggtttttcgggtttgctgttttagtcaacgtcgtcagagatcttactccggcgaaaattggaagattcatgccacttccgacggcgatggctgttccgtttcttgtcggagcttatttcgcaatcgacatgtgtgttgggactttgattgtgtttgtttgggagaagatgaatcggaagaaagcagagtttatggttccggcggtggcttcagggctaatctgtggcgaagggctttggactttacctgcggcggtgcttgccctcgccggagtaaaacctccgatatgtatgaagttcttagcttcatag

SEQ ID NO: 138505 - DNA, 1938 bp, Arabidopsis thaliana landsberg
atgtatccgatggattctgattaccatcgccgtggtctggtggtaagaagaattagaagatctcctcaaagctttggttttttttcgaatctatctctaattttccaaattgggtttgtgtaaaggtcttaactttagggtgaatctcgaatcattgcttagcttaatgagctccagattgttatgtcattttgggaatcttaatgtgattaggattcgttagattgtttctgttgatttgaggacccttactttggctctgtgttaataatatatttgaccctgttattgatggatgacatgaataaagaggtttctgctcaaatctttgtgagagtaattagtttgataatgacgctgatgatgatgacattgcaggcaaacgatcgttcaccagctcagtttgttaggctggataaaccgagagccgtagacgatctctatataggcaagagagaaaagatgcgtaggtggttgtgctgtgcttgccacgttgaagaaccttaccattcttctgaaaatgaacacctcagaagccctaagcaccacaatgattttggtactcctctttgtgatttcctgcccttgagctgatcatttcttgcgctagtaacagatcttgttgtatgcaaattcattttgtttcggcttttgttttgttgtattgaagggcatcacactagataaccacaggcggctgtgaagcctgatgctttaaggagcctccatctattgatgtgcctgcattgtcattggatgagttgaaagaaaagaccgataactttggatcaaagtcattgattggtgaaggatcttacggcagagcctattatgcaaccttgaaagatggaaaggctgtcgcggtgaagaagcttgacaatgcagcggaacctgaatcaaatgttgagttcttgactcaggtctcgagggtttccaagctgaagcacgataattttgttgagctcttcggttattgcgttgaagggaatttccgcattcttgcgtatgagtttgctactatgggatctttacatgacatcttacacgggaggaaaggagtccaaggagcacaaccaggtcctacgcttgactggatccaacgggtcagaatagcagttgatgcagctagaggacttgagtatttgcatgagaaagttcaacctgcagtaatacacagagatattcgatctagcaatgtgcttctctttgaagattttaaagccaagatcgctgattttaatctatcgaaccaatctcctgatatggctgctcgtcttcattctaccagagttttgggaaccttcggttaccacgcaccagagtaatgaatgcttctgaaataatagttgatcacacagtattcttgaggaaggaaagattgtaactgtacattttcgctgttgcaggtatgcgatgactggtcaactgacacagaagagtgatgtttatagttttggtgtggtgcttttggagctcttgactggtaggaaacccgtcgatcatacgatgcctcgtggtcaacaaagtcttgttacttgggtaagtactaaaaccatgttgctttaattttctgaggataatcttactttcgaatttactgattgttcttggcatttgccgtcttaacttcaggctactccaaggctaagtgaagacaaagtgaagcaatgtgttgatccaaaactcaaaggagagtatcctcctaaagcagtggcaaaggtaatgaacagaaacttcctagtcatttaaataactctagtggaccctacttacaagctaaaatgtgtgttttgatggtaaatacagcttgcagcggttgcagcgttgtgtgtgcaatacgaagcagagtttaggccaaacatgagcattgtagtaaaagctcttcaaccgctcttgaggtcagcaacagctgctgctcctccaacacctcaaccttga

SEQ ID NO: 138506 - DNA, 1801 bp, Arabidopsis thaliana landsberg
gccgagaaaatcagagacagaagaagaagaaaagcgaaaaaaagcaaaacatgaaggcgacgacgaagactccgatccacgtggtgtggtcatgggttaggagacaacctccgaaggtgaaggcttttctcgccgtggtcactggcatggcggctttggttcttctcagattcattgttcacgatcacgacaatctcttcgttgccgctgaggctgttcattccatcgggatctgtgtgctcatctacaaactcatgaaggagaagacctgtgccggtactattctatgtgtcttgtctttatcacatccatttttagggtttttcaactcagtcctgccttatcagcttctgatcgtatgtattcctctgttcttagcaaaattacttttcaacgtcacaacttttttgtttttcctcataatcgcgtccaaattttcgagctttgatcaggatttcattggtttaccactattatctgctcccggaagcagcctttagccgtaattcgtagaatcatcatctttataatcaaggattcaattggcaatttagggtttaagatgcattctatggttctttttttaaatcgaaagtgtttatcttcgatgtgtttatataactttgtgaatgattttgcaggattgtcactgaaatctcaggagcttacggcgatatttttagctgttaggctgtattgtagcattgtaatggaatatgatatacataccattcttgacttggctactttgggaacaactctctgggttatatttatgattcgtttcaagttaagagctagttacatggaggacaaagacaactttcctctctattatgtggtaagtcaatctggttttgatcctcgagttgtttgttatcatttacagtgacaatgatctgatttcaatttttgcagcttgcgccctgtgttgcattagctgtattcatccatccatcgacctctcataacataataaacagaatttcatgggctttatgtgtataccttgaagctgtttcagtactacctcagctacgagtgatgcagaacacaaaggtcactactttatttcacaatgtcaagtagagaactacatttgttttactctctaatccgcgtctatttggttttcagattgttgaaccgttcacggctcattatgtttttgcacttggagtagcaaggttcctcagctgtgcccactgggttttacaggttagttttgatcttcaagagtggatagaggttataccaatagtggtgattcctatactcgattggattagtaccttaaaagtcgattttgaatagctgaatacattgtctaatgtgctgaaaataggttgtggacacgcggggacggttgcttgtagcattgggttatggattgtggccatcaatggttctgatctcagaaattgttcaaactttcatcttggcagatttctgttactactacgtcaaaaggtatgcattagtccttcacttcaacagtttagctatttagctctttgtatatatctcaaaagtttcaacatttttctttacagcgttttcggaggccagcttgttctccggctaccgtctggagtagtataagttcaaaagatagaaatactccaacgatgtcctgcgatgagcttgacggaaattctaattgggaaagatagctcaatttttctttacctctgatttcatcgtttatgtgtcttgaggtttcaccaagtgtctcggttacgaattaattttacagtgttgtatattttgcctatcaagggatttaacgtctttcaggtcg

SEQ ID NO: 138507 - DNA, 726 bp, Arabidopsis thaliana landsberg
aagtaacaatctaattgtagtacggatgtctcttgagatgttcaagaattaagaaataaagaaagagggatcggagaatgaattttgaggatcaagaagaagatatggagatgtcaggtgttaatcccccctgcggttacgactctctaagcggtgagggagccacatctagtggtggtggaggagtaggaaggagtaaaggagttggagcgaagataaggtatagagagtgcttgaagaaccatgctgttaacataggtggccacgccgtggacggttgttgcgagtttatgccttccggtgaagatggaacgctcgacgctcttaagtgtgcagcttgcggctgccaccgcaacttccaccgcaaggaaaccgaaagcatcggcggtagagcccacagagttcccacgtactacaaccgcccgccgcagccgcatcagccgcctggatatcttcatctaacatctcccgcggcgccttacaggccacccgcggcatcgggggacgaggaggatacatcaaatcctagcagcagcggcgggaccacgaagaggtttagaacgaagttcacggcggaacagaaagagaagatgttagcctttgcggagaggttggggtggagaattcagaagcatgatgacgtggcggttgagcagttctgtgcggagactggtgttaggagacaagtgcttaaaatctggatgcataacaacaagaactctcttg

SEQ ID NO: 138508 - DNA, 3130 bp, Arabidopsis thaliana landsberg
gatttaccaactttatatttacaagggggatccatcatatcattggctcctccacatctgcatgttggggagtttagtctgtcagatgacttgaccctacttgtgtcattagatgaaaatggtaagcttagctttggatccagacagaggcgatcagtgatctgaaatttttatttcgttctactctgcttctgttcgtttattttgcaacttgtctatcagataacaaggtatttatatagttagataggtcacaggtattatgttactgaaacttgtggaaagagaataaatcataatgcaacagaaatttggcattccttctgacatttcgagaaagtgaataaatcataatgtaacaattaatttttggaatttatgttgtagtgttcacgcgcatgattgtgtattaagctctataactcttttggtgattactgattgcattgtcagattttatgttcatattctaaatctcgtagtaatcaggataatacttccgtttgtctctgtcagggaaagctaaaggactcttgttcgaagatgatggagatggatatggctacactaaaggaagatttctagttacacactacattgctgagcgggattcttccactgtcaccgtcaaggtttcaaaaactgaaggagactggcagaggccaaaccgccgtgttcatgtccaattattactaggaggcggtgcaatggtactgctctttctcttgttaaagtaacatagtggaactataagttcaaaaaatttgattctagatagtgttgaacagcttgatgcttggggaatggatggagagtttatccacattaaggtgccttcagaaagtggaatttcagagttaatatccacaagcaatgagcgctttaaacttcatatgggtatatatctcatcttctatatatgtatttagctacttgtataatcaggtttgtagttattgagatgtattgcttctgttcattcactgcattcgtcaagtcctctgtaatatctagttacattcaactttaatttgcataaattaattactgtgttaaccaagtcgcagctcctgcctgtggataagatctttagttccatgaacctgtgcatactgcagaacactaatgcagagtatcttctttctgagtatgtgtattattgaaatgtagaaaatacaaaactgatacctgagaaggaagtggtacctggacaaaagggaatggaactttcaaaggagccagttgagttaagcagtggtgattgaaagcttaatatagttccctgggttggtggaaggatattgtctatgacacatgttccctcaggtaatataccgaaaaactgtttttccgtgtactattaagcttgaaaagttgaaaatctcttatgaatgagataatttcaacatttttgtggaggatgctcagagacatacacatgttctgtttctttgaagtaaacaatctcagcctctatactgagagagacgacatctctatgttatttatattgtgtgttgccaagaatccgctcatgcttgattgttgacggtgttatgtccatattggatttagaatgtgcagagactacagttttggttgattacaatttgcaggaattcaatggcttcatagcaggatagatatcaatggttatgaggagtatagtggtactgagtaccggtcagctggatgtactgaggaatacaatgtcattgagtgagtttactttaacaatctctctcgtacaagcacatttcatgcatgcaatgaatgttgacatgaacacacagctttctgcattgtctttatttctgttactgaattgattgttctatctcttgtaggagggatttggagcatgcaggagaagaagaatctctgatcctagaaggtgatgtaggtggtggactggttcttcggcgtaaaataagtatagctaaagccaatcaacgagttttccggattgcctctagcattgaagcccgtagtgttggtgctggttctggtggattttcaaggtttgtctacttgcttcaagctttcctttttcttccactatgtctatgcttttgcaagagtttaaggaacagagagaatttacgcattgaagtacccaagacaatttgcaattttacatcactgtagtagaacatcgggaaaccaatctatagcaatcttgttgtgtaatttaagtagatttttgcataaaattgttaggaggttgggagcttgcaagttgcatgttggtttattcctcgtacttgatatatggatgcatatatcctcttctgttgttggaaatcccgtcctttttttatcttttgtctgcaaaatgatgttttttttggtgctggttatttaatgttgcaggctggtatgcttaagagtccatccaactttcactcttttgcatccgagtgaatcgtttgtctctttcacgtcgattgatggttcaaagcatgaagtttggccagattctggagaccaaatatatgaagggaccaaccttccacatggtaagtacctttaggctttttcacatttccctcaatgttttaatcaatagcccaaataggtagaaggttgtgatactcaagcctaacagtagagaagaactaaaaaaaaaaccagcagaggaggcttagcatctttaaacctgcggataacctttccatgctgataaactttaatcatgatactaaacatatggatcatgtagcatttgggcaacaatatttttttttttttttttttttttcagggaaatggatgttggtggacaagagcctcaatcttcggatggtaaacaggttcgatgttagtcaggtcttcaaatgtattatccactgggactgtggaactgttaacttagagctatggtctaaagagcggcctgtttccaaggaatctcctctgaaaatagagcatgaatatgaagtcacaagtttcccataaatgtgttcaaacatttctatttaactacttgggttgtccattacaaatgcataaataagtgaatgaatagttgtggttaataattaaactatatatctatgtatgcgagattgtgttatattgacattctctgctacttggaatccttccttatgaagggtataatatactt

SEQ ID NO: 138509 - DNA, 391 bp, Arabidopsis thaliana landsberg
atgcatgttcaattgacccaacaaacctctgaaaaagttgatgagcaaccagagcataatgcttttggagctaagaaagatactggaaacgtgttgatgcctgatgctcaagtgaggcaccttaaagatcagcttattagggcaaaggtttatctttcccttccatctgcaaaggccaatgctcattttgtgagagagcttcgactccgtattaaagaagttcaacgggcacttgcagatgcctccaaggattcggatctgccaaagacgtaagtgtttctcacctcttgaaatatatgtttcttcctctttaactgatatttctctgccatttttttgaaccccagtgctatagaaaagctaaaagcaatggagcaaacactggccaaag

SEQ ID NO: 138510 - DNA, 2496 bp, Arabidopsis thaliana landsberg
aatgtcagtgggcgtatactggttggtctcaggtggtggaacgagatcaatgacttgggagaaagtgtctggaaattcgagtctcttgatcaggaggttagcttttcttcacttattcacaaggatatgggttcagcctgtcgagaaatgtggggttgtgtttccctttccgttttttttttgtatactcatgtgttttcatcatttttctatacagtctttggctcggatgaacaagaaagactcatggcttttctggtggacactttaccttgcagtaagtatttcatatctaacacttcagttgcagcataagctaattacttaaaacccattcacaatcattgtggaactttagtggatgactaggaataagaataggcaaggataaacatgtcccttatagtggaataagaataggcaagaataaacatgtcccttatattgaagcatattgtgcaaaggtggtagataagaattgagagcagtcttttagaatcccatgtagacccatatatagatcgctagacacctgaatatcttcccccaagaagctaccagttaaagaagtttgcgacaaatggtttttccctctgcatgagtgggatatagcatttgacattggagtcaaatcacatgcgaagtcacattacaatatatgttgagtagggaaagattatctgctggaaccaagtcggccatttggagtatatcctatgatcttacactgactaagtataatattagttaaaacttggtagcttacaaacttatatgctcagttaccttacaagcgactataaagagtgagatgtagccatgagatggtagctatggatttgatgtctatggtactggagcgtagtaaacattaaaaacatgtggatttgtttgctgtctttttctgttgtcttcacagctaaatcttctccttttttcactcttcaggcagctgcatggtttatccttggggtattttctctgattagatttcaagctgactatctgcttgttgttggcgtttgcttgtccctcaatgtggctaatatcatcggcttcacaaagtgcaagaaagataagatcctcattagtctttcacaactgacctgattttgtgtaaaatcaaaccagctgtagatcaataggttgttagctttttgtacaaagaacatacgcatgtacatatatagaggtgactctaatcggcattcgccaattcttgttggcagatgcaaagaaacaatttcagcagtttgcttcgcagacaatcgcatcacggttccaatcaacagtacaatctgccttcacccttgtctgaagagaagaaagacgctttttttaagggctgtgagagcaaagacggtgtacaaagaagattgccaaaacgacatggttggttttttgactgattggtttcaaatgttttgtaagatttaagaggtcctatattcgtctttctatgtattttacattttcgacttacctattaacattttgcatctcgtatggtcttattatacgtatattagccctaaagaaaaatcagaaattttaaagtctctgatcctttccaattctgcatatgcatcttctgttcatgttgcaggcgatgcatctttttgttttggtgagctacttattaacactaagcttcgtggtgatttactaatgcagagcagagatcatgtagatgatgttggtttatgagacatgagaagagagaaatgatttgaaattactactgagtcaaggacattattatgaaaataatttacgttcttttaagcccaaataaatttggtggcccaagttaaaaaaaggtgaacttgggctacaacctctttttagcccatgatcactttttcaccaatctcagtatcttaccacaaatctattgagaatattttgggtttctgtttctgacgttaaaagctaaaaatctagagacttttgatatcccaaaagcaaagctttttgaaattgagaaatcaaaccccaaaaccctaaaaagctgattcctttctttgattctcactaccaattcttcccgccagtttcctttccccgattcatccttgacacttgcaacgccatgttgcggcctcgccgatctcttggggtttcatctccggcgaagcagaggaagaaagctgctcctaagaattccatggctacgagagcgaatcgaaagcgtctcccttcttacctcaaacctggctccgccgtagaaatcagctccgacgagattggattccgcggctcgtggtacatgggaaaagtaatcaccatcccatcttcctcagataaggattccgttaaatgccaagtcgagtatacgacgctcttcttcgataagaggggacgaagccactgaggaagttgtcgacatgagtcagcttcgtcctgcggcccgtgcaatgtctgagatagagaagaagaagaagatcgtggttggggaagaggtctacgcgttttacaattactggtgttgtgaag

SEQ ID NO: 138511 - DNA, 2359 bp, Arabidopsis thaliana landsberg
aaacaatttacaaaaggccttaaaaaagcaaagattcttcgctgacttcgttctctctttcgctggcgaagaagattttctagggttttttgtttgattttcgtgaagtcggaaaaattattattattaatcgtgttgagctgtttgatcggtgaagactatggcgtcgtcttcagcttcggcgacggtggctgttgataaagctaccagcgatcttttgttaggtcctgattggactacgaatatggaaatctgcgattctgttaattctcttcactggtaagtttttgctcgatttggtgttgggaattgttgattgttcgctgcaattggatttatcttggattggttgatgttcttatgattgcgtgataattttgataaaaaggttacaattacatgcataatttgggatttggtgttggtagtattgattggagtatgaacatcttacatatttgcatctgtgttaatggttttgtggctattgattttgctcaggcaggcgaaagatgtagttaaagctgtgaaaaagaggctgcaacataagagttcgagagttcaactacttgctcttacggtatgatgtttctagtgaatatttgggaccttgttccttggctaattattctgcgtgtagtttcggctcttctgaactctctatgtgttcttctgtgctagcttttggagacgttggtaaagaactgtggagattatttgcaccatcaagttgcagagaaaaacattttaggggaaatggtcaaaattgtgaaaaagaaggtagctcttgttcacggttctatgtgtatatttccgtactggtgattgttcgtattgctgatgatatggaggtttataggcagatatgcaagtaagagataagatattggtcatggtggactcttggcagcaagcttttgggggtccagagggaaaatatccacaatattattgggcatacgatgagttaagggtgagtaattttcttgaaatgtaaagtattttacttgaatacattttctgtcacctttagtggacttgtttgttgcttgtgatattttacttttcggtcattgtttattttaaatttgaagtactgtgtattggtagcaagtctggcatttgttgccactacttttttttccgcctggtgctaaatgtaaaagttcagtgtttatagttgtggagtcgtgttgctccgtgcatttatcttcttcagatctcgatatacatggaatttgctttgcattttactgaggggctcatgtgcatgatattcttattctcaaggttgctgttacatgttgcagcgttctggagttgaattcccccggcgttcacctgatgcgtcccctattataacaccaccagtgagtcatccaccgttaagacagcctcaggggggctatggagtacctccagctggctatggagtacatcaagctggttatggagtacctcaagcgggttatggaatacctcaagctggctatggagtacctcaagcggggtatggaatacctcaagtgggctatggaatgcccagtggttcttcgagaaggcttgatgaagcaatggcaactgaggttgagggcttaaggtaagtggatttgttagttcaatatgttgttaatgtgctgccagttttagatttcgtaccaaattttccactgtttcaatattcttttcttggttaaattgtagcttgtcaagtattgaatccatgagggatgtgatggatctcttgggcgacatgctacaagctgtggatcccagtgaccgtgaggtattgaagtctattatacagctatactgcgggtttgggaatgaaatctattgctttacccatgatttttctgttatgtaggctgtgaaagatgaagtcattgttgacttggttgagcgttgtcgttccaatcagaaaaagctgatgcagatgctaacctccactgggttagtcctttatttttaggatctttgtacttaaatttgttagatgtgtaatgatattgttgatctgacaggttccattgttgtgctaaaaagtcttttgtttatgtggcagggatgatgaacttttaggccgggggctcgatctaaatgacagtcttcaaattctgctagctaagcatgatgcaatagcttctggttctcctctgcctgttcaggcttctggttctcctctgtcagttcaggcttcgaaacctgctgactcgagccccaaatcttctgaagctaaagattctagttccatagctggttccagttccccaataccagccactgtttcaacaggaaaaagcccaattgatgaggagtacgaagaggaggaagatgagtttgcacaattagctcgaag

SEQ ID NO: 138512 - DNA, 4414 bp, Arabidopsis thaliana landsberg
gtaccttatacttcagagaacgttgtagaaggcaaaagagcagccaaggaagaattgcaaaacaggcttggactaaagagtgccgattttccagtagtaggaattattacgcgcttaacacaccagaagggaatacatttgatcaagcacgctatttggcgtaccttggaacggaatggacaggtcctttcgagccttatcgacctttgaaaagtcctgtcatgaacttttcacaatccttaccggttttcttgaaagcaggttgtcttattaggttcagctccagatcctcggatccaaaatgattttgtaaacttggcaaaccaattacattcttctcatggtgaccgggctcggcttgttctaacctacgatgaacctctttcccatttggtagaaagacaataacaaacctttagttgtagttcgttcctttatttgctgtcggtattactcttttaagtctttttgtgttttactctccagatttatgctggggctgactttattcttgtaccgtcgatatttgagccatgtggactgacacagctcatagccatgagatacggcgctgttcctgttgttagaaaaactggaggtaactgtttttggctatggttagaatcttaagctttacccatttcactcaagaccaagctgactttacggtaatggtttatctttgtccaacaggactctttgatacggtttttgatgttgaccacgataaagaaagggcacaagctcaagttctagaacctaatggtttcagcttcgacggagctgatgctcctggtgttgattatgctctcaataggtaaaccaaccaaaatctaaactaagactctcttttgattcgagcattatgaaccgatgtttcttgtttccttttgttcccagggcgatatcggcgtggtacgatggtagagagtggtttaactcgctgtgcaagacggtgatggagcaagactggtcatggaaccgtcctgcacttgagtatcttgagctctatcactctgcacgcaagtaagaccaaataaaatggaagctctaagatgaattctctttgtatgtacagaaattagcttatgagacaacttagagagtttgatcctttcttcttcttttacattcccaaagcaatataaaaaacgtgataggtctatggattctgcttttgtaattctgaataaatcaaaagttaagcaaagtttatacacacactgttagtacttttctcacattgttccagtttctaactaaattagtactttttcacaattccaaatctgacccggaaacagaacagtacgtaactcttttctccggtactagatctgcagctgcagttatcattacattagtagcaaaaatcatcagtttaaaatattttagtaacttcaaaatctataatctgaaacgtcattattgtatatgccaaaacgttaccaaacttgtaagttatataaaaagtgattcaattagtgggtttgttctctcttcatgcggagagagagtgggagaaagagagtgtgcagaaaagtactgtaaatagacccacaaaaaaagcttgaatcttttgacttccaaattaacaaatctttgattttgcattgaccattctctgctttttttggatttgagtcctgaaaccaaatccaaatgtcattcaagaacagaggagattacaattttactccaagaaatgtagtttctagaaactctgtatttttcatgtgcctcgcaagtttctgccttggaatgttcttcactaacaggtaaatctattacatgagccccatttttattatgttcgacgatttcttattaaagtttggatatctcactgttcgtgtttgattctagcttctttttctttctggatttttaagtattttgttgtttctaatttcatcttcttgggactgaatctatcttgtgtttctcaaaatttaagtagatttcttaagctttgagttttgtcggcgaaggcatgtttttgttttttatcaagactactggtctatttgtgtccttgtagctttagtgaggaggaatcaagagacacacacaaaaaaaactatatcttatactgcttatcagatagatttgatcaaatagtggaacattgtaacttttgtagtatttgatcaatctctttgcttaatgtatcgtcggaagaggaacaattgaataatttgaatggcacattgtccacaaagtatgaaaataacatagagattacttctttttgtttcaaaaatctgtatcactgagatagatagtgacttgatctgaattttggttcggatttgtgtttgttttgatctcatgggataatgatcatcattatatcaggatgtggaatatagtacctgaagctagaggcatatcaagactctccaaactaagcttaagttccagtgattgcgataaaaagaatgtaagatttctacgtttttgcatcatcaattcacttggaaattcgatgatacattgtttgaacttgtgtttctttgcaggttttggactatggtaacaacactatcgggtaaaaccatttagaaatttgactagatgtatctatgaacaattactatgtatgtttagttgatgatgatgttgtagaactcaaaacaaattgcaggatcttagataaatccatttcaaatttagagatgaaactagtagctgctagagctgaacgtgagtcattgtccgggaaatttaacatatccaatgaagctaagaaaagaaaatacttcatggttatcggtattaacacggcctttagtagtcgtaagagacgtgactctgtccggtcaacatggatgccacaaggtaagtctgtttctacttttcttgatttctagtttaaattagtcagaaattgtaacttttacggtttttaaactatcattcaggagagaatcttaagaaacttgaagaagagaaaggcatcattgttcgctttgttataggacataggtacaaaggagaagtcatgttctgtagtgagaaactaagcatttataactatactttactttgtgtataccgacatttttatgttcttggaatgttctgatttcagtgtgttgtcccacgggattcttgataaagctattgaagcagaagagaaaacacatggtgatttcttgagactggtaaaactctgagcaattctcacaaaattttctgtgtttggtattttcgtgctacatttattcaaagctttagaaaacaaaacaggaacatacggagggatacatgaagttatctgccaagacaaagacgtttttcgctaccgctgtttccttgtgggatgcagaattctacatcaaagttgacgatgacgttcatgtgaatcttggtaagaaaatcaaaatgtttcatttatgtcttatatatcatccatccattttgttttgatgccttgatccgattttttgcagcctccctcaagaaggctttatccgcacaccaaaacaagcctcgggtttatgttggttgcatgaagtctggtcccgtcctagccagaaagtaagtaaaaaccctactaaggtgagcattttttaggtacttaaacagcgtaagagcatcaacctttccggactttctatacttctggcaaaaaaaaaaacaggagtgtgaagtaccatgagccagagtattggaagtttggagaagtcgggaacaagtatttccgccacgccactggacagttttatgctatatctaaagatctagctacttacatactgataaaccagtaagtttttttcctaacttggttttagccagcggtttaatgcagccagaatgcttgggaaaaacctctaacgatctctatttattttgttgaaataagggatttactgcataagtatgcgaatgaagatgtttcgttgggatcttggttcatcggattgaatgtagaacatgttgatgaaaaaagactttgttgcagtacttctcaaggtaaagagcttaacaatcctggtttggtttaatccatagatgttaccggttttactctaagttgattttagtattttacaacagaaaagcttttatactggtatgaaatatatcaaggttttagaaatttctctaagaaaatcatattctaaagcattattgtttctttacagattgtgaactaaaagcaatgatgggacatgtttgcgcggcgtcgttcgactggaaatgcagcggaatctgtcggtcggctgagaggatggccgacgttcacgaacgttgtggtgaacctcaaaatgcattatggacgtcaaattcctgaaaatatttatagaaaacaaaatttatatcttactactactacaatgctataacttgctaataatttagaatgattaaaaaaaaaaaagagagcgaaaagatttcaaaacaa

SEQ ID NO: 138513 - DNA, 1932 bp, Arabidopsis thaliana landsberg
atggctgcagcagctgcagcgtcaggggcaaacttaaaagtttctgaagcctttaacttggaagtacttggtactggtgtagtcagtgcaacggtaaagtgcaaccatgctggagaaattgctggcatgcgaaggttgtacaacagtattggtggatttcaatctggctcgacacctagtggttttggtggtggccttcaaagattaatatctggagcattttcccaggcaccacaaccagaagatgattcatttaatgagatgttaattgccaggtttgtgcgtcttcttcagcaatttgtaaatactgctgaaaagggtggagaggtggagaagtcgcaattccgagaaacttgttcccaagcaactgcattacttctgtcaaacctggtaaggttttcttaccaagaacagagggggcactttttcttaccaacaactgtgaaatctaccagctattttctgctgtacattctaatctctcttattgttgcatcagggtggtgagtcgaaaacaaatgtcgaaggcttttctcaattactgcgtctcctttgttggtgtccagcatatatatctactccagacgctatggaaactggaatttttatatggacctggttggtttctgctgctcctcaactggtatctcttgtccttgccgagcttgttgatgcatggatatggacaattgatacaaaacgtggtctctttgcatctgatgtacgatactctggcccagctgcaaaattaagaccccatctttccccaggggaaccagaagatccacctgaaagtgaccctgttgaccagatagttgctcacagactgtggcttggatttttgatagatcgttttgaggttaggatttattctctactttttctaatacagagggaactcatgtgtgatttacctcattcttcttccacattggttaagacggtcttaagtgttataagtgctgagttttcttgtgatcctcctagttgaatcaattgaaagaccttaggtgacaaattgcagtctaaattaattttgcttcacttgaaaaatttgcttactgatcatcaaggaagcagataaatttgagtgagtttcttattgccactatgcttttttaggttgttcgacataatagtgcggagcaactgttgctgctaggtcggatgttacaacggagtacagaccttgaatggtgctttactcgccaccctgcagctgctggtacctttttttctttgatgctccttggactgaaattctgctcatgccaaacacaaggcaacatgcagaaatttcgatctggactccagcttttagaagatcgaatctataggtattttttttgcggatttcctttgttttttcttgcactatacattttgttacgctttctttatggacatctctcagcctgtctctatgatttggcggcacgcgtctgactaattttcttttcgtccatttatttactatgttctaaatattaatgttcatgtgatctcttagtgttttgtcggatgtaggatttaacataaattgcctttgcacaacacattgaactgcctggactagtatctgctatgatagtagctatttcatatgcggagaacaatttaagctttatgtcatcttagccatccaacatggcattttcggtgttttcaaaatacttaaataatagctatttcaattttattatctctgatttacctttgttttattttttgtgcacatcaacttatcccaggacgtctttaggctggtttgctcatcagccagagtggtatgatgtaaatattccaaatttttgtcatagcgaggctctatctgtttcagtttttgttcactttttatcaaacgagctatcagaatcaagtcaatctgattccaaaggaaaacctcgtgaaagtgggaatttgattgatgtg

SEQ ID NO: 138514 - DNA, 684 bp, Arabidopsis thaliana landsberg
agccttaattgctgggatacgaaatcctttcacgtctcttttcaaattccaaacgttcactatatattatgtggctcacacacaactaaagtaacgaaacaaagtgagacagagcaatggctgattggtctaccttaccagtggatctcctcaacatgatcgccggtcgcttgttctctaacattgaactcaaacgtttccgtagcatctgccgttcatggcgctcctccgttcccggcgccggcaagaaaaaccctttcaggacccgtcctctaatcctcctcaatcctaacccaaacaaacctctcaccgaccatcgccgacgcggcgagtttctctcacgctctgccttcttccgtgtaactctctcctcctctcctagccagggctggcttatcaaatccgacgtggacgtcagctccgggaaactccatctcctcgacccgctctctcgccttccgatggagcatttgcgcaagcgcgtcgatctttcagagttcactatcaccgagattcgagaagcttatcaggttcatgactggcgcacgagaaaagaaacaaggcctatattcaaaagagtggctcttgttaaagacaaggaaggagataatcaggttcttggaattcgcagtaccgggaagatgatgtactgggacataaaaacatggaaagccaaagaagagg

SEQ ID NO: 138515 - DNA, 1443 bp, Arabidopsis thaliana landsberg
caaaaacatatatcctcaaattaattagatctcatctatctctaccctctacatggatcatgaggaaattccatccacgccctcaacgccggcgacaaccccggggactccaggagcgccgctctttggaggattcgaagggaagaggaatggacacaatggtagatacacaccaaagtcacttctcaaaagctgcaaatgtttcagtgttgacaatgaatgggctcttgaagatggaagactccctccggtcacttgctctctccctccccctaacgtttccctctaccgcaaggtacatatgtacacattctcattacaagtacactccatataaatcatgtttccaattcactgagcattgaaccaatacatatatgtgcttgtaaagttgggagcagagtttgttgggacattgatcctgatattcgccggaacagcgacggcgatcgtgaatcagaagacagatggagctgagacgcttattggttgcgccgcctcggctggtctggcggttatgatcgttatattatcgaccggtcacatctccggggcacatctcaatccggctgtaaccattgcctttgctgctctcaaacacttcccttggaaacacgtcagtactttaatcttatttgttttaacacatttttggatgttactgagagaaccacatgaaatctatagacatgcacatgcatgttgtattatgaattaaattttaacatgggtaataaaactatatataaaatctgatcatataaaaggggttctatataattgttatacaaaaaaaatgttggtgtctaaatttatgttaggtgccggtgtatatcggagctcaggtgatggcctccgtgagtgcggcgtttgcactgaaagcagtgtttgaaccaacgatgagcggtggcgtgacggtgccaacggtgggtctcagccaagctttcgccttggaattcattatcagcttcaacctcatgttcgttgtcacagccgtagccaccgacacgagagctgtaacttacataacaactaacttatgaacatgtgaagaatctttgaattttggtcgtgtctgaaaactaatcacaagattacaggtgggagagttggcgggaattgccgtaggagcaacggtcatgcttaacatactcatagctgggtaaataaaccactagagatgtatctaaactaaaccagatctcgtacatgtaatttatacgttttaatgatcatgatgttgtgtacaacagacctgcaacttctgcttcgatgaatcctgtaagaacactaggtccagccattgcagcaaacaattacagagctatttggatttaccttactgccccaatacttggagcgttaattggagcaggaacctacacgattgtgaagttgccagaggaagatgaagcacccaaagaaaggagaagcttcagaaga

SEQ ID NO: 138516 - DNA, 3039 bp, Arabidopsis thaliana landsberg
gtctcctactacaaatgcaaattcaaaatcttgtcgtcagactcggtttccaagtaataaaaagcctaactcgtgctcattttccaacaaaaaccaaaaccaataatcatctacatcaccatcttaacaccaacaaaatttagaattttttaaacaaacaattaaaaagcacagagcaacacacctgcatcagtcaataactaaaaactttggatttatcaatcaaaataactaaactgtcacagagcaacaacacattattttattagtatttcaaatttatatccattaccaaatacatcttccaacactttttaagctcccacaagaattcaaaaaactttcctatgtctacattacaaccacgttgctactttggaaccccatcaccctaattcctctctttcgtcttcttcttccctcgtctctctctctccgcaactcctcgttgcatcactttacattgaaacataatctgtagatattaaacaaagtcttttgcaagattctgattctctagacaaatatgcagtttcttcgacttcttacacttcttgtttcttcctacttcttcttcttcatcaacttctcctcctcactgaatccagatgggttgtctctacttgctctcaaatccgcaatcttacgagacccgacacgtgtaatgacttcctggtctgagtccgacccgactccatgtcactggcctggaatcatctgcacacatggccgagtcacctcactcgttctctccggaagaagactctcaggttacataccctctaaactcggtctactcgactcactcataaaactcgaccttgctcgtaacaatttctcaaaaccagtgccgactcgtctcttcaacgccgttaatctccgttacattgatctctctcacaactcaatctccggcccaattccggcccaaatccaatccctcaagaatctcactcacattgatttctcctccaatctactcaacggttcactccctcagtcactcactcaactcggaagcttagtcggcacactcaatctctcttacaacagtttctccggcgaaattccgccgtcgtatggccgttttccagtctttgtcagcttagatctcggccacaataatctcaccggaaaaatacctcagattggctctctcttaaaccaaggaccaacagcgttcgccggaaactctgagctctgtggtttcccattacagaagctgtgtaaagatgaaggtacgaaccctaagctcgtcgctccaaaaccagaaggctcgcaaatcctcccgaagaaaccaaaccctagcttcatcgacaaggacggaagaaagaataaaccgatcaccggatccgtaacggtttctctcatctccggagtctcaatcgtaatcggagcagtttctatctccgtatggctgattcgaagaaaattaagctccactgtgagtacaccggaaaaaaacaacacggcggcgccattggatgatgcggcggatgaggaggagaaggaaggtaaattcgtggtgatggacgaaggattcgagctcgagctcgaggatttgctgagagcatcggcttacgtcgtcggaaagagcagaagtgggattgtgtacagagtagtggccggaatgggatcaggtacagtggcggctacgtttacgtcatccaccgtcgttgctgtgagaaggctaagcgacggagatgccacgtggcggcggaaggatttcgaaaatgaagtggaggctataagtaggatcaatcatccaaatatcgtacggctaagagcttactactatgctgaggacgagaagctcttgatcactgatttcatacgcaatggcagcttgtactctgccttacatggtaatttactaatctttttcctattttggtgctaattctgcataaatctaccactagttataaggtttttatgtgtacttgctctgactataaagtggagagctttttttttgtctttgtctgattgtgttgtattgactaacatgttcgcttcttctcattgttttattgttcaaagctttactgtgtttacatgtgttgaaacttgaaacagtagaactcgatgacaagcatacagatttgcttctgtgtagcattatagtatgtggtcctgttattttcatgggaaaacttaagtcgagaatgagttaatggtagtctagagagtgtttaatgtgacagaaagaatatttctttttggttcttagacagagattagtttatgatccgatagatgtgtgtttttcatagttaacctctgcttgatctgccttgggaagttagtactcgttgagatttttccattttcctgagatatgctgtgctttgagtatcatgtatcactggtttctgagacggcatttgaatttttttctgtaggtggaccttcgaatactcggcctacactctcttgggctgagaggttatgtatagctcaagggactgctcggggtttgatgtatatacatgaatacagttcgagaaagtatgttcacggcaacctaaaatcaagcaaaatcctgttagataatgagctgcatcctcacgtctcaggatttggtctcacacgactggtttccggctatcccaaagtcactgaccattcactatcatccatgacgcaaagtatagaccaaggatttgccacaagactctcagtctcagctcctgcagctgcttaccttgcacccgaagcccgagcttcttctgattgcaaattatctcacaaatgcgatgtttattcttttggtgtgattctattggagctgttgactggtcgattaccttatggttcctctgaaaacgaaggagaagaagaactcgtgaatgttttgaggaagtggcacaaggaagagagatctttggctgagatcttagacccaaagcttctgaaacaggattttgcgaataacatgttattgcagccattcatgttgccttgaactgcacggaaatggatccagaggttcgtccgaggatgagattagtgtctgagagtcttggcagtatcaaa

SEQ ID NO: 138517 - DNA, 1513 bp, Arabidopsis thaliana landsberg
gttttaatctctttttaagacaacatataatgtcaattgtatgtacgtttttcttgtttctcttaaacacttcttttgcgtttgcatttgcgattcctaaaccgccaatagtaaggagactatcaacgacagtgacatcaaattcaacagcgtcttcttgctcagccaatggaaatccaatcgatgagtgttggagatgcgacgaaaactggaaggacaaccgcaaaaacctcgcggattgcgcggttggattcggacgcgactcaattggcggtagagccggggagttctacacggtgactgattcaggagacgacaatcctctaaatccaactccaggtacattacggtacgctgcgacacaagatcaacctctatggatcatttttgatcgagacatggtaatacaactaaaacaagatcttcaagtagcttcatacaaaaccattgatggtagaggaaataacgtacaaatagcttatgggccgtgtttaactttatataaagttagtaacattattataaacaatctttatattcacgattgtgttcccgcgaaacggaatgctttatcgtcgttgggaggatactcggatggagatggaatatcgatattcgagtctcgagatatttggattgatcattgtacgttagagaaatgttacgatgggcttattgatgcggtgaatggatccacggatataacgatttcgaatagttacatgttgaatcataatgaagtcatgcttttgggccatagtgatgagtattccggtgatcgggatatgcgagttacgatcgcgtttaactattttggtgaaggacttgtccaaagaatgccaaggttagtacaatcttatatttctttttcttctttttttaatgtcaaatttataagctaaccaaaatattcgtgcttaaaataccaatgtgtaggtgtaggcatggatattttcacatagtgaataacatttatagagactggaagatgtatgctattggtggaagtgctaatccaacgatctttagccaaggaaatgttttcatagcttccaataatcagttcaccaaggaggtacgttcgtgacatgtgctccacaaaactaagagcgtgttaacctcacaattagtacaatataattcatagacaattaataatttataaatttgatcatgatgtgtcttactatatggattagattcttaacggaaatgttggctccatacttgtaaactcacatgccctatactcaggttacaaagctagagagtgcagatggagaccaagaatgtaaggaatgcaactggatatcacaaggagacgaattggctaacggagctttgtttacaccgtcagggaaagaggattctgctagctacacgaaattttcgagtatggtagctagaccagcttcacttgtcaagaccacacatgcatcactatgtgttcttagttgcaaaattgaccaagcttgctgaaaacacatacataagcttgtgaccaaatctagcg

SEQ ID NO: 138518 - DNA, 1528 bp, Arabidopsis thaliana landsberg
gattccttttttcgcagtgaacaagaacgatatagagtcatcgaagctcgctttcgtttcatcagctggtgcatttgagaaatggactactttgacaggtcttttggaacagcttaagggactgtgataggctggctacaaattctttactctttttttgtattttccaacagatttgtcaaagagggtcttttttttctccaaataatcctttgaataatcatcattcactttcttaacttctttggttattatttacctttatacattttgtttatacttactatgcatcaatatcaacaaggttgatttttccatcgaattccaccacaccaaaaggaaccaagaaaccataccaaaacttctttggttatttatctgaaactaattcaaaaagatctgatcagtaaacctttgttctattgaatctcacattaagagaaacccttttaacttgagaaggcatacagatatagagcatcacaaaatccccgaaacaaaaccgaaccagtcataaccaagaagggggaaagctactagatgaagctagtaggtggaagtttgagtcatttggcctattactacgcactagttatgatcttttctctgatacattgaatactttattaaaaaccattacataaccaatgtaaaaacaaatatttaaacgttaaacagtccaattcagctttgaaaaatcctcccagaagaagaagactagtcaatattggttgcgatggccttgtagaggcattattatctgttagataatattactataaacagtgagggataaagcagaaatgcttctgtataaatactatcactacttttgatcaaaacaaaaaataccatcactattttacttgtgtgttatttcatcaccttcaccttcaacatcaaacatcacatctctttctcttttatctctttttctcggtcttcaaagagtttcttagttaccaaatcaatggcaggtatcaaagttttcggacacccagcttccacttccaccaggagagtcctcatcgccctccatgagaaaaacctcgactttgagctcgttcatgttgaactcaaagacggtgagcacaagaaggagcctttcctctcccgcaacgtaagtatatttatctatctatgtgttgttttgtaagacaagagaccaaacttttttgatgtacgtaactgatcggaatcttaaatgttttttgtgtttgaacttctttcctatcttcagccttttggtcaagttccagcctttgaagatggagacctcaagctcttcgaatcaagagcgattactcagtacatagctcaccgatacgaaaaccaaggaaccaaccttctcccagctgactccaagaacatagctcagtatgcaatcatgtccattggaatacaagtagaagctcatcagttcgatcccgtggcttcaaagcttgcttgggaacaagtattcaagctcaactatggcttgaacacagaccaagccgttgttgcagaagaagaagctaagttagccaag

SEQ ID NO: 138519 - DNA, 576 bp, Arabidopsis thaliana landsberg
agagccaagaggattgacaaatcgctgaggtttgaagaaggcgaagaggaagaagatgaacagaataaaaagcctctggctaagccacgtaaggttgtcaggtttcagttagagaataataagatcttcgagccaaagaagacggtgagttttgatgatgatcacgaactcaaaccaaaggagaatcctctggaagaaaaagagagtttgaaaatggttgaagggaaggaagaggtcgtgagggttaagatcaagatgacaaagcatgaagctcaacggttgttgtcgaaatgcaaaaacgacagcgttttaaagttggagcatcttatggaccagatcgcacacgtccctgttcatcagcttcaagtcgctatggtgatggttggttgtaataatgagcgacaaggaaatggctgctggttatcccagctggaataagttaatcttgagtttttctatcaaattttgtagttttagagtagaaactatataaatttacgtttgtatatatattttgtaacagattaatagaagtaacatgattttgtggaattttttttgttgtcgtctcataaa

SEQ ID NO: 138520 - DNA, 2024 bp, Arabidopsis thaliana landsberg
atgaacaaaatattcgtcgtcattgccactattaacgattcaaagtggtaaaaaaatcaggaagcagtgaaaggtgaaacctcatgaatctctagactctaatgcataaacatatttcattatatatcgtagtagaatactgagacacattgacatatttaagtatcaaacagaaattgtataatggtatctctattttattaacacatgtgtgcgtcaatgtgaatcagatagaattagacacactatctttttaatatttaaagttggagccgttttggtcaaaactaatttatgtgcactactcatttatttataggttttttaaaaacacaaaaattgtgaaaaagcttctaagccaggtggcgggttttggtgcaaagtctttgatatgttcggaattgctgcttcgtagagaaaaaaacttttctgataacatcggagtaaaaggaaagtaagtcggagtttaatcatcttaagatttgattgaatggctacgctcactgaaatagcaacccttgaggagaagtgagttttttcttttcaccttctatttctatgtgtatatcttatctactcttttgaaattaagacagaaaagttagagatgtgttcgtaggattgggtttttgtctgaaagactgaaactttgtaaataccttttcttaaaattgatgagtttggaggaacggtttcagtaaattaggttgtgtttcgattctgttgtttttgtcggtgttcttcgtgagaatttgtctgaatttctgcatcttcctttgattgaggattgttttttgattctgttctatagcttttgctcttaaggaatcaaagaaggcaagtttttttgtcaaatcatggctttttttctgtttcggggtgcttattaatttgtttaattctgggttatttagttataatgtgtgctaagtgattcctctactagtattcaagttaatggatttgattcatctttggttttaggtatatcgaattgtgcaagatgcatggaatcctacccaacactgccattttatctgctttctttgaggtttgattactttttccttgtccagaagatctgtttagcttaatcttagtgttagtctgagtataaactacgattgaacctgatcaactgaattttaggcggaggttaaaaagtcaaggaatcaaagatgcattatgaacctttacgtggatagagtgaagtacgatgactatctcccgcttctcgagttatgcaatgagatcaacacatctgaggtacaaggaatagatctatttgtgagatccgcttgttcgttagaagatcattatgcattgcccttaatccgttccgtcaatcaaaaactccgagttgttcatctacatgactctttcgggaaaaacttctggcagtaagcaatggttttttgtctctctttttttctttttgcattatttctgaagttttccattttcattttggtgattggttttttactttcagggacgttttctttcaaggtttgagctgcaaagtgttgaatgtgaggtctatgcatatccataagcttaacatcgtaggagagttcacacagctgcacacccttatactcgataagaaccgtatagttggttttggagaagactgtttttcttgcatgcccaaattgacatatctttccatgtgtgacactctagtgtcagatctttggacatcagctgctgctctcttgaaactcccttctcttaaggagctccggtttcaaatttggatctcttgcagtgattctagcccactcaattcagagtcatcaccatcatcatctaccaaggatgatataaacacatttattgaatcagaccctcccgttgaagcagatatgtgggacgttgctgaacagatggatcctagtttacctgtcgaagagactcttcatagcatggatttctcgtataaaattcctgagcaagatgatttggattcacatgtctctgtgtctgcagggttgaatggagaagtactcatgagggaaaag

SEQ ID NO: 138521 - DNA, 1719 bp, Arabidopsis thaliana landsberg
acgtttctggtggcttctgaattgaaaaatcagcgtttttacttttcacaatattcaattggagaatctttagaacttcaacgaagtagcgtctccggaatttcaggtaaacgtggcaagaaaaagccaaacggagaagcatccacgtgtccctccattagccatctcccacgtgtccattaccgtaccgacgaaacattccttaaccaaaggcttcccgaaaaaggacagagtccacaagcttcggattgttcacaacttcaaagcatcgaaaaggtttaaactttacgtttttctctggaacccgattcgaagaaatcatcaagaagcttcctttcactgatttctcaatctattcgtaggtaacccaattccaaaaaacgtttcttttttctcgatgccttagcttctttggattctgttgtgatctaccgattttgaatttgcttgatcgatcatcggatcactgtgattagtgttattgttcctttcctttgtgtagctttcgcgcttatggaagattctggagtgaatccaatggattcaccatctaaaggcagtgactttggagtctatggaatcataggaggtggaatcgtggctttacttgtgcctgtgttactctctgtggtgttgaatggaaccaaaaaggggaaaaagagaggtgttcccatcaaagtaggtggcgaggaaggttacacaatgcgtcatgctcgagctcctgaattggttgatgtaccttgggaaggagctgctactatgcctgctttgtttgagcagtcttgtaagaagtattcgaaagatcggttactaggaactagagagtttatagataaggaatttattactgctagtgatgggaggaagtttgagaagcttcatttaggagagtataaatggcaaagttatggagaggtttttgaacgtgtttgtaactttgcgtcggggttagttaatgtaggacataatgttgatgatcgtgttgctatcttttcggatactcgtgctgagtggtttatcgcgtttcaggtttgtttatcaactattgttttgttggtttggcttgaatttgtctgatgaaatggttggtgttgtaaattttccagggatgtttcaggcagagcataaccgttgttactatttatgcttctttaggagaagaggctttgatttactcactcaatgaggttggtaggggaagttttgaatgtgtatgttttttattaataaatttggttgttggatctctgaatcttgcttgtgtattgttgacagactcgagtgtcaaccttaatatgtgactcaaaacaacttaagaagttgtctgcgatacaatcaagcttgaaaactgtgaagaacattatttacattgaagaagatggagtagatgttgcttctagtgatgtcaatagtatgggtgatataactgtttcgtcgatctctgaagttgagaaacttgggcagaagaacgctgttcaaccgatcttaccttcgaagaatggagttgctgttataatgtttaccagtggtagtactggtctaccaaaggtatgtgttgcactgtgtcttctcttttctttatgtgttttgttcacctgaattcttgattggtgtaccttacattgtgtgcattcactcagggagttatgattacccacggaaatcttgtcgcaactgctgcaggagttatgaaggtggttccaaagttggataaaaatg

SEQ ID NO: 138522 - DNA, 2022 bp, Arabidopsis thaliana landsberg
cccgcctccactctatcctaccgccgacgtccgtgatcgccggttagtcttcttctttctcttcgccctctcaacatacatcgttgcagaaatcaatcgtgtttcgagctgcgcgattgcattggtcaggtttaggaaagctatgtgtgttttggtagtggttcggctttatttggcctaaacaaatctagctattggttcagaagaaggtggaatcctgagaaagctctctaaacaacgcatgtgatctagcaattggattactttacaaaaattaagagtctttaaggtgcataacctgtgtgatagaatgtaattggatctatgacttgtggaccatttcctaggttttttaaaagattttttctgatatgtatgacaacagacacgaggattatgctagtaattgcctgaaagtattgatttttggagcctaaaaccttttgtatcattttggtgaaaggttatgtttcactcgtgtaacacaattccatttcacttgttacatttttatatatgttttcacttgcattatctaagaagctggaattcttgctttgattttattagcagtagcatctaattttgtttgtttttcagtttctctcttcaggaaaagtgtagttaaacgattgagtattccaattttgttctttggctatgtaattaacagaaatgactgaagcagagtccaagactgttgttcctgagtcagtgttgaagaagagaaagagggaggaagaatgggcacttgccaagaaacaggagcttgaggctgccaaaaagcagaatgctgagaagaggaaactcatatttaaccgggctaaacagtactccaaggagtaccaggagaaagtatttttctacaagcttagtttgcaattttttctaatgtgagaaatgcaaattcattgagcgtttctgctacttgttttcttcaggaaagggaattaatccagctgaagcgtgaggcaaaattgaaaggaggcttttatgttgacccagaagctaaactgcttttcattatccgtatccgtgggtaatatgatctactattactatctcccaagtataaggatgatgtgttacttctataactgttttctcatttttctatctatttgtttctatcatcagtatcaatgccattgacccaaagacaaagaagattttgcaacttttgcgtttaagacaggtaacaatcttatgatgagaactttgtaatatgttaaccaatgatacaaaaggatcgtatctgacacttaaaatcatttattgcagattttcaatggtgtgttcttgaaggtcaacaaggcaaccattaacatgcttcgccgtgttgaaccctatgtaacctatgggtacccctcttcgtgcttacatttcaaaactttcttttcttatttaacctcattagtaagtggtagtcttaccatggacgactcttgttttcctcagatacccgaacttaaaaagtgtgaaggaattgatttaccaacgaggttttggaaagcttaaccaccagaggactgccaaaacagacaattctattgtagatcaggtgcatatcatcaacctatctccttcatcaagtctggttcagttcctaaagtcaatattattgccgttatccctgtcctagaaaaaatgatgtattatcatcaatgttggattcaatttgtctaacagatatggattgtcatttatcatcaaaactctatgtcttctctatatttacatatcctttgctgttaaatcaggggctaggaaagcatggcatcatctgcgttgaggatctgatccatgagatcatgacggttgggccacatttcaaggaagccaataactttttgtggccattccagttgaaggctccattgggagggatgaagaagaagaggaaccattacgtggaaggaggagatgctggaaaccgcgagaacttcatcaacgagaatcgttaggagaatgaactgaagcgtaagcgttattgctctgaaactccctaggaaacggtttgct

SEQ ID NO: 138523 - DNA, 2609 bp, Arabidopsis thaliana landsberg
  unsure (1)..(2609): unsure at all n locations
atgggagatcgtcctgctgcgttggagaaattgcattcttggcataggaatattctggattctatgattattgatatcattcttgtccatccgatttcaaacgataatttggatgatgatgatgatcatagtgattctgttgttagatcagctgagactgtgattgagcgttgggtggttcaatatgagaatcctttgattatgtctcctcagagttctgactctgcaacgcgttaccagaaggtttacaagaaatctatcattctgttgcggtctctttatgcacagactcggcttcttcctgcttatcgtgtctctaggcagctgagttcttctcttgcttcttctggttatgatttgatttacaaggtttcatctttcagtgacatattctctggtcctgtgacggaaacaatgaaagagtttcgttttgctcctgttgaagtgcctcctggtcgtctttgtgcatcggttacttaccgttctgacttatctgattttaatctcggtgctcatatcacattgcctccgaggattataactgattatgtgggaagtcctgcaacagatcctatgaggtttttcccttctccagggagaagtgttgaaggccattcctttactggtagagctggtcggcctccattgactggttcatctgcagaacgtccgcatagctggactagcggctttcacagacctccagctcaattcgcaacaccgaaccaatctttttcgccagctcagtctcatcagttgtcacctgggttacacgatttccactggtcacgtacagatgcttttggtgacaatcaccagctttcacctcccttttcaccatcgggttctccatctactccaagatacatatctgggggtaacagtccgcgcattaatgtgagaccagggactgctccagtgaccattccttcttcagccacgttaaatagatacgtttcatctaacttctctgagccaggtaggaatccacttcctcctttttcccccaaaagcacaagacgctccccttcatcgcaggactctttgcctgggattgcgttgtacaggagttctagaagcggagagtctccttctggattaatgaaccagtaccctactcaaaaggttatgcttcttacatcttatgtgtcttgctcaatgcaagaaaaatatcacaatattttgtattgcctcatctgatattttgttgatttatttatatctactcttcagctgtcaaaggacagcaaatacgattcaggccgcttctcaggagttctgtcttcgagtgactcaccaagattcgcgttttctaggagccccagtagattatcttcccaagacgacttggatgaccctgattgttcatgcccttttgatttccatgatgttgatgagtcaagacttcagtacaggttggctttatcccactacctaacttgaatcattcaaaggaaatattatatacttggattagtttacagaaatctttacacatagagctggtcaatgacaagatgccatgaagaaaacactaatgtgttggctgttttgtttaatgtgaaattgttggcattcacactctatacttggcctttctcttactgtttctttatcattttttggtctgtcaagttcacttcttcttgggttttttagtctttggtagtaagaaaatgacagatattttgcaattttttcgatgcagccaaagtcttgaccggaggaaaacttcaagctctatatcgcagtcgctacctctagggagaagatcatcacaggacgcagcggttggtgttctggttcacatgctgaagacagcaccaccattacgacaagactcaagcacttatatggcgtcaatgtctggggttcagagagaaggttcagtgtcaggtacagaatctgaatttcgatggctcgtagcacatcaaatgcactaaaggaactgagaaactacaaacagctcaaagacttgcttctctccaaatccaaaagtgggtctggaccaactcgcgtccactgagccaaatcaaagagcgatcaagatatgagttatccgatggttgtttgtagatatgaatttgatgacgaatacttaactctgttgtatattgccaaagagcaatcacgttttggtttctgtaaaagaacttgcctttgaatatgcacataaaataaactaatcaaacttgaatcttttcattatgaagtagtgaaatttatagagggttttgttgttgttgacaaatcatgtgaaaaccttgttttctcatctggacctctttctagaagaaacatgaaatacacaaatgttgaaaaccggtcacctatactcttttaagatgagtgtgaaacgaagcaaagagtcacattgatagagagatcggatgcatgatagttcctactgtgataacaagctatttgggtataaggtcacaagatgtgcagcacaaaacgagagagagaagagttttaaacgcaatgcccatttagataaaaagtacaccaaaaacacacacacaaaagtcagcttcaaatagccatccacaataagcctttgcatctacacaaattcagcttgtgntagctttctccaaatcttggtt

SEQ ID NO: 138524 - DNA, 3159 bp, Arabidopsis thaliana landsberg
cagagggaggcgttgcaaactcaataaagctcaaaactttccgccgtcgttttcgtcgtcggagaatacaacaaaagacctaaagcagatcaaagtaattgtagttgacggagatggagaaagtaaagattgaagaaattcagtccaccgctaagaaacaacggattgctactcacacccatatcaaaggccttggcctcgaggtgctccttctcctctctctctttgactctagtggattccagtagtttgctcgagtttagggtttagttaaggttttatgttctaagcttttttagggttttaaagctatttgcttcgtttggtactacgcttagagtttcttttctctgttctagcacaaacaaaccctagttttcatttgtaaagtttcgacttttctggggataagatgcattgcagtattctcgtattgctcaaagttctttaaggttttgtgtttaaagtttaatgatttttaggggtttcaagctcattgcttcgtttggtattctccgagactcttttttcggctctagcacaattatactctagttttgatttgcaaatattcaattttaatacatgtattttatgaaatatatagtacttgaccgatgcttgaagacctttgctcttccactttggcacggcactttgattttaattaactatctttgcttcttttactgactgtagtttctcaagcatctgtgtgatctcgttctataaccagtacatcatttctgttgctaatgttgcgtctctttttctagccaactggtatccctataaaattggcagctggatttgttggtcaacttgaggctagagaggcagctggtcttgtagttgacatgattaagcagaagaaaatggcgggcaaggctcttttgcttgctggccttcctggaactgggaaaacagctttggctcttggaatctctcaagagctgggaagcaaggtaattttggatgtctcattttgtatcttctttgttacattgtttccacatggcttcattgtatgaagcttttttcttttacttttagcttattttatctggattgtttctttcttgcaggttccattctgtccaatggttggatctgaggtttactcatcagaggttaagaaaacagaggttctcatggagaattttagacgtgcgattggtttacctatcaaggaaaccaaagaagtctatgaaggggaggtgtgttgctatttgcggttacttttgctgtgttcttatgcaatagcatgtctcgctaattggtttttgacatgttgtccttctcttctaggtcaccgagctgtcaccagaagaaactgaaagcctcactggaggttatggtaaaagcatcagccatgttgtaattacactcaagacagtcaaaggaaccaaacatctgaaattggatcccactatctatgatgccttgattaaggaaaaggtcagttcttggcatgcgatgctatgctttggatgtggtattttcccctaagtttttgcttttcagtttgttccaaaacctgcttttcttttcacctttttggttttctaacgatgtcattctgtggggacaattgtgtatgaatttgctgattactttgtcattctgattggtttctttttatatttttgctgtttgcctctcaggtagctgtaggagatgtaatctatatcgaagcaaacagtggagctgtcaaacgggtaggtagaagtgatgcttttgccactgaatttgatctggaagcagaagaatatgttccacttcccaaaggagaggtccacaaaaagaaagagatagtgcaggtttaccttctttgacctctcccttctgtgtagagtaattattttctttgttgatttattatctgttatgtattagtttgtatgtgtattaaccttagttcctaagtttattaagactacttgttactcaactagaccatatacttttgactgataggatgtcacactccaagatctggatgcagcaaatgctcgacctcaaggtggccaggatatactttctttgatgggccaaatgatgaaaccgcggaagactgagatcactgataagcttcggcaagaaattaacaaggtgattttcgctagtacatgggtgatttttttaagcatcttactttctcttttgcaaggtctaatatttttatatgccattgtaggttgtgaaccgatatatagatgaaggtgtggcagagcttgttccaggagttctatttattgatgaggtattttcccaaattaagttttttttcattccactattgatcttgctcaggactcaggagcagtaagaatacctttgtttaattataaaacctcaggttcatatgcttgatatggagtgcttctcatacttgaaccgtgctcttgagagctcattatctccgatagtgatatttgcaacaaatagaggtgtttgcaacgtaaggtgagaagagcgctagaccttgatagacattttcctttggaaatcttgtgagtttttgttaacttggtactgtgatttactttatttgcagagggactgatatgcccagcccccatggagtccctattgatctattagatcgattggttatcatccggactcaaatctatgatccctctgaaatgatccaggttactcaattgtcatttagcttttggatttcaattactacgaacaacattctaatagatttatcattttgttcacagattatagccattcgtgcacaagttgaagaattaaccgtggatgaagaatgcttggttctacttggggagattgggcaaagaacttcactaaggtactgtcatcattgcttttctaagcaaaatttctgttcgtgaatctaaatactaaaaccttttttgtgctttcactctcaggcacgctgtgcagcttctgtctcctgccagcattgtagcgaaaatgaatggccgtgacaatatttgcaaggtagatttacttgtgaaatcttagaacaataaaacaaatgtaaaatatgtggatgttatgttattaatccttcatcttaaattttgacaggctgatatagaggaagtaacatcactctacttggatgctaaatcttcagcaaagcttttgcatgagcaacaagaaaaatacatctcatga

SEQ ID NO: 138525 - DNA, 1925 bp, Arabidopsis thaliana landsberg
tcgccgttgttgtcaccgtcgccggcaagtgaagtcgctgcaagagtatcgtctttgttcgtttatccgatcaaatcatgtcgaggaatttctctgtctcaggcagctctcactcccaccggtatcaacaaaaactagtttcgagaaaaatttctcattttttggtttcgaattcgatttttccttcttgggtttcatattagagctgtttcttcatctgggtttaagtattcttacgatattttcgattagccgttgtttaagggttcatcatcattcagtgagactccttgttgtgctcttgttggtgggtctaagttgtctttagtgtgactctgagtctctgaaagttattaagtggaaagattgatttttgtgctgtcctcaatgattctctaaaagtgtataagacttggaatgtgaatgattaagtgtgaagtaatccaaaacagtttaatgaagttgtcattgtgagagctgatgtgattattttggtgtgatttgttgggggaaaattagaaaagctaagtttttttttggggtttggttgcttaggatttcgatgggatcgaaactggttgattgtgaattctaaaggaagaggattgactcagagagtggaaccaaagctttctttgattgaagtagaaatgcctaagcatgcgtttggagaggactgggagcctgagaagagctctaacatgggtcagattgttttatgtcttcttattcagctggctttttgttttaatgaagttggtctttttctcatcttttggctgtgtttgcagtggttagagctcctggtatggatgcccttaaggtctccctagctaaacccgacaaaatagcagacggtgtctcagtttgggagtggtctggctccgcactagatgaaggagaagaagcatctcagtggtttacaaactttgttgggaagccttgtcgacttgttcgttttaattcaggtctcataaactttttcctgtcttaatcagttaagcttgactcctttgaaagattttggcggtgcatatttcatcacaagtcacatgttatattgcagcctatgagactaggcctgtggatccaaattatgctccaggtcacattgcgatgttctcggatatgtatccattcttgcttatatcacaggtcagaggatcaaattcgatttctttctttcggttctgctttaaacagtctcgtgctatttccagggttcgcttgattccctgaataagcttctcaaggagcctgtaccgatcaaccgatttagacccaagtatgcttcagaaagccttcactgtttttattgctttgtaacaacacttgataactctcactgggaaatgttacagcatctttgttgatggatgtgaaccatttgctgaagacttatggacagagatccttataaacggtttcacctttcacggtgtgaaattatcgtctcgctgcaaggtatatcaaaaccttgtcatagttcaaaactccatgaagaatcttcttcatttttggttttgttcttttaaggataagtatttttaatccgtccatgatcaggtacctacgattagtcaagaaactggtattggaggtcaagagccaattgagactttgaggactttcaggtcagacaaagttttacagccaaagagtaaaccacacggaaaggtaaagaaagactgtggtccggtttatcgtcataacaaatgaatacgagggttttgaatggtagatttaaatatgatgcagatatactttgggcagaacatggtttggaaagacggattcggcgatggaattggaaaaacaattgaaattggtgattccgttgttgtccctcccaaactctcatctcctgctgaagcagcaactaaaaagagacttgcagcttgttatatatataattgtgaatgttc

SEQ ID NO: 138526 - DNA, 1514 bp, Arabidopsis thaliana landsberg; identical to SEQ ID NO: 48613

SEQ ID NO: 138527 - DNA, 2262 bp, Arabidopsis thaliana landsberg
tctcaatcgagaagaaggaacccaacactgagatccatggcgatggtatttgcacaacccaagaaaaacctacttcctctcattctcttcctcttctgtatctccgtcatcattctcctcgttctcgtctccgagaccactcactctaacgccggacgaggaactactttccggcgaaattacaatgatcccgctcctttcactttcctcatcaaggtcctcacctttaaccgtctccattctctctcccgctgtctcagatctctctccgccgcagactacggcgtttccggagacagaggacgcattcacctccacgtctacattgatcatttcaacctcgcgaggaacgatacacctgtggaagataacttgcaaatcgcgagggaaatcctagggtttgtggatagattcgagtggagatttggggaaaaagtagttcactatcggactgataacgctggattacaggcgcagtggctggaagcttggtggccgatctcagatcacgaattcgccttcgtcgttgaagatgatcttgaggtttctcctctttactatggaattctggaacgcctgattctcaaatactactatgatacttccaatttcaatccttccatctatggagcttcgcttcagagaccaaggtttgttccaggtaccattttctattctgtgattcagctatggagattgtagaataaacctccaagaatttagggatagatcatagaaggagattgatatatacattgtagttgaatctggtgatacattgttcaaatagagagtagcagaagttgattgaagaagtgtgattcttatatgtttcttggatatacattcccagatgatagagctatgcaagtgtagatcagtaagaagtaggatacatgagtttgttagttactagaagtgtctcaaatagtgattgaatgatttagtggtcaattgcaggtaaacatgggaataaactacatgtagatcccaaaacgaatctgatcttatatcagttagtgggaacttggggacagcttctcttcccaaaaccgtggaaagagttcagactatggtatgatgagcacaagtcgaaaggcaagaagcctttccttgatggcatggtaacagagatgcacactttcgtcttcatggatttcattgtttataaattctaagttatctgtcatttattatcttggtggatgtttttctcaggtgtcaaacggatggtacaagaggctgggagaacgaatatggacaccttggttcataaagtttgttcattctcgtggttattttaacatctatacaagtttcccgaatgagggggctcttagtgtctctcacagggatgctggtgttaactatggaagaaccgctgggccagactcacagttattgaataaaagttctctcagttctgattctctgaagctccaacccttgagcaaccttaagtggtacgatttctgtttcagtgaagttgttcccggtagagttgtgagaaacctgaatgaacttggcaccattcttccttctgtgcagagagagaaaaccataattctggtcagtctatatggtgcagacaagatgttcatcaggaacttactctgccatttcgagaagcttaatattcaaaaccacattttcataggccctagctctgagttgttccacgatctttcaagaaggggacatcctgtaattgatgcggatatgtttctaaacaagttgatcaaaagcaaaacttcttatccaaactcagtgaaggaggctctgggcaattcttacgttgtcaagaaatgcttagaacttggatacagcacctgggcattttcaagtaattcgcttttggttgataaaggtcgtctccttgacagagtcagctcagattacgacatctatatcggggagagctctggaattttgattgttcaatcttcatcagtcactcaaaagttatggagcaatgagtttctacacagcattgcatccccaaaacaaagtctagattttattcatctagtgaaagagctagtggagcaaaagggcaagaggattaagaccgtagagacgatgaatattgcagaaaataccaatgccaacagcgtaaaccaatcgttgggagatggcaagccggtggtgtattggtctcctgaggttgctcccaatatgattcggtcaaagctagaagagttgagcttgtggctcatcgatgatgatctctcttgcaaggccgtggtttgtcatagttcataa

SEQ ID NO: 138528 - DNA, 150 bp, Arabidopsis thaliana landsberg
agtacttgaacgatccagaagccacttcagcaacaatagacgaagaaggttggcttcacacaggagacattggatatgttgatgaagatgatgagattttcattgttgatcgacttaaagaagtcatcaagttcaaaggctttcaggcaa

SEQ ID NO: 138529 - DNA, 563 bp, Arabidopsis thaliana landsberg
gatgcgaaagctgcaaagttgattcatcattggcctaaactacacgaaagacacacttttctgcagccaaactcgagaggctacggtggaatcatccgggttagtgaaccaaatcacctaaagcataatcctttcatcgtattttctcacagtggctttggtttcttagtaaaccagaatcaaagtaatgtcggtgtatgtaatcgaatttgggtatgtgttacgaatttggtgtaggctggggtgactgacatacaagtttgtccgaatggatttataacgtgtggtggtgatggcacggtgaagttcgtcagcctcgtagattcttcctatggcgatgctaaataaaaagaagatacattttccgggaaagttttgcagtcgagaaaacgagttattgctaccttgcgtgtgtttattgaatacgtgattttttgtgatgtagtttttttctctatatggtttaatatttgtgtatatacaaatatattaaagattatgaagcagtagaatcttgagttgaccataatccagattttaatttatctttgacttgacttcaa

SEQ ID NO: 138530 - DNA, 3134 bp, Arabidopsis thaliana landsberg
catttaggagttcacttacttgaaaaagtgaagcaagtaagtctgtattgtaccaccatacctgttttcctgcatttgtttgcgacaacctaaaattttcctttgccttctagatttgattttgtgttcaaatgtttatgtagaatgcagaggagaaaactgtcgtgtcttattctccgatcctggtggcgagacttgagaatgttggtcttcattccatgttcactgaccagcaaaaatttaaccaattatgtatagaggtataatcttgtgaggtgcaatagattggcttggttttcagggttgcagaaataagacatgaattttgtctttggatactgcaggctctaaatgtggatcacaaatgggcaggggcaccctttgcagccatgcttcgtcagcatcaatcaagttcaagtgacgcaaatggttgtctattcaaatgtgtattcattctagtatcaagtggttccagcgtcacacaagtcaagcactcctcgatagttttgcaggtataggcggttactgtgtcactcttcttgaaattttccttacccttttctcttcacactgtctaaattagtgacgggaattttaatagccagagtcaacttctggctctttaagtattgattgtattgtcatatatgcctgctggatatgatattcttacgttttacattgcagccagtcaatttgaacctagacgaagagactttaatgagagttgtggcattttggagatcatctctcagtacaaacacgcaaagtagtcaatattattttgatcattttgaaatccacccaataaaggtttgctctaacagttgctctatttgcctcctttttcagtttctactctatgttgtgttttacattctacctctgtttctcttttccttttcaattagattactgctaattttgttcctgggagttcatattcgagctataactcagctcaagaaactctgaggtcattactgcatagtgtggttaaggtatgggcatcagaaatttcattttatcttcttaattttgctgttttgcgtatattcacatgcacatcatattatatgagctaatgcttgtctggtacttcgttttctgtaggttcctcatatcaaaaatatggttgtagagctaaatggtgtattggtcactcatgctttaataactgttcgcgaactacttctccaatgtgtaaaacattactcatggtatcatcttttgtttctatgctaaaagctccgaagttatctgccctctgtttttagatattattaacgtgcataagtgctccctaggtatgcaatgagagcaatctacatagcaaagggcagtccgttgcttcctccagctttcgcatccatgtttgatgatttttcatcgtcctctcttgatgccttttttgatccttctcgtggcttggtgaacgtccctggtttgacagtgggtaagcaatgaccattcgtggtatcattaccttaaattttggcttccatatgtattaaatctcaattaaggtggaaatataatttgcttctatctgttgtaggcaccttcaaactcctcagcaaacttattgacaacaaaggattgtcagggacaagacgttactttggtgatcttgggaaaactgtaagtatcatatagtatatggctgatgaattttctagctttttccattcaacctcttatgcaaataccatgttgcagctaagaacagcaggatccaatgtcgtctttgttgctctcactgaaatctccgattctgttctgaggggtgcagaaatgaaaggtgttgatggactggtgaggactcatctacttattatccggtaggttgaatttaattaccactatcgtctttcttataatctccctctcttctctcaggttagcggtttccaccatggaatccttaaactggcaatggaaccgtctgtgataggaacagctttgatggaaggtggccctgatagaacaattaagcttgatcgtaaccccggtattgatgaggtgatattttatgccttgtcttctactttcaatttaaatattttcatttttatagagtataaaagagaactgagaaaactctatgcgtagagctttttctaatgtccatctacgtgtatgctcaaattcactcctttgcagttatacatcgaaggataccttcaagctatgttggatacaatgtataggcaagagtatctcagagtcaaagtcattgacgatcaggtaaataatatttctcgaacttagttttgctttgccattccaataaaagaaaacgtaaaccgattcattatgtttccaagagatgattaataccaacatatttcccttactgaccgaacatatttcacttataggttttcctgaaaaacctcccaccaagcaattctctcatagatgagatgatagaccgtgttaaagattttctcgaaagcaggggtttactcaaaggagatccctcaagctctcgtcctcgtcgccgtctccatggagacaaggtttaattccaatcccttttctctgcataaacataaacaccctcagtcatgtgaatatctctctcaatatgatcacaggaatggaagatcggaccaacggtgttgacattgtgtgaacatctattcgtcagttttgcaattcgcatattgaaacagcacgccactaaggccattacaagtctaaggccaaagaaagaagaagcagaggccgagacaagtgacagtggttccaatactgcaatggtaccagtagttagtgacaataagaagaagaaaatgaagttcatgtggaaagctggtattgggaacttcgttgcttcaggtatcgtagcttacatcgacggacgtttgtgccgacaaattcctaatccaattgctcgccggattgtgagtgggtttttgttaagttttctcgataaaagcagtgaacaataatcacttcctctgtatatatattcttctataatagaaccattacataaaataaaagtaataaagctcctttacgtttgttttcctcttctctgcatcaatcacgattcatcaacataggactatgagaccgatttcgaagtcttctgcatccgaggtgtgatatatcggccaatatag

SEQ ID NO: 138531 - DNA, 5864 bp, Arabidopsis thaliana landsberg
ctgcttgactgttcatgttcaaggaagagacttgacttcaggagctgtgcttcgaggatgcatgcatcttgtgcatctagcaggcagtgagagggtagacaaatccgaggttactggagacagactaaaagaagcacagcacatcaatagatcgctctctgctttaggagatgtgattgcttcgctagctcacaagaacccacatgttccttacagaaacagcaaactcacacaactccttcaggactctcttggtaaaaggatacaagtaatttagtcctgaatatttgcagctaaataaaaactcacctttttcttaacttgggattgcaaatatgttatatcaggaggacaagcaaagacattgatgtttgtccacattagtcctgaggcagatgcagttggggaaacaataagcactttgaagtttgcagagagagtagctacggttgagcttggggctgcacgagtgaacaatgatacttcagatgttaaggaactcaaagaacaggttttttttttctctttttgcattaactgaatctgatggtttcactttcttggttgatagtatttgattgtctcacacacatgggcttttgctttgtttacagattgctactcttaaagcagcactcgcgagaaaagaagcagagtcacagcagaacaacatcttgaaaactcctggtggctctgagaaacacaaagccaaaactggtgaagtagaggtgattcttcttttctcaagcaccttctctatgatttaaaatcagatctcaaagtggacattgttttctgagtgattgcagattcataacaataacatcatgacaaagaaatctgagagttgtgaagtggaggagattacagtgaactcaccaccttggccaccagtagcaagtccaggacaagcctacagagaggatgaccgaagtttcgggtccagcgagtgggttgacaaggtgatggtgaataacagacaagacgagatgagaagagtggagagtctttggggaggagccacaacagagaatggtattggtattcttgccgaagacttttacaggagagatttggcttcagacacttcaagaatattctctgaacattcttacaacatcttcatgggaaccaacaacagcacagacgatctagatgcagccacaagtgactcatctgagccagatttgctctggcaattcaaccagtccaccaagatacctacaagaagcaatattgagtcaaaactcaagaaacccgtctcaaaacctataagaagtcctcaatccaggtaagtgtcctttactcggtcaaaaactaaatgaaacagcaatatagaaaatctttaacagtttcttttgaatggttccaaaaaaaatgcaggaacaactcaaacaacacggtttcacgtcctttggcttcacagaaggtagggaatggtcctcgtggcatgaaacagttcggtcctgctgatatgaagcggaaagctactaacgccagacattgaaggccactcactcacacggatacatacatacacactcacatggcttcttattggttttgatttgtttatttttcatccattggtttttattgtttcttcttctctcgtttggttgtgcgagcttttatatacataacacagacaaagacaatagctagacaatgcaacaacagtttcttcttgttgctctctttcttgggttttgttttacttttctgttctatgtatattcttccactagctgaacataaaaaatatgaaagatttgtatgttaactatttgcttgagagtttttttagtatattctataatgcttcaaatcagagacttgttgcatttcttctaattagttacaacttttgcaatctttgctagtataaaaatattttattagaaatatgtaaaatttgggaaaagtattatttcacaacagaaaaaaaagcatagtacttttcaaatatcgaccaaccttgctgattcgttgaatccgtttctcgaatattaaattttatttttgttgtttgccctatctttctttctccctctgctcttgtgcaacttgatccgtcgtcttctctcagctctccatctccgtcttccaaggtttttgtttttgctatttacgtttacagattcgtaatcctatcctggattgagaaatgcgtagtttgatgattcttcgctcgcctctttgttgactgcagttttactgtcaggtagaagaatccatgtcgatttacgtcgcgtcgcgacggctctccggcggaacaactgtgacggcgctgcgttatgccacctctctgagatcttattcgacctcgtttagggaggagagggacaccttcgggccgattcaagttccttccgataagttcgggatctgatctttacgcaacgtcgaattttctcttatcctcgagggaaacgtttcacagtgttttatttgttgtgtgtctcagattgtggggagcccagacgcagagatcgctgcagaacttcgaaatcggtggtgagcgcgagcgaatgcctgaaccaattgtccgcgcttttggcgtcttgaagaaatgcgctgccaaggtaacattctagctccaggttttggggttaatttgcatctgaattctcatttgctttctcgtatttggttctgtgatgaattgagttaatataattttataggttaacatggaatacggtcttgatccgacgattgggaaagcaattatgcaagctgctcaggaagtagctgagggaaagctcaatgatcatttcccccttgttgtctggcaaactggtagtgggactcagagtaatatgaatgctaatgaggtaatttctttgcagtttttgagacatctgttgaggatctcattgtatatagctagctacaagagaaggctttctgtttatgttttttcattttcttttggccttgttatttgctcttcacaggtcattgctaatagagcagctgagattcttggtcgcaaacgtggtgagaaatgtgtgcacccaaatgaccatgtgaacagatcacaatcttctaacgacacttttcctaccgtaagctttcatttgcattccagctaccaatacttttacatgctttaagtttttaaagtttttctttcttatatgttggctcacttccctttcaacttataattgacggtcttttttttttttttggcttttgtataggtcatgcacattgcagctgcaaccgagattaattcgaggctcgtccctagtttatcatctttgcatagccctttggaatgtaaggtcaaactcttttcttgctccgtcctaagtgacacacttgatctagtcgctaaactgcaacacaagactctttaaaaataaaacttgctctgacctctatagtatcatggatcacttctgatattagttctgtgtggtactatttgtatgtgagagttgctttgtagatgttgcattgttgcgtttaaggaacatcttctgaccctgccactttgttatataatcctgcttttctagacctcttcacattcctattgcatttgcacttgggctttatggtctatctgctctgaatcctaattctttccaaacttaccttgtttctggcagtccttcgagttcaaagatattgtgaaaattggaagaactcacactcaagatgctacacctttgacactaggacaagaatttggtggctatgctactcaagtaagtggttttgttcagaaaactgtgtttgtctaacaaagttgaaaatcacatacaatctggaactcacctgcaggttaagtatggactaaatagagtcacctgcactcttcctcgcctctatcaggtttgggaaatgatatcttttggggatctgatttcctgtacttctccagtttatactgaggtctaacttgctggaaatgtttggccagcttgcacaaggtggaactgcggttgggacaggattaaacactaagaaagggtatatctcatttctaattttatttccataattccatcccaggttcatctctcctaaatttgatgttttattagtgggctttgtccactgtagtaacactagtaatatctgtacaggtttgatgtaaagatagctgctgcagtagctgaagaaacaaacttgccatttgtcactgcagaaaacaagtttgaagctctggtagcctccaaactacctctattatttattgacacgaaacccattcctagctctgcctctggtgccaactagacaagatgttcctaaacggtgaaatcagttgctaaattattctgctttttccaggctgcacacgatgcttgtgttgaaaccagtgggtcacttaacacaatcgccacatcgctgatgaagatcgccaatgatatacgttttcttggaaggtatggatctaatctatagggattatttttttctttctttaacatgtactatgtccttatggtttaccatgtctttatatagtggcccaagatgtggtcttggtgaacttgtactacctgaaaatgagccaggaagcagtatcatgcctgtatgaatgcaatcttcctttgctcttctgtccttttctttttcactagttttgattcaaatgaatttttatctctttctcaggggaaggtaaatcctacacagtgtgaggccttgactatggtttgtgcacaggtaagtcccatctatcaatacattcttagtacagaccaatgaatctagatgctaaggttgtattattgttccttgactgtttgggttgcaaccaataacattgcaggttatgggaaaccatgtagctgtgacagttggtgggtcaaatggtcatttcgaattgaatgtattcaagccggtgatcgcgagtgctcttttacatgtatgtcaatcattttcattctacgtctgtttccttgattttatataaaaatataccagtcttaaccatttgatctcgcctctttgacagtccgtcagattaatagcagatgcttcagcttcgttcgagaaaaactgtgtgaggggcattgaggccaacagagaaagaatctcaaagctattgcacgaggtaggcttattctcgtttgttggtctgaaaattttccatcaaacgaaaatgatatctgggaactgattattttgttccatgtatttatctgtagtctcttatgcttgtgacatcattgaatccggtaagtctctaaatattgaactccgcctttttagtcatccgttttaccattaggattactaatgaatgtactttgatgctgagttttggaatccttatcctctttaccagaaaatcgggtatgacaatgctgcagcagttgccaagaaagctcacaaagaaggatgtacattgaaggtaaacacaagaaacaatttattatagagaattgaaattgattggcaacaagagaaagacgttattgcctgcatcagcagtttgatagcaaatatatctgcaatgcagattacataaatttattgtaaacaggttctatagtatgttaaaccttgagttttaatttatcctacaggaagcggctctgaatttaggcgtgcttactgcggaagagtttgatacacttgttgttcctgagaagatgattggtccctccgattgatagttgtttttggagccaaagcttcaagtaccattattcttctgatgcttttatttaggttataataaaaatgagcaaatccagaaacaattcaaattttcttgggagggcaacattgttcttcatcttacggctaaactatgatcttctttatgtatcaattttttttttgtgttgaataagagagtgagtactcagcgagaagaatttctgagtttcgtt

SEQ ID NO: 138532 - DNA, 1058 bp, Arabidopsis thaliana landsberg
atggatggttcgggaaaacctcagtctttcaatgatccaagcaatattttgcgagctaagaaaattgatatagggcagatacggattctcgaagatgatcttaacttgattacatccgatgtggttaaatttgtatcttcattctcggatgctgagggcataaatcaagcatctggacaccgtcagcctggattggttgacgaggctttgacagaaatgagtggaagccagttgagtttctctagcgtcgtagatgaagtgtttggacttcagaaagtgacatctgctcttatgtcaattgatggacatggtttagttcccaaaaatctctctgctgttaccggccatggaaaagctccaatgttgactagctatcattcagattccttgtataatcgacagggtcccttacaatctagctcttataatatgttatcatctccccctgggaagggttcagctatgaagaagatagccatctctaactctgaccaggagttatccctgatactgtctccatccctctctactgggaatggagtctctgagtcaggctctagactggtcactgaatcctcattgtcacctcttcccctatgtaagaacatttttccatagcctttttttttaccttcatagaactttctcaatattagaattcaaaaatttctgttatttgcagctcaaacagctgatcttgcaacatcatctgctggtcctttgttaaggaaagatcagaagccccggaaacgttcagcttcagatttgctaagattgatcccatccctccaggtagtggaaggtgttgctagtcccaataagagaagaaaaacctctgaactggtacagagtgaattagtgaagagttggagccctgcatcacagaccttatccactgccgtgtcaacatcaacaaaaactataggatgcagctatgggaatctcatagctgaagcaaacaaggggaatgcaccttcaagcgtttttgtttatgctcttctccatgtggtcaggcattcttcgttgtccataaagcatgccaaactaactagtcagat

SEQ ID NO: 138533 - DNA, 334 bp, Arabidopsis thaliana landsberg
caagaagaatctaatgttggcttgcctggaggaaacggccagcttttaactctcggggtgggtctgttggttactgcattggctggaacatatgtgacaagccttgcaaaggtaaactcatacgtgtttacttcttttctttctctgttctgcgttatatttgcctcccacttctgatatcaaaccaactggttcaaagcttcgtagcatataagctcagaaaagtcccacatttggttgaaaattaaaagatgcaaagtgaaatgaatctgtctcatgtatatcttatacttgccgagtgttgcaggatgctataaaggatattgatgatgat

SEQ ID NO: 138534 - DNA, 3476 bp, Arabidopsis thaliana landsberg
atggatatacaggtattgaagaaatctaaggaggaagaaaaggttgatagtactactgaattagagatagaaactaagcgcctagaggtgcatgacgtggctactgagatgtccgacaaaactgttatatcatcagctgttgttactcagtttactggggaaacaagtaatgataaggaaactgttatggatgatgtcaaagaagatgttgacaaggattcagaagctggtaaatcactggacatacatgtaccagaggctacagaagaagtagacacagatgttaattacggtgttgggatagagaaagaaggcgatggggtgggtggtgcggaagaagcagggcagacagttgatttggaggaaattcgagaagaaaaccaagaactgtctaaggaactggctcaagtagatgaaaccaagatttctgaaatgtcggaagtaacggagacaatgatcaaagatgaggatcaggagaaagatgacaatatgactgatttggcggaggatgtggaaaaccatagagattcctcagtagctgatattgaggagggaagggaagatcatgaagatatgggagtgacagagacacagaaggagactgttttgggtaaagtagacagaacaaaaattgctgaagtgtcagaagaaacagacacaaggattgaagatgaggatcaggagaaagatgatgagatgactgatgttgcggaagatgtgaaaacgcatggagactcctcagtagctgatattgaagagggaagggaaagtcaagaagagatgacagagacacaggaggacagtgttatggctgatgaagagcctgaggaagttgaggaagaaaataagagtgctggaggaaagagaaaacgggggagaaatacaaagacagtcaaagggacaggaaagaagaaagaggaagatgtttgttttatgtgctttgattgggggtgatcatgtcctttgtgaccgcaggtgaactttcatttgtagtttctgtgactttgctgttggtccttctccttcttgcttatggtcccttccctttaacatatgataaattttattaatgtatgatcctgttggcttgcaggggatgcacaaaagcgtaccacccttcctgtgtagatcgagatgaggctttcttccagacaaagggtaaatggaactgtggtaagttttttctgttattctctcagtaggtgtctgcttaaattaaatcagtgaactatagtttggaaaaacatgatacatcatctgctaagcacatattttctttcactagtgtatgtagtggtgaatattgtttactataggtatttagagtgtcttttaactgtacttccttagaaaatcatgacagcatatgtttttttatctgacttccggattatgacatttataacaattctttgtgatttaagcttcttctttcttcttttgtttgagttcctggcttgcagtttgtctttttaagtatttgctctcaaattattagtttgaacctttagttgaaagttatgtcaaaggcatttttctattgcttttcacatcatctttgattttcgtgttgttccttattgattcttactttagtctcaggcctgttgtaccactgtccaatgctacacaggcagtgacagatgttggattgtttgtgaaatggataagtctgattatcatcaaggctatgctcacccttttttgtgtacagtcatgactctttgagattccacaagaacttgtcaatggtagcttttagttgattctccgttgttcagtgtaaataccaaatagcagcagtgggatctgctatgtcgtttatttaaataaactataaaagtaaatacactggcattgatacttttaaatactttggtagttttctttccttgactatgggttggcgtggtgacatcatccagttttatcataccagaaatctacaccatttaaacttggtaacataacatattgatattaatgagaaagattaatttttcacgatcttctaggcaccaattaatggttatctctaagctattttcatgctgcaccgaattgtaaatgattcttgcatttatagcaaatggatcagattttttttggtacagatgttgttcaattccacaaactattgagatgcaggagcccaaaaaacactgtacagtctcttagtatagtactgtccctcatattttagaatacatgttttaaacttttaaaatagtacactgtttgagggattatttcccctaatttctttaaactagaattaattggcattctgcttcggttatgctgtatttttaagtttctctctgtgcatggtcatacttttgtttggttacctctctctgtgtatgtatgtattccgtgagctttcatcatttccatgtctttctaatagaacctaacataatgcttcatttttatgagtaggatggcacctatgtagcaaatgtgagaaaactgcaacgtacttgtgttatacatgtatgttttcattatgcaagggatgtgccaaggatgctgtcttcttttgcatcagaggtaataagggtttgtgtgagacatgcatggagacagtcaagttgatagaaagaaaacagcaggaaaaggagccggtatgcctgacatactcttgtagtttttttttgcttaccgaaatgttttcttttcttgtaacaatgagctgataaactgctcatgttgcagtagctcatgatcttatatttcctgtttctctcattaaacatgttgtgataagtctgatgatcaatcttctgttgattctctttcaacctagttgatgcatgataaccttacatttctttcttttactatgtaatgtcactaataaattatgagtttattttcacttctgccttagtttccactttgttatttgaatgacagttttttatttttctgatctctttcttacgtcgttttgtcttttacaggcgcagttggattttaatgacaagaccagctgggaatatctctttaaggattactggattgatttgaaaacccagctatctttaagtccagaggaacttgatcaggctaagaggccactgaaaggacatgagaccaatgctagcaaacagggaacagccagtgagactgactatgttactgatggaggatcagattcagatagttctccaaaaaagaggaagaccaggagtcgatcaaagtctggttctgctgagaaaatcctatcatcaggcgataagaatttgtcagatgaaactatggagtgggcttccaaggaacttttggatctggtcgtgcacatgagacgtggtgacagatctttcttacctatgttagaagtacagactctcctactggcttatataaaaagatacaatcttcgcgatccccgtcgtaaaagccaggttatctgcgactccaggcttcagaatctgtcggcaaatcacatgttggacactttgagatgttaa

SEQ ID NO: 138535 - DNA, 2685 bp, Arabidopsis thaliana landsberg
  unsure (1)..(2685): unsure at all n locations
aggttctaaatttgattccagaagagggtaaaggggagacttttgaagatgctcttgcacgtgtccgccgatgcattggaggtggaggtggagatgataatgccgacagtgatagtgacattgaagttgttgctgatttcttcggtgtcaatcttcggtgtcctgtaagttactaatagctcgtagcccagtttttatacttatcctcttcctagggctatcttgcagactgaattttttttattgtcttttctgtttgcgtcattagatgagcggttctaggataaaagttgctgggagatttttaccctgtgtgcacatgggctgttttgaccttgatgtgtttgtggagttgaatcaacgttccagaaaggtaggtctactatccttgtctagatattgggttatgtctctttttctgactttagttgttctggggtttgttaacatgcagtggcagtgccctatttgtctgaagaactactcagtggagcatgtaatcgtcgatccttattttaaccgtatcacgtctaaggtatgtattcttatgggaattcaagaattcttaaaatctttgtatctacgcttttattcagtagttgtcttcctgcacgacagatgaagcattgtgatgaagaggtgactgaaattgaagtgaaacctgatggttcttggcgtgtaaagttcaaaagagagagtgagcgaagggaactgggggaactctcacagtggcatgcacctgatggtagcctttgcccctctgctgttgatattaaacggaagatggaaatgttaccggttaagcaagaaggttactcagatggtccagccccgctaaaacttggaataaggaagaatcgtaatggcatttgggaagttagcaaacctaatacaaatggattatcttccagtaataggcaagaaaaggttgggtatcaggagaagaatattataccaatgagtagtagtgctactggaagtggtagggatggtgatgatgcaagcgtaaaccaggatgctattggaacttttgactttgtagccaacggcatggaacttgattccatttccatgaatgttgattcaggttataactttcctgacagaaaccaatctggcgagggtggaaataatgaagtcatcgttctgagtgattctgatgacgagaatgatttagtgatcactccagggcctgcatacagtggttgtcaaacagatggtggacttacttttccactgaaccctcctggaataattaactcatataatgaggacccacacagcatagctgggggaagttcaggcttaggtcttttcaatgatgatgatgaatttgatacgcccctttggtcatttccttctgaaactccagaagcccctgggttccaactatttagatctgatgctgacgtttcaggaggtttagttggtttgcatcatcatagtccactaaactgttctcctgaaataaatggaggttataccatggctcctgagacatcaatggcatctgttcctgtggttcctggctctactggccgatctgaagcaaacgatggcctagttgacaatcctcttgcatttggtagagacgatccctcacttcaaatatttttgccaacaaaaccagatgcttcagctcagtcgggttttaaaaaccaagctgatatgtcaaatggtctccgtagtgaagactggatctcgcttaggctaggcgatagcgcctctgggaatcatggagatcctgcaactacaaacgggattaactcaagccatcagatgtctacgagggaaggttctatggatactacaacagagactggtttgttccctgtctgagactaatgctttcctgaaaacatcaaagggacctaaaaatgtggaccatgttcttgatgttgcattacctttttcatcactttactaagctgctagctaggtcttatgaacaactgaagaagaaatatctgttttagtttctatgtggcgtattttgtctttgaatatgctactttatatatgtccatagtccatgtggtatacttactgactattactgcgtatttgcagcgtcgttgcttctgggtatgaatgacagtagacaagacaaggcaaagaagcaaagatcagataatccattttcatttcctcgccagaagcgttctgtaagacctcggatgtacctctccattgactcggattctgagtaatattcttcctgatttgtctgtactgatgtgtctctcttgggatgattcggtgttccttttgattcttaacgctatgcacagancatgagcaggatcatcagacaagacaccggagtttaaacaagatttgcataattctctgtgcaggcaagaattgaaccggtattgatattttcacttgtatgatgttgttgactctctcttcaatatcggttcagaatcttggccttgtctgctacactgcaggatgtattttgcaaagcgaagcactggctgatttagtttctctgatagaaaagaaaagtgggcacagtggttccgatttaattagtagtttgtatactcgaaataggttttttttgtgtggacgatgataaaattacttcgaagccaggagctatagagagatatagcaatgtaaattatgggctccaaattttatttattaattagaaaaattcagctcttctcctcc

SEQ ID NO: 138536 - DNA, 452 bp, Arabidopsis thaliana landsberg
atgtatggtcttgaagtagctttacagaacaatctcagctctgtggttgctgtaaccgactccgagttgctctataatcaggtaaagtctctcttctttagcttgttgaagagacttgctttcatatggttttgtatctctttgtaggtttgagctcacgttttatatgaattgactttgcagataactcgtgaggagcagctcgagatccctcttttagtagctctgagagaaagggtattggagaaaacaagtaaccttaatgggtttgttctaaagcttgctcctttctgtgatcttgatgaagctctaagcttggctcaagtagcggtaggaatcgtgtcttctaatcttgatggggataaaccgatcgagaactgctcgatctgctgtgaagaccgtcagtctgagatgatgctatcattgaaatgcactcacaaattctgttcgca

SEQ ID NO: 138537 - DNA, 1642 bp, Arabidopsis thaliana landsberg
gacccacaattatctcagttttgacctctctaaagattaagcaaaataacacttcgttcgttcgtactctatgaactcgctgctgacctcctccacatccttagccctgccgtgagcgataccgatcgtcttcgtcaatttcttaagttctttttgttctccaattcatggtggtaccaacgatttagctactgaagtttagaaagcccccaatttttgttttcgttttagcgtttcccgatctgtgaattgggtatcagctccaaaggtttaatgcccaataaagttatcgaggacgagagtttaggggtcttacagtgcgagtgaatttagattaaaaggtacaaactttaccttttggtcggaactgggaagagggggaatcggacatgattcagttactattcctggttctgttcgtagaaggtgcgattgcgttcttactactggtaaagattggtcctttaagggagcttgtaatgaagagcttagaccagcttaaattggggaaacgtcctgctactctgaaaaccattgctggaaccatgtctgtgatcctcctgtcgaatctcatgaatatcattaagatccagaacaagggtgccaaacttgggacaatgtctccaatggatcaagtcctctggagaacacacttgctcgaggcttctcttatgggtcagtttctcttttcctttgtttgaactttgaatcatttctcagtgttgatatgttttagattgaaatttggggcaaatttagttatcttcctcccctgtacttcagctcttgctcctatcttagttgttattagcaatggcttgtgaaagagccatctttcatgttttcttgtctgctgatttggcttgaatttcaaggctgattcaacatctactgggttatataactgaaggatgatatctatataagcaaaacaaaagctttcactgcttattttagtgagtgggaaaactaagaacactttataggtatctttcctacatcagtatttaactgatttgtgatatagatatctttggcaaggaggatctctatgtttgtttccactccgttgcttccatagttgtgcttggtactgcttatgttcactaaatttgggaggatttgaaaaagtggtgaaatttgttgtgatgattggaatcacgttttgagctcatatgttcttgcaggtgttgtgctcttttttggcttcattattgaccggacacatcattacctcgaaaagctaatcactttaagaagcaatgtcgggtcatcgaaaggagaactagaagaacttaggaaggagagaatcgaactgaaggagaaagaggagaaagcatccaaggaaatcaagcagttgcaagaaaaattgtcatctattacagagagagtaaagaaagcagagaccgagtcgaaagagaaagagaagaaactcgaaaccgctgaaacacatgtcacagcgctacagaaacagtctgcagagctgcttctagagtatgatagattgctagaagataaccaacatctccaaagccaaatcttggggaaaaccaagagctgatgttaagattgtctggtgttatttaacaatgagagagtttatagagtattgtagttgcaggaattcttgcaacatttttgt

SEQ ID NO: 138538 - DNA, 873 bp, Arabidopsis thaliana landsberg
gttcataatattgcgcggagcttccgagacagatggatacctaagcattttagaaaaccttggcgcatcaacagggaggagagatcggagtctatgaggtcacctataaacagaaggttcagagcatcacaagaacctcgatatgatcatcagtccccaagacctgcagaaccagctgcgtctgtcacatcatcaaaggctgcaactcctgaaacagcatctgtatctgagggatattcagaacctaattccggtcttcctgagacaaatggacgcaagcgcaaaagcagatgggaccagccgtctaagacaaaagaacaaagaatcatgactatcttgtcccaacaaacagatgaaactaatggaaatcaggatgtccaagatgaccttccacccgggttttcatcaccctgcacagatgtgcctgatgcaattacggcgcagccgcaacaaaagttcctttctcgcttaccagtttcctatgggattccacttagcattgttcatcaatttggttcacctggcaaagaggacccgaccacctggtctgttgctcctggcatgccgttctatccatttccacctctaccgccagtgtctcatggtgagttttttgctaagagaaacgtaagagcctgttcctcgtccatgggaaacctgacttactccaatgagatcttaccagctacacctgtgactgactcgaccgctccaacccgtaagagagagttgttttcatctgatatagggacaacttactttcggcaacagaaacagagtgttcctccatggttgcggaacaatgggggggagaaaacagcaaacagccctatacctggaaatctaactttagagaagaagctcaacagttaa

SEQ ID NO: 138539 - DNA, 587 bp, Arabidopsis thaliana landsberg
tttagcaaaaaatggaagccttgtggaagttggaggagaaactgaagctaactacgaaagaagccgttgtgatcttggtcggaacagcggctgcggtaacgctactctgcatagccgcagcgtttctcaaccgcaattctcgagggaagcaagtagcagacgcagagtgggcgtctgaaacagcgtttgggtcaaggactatggaggaaaagaggaaatgtaagtggagcaaagtgaaaagaacgttgatgggttctttttgttggagctctgctgcgaagtggatggagatggaaacaaggcggcagccaccattgcttgcggttaaagaaaggagtcttaatgcggttgatccggtttggcagcgaccaattctgatgggtgagaaatgtgaattgcctcggtttagcggccttatattgtatgatgaatgtggccatccgcgtcatcatcctcagcttcaagaaaaagtgagtgttaatttactcctgacctaaatttaacaacaaaagtgttttttggttttggtcagagatggatataagttcttgtcattgctgtttttgtaggtaaaacagagttctgtg

SEQ ID NO: 138540 - DNA, 443 bp, Arabidopsis thaliana landsberg
atggacagtgggaagatcgtaccgctctcgggaaaagttttcgcagcagcaacgcagcgtaaagacacatggaatgggattcaacaagagatttcaggaagattcaggaggaagcgtgtgtatgaagtaacagcggtagttcgaatatttggcaacaatgtcacaagtgcaacagtacaagcgactctctgggtcttaaacgcaaacaaacgtgaacaatacatagtcattgccaagtaggtttcaccttttttcatcttctccattacataagtatcttgatataaattcattatactgatagagtttggtatgtcaatgaatcatattagtgttcaagcaacagataagaactgggtggagttgaagggtaaatttgtaatccatggttcgccatcgagagtaatactataccttgaaggtccacctccacgagctgacat

SEQ ID NO: 138541 - DNA, 3222 bp, Arabidopsis thaliana landsberg
atggataagaaacaagaccaaagtgaagaaaacgatctgttttcgaatattcctcttgagctgatgatagagattctcctgaaattgccggccaaatccatagccaatctcatcttcgtttcgaaacactggtcatcgatcatcctcgacaaagatttcacggagttgtacctgactcgatcttccactctgcctcgtcttctttttcaagtctcagtctcccgtctcaagatgcagttcttgcactccagctccttggagggcccgtcttgtgatcatcacagggtagctgttactttgaatcatgatctagagtatcggttttctccacccgtccggggcttgatctgctgtctaaatggtactaaagtgttgattgggaatcctagtactggtgaattcgtaactttgcctaaactcaaaactaagaaaaggttcatagatagagtatcattttttggatatgatcccgttaacgatctatacaaagtgttgtgcataacgcaactatatgttcatttcatagatgatattagaattattcggacagaggagcatcaagttttcactctaggagctaaacaagaatggagaatgattgaatgtaagcatcaccattatctagctgatcctgaaaagaaaggaatatgtatggatggggttgtgtattatgtagctaggatcaatcataaactattatctctgataagcttcaatctgagatctgaagaattcaatgttattaagttccctaaggatgtcaaacatatatggtagtaatctggtgaactacaatggaaagatagacacttgacttgtgggttatgaaggatgatgctagtaaacaagaatggtcaaaagcttctctattggttccttgttggacagatttagttggggatcaaagtttcaggttcaagggtacacttagtaccggggagcttacatttgcaccgtgctttattaccgatccgttcttttttatttgttacgatctcaaggaaaaaagtgccagaaaagttgtgattgaaggacttggggatgactatgttaatgtctctttggatcatgtagagagtcctatgtttctaccaaaggtttgtttatccgatgatgagtgatgactagttcttttttatgttcaagactcatgtaagaacttggaattggatagtagttgtctaagattattccttattttgtctaatggcattttatgctcatgactttgattcgggtttggtttttgtgtggagctttacaagcttcatttttttcatctggtttatattttgagagaacaaaaaagtttaaccaatcatatgaacaaaactgaatctcaatttcgatttgatactttaatgattggttatatacttatgtttgtttagtccacaattttggatggataagtttttaacaacataattttattattttgtccaaaattggacttttggtaaagaaccaggatattttgtgcaatttactagaaatacaaaactaaataacaatgtcacaagcataggtgacgtgtccaactgtaattggataagctgacgaaggagcagagcaaaatttcacctccaaagaaaaaaattatcagactttcagaagaagaaaaaacgaaggagaagaagaacaatttcgcggattcaagagacagagagcttcttctgcgtaaagtttgatcctttgaaaatggcggaagaaccagagaaggtgtcttcttcagtattacatcaaccttctggtgataagaaacctgaagatgttgggatcaaacctcaggtctgtgacttgctcaatttttcccctttcgctggatcaattcaagggtttgcgaatttgatatctgggtgtttgaattaacaggatccagcgtcttcttctgggtttggagcttatcctaatggtgattctccaatgtacccggttttttatccgggtcttgtttccggatcgaatcctgtacagtacgaggaacaaatgaaccgtggagctgggatctatgcggttcctgttcatcaatttggaggacatgtcgctggtcttccctcaaattatcttatccctctcacttacaatgttccaacgtaagtaaataactccttcgaaattcccatggatttgatggattagcttgtctcagtgtaacactagagaagaatcatagctataggtaactggtttcgttagaagaatcatagttgtgtcaacaagttggtaccttttgctcatttgcttgggagttgaatccagaccattgttagaaagtataggcttgattttgaagcttttggggttgatggttttatgttttgtttaggactagaacaaataatgagggtgagcctgggggagagaatcaagcgcaagctgaggcagggtcagcagcagcagcaacctgcaaatcaaaggcatgttgtggaaaggagatttcagattgcgtttcagcttgatttgttcctcatactcaagcttgctgctgttatctttttgttcaaccaagatggatcaagacaaaggcttgctgttcttgtgattttcgctaccataatttacttgtaagtctcgagaatcttgtgtaatttcaatcttatgtcttcttatggtgttatggttttcactgtatataacgatgtctcgagtgcgtgattcaaaattaggtcccattaatccctcatagcaatctttttatgaaaaagtattgatatagagtttgatctctgtttgatgttgcaaacttgacagataccatactggagctcttgcaccgtttgtgcgatggctctcacaaggtatgcatagagcagcagtaccacctgctcgagcacatagacctgctgttagagctgataatgatcccgcagctgcagttccactaaacgaaaatgctgttctcggtatattactttgcaatatctctttcccatggtaattactgaagccatcacaacaacaacttatgcagaaggataatctttctattttttgagcagagggacaagagaatgaagctgataacggtaaccgagcaagagcaaatgcaaatgaaaatgaaaacgttgacgcaggaaaccaagggaatcaatggtgggggatagtgaaagagattcagatgatagtgttcggcttcataacttcattactccctggttttcacaacatagagtagaagtagactcttttctgcatactttcatcttctgcaactcaaaa

SEQ ID NO: 138542 - DNA, 2586 bp, Arabidopsis thaliana landsberg
atggagaaaccagtgtttgcaccatggcgttccgaccaagttttccggccaccggagacaccattagagccgatggagtttctctctcgctcctggagcgtatcagctcacgaagtctccaaagctctcactccttctcagcaactcctctcaaaagcctcaatcgaaaacaccaccgtcattctcgaagaacccatcgccgccggcgagaccgaaacggaggacaacagcttcgtctccggaaaccctttctccttcgcttgctcagaaacttctcagatggtcatggatcgtatcttatctcagtctgtaagtgtttcataacgctttcctaaaaaacagagcatttgcagacaaaaaaattctgttctgttctgtctcaattctcttaatttcgtcaatttgattctatgtttactcaattctatcgatgggtcattacaatttcatgagttaagcacgattttggtctaaagatcacgttttttttttttatctttcgcaattctcatgaatcatgaattcttcagtgggttcaacgaagttgaatttttcatgcgcaatgatttgtaatcatatatatcatccttaataaaatcgatatgattttctaaaacactcacctttcatgggaccctataacataatcacaaaaaaagtttggagttttcttcaagtcaaaaagctaacaatttcactgttctttctttgtcttctttcttaattcttttgccataactttaaattatgttattgcagcaggaagtgtcgccacgaacatctggtcggctttctcatagcagcggtcctctcaatggttctttaaccgacagtcctccgatttcgccgcatcaagtcgacgacattaaggtctaaaacattctcataatgtttggttctttaatctcgcttgctaatgtgtgactctgtgtttaattagtatagtaatatttttgatatcttcgatgaagattcatggattgttggctgttgcttattaaattattgaagtgtattttaatataaagcattaatctttactcgatttggtttcttcttttgttttatccgttttgttgtgaattaacacagaatctgattttgttgtgttttatttgctctatgcagcaattttgccgatcaaacaacaatttcaactctcaataccgttcaacgggaacaactccgggacctatcactgcaacaactacacagtccaagacagttggacggtggttgaaagacaggagggagaaaaagaaggaagagatgagagcacacaatgctcagatacatgctgctgtatcagtagctggtgtggcagccgcggtggctgctatcgcggctgcaactgctgcttcgtcgagtgctggaaaagatgagaatatggctaagacggatatggctgtggcttctgctgcaacacttgtggctgctcaatgtgtggaagctgctgaagttatgggagctgagagggatcatttagcttccgttgttagttctgctgttaatgttcgatccgcgggagatatcataacattaaccgctggagcagccacaggttcttagagtttgttttagaaattgatactatgtttctagtgaaaacatgtttttgcttgagtgccatttttgttttgcttctggtgtagcgttaagaggagtggctacattgaaggctagagctatgaaggaggtgtggaacattgcatcagttattccaatggataaaggaatcaatcccggaggttgcagcaatgttaatggtaacgggagctatgtcagctcaagcagcagtcatagtggcgaatttctagttgaggataatttcttgggacattgcaatagagaatggcttgctcgaggtggccaacttcttaaacgcacccgcaaaggttaaagcgctaatctattaacagtgtttctcttgttatggttttggatccattttcttaactaatgttgtggttttggtggcaggtgatcttcattggaaaatagtttcagtttacataaacaggctaaatcaagtaagattccttcttgagcattgatattagtgatctgatgaactttggagagaggaaagaaagattaaagtgagatacattattagtgaatcagtggaaacttttttaagtcacctacatgagtgtgattttgttaaaagaatagaaaaaaagaacatgaaaaagtgatttcagagaccaataaaagaagagaaagcaattttgtgaatgatgtatatatctagtaatatgctttagtctctgcttaaaaccatttcttggcatcattcttatgattttgatttggttattgaacatgaaggttatattgaagatgaagagcaggcatgtaggagggaccttcacgaagaagaacaaaagtaagagaaattcttacccttattatgcatacacctagtagaatcttaatatattctcatagtatactaatgtgacataactaaaggtgaaagctttaactttgtcactatctactaatactatcaataatatgagaattcaaaactttgatgtgggtctactttgaatatggggatttgagaagaaaagcaaaagg

SEQ ID NO: 138543 - DNA, 3518 bp, Arabidopsis thaliana landsberg
ctctctctctctctcacttttctgaaaaagttgtacgtccaaaatctccaaacccttttttaagaacaaatctcaatccatggcaatcatcgatcaaaattgagaatcacacaagcttcacaatgtcatcatcatcatcaacgacgacgaacacaacaacagaatcagattcatcatctctacctactcacatcggtagatcaaattccgacggaatcatcgacactacaccatttcttcctcccaccgttacaagaaccataagcgtagatgaagaatccaatccaattcatcgatccgctagacgacaaggtctaagagaagcagcgaggttcctccgtcacgctggtagccggagaatgatgcgtgaaccatcgatgctcgttagagaaaccgctgctgagcaattagaagagagacaaagtgattgggcgtattctaaacctgtggtgtttcttgacattttgtggaatcttgcttttgttgccatcggtgttgctgttctgatacttagccgtgacgagaagcctaatatgccgttgagagtttgggttgttggttatgggattcaatgttggttacatatggcttgtgtttgtgttgagtataggcggaggagacgacgacgtcacccggaggatggtggtggttctgggttgacgaattcttcgtcgcagcaatatgtttcgttagcgcaattggaggatagaggagagactaggtacagtatctctgattgatctggacttggagtttctaatttcgaattgttcactgtatatacattgaaatgtggaatctaggtttttaggttaatgttagttgatggtattgtatctgtgaatcaatgtagctttttgtgtgacctatttttcatattggtgaatattgatatcaagcttgatgtgaagcaattggtcttgttgtggagtcttaagagatagtttaggctcttttggtccttttttattgtttgtctgagtttcttttgttttcgtatgattcttgttgatccacattgttttgatggatcagtaatcctgctaagcatctggaatctgccaatacgatgttttcttttatatggtggatcattggattctactgggtatctgctggtggccaagagttggcacaagaatcccctcggatttactggtttgttatatgcctccatcttcaatgttaacctattcaaccacttccactactgaatgtctttacttatttcaggctgtctattgtctttcttggtttcgatgtgttctttgttgtcttctgtgttgcgttggcctgcgttattggaattgctgtttgctgttgcctgccatgcatcattgcagttttgtacgctgttgcagatcaggtacttctcataaccaattccatcttatatccaaagttgccacattgtgctatttgttttaagtttttaacacaacatgataaaaatgcaggaaggggcttcaaaagaagacattgagcagctcaccaaattcaagtttcgcaaactaggtgatgccaacaaacacactaatgatgaagcccaaggaactaccgagggaataatgactgagtgtggtacagattcacccattgaacatactcttttgcaagaagatgcagtaagtatacactataacacaccaatctctcctccttgacgaataacccctagatagataattatgcttcttggttcttatgattctgcattacaggaatgttgcatctgtctctctgcatatgaagacggaacagagctaagggaactaccttgtggacaccatttccactgttcatgcgtagacaaatggctatacatcaacgcgacgtgtccactctgcaaatacaacatcctcaagagtagcaacttggatcgacaggaagtctagaggaaacagctttacgtgttcatgacccacgacatttgatcaggagactttgggttaaggtaaaaaacaagactggtttgtttttttagatacgatgcattgtttgtgaaatgataatgatatctatacgaaattattacacttttgtttgtttttgatttttggtttggaaactaatcaggtctgtacatctatctgtatctatcttcttttacttgaaaccaatgttttgtagtttgtattacctctttctttctcagtcgacctcgaattgttagagatttccatcatcgtagatctttagtcgtgtctcaatgacgattttgattgttactttaaagtttttccaatttgttctttggtctcttgcttttaagtatagataaatgatataatttctagctcaaaaacaccatcactattaaaattgaaagaaaaaaatacataccaaaccaaatcagattagacccttttttttagtgcgtatactttgacaaaatttgaacaatacaaatcaaactcgagtcagaaaagattcaaacaaatgaatcaaattttttgagtcggaacctgaagtattttagtccgtttgtgataaagaaaaccgagaatgtaccggtttatcttcagacccggttgtttgtccggtttggtaaaattagaacctaacctttttatccagaactggagactttggaagaactatagaagtgttgttctcttcgtatcgtcctcaatcctcatggagactattatcaggtgcttttctttttcatttctcctcatctatggctttgatacgaccatttagtttcttattctcctattgcgaaagctactatctttcacatccctaggaatcggacactatcttatctctagtgttgatatctgtatgttagccatttagattgcctcagagttttttggtttcaccctgagttagaaattgtgagtctcggcctgatttattagaatgcttttggccggactagagtggggttttgttgtgtaaactgccacatgctgctaaattggcttgttaggtgatgatggttttcatgcccgccagttgttcgacgaattgcctcattaattttcctcggcttgtttcttaatattttttggcgttttataaatctgattcctttaagatatatctcattcgatattagtattactagatttaagaaaatcagtagtttgtctactaaatcaacaaagttgatgtctttttatttcagccttgtcggtgtatctgcgaatagtatgttcttattgctgtctaatttggattccatgtgctttgcaggctgttttgagcaaacgctgtgataaagaggctttctttcttgctagcaagtacacacgagtgacatggcggcatcaacttcaacccgattccttgttctgctcaaagatttttctgccttcagaaagatatcatggacttgtgctgcaactaattttcaccgccaatctcgttttttatgccatgttgcgaaagaagacgggtctcttactcttgcaagccttgatttggggaacaaaccacggaaatttgggaagggtaaggcgatgaagcttgagggaagttttgttactgaaatgggtcaaggtaag

SEQ ID NO: 138544 - DNA, 362 bp, Arabidopsis thaliana landsberg
atgagctctaacaacaaaactgatgattccgacgaccgttctttctggcaaaactcgacttcttacgatgccagcagcaagattttcctcgtcaccaccgtttccttctctattattatcatcatcgtgttcgtttattatctctacgcaaaattcgttctccaccgtagatcagccttccaagacctctccttctctgtcgtttctcagccgccaaaacgtggcctcgattctctagtcatcgcttctctcccaacgttcgtggttggaatcaagaatgacgtggcgggtacggaatgtgcggtttgtctaagcttattggaggagaaagataatgcaaggatgttaccgaactgcaaaca

SEQ ID NO: 138545 - DNA, 2994 bp, Arabidopsis thaliana landsberg
cataatgagatccttctcacttcccactaatatatatatacacacacacatatactaacacattacacacacttagagaaagcagagcagagcatagagaaaaacataacaatggaggttgagaagacagagaagaacattgcagaggatgatgagtctaagatcatctacagaggatggaaagtcatgcccttcatcattggtatttattcatccatattctttcttatattttttctttttttttttttttttggataaaaacttttgtttgcttacaagtataaagtcctcatgttttttcataagttccttgttcgtttcaaaattatgatttttgtttacttacactcataatcttgaaacgaacaaaaaactgatggaaaaacatgaggactttatacttgtaaataaataaaaatatttattagaaataaataaacaaaaatataagaatatttattaatttcgtgctcttttagtatgtttttattattatttatgaaacatttgattcattgacaaaaaaaacatttgattcataaaattaaaacataggactttttttatggatctgtttctttcatgttttttatttttatttattataacatttttggtcttgaaacgaacaagaaactgatagagaaaacagaggattttatgaacagagtaacttaatgctctgtttcttaatttggtaggaaatgagacatttgaaaaattggggattgttggaagttcatcgaatctggttatatacttaacgacggttttcaacatgaagagcatcacggctgcgaaagtcgtcaacatctacggtggcacaagcaactttggcaccatcgtcgctgctttcctctgtgactcctactttggccgctacaagaccctatctttcgccatgatcgcttgctttctcgtaaattctaaaacctcttcatcacaattttcagtttgaaaaaaaactagctgattatgtctgaaagtttcaatcgtttgttgtgtttgatgcaaagggttcggtggcaatggatctaacggctgtgattcatcccctgcatccagctcaatgcgctaaggaaataggaagcgtgtgcaatgggccatccatcggacaaatcatgtttctcgccggagcaatggttttgctggtgatcggagccggtgggattaggccatgcaatcttccatttggtgctgatcagttcgatccgaagacaaaagaagggaaacgagggattgagagtttcttcaattggtatttcttcaccttcacgtttgctcagatggtgtcgttaaccctcatcgtctatgttcagtcaaacgtgagctggagcattggtttagccatcccagctattctaatgctacttggttgcatcatattcttcgctggttctaagctctatgtcaaggttaaagctagtggcagtcccattcacagcataactcgtgtcattgttgtcgcgatcaagaagaggcggttaaagcccgttgggcctaacgagctttacaactacatcgccagtgatttcaagaactcgaaattgggccatacagagcagttcaggtactaataacctcactacttctcttagtttcttgtggaacaacttagaaacattttagggttttcttaatttgcaggtttcttgacaaatcggcaatccaaacacaagacgacaagctgaacaaagatgggtcgccggtggatgcatggaaactctgcagtatgcaacaagtggaggaagttaaatgcgtgatccgggtgcttccggtttggctctcggccgccttattctacctagcttacattcaacaaacaacctacacaatctttcagtctcttcaatccgatagacgccttggtccaggaagtttccagatcccggccggttcttataccgtcttcttaatgcttggaatgacgatattcatacctatctatgaccgcgtccttgtacctttccttagaaagtatacaggcagagacggcggtatcacacaactgcagagagttggagcaggactgtttctatgcatcacaagtatgatggtgtctgcaattgtagaacaatacagaagaaaggtagctctcacaaaaccgacgctagggttggccccaagaaaaggcgcaatctcttcgatgtccggtatgtggttgattcctcagctagtgctaatgggtatcgcggacgccctcgctggagttggacaaatggagttttactacaaacagtttccagagaacatgcgaagttttgctggttctctgtattattgtggaatcggattggcgagttacctcagcacctttttgttatcggcggtacacgataccacagagggattttcaggaggaagttggcttccggaagattaaacaagggaagattggagtatttctacttcttggttgctggtatgatgactctaaacttggcctatttcttgttggtctcacattggtaccgttacaaagatgttgtggccaaggacaaggacatggacaagacttctgctgagtttgataaggtgtcagtgtaataaagatctttcctttgactctttggtttaggggctttgagacaataaaaatacaacctttgaacaaaacattacatacaaaatacaatgtaaaatgtttatatatgtaaagaaccatagcttccgtaaaattcccatccctcaaagaacaagcccggaaaattcccaatttatgaaatggggaaaaaacggagcattgctctgtttttggtgataacgaataaatttaaacaggaacagtttgtccagtgagagcgtcatggagatgcaatgacccatctttcatcaagttaatgcttaagcttttgaacctctctcttgaatattgtctcgatgcctttctccagtcagttccagctttcatcatcgtcacaaactcatcatagtttatacgtccgtcctgtaaaaagcaaacaagcccaacaatccgactcagaagcagag

SEQ ID NO: 138546 - DNA, 1776 bp, Arabidopsis thaliana landsberg
cccgtgtctagggttttctttcgtagctgattgggggctgcaagagtttcgccgaggacgattgagaattttgattttcgaaaaatggattctgtggaggaagaaggtgttgttagggttgaagaagagaacggacgcggtggtctccgtaggcatcggagggtttctacgaagctggcgaattacgtagatcctccgactgacgacgaagaagatggaggacccaagcgaaagggcaaaaggggtggaaatagggctccgaaaaagacaccgaagaaagacgaggagatgcaaaagaacgaaattgatgaagcaaaccgagtcactggtctggtgaaggaaaaaagagccgcgactaagattctgaatcgcaaagactccattattgaagtaggagaagcttctggaagcatgcccaaggaagtaaagggaattaggattgggaaaaggaagggagaaatcgatggtgagattccaactaagccgggcaagaagccaaagactacagtagacccgagaatcattggttacagaccggttagtgatttctctgtaaaatttgtactcttttcataccttacatgacgaccaatttattaattttgggatatattatataggacaatatgtgccatcaatgtcaaaagagcgataggattgttgaacggtgtcagacctgcaatagtaagcgttattgtcatccatgcttggacacttggtatgatcttcttcttaccttgaactttaatttcgtttcttgttactgatttcattttattgtccagaagcctgaaacattggtctatttacttcttgcaggtacccccttatagcaaaagaagatgttgccaagaaatgcatgttctgctctagtacttgcaattgcagagcatgcttgcgtctagatactaaattgaaagtaaaattttctcgtatctaccatatcttgcttgcttattattatttgttttcgatatacttaagctccttaccataatgattactcaaatgctatgtaggggataaattcgaacctcatagtcagcgaggaagaaaagtttcaagcttcgaagtttattctgcagagccttctcccacatctgaaaggaataaatgatgaacaagttgctgagaaggaagttgaggccaaaatatacggtactttctttgcttttatttatgctggaaagtaatgattggatattcgttattattggacatacctgcattaattccccattaaatctcaaagtgagtgggttcagttttctaagtgggaaactggaagctcattagttccaggaatttgaagatatcttaatgttgtttaatttacaggaatgaagtttgaagaggtgaggccccaagacgctaaagctttccctgatgaaagactatactggtatattaccctgatatttttgtttcagttaaaatgacaagttcttatgtcttcatgctgtttgataacatgcttcgttgttgttctaactttttgggcttacagtgatatctgcaagacttctatctatgatctccataggaattgcaagtcctgtagttttgatatctgccttagctgttgccttgagatccgcaatggaaaggctctggcatgtaaggaggatgtgtcttggaattatattaaccgaggtttagagtatgaacatggacaagaaggaaaagtgattgaaaagccggcgaataagctagatgataagttgaaagataagctggatggtaagccggatgataagcttgatgataagccgaagg

SEQ ID NO: 138547 - DNA, 2340 bp, Arabidopsis thaliana landsberg
gtatcttttcttcttggagtaatcccaatatttgttggttggatatactcggagttacttgagtacagaaaatcttgggttcccttgaaaccgtaagtttttgtaatgtgatactctctataatgtagcagagtttacaccctctctattgtgctcctctcttccgacttactcttgaaaaagtgttgcattcttgttatgcagtcactcggataataatctagttgaattgggagacgtagcagagaaggacgacgacaaagctgatctgttggagggaggtcttgcccgatcaccatctgtaaagtttcataattcatctatcagaacaaacataatcaggttggtgttaccagctcataagttttctagtttgttaattgcaattcttcagcagttctcatgctagggtgtatataatttatgacataacaggtttttgagtatggaagattcatttttgctggaacatcgagcaaccttgagagcaatgtaagtgaaaattaaccccaagaagtgatgatgcatttgtttgttatcttatactatcattcataatcttgtgtaggtcggaatttggggcaatcttaatatatttctatatctgtgaccgcacagaattgcttggagattctaccaaggtacctatgtctttcacctgctttttctgtgaacgcaagctcataagacttggtttcctatgacagaattacaaccgcgaccttttcctttttctctacgttcttctcatcatagtatcagccatgacatctctcagaaaacacaatgacaagtcacccatatctgggaagtccattctttaccttaatcgccaccaaactgaagaatggaaaggatggatgcaggcaagtttctcttgattattcccaatatgatcatttcctttttctggccggtaactgtattgagctcttactgccgctggctatatacagtctcatgacttactttttaacaggttttgttcttaatgtatcactactttgctgcggccgagatatacaacgcaatccgtatctttattgctgcttatgtttggatgactggttttggaaacttctcttactactatgtcagaaaggatttctctgttgcacgttttgcgcaggtgatacaattcattccacagaaagctctcgtcattgtacttgataatccgcatctaaaatcttggttctcttgcagatgatgtggaggctgaacttctttgtagcgttttgctgtattgttctcaacaacgactatatgttatactacatctgcccaatgcacactcttttcaccctaatggtatatggagctctgggtatcttcagcaagtacaatgagataggatcggtgatggctctgaagatattttcatgcttcctcgttgtctttttgttgtgggaaattcctggagcttttgaaatattttggggtcccttaacatttttgctaggtggttagcttatctgaaattgattgaattcccaatgtggaatgagattattcataatggaattagaagaagtttctaatatttgtatattacttgtgaataactccaggttacaatgaccctgccaagcccgatcttcatcggctgcatgaatggcactttagatcaggccttgatcgctacatatggatcatcggaatgatttatgcctattatcacccaactgtaagttcttacttccatttttttccgttttttgtagtgtcgatgtaataaacttcaaaacttgggatcattctctaggtagagagatggatggagaagttagaggactgtgaaacgaagaaaagactatccataaaggccgctattgttactattactgtgcttgtaagtcatttagtcatcttttagcttggtaattgcaccattcccattgtacagattgatataattttcccgtttggtcacattttaggttggctatgtgtggtatgaatgtatctacaagctggacaggaccagttacaacatgtatcatccgtacacatcatggatccccatcacgtctgtgcataaaactctttttttattggtctttatatttgtctcttatgtcacttgctgaaactgaaacatgactcaccatttgatttctgggttccagtgtttacatatgccttcggaatttcacccaccagcttcgaagtgtctcattgactctctttgcgtgagtcaactcgtacttacatttaaactaaaacctggtttgatatgcttgcctcatttccatgtaaaactctttacatttctctgcgcaggtggcttggcaagatcactttagagactcacatttcccagtttcatatatggctaag

SEQ ID NO: 138548 - DNA, 3875 bp, Arabidopsis thaliana landsberg
aaaaccacaaaactttcttttctttttctaactattttatttattattcctacaaaatgtcatgtttgaagtatttcttgatcttattgatgttgggactgtgtgtctcatcggaggagaattttcaatatgactacttgaaagttccggcaagcgagtttgtgagctccataaacacaattgtggtagtgataagacaagtgagttcaattttgtctcagttcgctgatttcagcggagatcgccggctgcagaatgcggtttccgattgccttgatctgcttgacttttcttcagaggagctcacttggtctgcttctgcttctgagaatccaaaaggtaccttaaaggcttaaactctagtttacaacatatatctatctctctagttttatcacatccttatagagttggaaactttgaatgcatagacctttttttaactctgatcacgaggtcaaaattactgttatgagattaatacatattttcttgggtgaaatttgaaaagatgataataaccaaatttgagtaatcgacaacttaaattaacaaaaagaaacaaacaaaccggatatagatatgcttattgccggtatatggaaagtaggataaaattgacgtttgtgaaactggttgctatgtttagaaagagtgtgattacttggtatataacttgttgccttttccattccaaccaattaaaagagaaagatttttaaactcagttgtttatattcaaatgccatgatttttgatcaaatgacaaaggaatgtttggtgcccatttaacagttaagcgactcattaatcagtccagatgttcggttgatttatttgtaataattatatatacaaatcagaataatataaaacaattatacatataaatacaaaatgtaatataaaaatttataaatgttttttttcttcgataaaaaaatttagattataaatgttgtattttttttgctttgataaagattttagattataaatgttatgtacataaaacagcaaaacagcaattactgtatattcttgtaaaacaagatatacgatgcacctgtacaacaaacaactctattggtttggaatttatttagttaaactctccacgactccaataaaagatgatgtaccatgcaaaaatagaataaatgatcgttcatggatcatggtgtatcgtagtaatatatagttagacaagtttatttacatagatatagaaaaagactatttattttgcacttgctgcattaaatttgaaagccggcacaaaattgattgtgatacggttagtaggtggttctttgaccaatcatattagtattatattttcaactaatacaattttgcatcacaattcacaacacaacaatattgaatttcgacctgtattttcttcattttttttttaatgttatttcagcttagacaaagtgaaataaaagagctgaaacaaaaataaatctgaatatgtgtgctggtgtgcaggctatatatttaaagtaggaaatctatttatatcaaatcattaccaaatgcatgtttttctttgaaaaagcattattcgattgcatatatcagtcaatataaatttagaaaaaaaaattaatgttaatttcaattttaaatgataatgtcaagtgataatgatatgttacatcaacgttgtgcattctcgttagtgaaatgaaagcaaatcctataatcattattgtaaatggcatgtgcgtggtagggacaccgaacatggatttcaaaaaaatcttagatttgtaataaatgtaagtgtgaatatatgaaaatgatagtgttgattgataagaataaaatcacgagtatcatcaagtgattaatataagagaatgcgtgtgatgattttttgaatgggaccaccaaccaggtaagggcaacggaacaggggacgttggatcggacacaaggacatggttaagtgctgctctctccaaccaagccacttgtatggaaggcttcgatggtacctctggtctcgtaaaatcccttgtcgctggtaaattaatcacttcttattgttatcttacaaaattttggttctgtttatccaaaagaagaattaatttataatttgggtgaccatgcaatttcgttagggtttcacgttgataactttcggttcaagtcggtatgatttttcttttttttttaacgttaataatttatcatttcaggcagtctcgatcaactatattctatgcttagggaattgttaccacttgtgcaaccagagcagaaacccaaggctgtttctaaacctggccctattgctaaaggaccgaaggcaccacctggccgtaaactcagagacaccgacgaagacgaaagccttcaattcccagactgggtcagaccggacgatcgtaaactattagaatcaaacggtaggacttacgacgttagtgtagcattggatgggacaggcaacttcacaaagataatggacgccataaagaaagctcctgattatagctcgacacgtttcgtcatatacattaaaaaaggtttatatttggagaatgttgagatcaagaagaagaaatggaacattgtaatgttaggtgatggcattgacgtgactgttatttccggtaaccgcagcttcatcgatggttggaccactttccgatcagctacattcggtaataagattttctagttgttaattcatgttttgataacaattgttttttcttttcttaattctaatggttttgaaacattgtgacacaaaaatttcagcggtaagcggaagaggattcttagcaagagatataacgttccagaacacagcagggccagagaagcatcaggcggtagcactgagatcagactctgacctctctgtgttctacagatgtgcgatgaggggttatcaaaatacactctacacgcacaccatgcgtcagttctcccgtgagtgcaccatcacgggaacagtagattttatatttggggatgggactgttgtgtttcaaaactgtcaaattttggctaaaagaggactccctaaccaaaagaacaccatcactgcacaaggccggaaagatgtcaaccaaccctcaggtacattaacaaaatcataaatagggttccacttttaaggtcttgttagtgtgatagtttcttgtcactcaagaaactatctaaactgaaataattgatctcttgtgaatagtacaaatttacaatcaatctatgtattaaccataatataacgattctaacttggacctttttcaattttgctcaccttcaggattctcaattcaattcagcaatatctcggcggacgcagatttggtcccatacctaaacacgacaaggacgtatctaggaaggccatggaagctatattcgagaacggttttcattaggaacaatatgagcgacgttgtgagacccgaaggatggcttgagtggaacgctgattttgcgttggacacactcttctacggagagttcatgaactacgggcctggttcaggactcagcagccgagtcaaatggcctggttaccacgtctttaacaactcggatcaggctaacaacttcaccgtttctcagttcattaaaggaaatctttggctgccttctacgggagtaacgtttagtgatggcttgtatatctaaactggctcagtgtttctattgtgaatgttcctgttttttgttccttttcattttgttttgcgttttcttgtcatgttcttctaagttggtttgttgtggtatttcacggttttggaaaaatattgataaatggggaatttaagtcgatcggctgaagttgaacaaatcatatattgcccataaaggttaatagattttgt

SEQ ID NO: 138549 - DNA, 2212 bp, Arabidopsis thaliana landsberg
ggcctaagttcatctgcaacatcaggaacgtttttggttgaggatggtccatattactattgcatgcttgaaatcctacttggaaggctatctggatctctatataaccaggttggtttgtcgctgttactttagaaactccttatactttttgttggaagagaagtatgattgcttgtatgttttaatctctcacaggccttgaaaaagatatcaaagtttgttcagacaaatatccttcctggtgcaattgccgaggttgggttgctttgttgtgcatgtgttcattcaacccccgaagaagcagttgctcaaattgttgaaccaatgctccttgctgttatatcttctctgaaagaaatccctgtcaatgggtatggaggaaaaggaagtgcagagacccttgtttccaataaggttcttgtcagtagtttttgttcgacattttatgtgttcttttcaatatgaaaagtaaataataattattttatttcgtatcaccttttttcagcaagacaaacaaacactttctccagcgcttgaggcagctatagattatcagctgaaagtattgtcagttgccatcacttatggaggcagctcacttcttccgtacaaaggtcttttgatcgaagctatatcttccgcatttaattcctcatcttggaaggtattattttttgctgaattgacatctatggactcagatttttcttttgtctttgttattttttagtgatgtgtacttttatctggcttctttgataatgtgatggtcttcttatggaaaggttaatggagctggggatcatcttcttcgatctctcctcggaagtctgattctttactatcctattgatcaatacaagtgcgtgataactcaagaatgtttattataaatatcttggggtttttttgcttgtctctttactcgagtactattctgtttttgacagatgtttgtctcgtcaccctgctgctcctgctttggaggaatggataagcaccaaagcttcttctaaggatgagcaggtggcgcattccaggtggcatgttcccacccaagaggaaactcagtttgccaatgagctcttagatctccatcttcagtcagcactagatgatcttttgagtatttgccaatcgaacatccactctgatgcaggtaatttcagtcattgctttgtgtgtttcagtcttatttcaaggatatgcatatttgtctatcgtatactagttgggtttgcgtgtttcatcttatagctaaaggcttacatttctgtttttcattggtgatattacgtacacttgtttgctctaaaaaatttacacgtgtttgcctcattgatgttatttgtggtgcaggagatgagaaaacacaccttaaagtgactctattgcgtatagattctacattgcaaggtgttttgtcctgcctacctgatttcaggccatcacctagacatgatatggttgaagatctacagttctttatagctggagcatcgggttcatgtgttggcagcgctgagatacgagaaaaaactgctataactattcatgcagcctgcaagtaatgtttgttcagtagctgctctgcttgcttctctccaaaacgcatatgcgtacaactggaaatattattttgtgatggtttgttatgtgatgtttgcagatacttgttagagaaaaagtcagatgacagcatcttgttgatattaataatccgcataatggatgccctgggaaactatggtactgcagaaagcctctggcgtgctccctttttgcagttgacaagccacatgtttttccctttgtaacacttgtcctttaaacgtttgcaggcagtttggagtatgatgaatggtcaaatcacaggcaggcttggaaactggaatccgctgcgattgtagagcccccagcaaactttattactgagtttaattctaagggcaagagaaggtaggtctctcttttgtcttaattgaaaacatacatatcttaattttaatttcttgcaaattgtattgtcttccaggcctagatgggcactcattgataaagcgtacatgcacaacacatggagatcatcacaatcgtcctatcatctgtttcgtacagatgggaacttctctccaccagaacccttaacatttttggttgatgatcttttgaccctctgtctgcacaactatgaaactgttcgagt

SEQ ID NO: 138550 - DNA, 670 bp, Arabidopsis thaliana landsberg
ttattaggaataactcgagcatctgtgaatcctcacagttttagatccatagcgagttgtcaagagactgctcgagttttagcaaaagctgctcttcggggtcgcatcgattggttgaaaggcctgaaagaaaatgttgttctagggggggtgatccccgccgggaccggattcaacaaaggattggtgcattgttcacggcaacataccaacattattttagaaaaaaaaacaaagaatttagctttattcgagggagatatgagagatattttattctaccacagggaattttgtgactcttctatttccaaatctgacttttctaggatttaatgatttctaatagcggactatttaaaattttagtttttgttgtttgctgtagtcatttgctttcgtaatttgttaacactaataaagataataatcaatacaaaataatggcttggttcatgcataaatggccatccccggtacaagagaaggttccatcggaacaaaattttattttagtttggggtgcccccctttttaagtgtgaaaagaaatgacaaaaagatattggaacatcgatttggaagagatgatgagagcaggagttcattttggacatggtacgaggaaatggaatcctagaatggcaccttatatttctgcaaagcgtaaa

SEQ ID NO: 138551 - DNA, 558 bp, Arabidopsis thaliana landsberg
atggggaatgtgagggtagagatccgtttagcgattcaggtagcgatgagagtgtctctgaggaaggacttgagaacaacacgctcttgcatccaagtgatcgtttgggttatctttatctccaatactttgagagatcagctccttataccagagttcctctgatggataaggtacataatataaaccttgttatgtagccttgcgttagttcacctgatccgatcgaataagcatcacaaatgatgttttgatatgattccagatcaatgaattggctcaaagatacccgggattgatgtcgttgagaagcgttgatctttctccagctagttggatgtcagtagcatggtacccgatttaccatataccaatgggaagaaccattaaagacttatccacgtgtttcctcacttatcacactctttcctcttcttttcaaggtgcagattctctctgtctgtctactatccttcaactcggtgtgatcgatcgggtttaacactttgttgtatcacagatatggaaccggaagaaaatggtggggacaaggagaga

SEQ ID NO: 138552 - DNA, 3124 bp, Arabidopsis thaliana landsberg
atgactacacctgcacaggctcctagggaggaggtgtcactgtctccatcattggcgtcccctccaccaatggcgttgcctccaccgcagccttcgtttcccggtgataatgccacttccccaactagagagcccactaatggcaatccaccagagaccacaaacaccccagctcagtcttctcctcctcctgagactccagtatcatcaccaccaccagaaccttctcccccatcaccttcactaactggacctcctccgacgacgataccagtatctcctccaccagaaccttctcccccaccacctttaccaactgaagctcctcctccagcgattccagtatcaccacctccaccagaatcttctcccccgccacctccaccaactgaagctcctcctactacatcacccagcctgccaacaaatccaccaccaccaccggagagccctccttcactacctgcaccagaccctccaagcaatccacttccaccacctacgttagtcccaccatcacattcacctccacgtcatttaccttccccgccagcctcagaaattcctcctcctccacgtcatttaccttccccaccagcctcagaacgtgcttcaactcctccatcagattcagaacatccttctcctcctcctccagggcatccaaaacgtcgtgagcaacctcctccaccgggttctaaacgtcctactccatcacctccttctccaagtgactcaaaacgtcctgtgcatccttcacctccttctccaccagaggaaactctcccacctcccaagccaagtccagatcccttaccttctaattcgtcttcaccaccaacattgcttccaccatcgtcagttgtatccccgccttcgcctcctcgaaaatctgtgtcaggtcctgataatccatctccaaacaaccccactcctgtgacagataattccagcagttctggtattagtacagcggctgttgtgggtgtaagtattggagtggcccttgtgctgcttactctcattggagttgttgtctgttgcttaaagaaacggaaaaagaggctctcaaccattggtggtggctatgttatgccaacacctatggaatcctcctccccaagatcaggtaatcataatctcgtctacttttataaggcagttagtctttgccatccttaaatgtcttggcaagcatggcagaaagaagtctccttgtataattgattgtttgaatcttattaagacatgttactttaaactgaagagttcatagttattcagagattaagatagtttgtgtcaagagttcataagtatggatattgctatgtatattttgattatcatcagtatttctggattttcatctccatatctttgttattatacagattcagcgcttctgaagacgcagtcatccgcacctctagtgggaaatcgttctagcaatcgtacatacttatcacaatcagagcctggtggttttggtcaatcgagggaactgttctcatatgaagaacttgtcatagcaacaaatggattctctgatgaaaatctcttgggtgaaggtggatttggtcgtgtgtataaaggagttttaccagatgaaagagtggttgctgtgaaacaattaaaaataggtggaggacaaggtgaccgagagttcaaagccgaggttgataccataagcagggtacatcaccggaatttgctttctatggttggatactgcatttccgagaaccggagattgcttatttatgattatgtccctaacaacaacctttacttccatcttcacggtaagtaagatttctagacataaaatcacaaacccaaaccacatttacttattactatctttccatggtctttagccgcaggaactccgggtctagactgggcaacacgtgttaaaattgctgctggtgcggctcgtggactagcttatctccatgaagattgtaggttgctacaactcttcaaaaatttatggataaaagaatcaaattctttatgttattcttttggttcttggggactacatattatttgatgaatgattttaatggtaaaacatttacaggtcaccctcgtatcatacatagggacatcaaatcatccaacattctcttagaaaataacttccatgccctggtatacattcatctgctcttctgaatttgcaaagctgctgattaattaaaaatcatgggttctaacactggttagaatcttattcgtaggtttctgacttcggccttgcaaagctagctctcgactgtaacacacatattacaactcgggtcatgggaacattcgggtaggtgctggttaaggtcccatatgacattgctcatgagcaaaacttctttctgtatatgttccatcttataaacgattggtaaatgttttcagctacatggctccggaatatgcatcaagtggcaaattaaccgagaaatcagacgtattctcctttggggttgttctactggagttaatcactggacgtaagcctgtggatgcatcccaacctctgggagatgagagccttgttgaatgggtatggtataaataagcatttaaacttttgagaatggaactgtttcttcaatccaatgtttgtgttgaatgtttcaggctcgtcctttgcttagtaatgccactgaaaccgaagagtttacagctttagcagatcccaagctaggtagaaactatgttggtgttgaaatgtttagaatgattgaagcagcggcagcttgtattcgccattcagctacaaagagaccccgaatgagtcaagtacagaccttctcttaataagccagatttttttcttctttccaaatcgaaactcacatcaattttttacagattgtgagagctttcgacagtctagctgaggaagacctcaccaatggaatgagactaggcgaaagcgaaataatcaactcagctcaacagtctgcagaaatcagattgtttagaagaatggcttttggcagccaaaactacagtacagattctttaactcgtaatagttatataagcaaagatgaaaacttgtaaatatcagaaacaaaacacattgcagaatgatttttctgaggaagagatc

SEQ ID NO: 138553 - DNA, 1781 bp, Arabidopsis thaliana landsberg
cttctggccgaattcatagtctcccacaagaaaatgcaaccttagagttaccagttgctccaccaccaccaccacaagcactgccaccgccagttctggaggaggctcaaggcaattccttgggtaaaatttgggtgtctcctcctagagataagaagatgccaccgcttgagacctttaaactgaccaaagaattgtttggggaaagagtgaaggacaatgttattatagtgacctttgggaactatgcttttatggatttcattttgacttgggttaaacacttgactgatttagatctctccaatattcttgttggtgagttgtcacttctaatatctatttctgattgtccatttcactggctttctgtaagttagtaactttatgttatggggctttataggtgcgatggatacaaagttattagaggctttgtactggaaaggcgttccagtttttgacatgggaagccatatgagcacagtggatgtcgggtggggttctccaacattccacaaaatgggaagagaaaaagttattctcatagattctgtcttgccttttggttacgagctacttatgtgtgacactgacatggtgtggcttaaggtgctaattcgacagattattatcactgttattcatcacgttatcttccttaatagactttcttctgataatttatatgtgacagaaccctatgccttatttggctcgattcccagatgctgatgttttgacttcaagcgatcaagttgtgcctaccgtcatagatgacagtttggacatatggcaacaaggtagatgttagctatagatatgcattttcccctgttcccatttgaattcgtttatcactctggcaaaagtgttttgagtttattattatcagcagctaatctgttcacatggctactaactgttttctctaccgttcttttcttggactttgaaagttggtgctgcctacaacataggaatttttcattggcggccgacagaatctgcgaaaaagttggcaaaagaatggaaagaaattctcttagctgacgataaggtttgggatcaaaatgggttcaatgagattgttaggagacagctaggtccatctgtggaaggggatagtggacttttctatgcttatgatggaaatctcaaggttggaattttgccagctagcatattttgcagtggtcatacttattttgttcaggtacctttcttcatgcttcctgtttttgtgttttattatcatcctcttttcttttgtgttcagaaatgacctaacaggtaacttctattttcgatggaaggctatgtatcaacaactcaggctagaaccatatgccgtgcatacaacattccagtatgcaggtaccgaaggaaaacgccacaggcttcgagaggggatggttttctatgacccaccagaatattatgattcaccaggtaatattctttctgttaagattcttcaacattaatcttgttaatggggaaagccaaaatcaacattgtaaactccaacacaatgcaggaggtttcattgcgtttaaaccatcgattccaaaaagcttgttacttgacgggaagcataccattgaatcgcattttatcctcgttaatcaccaagtaacaactactaacctaacatgatccctcagaactatatgctaacttgaccacctttctaattttacatccacctttggtccactttacagatgaaacagatcagatcagctctagccattgcatctcttcttaatcgtacactg

SEQ ID NO: 138554 - DNA, 512 bp, Arabidopsis thaliana landsberg
gcagatataggtctctctatgggtatatcaggaactgaagttgcaaaagagagttctgacatcattattttggatgacaattttgcttcagtagtaaaggttagtctactacatcaaatatagaaacatgtgatcttctacattatccttcatctttatgcttttctaatcaataaactctgtttactcttccaggttgttcgttggggccgttctgtgtatgctaacattcagaaattcatacaattccagcttactgtgaatgttgccgcacttataatcaatgttgtagcagcaatgtcttctggtgacgtccctctaaaggctgtacaggttagtaccttgatgcttatttgaatggttgaacttttaagacaaggataaaagatataatggtgttctttgatgcagctgctttgggtcaaccttatcatggatactcttggagcacttgcactagctacagagccaccaaccgatcatcttatgcatagaacccctgttgaaagaag

SEQ ID NO: 138555 - DNA, 2724 bp, Arabidopsis thaliana landsberg
accgaacgattgaagttaaccaagccagcaagcaacccaattcttctatttcttcttcacctttagatttttcctcgcttaatttctcaataacgctctcagagagaccatttgatgaagcttctcgcttctggaatttgaaaaggtacaagttgcaactctctcttttctttcttttcttcctgggtttattatatagctggagttctttgtcgatgaatcgggtggtgttgttgttgtttggtttcaatttgatagaagattggcttgaccttgatttgctttgttttgattaggatttgataagacgagttcatagaagattaccgcaagttcatcaactttttgtatgtggtttcagcttttgaagcaaaattctgataactatacaaagattccagcttcatatgtgattgtccttgttattcttagctttgctatgaagttgagatatatgagtggaaaattcgtattaaaggatatgccttttggttgttcatttgcaggaacttgttatggagataatctcactgaacgttgtgccccagtgctctgtggttacttggagtagtaaattagcaacgaaaagattggtcccaaatcggtcaagtttgttattctcaggggtcaaaaaatccagacttgtgattcgaagtggaaattccgatggttatgttgttggtgagaatgatgacttgggtcgtatagccagaagaggagaatcaacgtcaaaggttttgattcctggtttgcctgatgaatcaaatggtgaaattgctgctcgaatcagtcattctcactgcgagtggaagcccaagcttagagtacattatgagaaagccggttgtgacaatctcgatgctcctgcggtgttgtttcttcctggctttggcgttggttcatttcactatgagaagcagcttaccgatttgggaagggattatcgagtatgggctattgattttcttggacagggtttatctctccctactgaagatcctactaccatgactgaagaaaccagttcctcggaagataaggaaccattttggggatttggtgacaaaactgaaccgtgggctgatcaacttgtattctctctggatctctggagggatcaagttcagtattttgtagaagaggttagcaatatctgagttcagttgttctattactctttaagctgttgattttgttcttttagtcgtaatttcaaaagcagtgtgttagctttttttttttagtgtagattgttgctatgtgtcgtatactcatggatttcaatagttttcagctcagaacctgaaagtgtgggtatggagtcttctggtgttgctttgggaatgggaaagtttaggatgcactagatattagaattcatctctgttctttgattccgtttgtgttctagtttgagatcacgatctttttcatctgaaataagctgctgagtcggtaagagtatgtggtatttgtgttgtacaggttatcggtgagcctgtgtacattgcagggaactcacttggagggtatgtagctctctactttgcagcaacccatcctcacctggttaagggtgttaccttgcttaatgcaacacctttctggggtttcttccctaatccagtaagatccccaaagctagcacgtctctttccatggcccggagcattccctctgccggaaagagtgaaaaaaatcacagaattggtgtaagggagactttattaacacatctcctcacctgaaaagtatcattttctatttctatctctatcagtctaatatctttacttcccaatgaaactgcaggtggcaaaagataagtgatcctgaaagcatagctgagatacttaaacaggtctacacagaccattctaccaatgtggataaagtattctcacgtattgtggaggtcacacagcatccggctgctgcagcatcgtttgcttcaatcatgcttgctcctggtggagagctatctttctccgaagctttatctaggtataagacagtgtggtttcttgtttttatatgttttttactctgcgtgattggtgttattgcttatgaggaatgctgctatttgatggtttatgctaggtgtaaggaaaacaatgttcagatatgtctcatgtatggaagagaagatccatgggtgagaccgttatggggaaagaagataaagaaggaaatccccaacgctccatactacgagatcagcccagcgggtcactgcccacacgatgaagtccctgaggtataatgaactagtcaataaattcttcaaactctgcaattaggtataatgaacccaccatttgggatatgaaaacgagcaggtggtgaactatctgatgcgcgggtggatcaagcacctggagtctggtggttttgaagcgctcccgcttttggaggacactgaagaagattgggaggagtccaggattggtagagaaattgagttcccgagagatggttggaaaaaagcagtgaatctgtggttatatgggtcaaactatacgtactggagaggagttagagaatctttcagatccagttttataagggtgtttggagggaagtctgcatagaagaagcatggaacagtcgtctagtgtcaattgattgtaatctatgttgcatccgatgctagactatataatgttgtctgtagaatcaagtttgtaaaatgttcaaaaggaaaagttagcaaaaggtcta

SEQ ID NO: 138556 - DNA, 550 bp, Arabidopsis thaliana landsberg
atacactccttatcaagctgagatctctcaaggtcgtctcgaatcgctcctcaatttccagaccgtgatcacagatctcacgggtcttcctatgtccaatgcgtcgcttctggatgaaggcactgctgctgcggaggcaatggccatgtgtaacaacattcttaagggtaaaaagaagacctttgtcattgctagtaactgtcaccctcagactattgatgtttgtaagactagagctgatgggtttgatttgaaagttgtcacctctgatcttaaggatatagattacagctctggtgatgtttgtggggttcttgttcagtatcctggtactgaaggtgaagtcttggattatgctgagtttgttaagaatgctcatgctaatggtgttaaggttgtgatggctacggatttgctggctttgactgtgttgaaacctcctggagaatttggggcggatattgttgttggctctgctcaaaggtttaggtgctccgatgggttatggtggtcctcatgctgcgttcttggctacttcacaagagtataa

SEQ ID NO: 138557 - DNA, 1133 bp, Arabidopsis thaliana landsberg
ggagaaccatcaaattcatcttcttctctttcacaaatttcagcctaaaactttccgattccatggaaatcgaagtctcttgctcgactcatgatgccgaaaccaaaggaaaccgcatcgatttggatagtattcgtgtaaagcgaaagacgttacagaatctgctcgcggattgccagagagctcttgagcttctagaacttcccggcgatgaaaacggtggcgaacagagtgaatcaccggaggaggaggaggaggaagaatcggacagggaagaaccgtctgcttccgatccaggagatcctgaagctgataaagtatgcttttttattactttaatctctctgtttcgtaggattttgatcgatgttagctcaacttagaatatagaagctcaatttcatgattctgtgatctgttttcttatgtgcagttttatgatctcatcaaatctagagttgaatgtaatgactttcgtgaaaagatagaattagctcaagtttcagttccccaagttcttgctggtaagatgtttcagctttgtttatctactcaataagattgccaatgtgtgtgtaatttggttgtagagataactaactatataagctagctgttgaatttgcagaagatagtagctcttgggatgtagttagtgaagatgatttatgggatgaggaatgtgtgggtcaaacggaagatgattatgtcgttgttagggaagaagatatagctgacggtattgcttgtttcatggctacttatttatcatcccttaagcaaacaaaggtatgttagctcttatcttcttgtccttgttcgttttatgtgaacttattctgagtgctatctttttgtaggatatatcacctgatcagcttcagaaaggtaaatcttcaacttccatgtgttacaattagaaaagatttcggctttatactcttcctgaagtttagatagtagcctaaggtttttcttgtcaagaaccccaaaatgtgtcttccctaaggccccaaatcaaccaaatacttaaaaaccaacttagggtgactattatgtctaacagatacttactgtttgcatatgaagggtggcttttaagtctattggatactaagagtttgcttatgaac

SEQ ID NO: 138558 - DNA, 1117 bp, Arabidopsis thaliana landsberg
gcggcttggtctattctctaacgtttggtgtcacgaggacttgtgctcaagacgagaacatcagaatctctgtgcctggtcagaccaatgagctaccaatccaaacattgttcagtaccaacggtggtgatacgtacgcatgggcttttaaggcaacgtctgacttggttaaggtcactttttataatcctggtgttcaagaagaccctacttgtggcccaatcgttgacgctgttgccattaaggagattcttcctctccggtataccaaaggtaacaactttcaattccggttcggtattggtcgtgtctcattccacattccggtttgactttattttagaatattaaccgattcacatacaaatcttgaaatctaccacacaatggcttagtatataggtttcatttccggtttggattcatttcttttatattttaaccgggttaaattggatttctggtttttgaagagtaaattcaatttaaccaaaacttccacataccagtttggttttgcaatttggtccttatcttttcatattattttctctttcgcccctaacttttaatttgtttacgtaaaaatcaaccagggaaccttgtgaaaaacggcggatttgagaccggtccacacgtattcagcaacttctctaccggaattttaattccggcgaagatacaagacctaatctcaccgcttccgggatggatcgtcgaatctctaaaaccggttaagtacatcgataaccgccacttcaaggtcccctcaggtctcgcagcaatcgagcttgttgccggaagagaaagcgcaatcgctcagatcatccgtaccgtctccggtaaaaactacattctctcgtttgttgtgggagacgcacacaatggttgtcacggatcgatgatggtggaggcgtttgcgggaatatcggcgtttaaggttacattcgaatctaatgataaaggagcgttcaaagtggggcgtttcgcgtttcgtgccgattcgaatcgcacaaggataactttctatagtgggttttatcataccaagcttcatgattttggacatctttgtgggcctgtgcttgataatgttagtgtttttttggcccattaa

SEQ ID NO: 138559 - DNA, 3396 bp, Arabidopsis thaliana landsberg
acagtagatatggctagccaaggcgggccaagacggagcttatccgttacgactgcgtcattgcacggaaagaagaaatccatggatatggccgaacgaggtctcgatactggccggagatctcttactgtttctcgttctcctttgtaagtctcagctgggtctcaatcttatatataaaccctagtttatgctcgtattcaattcatagagaacatctagctcctcaggtttaccttatttcttttccattgaagctattgtgatttggttttaacttttttctctcatctgtatatggagcaggggtttaacaggaggcgagcggactgtgaaacggttaaggctatcgaaagcacttacagtaccagcaacaacaactatatatgaagcttgtaaaaggatggcttcacgacgagttgatgccttgttgttgactgactctaatgaaatgctttgtggtattcttactgataaggtatgccactattcgctaagtgtagttaaaaagttagaaacagattggaagaaggaaatggagacttcattgatctgtgtgtatgtgtgtcttttttggattttcaggacatagctacaagagtgatttcacaggaacttaatgtcgaggaaacacctgtatctaaggttatgacgaagaacccaatgtttgttctctcagaaacacttgctgttgaagctctccaaaagatggtccaaggtttgtctcattgtttttaagctagagaaacttgatgtttatctgattgctgtgtctagatccttaatgaggctatatcttaaccttacctactgcaggaaaattcagacatttgccggttgttgaaaatggcgaagttattgctttattagatatagcaaagtgtttgtatgatgcaattgctcgtatggagagggctgctgagaaaggtaaggcaatagctgctgctgttgaaggtgttgaaaaaagttgggggacaaacacttcaggtaggcgaggaactgctgcaatctcatttgttgtttgcttcttattttctcggattttgaatgtccaaaatgttgattttttcatgtagttcccaacacttttattgaaacgctacgagaccggatgtttagaccttctttatcaacaattataccagatgatacaaagtaggtaatctcttatttttctaatgaaattctttttacaatcttgattgagtgtttcctgtctcatttgttgttttaacttaacaccgctgtttgttcagggttttgaaagtctcaccaactgacacagtgttgactgtagcaaagaagatggttgaatttcaatcaagctgtgcagtcgtgataatcgaggacaagcttcgagggatatttacgtgagttctcccttctgaaagcctttgaagttttgtcttctttaccctatagatcctgaaagccttacatccatcctcattaatcggctaaagtgtttctcctaaatttcattctgatactataatattagtttactgataggactatttacttctgcaaagacccttacatgaactagaacaggtcaatttgttctagagaaccacatttaccagatgaaatttgttctaacgaacttgatagatagattatgcgttggctaaactcttctgtctttctttttgaatatattatcactaactttcaagagttctgttttttcatttatctagttccaaggatatactgatgcgggttgtggctgaaaatcttcctccatctgagactctagtggaaacggtaagattaaaagattagtctccagggtcttgtattattcaaccatcttagactcttatttccagcttagtgatagttgctcctttttcctgaatttaaccatttgttcgtattcattaatgcataggttatgactcagaatccagaatctacgatagttgacacaccaattgttgaagctctacacatcatgcacgagggaaaattcttacaccttcccgttactgacaaaggtgagaattctgaaaccttttcaattgtaaagtcttacaaaaactaaaaaggcaaacgcatgtaaaccataaatgggtttctgattgcagaaggagatgtagttgctgttgtcgatgtaatccatgtcactcacgctgctgttgccacagtaactcccatctcttgaaccgtctgtaaattttttcgtttagaacatccactgttctcttttttctagatacatgtttcaatcttgtagttattttgatgtgttcaggctggaactactgcgggaataggtaatgaggcgacaaacacaatgatgcaaaagttttgggattcagctatggcattgtctcctaatgaggacgatgaggactcgcgaaggttattagctagtcttacttgttccactatttatcgagtttcttttcaaagaaagctttggttttgctgactttgttgacaacatggggaacaatttgtttcagtgagagctccatgaaggttgcttccgaagctgagacaggaaaatctttcccttttgcaaatacattttctttcaaaattgaagacaaaaagcacaggaaacacagattcataagcggtaaaaataattttgatttttattcatcaagtaaatagttgtagtcttgcttttacttaactgaattggttctttttgcagacactcggagtttgacagaggtgataaccgcgatcattcagagggtaggggatgatatcgatccagataacttcccccaaattttggtaaatattttcttttacataaagactatgatgcaatcattatctaattcttctcttgtcaccccctgaattgttaaaatgatggttataatgtgcagtatgaagatgaagaccacgataaagtgttgttggcttcagatagtgaccttcaagcagccatagagcatgcaaaatcaattggctggaaggtaaaaagaacgatttcctcctgcttgaaacttttggttgataagcaacaagaaccaaagtcgaagatgaaaccttcatgagattgcccataaaccccttttgctttctgaattgatttgatcattataaattgcagagtctgagattacatttggatgattcaagagaaggcaaaggaagaagaaggagaagagcatcaggatcagcagaatcaatggagtatgtagagacagacgcttgggctgctgcttatagtggagttgcggctggtgcagcattagtagctggtcttggttttatggcttttctcagaaaattcggtcattgattcctcagaaacactacaagaagtgtttctttaacagatcaatacaaacaaaaaagaaaaacagacacagggtttgaaggttttgtctgaaatatttttatatacaaaagtcattttaaatt

SEQ ID NO: 138560 - DNA, 729 bp, Arabidopsis thaliana landsberg
ctggctctagagttaagtgctacggaggatcctgaagctgctcatattgaggctatgaagcccgtcaactcatgttctggttcttctgctcccgacaatactccagctgaactcatggactatagatattgggtgaggagttaactcattgctagacatacaaacaaatttccagttcacttaagcgacaatagactatgcttgaaacaaaatgtgttaagttgattataagttgataactgttttctgtctcttctaaccaattttacatcatctggaattttgcagaattataactgtcttggctatgatgacaagattgtggatggtttctatgacctgtgtggagtaatgaatgaatcttccttaaaaagaatacctcccttagttgatcttcaggggacacttgtgtcagatggtgtaacttgggatgctgttctagtgaacagcagcaaagattctaatctgttgagacttgaacaaatggctcttgatattgcagcaaaatcaaagtcagcgtcttcttcagggtttgtgaacagtgaattggtaaggcaactggcagttttagttgctgattacatgggtggaccagttttggatccagatagcacgttaagagcttggtggagtctgagctacagcttgaaagcaaccctccgtagcatggttctgcccctgggttctctaactattggattggctcgtcatcgagccttgttattcaaa

SEQ ID NO: 138561 - DNA, 481 bp, Arabidopsis thaliana landsberg
tgtaagtgtatttggagtatcggcgaagtcaatgcaatgctcttacgacgacagaggaaatagtgtcccaacaatccttctcaggatgcaaaaacgtctatacactgaaggaggtcttaaagtaagtctctaccctcttctgttccgtgaaaatttcggattagtttggaaaagagtttgatataatgtgtgattgtttatttaccttaaggcagaaggaattttccgaataaatccagacaacggcaaagaagagcatgtccgtagacagttgaactgtggtgtggtaccacgtggaattgatgttcattgcttggcgggtttaataaaggttgaaaaaggaaagatttaaattagtttctataacattttaagttcaaaaggtttgatgtttgctgttgttgaatttcggattaaattaggcgtggttcagggagctacctacaggagtgcttgatgtgttgacaccagagcaagtaat

SEQ ID NO: 138562 - DNA, 1238 bp, Arabidopsis thaliana landsberg
aaccccaaaagaaaaaacatctttggtgtaacaaaaatggcttcgtcttttataagcactgatcgaatccataggctctcttgacaaagactcatacgtttctctcttatcaaaactcataggcgaatctaaattcgtccagaacaatccgccggagctcatccctcaagaggacctaatcgtcaaacacgtccttgactctctccgtccttacagcacagaaactggtggtggtcctctggtgatcaatcatgtcgcgtatcattcaggtagaggtaatctcatcgttgagtacccaggatctgttcccggaaagatcttgtctttcgtcggaatgcatatggacgtcgtcactgcgaatcctgatgattgggtaattctgattgattctaaatatgtgattttgatcggtgcccattagaattagcttaaaatctgatactgggttctgtttaatttccgatgaactgatctgaattgttccaaatttcaaagctttctctgttttgtgtactctagggtttaatcggttacattgaattttggattctctggttgacttcggtttttgttcataggaatttgatcctttctcgctaagcatagatggtgataagcttcgtggtcgtgggacaacagattgtcttggtcacgttgctcttgtcactgaactcatgaagaaactcgggcaagccaaaccggcgttgaaatcaacggtggtggcggttttcatcgctagcgaagagaactcttccattcctggtgttggtgtggacatgctggtgaaagacaaacttcttgataagctcaaatccggacccttgttagtttccatcctgttagaaatttcttggggagtttttagatgaaaattgaaggatgattgaagcttattgatgtgtattcttttgaaggtattggattgatacagcggataagcagccgtgtgttggaactgggggtatgataccatggaagcttcagtttactggaaagcttttccatagcggtttagctcacaaggtattttatatatgaatggattactctagatgaagttgcaaacttggcattgatcttttcttctgtttgtacgaaggcgattaacgcgatggagttagcaatggaagggcttaaggaaatccaagctcggttctacagagactttccgcctcacccacaagaggaagtttatggttttgcaacaccatccaccatgaagccaacacagtggtgtt

SEQ ID NO: 138563 - DNA, 4280 bp, Arabidopsis thaliana landsberg
atgataaattctcgtttgggtggtgagaactgagaggcaaacattcaaatttacaccacaaatctctcaattttatttgccaaatcaaccatagacatacatataagaaacttgtgcactataaagccaaacacttacacttaaagcacagtacactattaagaaagaatcagactttgactctttgagcttaactgatcttacatcaataaccaaaagaagaaagagctcagaatttgtaatttgtttagtttcaagttttccaattcactagccaactgatgccattcggaagttttgatcaaactagactcaattcctcagcccgagataaattttgacaaaaaagaagcaacaaaactaagaacaaattatcaacagaaaagacggaaaataagtcgaaatcaataccatagcttgaggctgcgaagagtttcgagacgaaggccacatgatacgcttctggagattctccaaggcgacagaggaacaaagctaagcctttaaaatcgaatgcccatgagtatgatgaagaagggagataagagcagccttagtaaccgtaaacgtcagggtgttcatatctctgattacaaaacgacgcgttgtttggggcttaatgtacattctggaaaaatacatggaccaattagaaaagttttaacagtatatagctactaatgtaattactatagaatatctctcgaacacacggtgcgttttactgtcgtcgctcctttttgttggtctgtttccacttcagttcttctccctccggaaaagctacaaccccaatctaaaaccctaacggccatttctaccatcggagctccgaaaatgccgggtatgtcttcggaatctggcggtggagaattggttctgttttcgaccaaggaaaaaactccggtgttgtatcctctaagctatggcctcaagtctccggttcacaggctctccatctcctggggttgcggaaacaacctacgcgtcacggttttaaggaatccagagttacgcgatgatgacgacggagaagttggtggtaaggtcgtaaacgttaggcttagcggcgaggatggcgaaatcagtgacccacagtggcgaaggatcgcttatggatcggtatctccgttcgcgcttttgcagagcagaagaaactcaatttccagtttgtctaagatggatatgagttcctctctgtatcagactgcgtggtgagtatcttctttgtaaattcccagattttgcccattcaatactgaaatactgttttggattatcttatgattagacttctaaagcgtgtttgagcaattctggattgtcgtaattttaatcaggtgggagtacgtaatggaatacagcagagatattaaatctctccttagtaatacaatatctttgcccgctcctttgattgaagacccgagatcagttataaaggtacgttggtctttctggttctacaattggttaactttacttgtaaatttaactcctccgcgagtgaggtataggtttgagtgtggagctttgttaatggatgttcctgttaacatacatatgcagaatgctgaggaaccaacttctttaaaggctgcgtgggagttgatggaattattttatgcagataagacatgtctgtcttggttgccagaacggctcgttgattggttatctgtaattagtttttaccttcgacacttgagctatcttatttttttaaacttctagtgttttcttacctaccatttataacatggcaggaatacgatatactcctttctagctcacatccaacaatctactcaaagctccaggatttccaaaaggaacttgttggcctgcaggtttgctcatctctaagaagtcgatagttctcagaaaataagtgattgaagaacctgactttcttaacggggttatgtgccattgcaggccatcgaggatgatccaagatactgggaagtgatggcttctgctttatcagttggttggctagaaatagtggttagtactttttttttgggattgggggttctttgtaatttgatcttgaatgttacaatttgagaaatgttctgcccatactttttattttcaggtgaagttgttacacctacatggttcttatcaactagaccagctgggacatcgtgaggttagaatgaagttgttcatgtttaggtcctttgggatttatgtcatatgaagtgactagctacgtgctagtacttttgtatatgcacagatttctgattattcataatgtaatacaaatttaatgaaatagacagaaaatggtttggtagaagcggttgctgttctcatttcaaaaatgccacgaatgcggccacaactagaagatgggaaatttggtgaatgctctgcagcaaagcctgactttatgaaggtattttagaaacatgtatcattctaactctttttattgtatctgattatgtgtctagactcatcttgccgtttttgccagacacgagaaagatggcagtctcagataactaaactagagtgcagtgccttctgggttcaatgtgctcaccatcagacccgtgagggcttgagaaatatgttgaagatcatgataggaaatgctgattgcctcagagctgcgacatgtaactggatggagctttttgtttcacatcttctttatctcaggccatttacgaaggtggattgctttacctgctgtttgtctatttaaattcgagtcttgctatcattctaatattaaacttgaaaatcaaattaataccattttgcattgcagggattagatggcatgcatagcctagcccagaagtgtgttcagtcaaagccagttaacacttcccataagcttctaagactgcttattggaattcttggagaaaatactgaggtcagtagtacatcttatacctagtcagaggtgcaactgtttcagctcttcgccactttctaatccagcatggtgtaattaaatgatgcaggttgttctggcagagtgttccaaagaatttggctcctggtaggcaggcgatgtttgtttctggttactaagtttattgagtacgctatactcttatctatatgaatcaggacgagacttttcatgtttttgttaggatggttgcacatgccatggaattattgacagctggaagcgaagaaggagaagttcttgtacatgaggaacagcgtaagttgggtggaattaacatggaagagctccatagacttgtttatgctcaagttctttcttctcatgctttgacttggcaggtacctttcttttatgacttatcaagtaccttccctgtaatcaaatcggcacctttcttattacgcttcttgttatatcaaactcttccatattgtgtttgaaatttgcagatagctcctatttatctagcatcgtgcgagaaacagggattaggcttattagagctgttgttctacaggcagcctgttcaagagaatcagatgcttattaaggtttcattatttcagttgcatttgtacatcaattctagttctggtttgtcgtttacaattctaggatcttgtcagaagccttcacctggtacttatgtttctcctgttgcagagcctagagatttgccgtctctatgaactcagtaatgtcagtgctaaactaatgaaggtattgatatattgaggcactattttacgcttgtattctctaatctccaaattgggcggaaaaaggaaaaacagatttaatctgaagttatggttttcagatttctggagtgcatcattggaaacatgggaggaaaggctcagggattttctggctccagcaagctcgggacgaaaattgtctcagcgtgattgctcaacagctgtttgattctgttggaaaatcattgtctgatgaaagtctcaaggtatatattctctaagacatactcaaagcaaatttcagtatataatatcactgtgggttcttctatctgtgccctagatgacgttgtttcatttcatacatgcagcaatgggaaggcctagtcgagttgctgggttcggaatcacagatctctggtggtctcgattttcttcacaagtaatttgtcatctcttactctctatgaaaatgacttgtttttgtaaaaatctaccctacattattaattgattattgatgccatacattccaggtatagagatttcaagagatcgctgaaggtagtccatgatggaaaaactatagatgcagctcatgaagccgtagagagacttgtatgggtgtc

SEQ ID NO: 138564 - DNA, 1314 bp, Arabidopsis thaliana landsberg
tgatgagtgactctcagcgatcactttctgtgcgattgagccgccggggtgagagaagcaatcattactcacaatctaaaggtctcaacccaactctttttgaactaatgatcatcactttcttttaggtatagtggtttacacatgaaaatttgaagatgacccccgttatagtgttttgtttccactatagaagaatctaatgcgtaatgaatgattatgtcttcgtaatgaatccctaatggattctattactttgtctccaatgatgcagatgctgtggctggcttcttctctcccaccagattgcatgctgattacactttgaaaaaaatttggaaggcaggcttccttcgcttgcttcttgttggcggcattgtctggatgctactcattctatttgccctcttgtttcatgtttggtcctgtcaatcttccctttctttcttctcaggtttcctccaacttctttacacttgccattcttcactatatctatcatttgtcatacactcaatagaagatgttgttattgtactagttactccaaccatcttctgcattcaccgcagattctatcacagtaatctcatgttctttgtaatttcgttgcagctatttgcaacaaagaaggcagactctatgtcatgttggacactattggatttgtacctaaaccccagcaccgtaagatttttatatcactctgtttagcttctgcttattctagagctacgcttagcaactcttcttttctaggatgccccattcccgttgcttatgaccctgataaggtgctcctaccaagtgataaaaccgcagatacaattgtcagaaatttgacctacgtaacagaggatgaatcctctaagtctcagtttcctctatttggcggaaacataagctggtctgaacgagaagaaagcttcaaactgaaacctgagatgaaggtaaaaggcttgttttaaggcaatggctaaacctcttctaccattcttcccacgaataatttctaaattatttatttcattacaaccctaaacgtttcaggtccattgcggattcatgccacgtggtggtgctgaaatgtcatctctggataaagaatacgtaaagaagtgcagatttgttgttgccacggggattttcgatgcatatgatgaaccccaccagccatcaaacataagcaagcgttctatgaatctcttctgtttccttatggtggtagatgaggtctctctcgatttcttaagaaaaaatactactgtgaggaaagatgttaaggaggcaaatgggttggcatttggcgtctga

SEQ ID NO: 138565 - DNA, 497 bp, Arabidopsis thaliana landsberg
gagattgaacaataattcaaatttatgaaacaaaaactaaggttcaattcaatacttattcattcatctccaatattattacaaatgtaacaaataaatacacagcgagcaaaacagagttcgattttcgaacaccattttcgctcaccatcttcaatttcgattccacaaatggaattccaaaaaaaatcaaatcaattaaacaagaatattaacataatttaataaactcaataaaaatgagagcttgatgaaccttttttgtcagaagactagttattattggcatgctttacgaagaagctctaacaaagatatggctttccttttgcctctctctgttccattcttcgatagatccatcaacgggacaaccgcaccgagtctaccgatagtgatcagtttctcagtgtctcttttacacagcgaaagcaatatcgctgctgcgttctctcggtttctagtttgatccgtttggagaatacctatcaacgcgg

SEQ ID NO: 138566 - DNA, 1353 bp, Arabidopsis thaliana landsberg
cattcatccatcttttaatcattactcgagattctgtttccatggccatatcctcaaatcttctcctttgtctctctcttttcattttcatcatcaccaaatccgccttggctcagaaatgttccaactacaaattctccaccaaccgtctctttgagtcttgcaacgacctacctgttcttgattccttcctccactacacttacgattcttcttcaggcaatctccaaatcgcgtatcgccacacaaagctcacccccgggaaatgggtggcatgggccgtgaatcccacatctactggcatggtcggagctcaagccattgtggcttatccacaatcagacggcaccgttagggcttacacgtcacccatcagtagctaccaaacgagtctcctagaagctgagctgagtttcaacgtctctcagttgtctgccacttaccaaaacaacgagatggtcatctacgcaattctgaatcttccacttgcgaatggtggaatcattaacactgtgtggcaagatgggtcactgtcagggaacaatcctctgcctcatccaacttctggcaacaatgttcgttctgtttctactcttaaccttgtctctggtgcatctggatccacctctaccggagcaggaggagcttccaagctacgcaaacgcaacgtgagtccatggttttatcaatttcttcatttcatgttttttaggaatctcacatatgaaatgagatttatcaatcccatcattgttagttggttttatgaaacttatcactcctaatcattattgcagatacatggaatattgaacggtgtgagctggggtataatgatgccaataggagcaatcattgctcgctacttgaaagtctcaaaatcagcagatcctgcttggttctaccttcatgttttctgccagtcttctgcttacatcattggtgttgccggttgggcgaccggtctcaaactgggcaacgaatcagccgggattcagtttacctttcaccgtgctgttgggatcgctctcttctgcctcgcaacaattcaggtaggttttagttaacagtacagagagtattacacttgtcatgaatatgttgcaattactaagttgcttgtttcacacgttaggtgtttgcaatgtttttgagacccaaaccagagcacaagtacagagtctactggaacatttatcaccacactgtaggctattcagtgatcattcttgcggtggtaaacgtttttaaaggactagacatcttgagccctgagaagcagtggagaaacgcttacaccgccataatcgtagtactaggtatagtcgcggttgtgctcgaagggtttacttg

SEQ ID NO: 138567 - DNA, 2284 bp, Arabidopsis thaliana landsberg
atgcacatcggtgttcttgctgctgctgctcacgcaaccgccaaccgtactccttttttgatattctataatccaaggttagctcaaaagcttcttcaatcctcaatgatataaaactattttcttagttgtaacgtaacttatggtgtttgttctcagagcttgtccagcagagttcgtgatccctctagctaagtaccgtaaggcgatatgcgggtctcagctctcagttggtatgagatttggaatgatgtttgaaactgaagattccgggaaacgaaggtaagttatccgtaaactgcaatctttctgtttttgtttatcaaatttggttgttcacttatacacgttttggttgtgtatttaggtacatgggaactattgttggaatcagcgatttggatccgttgagatggcctggttctaagtggcgtaaccttcaggtagaatgggatgagcctggatgtaatgataaacctactcgggtcagtccatgggatatcgaaacacctgaaagtctcttcatttttccttctctgacctcaggactcaaacgtcagctccatccatcttactttggtgagtaaaatataagtgtgccttgttgtgaactttacatgagatttgctgccttaaacttttgttatgaaatatgcagctggtgaaactgaatggggtagcttgataaaacggccacttatacgtgttcctgattccgcgaatgggattatgccatatgcatctttccctagtatggcttcggagcagcttatgaaaatgatgatgaggcctcacaacaaccaaaatgtaccatctttcatgtctgagatgcagcagaatattgtaatggggaatggaggtttgctaggagatatgaagatgcagcaacccctgatgatgaaccagaaatctgagatggtgcagccacaaaacaagctaacagtgaacccatctgcttctaatacgagtggccaagaacagaatctttcacagagtatgagtgctcctgctaaacctgagaactctacactctctggttgcagctctggtagagtccaacatggacttgagcagtcaatggaacaggcaagccaggttactacatccacagtgtgtaatgaggaaaaggttaatcagctacttcagaaaccgggtgcttcgtcgcctgtacaagctgatcaatgtcttgacattactcatcagatttaccaaccacagtctgatccaataaatggattctctttcctggaaactgatgagctgacatcacaagtctcttccttccagtctcttgccggatcatacaagcaaccattcattctatcctcccaggattcttcagctgttgtgttaccggattccacaaactcaccgctgtttcatgatgtgtgggacactcagttgaacggtctcaagtttgaccagttcagtcccttgatgcagcaggacctttatgctagtcagaatatctgtatgagtaatagcacaaccagtaacattctagatcctccactctcaaacacagtccttgatgacttctgtgccatcaaagacactgatttccagaaccacccttctggttgtttggttggaaacaacaacactagctttgctcaagatgtccagtcgcagatcacatcagctagctttgcagactcacaggccttctctcgccaagattttccagataattctggaggcactggtacatcttcaagcaatgttgattttgatgattgtagtctgcggcaaaatagtaaaggctcatcatggcagaaaattgcgacaccccgcgtccgaacctacactaaggtaaaaagattatctctcattcattccacaaatttcttgtgtcacaatctgacatgaaactttggggtttgggtaatgttttgacttggcaggttcaaaaaaccgggtcagtcgggagatcaattgatgtcacaagctttaaagactacgaggagctaaaatctgctatcgaatgcatgtttggattggaaggactactaactcacccacaaagctcgggttggaagcttgtatatgttgattatgagagtgatgttctgcttgtaggagatgatccatgggagtaagtctctctctcactgttctgtgaatccattaacttcatctgactatcagtcttacaatagttttccttacataactacataaactggtgcagagagtttgtgggatgcgtaaggtgcataaggatattgtcgccaactgaggtccagcagatgagtgaagaagggatgaagcttttgaacagcgc

SEQ ID NO: 138568 - DNA, 1060 bp, Arabidopsis thaliana landsberg
gcaacatatttgcatttggactcttcgtttcaccaatgtgagttcttcttattcacttattcgttgtatgtattaaacagagtttttctttgtctatggacttgactgttttttcttctttcaggccaacgtttaggaggatcatgaggaacaaatcgacggagcaattctccggtttaccatacatttacgctctcttaaactgcttgatttgcctttggtatggcacacctttcatatcacacagcaatgccatgcttatgactgtgaattccgttggagctacgtttcagctttgctacattatcctcttcatcatgcatacagacaagaagaacaaggtttttggattgtttctacttcttactcacacaaacaaagtattgtttctttttctaactctaaatcaacattttgatcatggcagatgaagatgcttggtttgctttttgtggtgtttgctgtggttggagtgattgtagctggaagtttgcagatacctgaccagctcacacgatggtactttgtcgggttcttgagctgcggttctcttgtttcaatgtttgcctcgcccttgtttgttattgtaagttcccaaaaaatgtcaacaaatcttttcaaaatatatatgtagctttcttgattgcctgacttgtttggtctttgcagaacctagtgattcggactaagagcgttgagtttatgccgttttatctctcgctatcgactttcttgatgagtgcttccttccttctttacgggttattcaacagcgatgcctttgtttatgtaagttactctacaataattgctaatggattaatctgtacgttttctttcattagagtattgacaaaactcgttgtttttttggccactcagacaccaaatggaataggaacgattcttggcattgtgcagctgggctttgtactgttactaccacaggaattctatagaagaagaaacaaaagagcctttgattgtttcttacgtgtgaggttcgcgcaaagaagcaaatttatagtggggaaattaaaagaaaccagaaaatgtggtg

SEQ ID NO: 138569 - DNA, 849 bp, Arabidopsis thaliana landsberg
atgctaaatgaaaccatcgaatcatgttttgtttttgaaacaacattattacgtaagaatctaactaatattcgaagactccatcctaaagcatttctctatctctttaatatataagttccactaacctctcttctcttcacttcattcacataagtcataaccttgaaagatgacgagtctctacagaaacacatcctcttttgtttatctcctgttttgtctcttcatcacatcttcgtctgcgggttcctttatacgacaattcagtgatgacttcaacacaattcaacagcgtataaaatctctttcactcttagattcatctacgtaacttagattttgtgtgtggacataatcctctgtttttttttcttttttcaaatgctctgtttttttgtctgaaacagagaagggaaaagatggaccaacaccaaacctggaaaaaggaaattacttgcataaacataatgagatctcatcatcacttgattataaagtatcagcttcaaacatagtgaaaggtctaacagaagttcctccctcgtcttactctttcaagatagagtcttataactcgttccttaaaatcccctacttgggattcgaatctcgtccctttgcagctggtggatacaactggtatgttggtaattctgatcttcattttcatgaatcgaatcttatgtaccaaaaatcttttgatgggtcttaaaagacatgatatataatacagggtacttaaggtacaccctaacgggctcacgtgggatggtacttcaggatacgtttcgctttacgtactcttacacgaatcgacccccatcactgcagatcaagtcgtttacg

SEQ ID NO: 138570 - DNA, 1639 bp, Arabidopsis thaliana landsberg
atgggggaaagagatgatgggttgggtttgagtctaagcttgggaaatagtcaacaaaaagaaccatctctgaggttgaatcttatgccgttgacaacttcttcttcttcttcttcgtttcaacacatgcacaatcagaataacaatagccatccccagaagattcataacatctcttggactcatctgtttcaatcttctggtaatacttttctatttctcgttttaatataatgtttttttaagcattaaatgtgttgaaattctgttttatgtgcataacttcggatctatgtttcagatccgattcttttttaaataaagatatttctgttttagtaatttacgaaactgaagctaaaaacgtttttcgggttttgatgtactctagggattaaacgtacaactgcagagagaaactccgacgccgggtcatttctaagaggtttcaacgtgaacagagctcagtcttcggtggcggtagtggacttggaagaagaagccgccgtcgtctcgtctccaaacagcgccgtttcgagtctgagtggaaataaaagggatcttgcggtggcgagaggaggagatgaaaacgaggcggagagagcttcttgctcacgcggagggggaagcggtggtagcgacgatgaagacggcggaaacggcgacggatcaaggaagaaactacggttatcgaaggatcaagctcttgttctcgaggagacttttaaagaacatagcactcttaatccggttagtggcattttgtgtaatttttatctaacttataaattcagttaattacattttcgttatttgtcacttcttattgcatggacgtttgtgattggcttctctctaaaagactaaaattggtttttttttttttttttttaattatcggattgggcagaagcaaaagctggctctagcaaaacagttgaatctaagggcaagacaagttgaagtgtggtttcagaaccgtagggcaaggtaaagaaattatctttattttctaggggtattataggaaatttggtttcacagaaccttagtaattgctatgatggggatataattgtccttttatgacccaaaagcgatttcagttccctgtcctaaaagaaaatcctaataagatctctgcctctgtactgtcacatggagtttcttactttttactacagccttaaagacacatgcatgcgtatgcgtacaaataaaatctacttttgtccttttttgtttcttatcagttttaaacttttatttctgttcacttcactaattaaggtgattttgatttattatttgtacgtacattaggacgaagctgaaacaaacggaggttgattgtgagtatttaaagagatgttgcgataatctgaccgaggagaatcgacggctgcagaaagaagtgtcggagctgagggcgttgaagttgtctccacatctctacatgcacatgactcctcctactactctcaccatgtgcccttcttgcgaacgtgtctcctcctctgccgccactgtgaccgctgctccttccactactactactcctacggtggtggggcggccaagtccacagcgattaactccttggactgctatttctctccagcaaaaatcaggtcgctag

SEQ ID NO: 138571 - DNA, 1425 bp, Arabidopsis thaliana landsberg
tcacggctcagaacggctacttcaatggttcgttcgggcttggtacagacagagtctacgccatggggatgtgcgctccaggtgctgaacctgatgtttgctccaactgtattaagaacacagcagagggtttactacagatctgtctaaaccagacggacggtttctcatggtctggtgaagaaaccctttgccttgttcgttactctaacaaatccttctccgggctacttggcttggagccgtctaatgatttcttcaatgtaaacgaaataagaaaagaagaccagaaggaatttgatagtgtgtttgatgagttaatgtttcgtacaatccaaggagcatcttcatcggtgagaaacaattctaattctttatcattgtctggtaaatattatgcaaaggatgtagctcctgaaccggtttacgggaacatatcggtggtgatgcaatgcactccagatgtttcttcaaaggattgtaatctttgtcttgagagaagtcttgatttctataagaaatggtacaatgggaagagaggcaccattatattgcggccaagttgctttttccggtgggaattgtatactttctttggtgcttttgatagtattaatgctagacacccaccgcctcctccacgcccgctttcaccgccccctttaaagacgccttctgtaaccaaccaaaccaatattaccaagaagaatggcaagtccttttttgggtaacattttagagcaaatttgtcacactttttcggctttgcttaattatgttgttggtgcattgtgttttttgtgcagatagtagaatctcaggaggaactatcgcggcgatagtcgttgtagttgttgttacaataatattgattgttgtaggcttggttatatgcaagagaagaaagcaaaagcaagaaattgaacttccaagtgagtttttcttcatttgtttggtttcggtttttagaccttaaaaattgaagtggaactttttaacgagcttaatagtcgttttaaatgaagcggaatctgttcagtttgatttaaagacaattgaagcagcaacgggcaacttttctgagcataacaagcttggtgcaggtggatttggtgaagtttacaaggtatatatatactctctttgttgtccatctagtttgcttcctatgtggagaatataggttatgtgcttaatctgttagtattttcaagggtatgctcatgaatggcactgaaattgcggtgaagagattgtcgaaaacatcaggacaaggtgaagtagagttcaagaccgaggtggttgttgttgcaaagcttcaacacataaatcttgttagacttctcgggttttcgccacaaggagaagagaagttactcgtctatgagtttgtttcaaacaaaagcctcgattatttcctctttg

SEQ ID NO: 138572 - DNA, 541 bp, Arabidopsis thaliana landsberg
gaagcaagtagagagatagaggagagagagtttgataaagagagagaaaaagcgggttgcgatttgggagaagagaaatagagaggagaagcattagagaagaagaagaagaagatggatagaaatagagaagctagaagagtacctatggcggctgccggaaatggtctttcccggcggagacatagagccggaagtttcagagattcaccaggtttgtttttgaatctcttgatttggtttgtttttcatcagatctgagagaaaacgtttggttctgatttttctgaacgtttttttcacagaggaggaaggtccggtggagttaccggaggcggcgaggttgagagatcgaggagggagtaataagaaggatcgagatcgggaacgtgatagagacagagagagggaaagagaaagagatagggagagagatcggttaaatagccggagtaaacggcggagaggagaacgcttaatgatggttcacggtaatctagacgacggtggcgacgatagctcggaagagagtgtcaacggg

SEQ ID NO: 138573 - DNA, 717 bp, Arabidopsis thaliana landsberg
cggtaacttagatgttccaccaccagcaccagctaacttcatccgtcctggaaaacgacctttgtcctctatgtcacccaccattgtactcaaggtaaggggaaaaaccctattacttgtgatacacgaaactcttaattagggatataaaagatagttatctcctcttttgtttacttaggacggtaaagtgaaagccgctgtgggtgcgagcggaggagccaacattattgccgggacaacggaagtttacttgaatcattttttcctcaagatggatcctctttcttccgtcttagctccaagaatctaccatcaggtttgttacgttattattacttgtacacaataaaaaagcttacctttttgtttcgtaactaaaatttgcgattggtaatgtcattttcagctgataccaaacagagcttcgtacgagaactggacaacagtattcaatgatcatttcgagattcctaaagcaacaagagttgtgttggagaagaaaggtcatgtcctatctcctattgccggagggacgattgctcagttcatagttcaagaatccggtgagaactccggtggaagaagtgagcttgtggcagttagtgatcctcgaaaaggagggttcccttcaggatattgagaattttagatcgagatttattttatgtttttattgtttctttgattattgaaccgaacgttgtgatgaatata

SEQ ID NO: 138574 - DNA, 312 bp, Arabidopsis thaliana landsberg
tagaattgaagacaaacctggaaatcagaatgttacattgactagagactacaatggggaacatattaaagttgttgtaagcatgcctagtcttgtttcagatgaaaatgatgatgatgatgatgatgatgatgaaggtcctagtaatgaatcgagtattccactagttgtgactgttactaagaagagtggactcactctagagtttagctgtatggcttttcctgatgagattgctatagatgctttatctgtgaaacatcctggggactctttggaggatcaactggctaatgaagggcctgattttga

SEQ ID NO: 138575 - DNA, 1524 bp, Arabidopsis thaliana landsberg
ctcttctcattagatcctctctctctctctctcaaaaagagaaaatctcagagccagaagaagacaaatatatcttttctattcctcagatctctgaaatcgaagtttctcgaactgttttgttttgttttttttccgatgaggtgtaagagacacacagtagatttcagtagcagtatcggcgtttgtgcttcttgtctccgtgaacgactctttactctcgccgtttcaaccgccgcgtctgaaaacgacgataacgatcatcgtcattctcgtatttctccacctcctctgctttttcctcgttctgtttctccttacgttgctcctagaaaatccgacgccggaaccggaaccggagctggaggaagagactccgtagcttcttctaataaccgattcttcgcaacgccgcaagtggttgttcaatcatcgtcatcggaaaaagtcttcgaatcagacagatcgtttaagaagaaaaaaagcggtttatctagattctctagcttcttcagaacgagatctgacgattacgattcgcgtcgcgattcatgcgacgcctccacggttttttctcaaccgtcgtcggcgacgacttcacggtcatggttttcgaaggttatatcagttcgatcgaagaaacaatcaaccaccaatacttgctacatcgaagatttgatcgcttccgaatccgatcatcatcatcataatcaaaatcgacctagacagagatattgtagaggaatgtcgccggcgggagattcaacgacgaacgatgaatcagttgaggaatctccagggagattaagaagaacgccggtgatgggaactccgggaaggaaaaagacggcgacgattgggattggtagaagtgtatcagggatggctttttgcttaagtccattagtgagagctaaacctaactgttcttctaactggaaagcgaaatttccgccggattttggatattccggtgaattgaaatctccggcgaagcctcacctatcaacggcggcgtctttttgcggtaaccggtctaagaagcttgtggatttaggtagagttgatcaccgccgttgattttttttattttggtgggattagtctttggtcaacgtgtttgactattggatagtaaactacggctttctgaagatggattttgccaaaatcaagctttttatatggcttgtggtgaataatctctatgggaaatagctcaaacaatacttttgttataaaaaattgtaatgttttctgattgtaattgtagagtttgaatggccaaatatattgttcttaggagattaagagaaataatgtagtgtgttcttgtttttttacttatgagaattacttaccgattattaggacaagaaatcaagataaaaccggatcgattgattggtagaaccgtggaacctgatcaaaccggatctaaattccaaaaaaattggacaaaatcagtatgggttcgtatagcggtaagatcctatatgaaccgtgccaataataccgaatcag

SEQ ID NO: 138576 - DNA, 1805 bp, Arabidopsis thaliana landsberg
ccacagttttctcatccctccagaaaaacaaatcatcccaagtaatcctaactatacaaaacacataacaatatggctccttcaacaaaagttctctctttacttctcttatatgtcgtcgtgtcattagcctccggtgatgagtccatcatcaacgaccatctccaacttccatcggacggcaagtggagaaccgatgaagaagtgaggtccatctacttacaatggtccgcagaacacgggaaaactaacaacaacaacaacggtatcatcaacgaccaagacaaaagattcaatattttcaaagacaacttaagattcatcgatctacacaacgaaaacaacaagaacgctacttacaagcttggtctcaccaaatttaccgatctcactaacgatgagtaccgcaagttgtacctcggggcaagaactgagcccgcccgccgcatcgctaaggccaagaatgtcaaccagaaatactcagccgctgtaaacggcaaggaggttccagagacggttgattggagacagaaaggagccgttaaccccatcaaagaccaaggaacttgcggtaattaccaattatgctttttcctttataatcaaactgatattattaacgaacgtctatatttacacatggttcgtaacagaacaaacttttatgttatattttgtgtaacttaacatgtaacacatgcagcatgtgtattgatgttaatatttgtgtttgtgtattgatcaacacaggaagttgttgggcgttttcgactactgcagcagtagaaggtataaacaagatcgtaacaggagaactcatatctctatcagaacaagaacttgttgactgcgacaaatcctacaatcaaggttgcaacggcggtttaatggactacgcttttcaattcatcatgaaaaatggtggcttaaacactgagaaagattatccttaccgtggattcggcggaaaatgcaattctttcttggtatacactcaaaaacagagttgctctgttttcactttattttcaagaattgcaaaatctgattatttttcctatctctttgtgtttttgcagaagaattctagagttgtgagtattgatgggtacgaagatgttcctactaaagacgagactgcgttgaagaaagctatttcataccaaccggttagtgtagctattgaagccggtggaagaattttccaacattaccaatcggtaagcgaaccgacattgatttgtgtattaagtaacaaaaccgggtttttggatttttattaacctgattggttttggttggcagggtatttttaccgaaagttgtggtacaaatcttgatcacgcggtggttgctgtcgggtacggatcagagaacggtgttgactactggattgtaaggaactcttggggtccacgttggggtgaggaaggttacattagaatggagagaaacttggcagcctccaaatccggtaagtgtgggattgcggttgaagcctcgtacccggttaagtacagcccaaacccggttcgtggaaatactatcagcagtgtttgaaatcaagacgctcgataaacatttgggattcttataactgaatttaatctcgtattgttattattgtttgtatgtatagtatttcaacaacaatttcaaaaattagttgattcatcataaggatataaaatttataaatccttatgtcgatcaatttcttttttattcaaagaaagattgtttgcttgttttatgtattaagagaaatataataaaatgatatatttcttaagagccattggttt

SEQ ID NO: 138577 - DNA, 4265 bp, Arabidopsis thaliana landsberg
  unsure (1)..(4265): unsure at all n locations
atggtagaagcagatcctatgattatttcatcctatcattatttcctaaataagtcccctaaacttatgatgtcactctttgcttacaatcaggaagaagaagaagaaaggtcggacaggtggagcagtttcttggaagatcatgttgaatcgactgagttnnnnnnnnnnnnnnnnnnnnnaaatagtcacacaccgtttagtgaaagtgagaaggaaaaagaaaaagaattaaacaaggggactggtgaagatctgcatactgacaagttaggttctgatgtaactcctgataatgccagtgaagaagaaggacaccccgatgcagagaagaatgttcacagagtgcaattatggactgagatcagaccgtctttacgatcaattgaagacttgatgagcatccgtgtcaagaagaagggggatttatcaaaaagcgagcaagatgctccgaaggtgaaggtttcaccttcatttgatgatgccaaatcttccaagggagcatctgatattgattctgaagacgagttctatgatgttgagaggtcggatgttcaggatggttcttcttcagatggtacaagtgtctctggtatccctgttgctgctgatgcaagtccactgtctacatgtccttggaaggaagaacttgaagtgcttattcgcggcggtgtacctatggctctgaggggagaggtaataaatcttttaatgtttacattcctatgtgatatcatgctctagctctccatactatagttcgttagtcttagctcttgctcaattataatcgtcacatttatcaataacatttcagttatggcaagcatttgtgggtgtgaggaaacgacgatgcaaggattattatcaaaaccttcttgcagcagatggttctgtaaacaccatagagcaagaggatatgcagcatgttgatgataaaggttcaagtacagaatctattgctgttgtggaaaaatggaaaggacagatagaaaaggtagtactcaaaatttattcagccttgaccctctctatgtagtggtgcagtgtggcttatgctgaagttgatcaggattcttatgccgttgcttgtttcaagtacaggacttacctcggacatttcctggtcatcctgctctagatgatgatggtagaaatgctctacggcgtttgcttactgcttatgctaggcataatccttctgtaggatactgtcaggtattggttcttaaccaatatcatgatctttattatagtacctctagtttagtaccgagacatagtaaattaacattaatatcaagttaatatcttttgtcaatatactttctgcaggctatgaatttctttgctgcgcttttattgcttttgatgccagaagaaaatgccttttggtatgttcacaaatttgatgaatttatcatctccaagtcctaatattgtttcctgtgaaaattaaactctttggatctgtgtttactgtttagtttgtgttatatcgccttccttcttccaaacagtaactgttcttgggtcattctctgtatccttatttctacctaaaccaatgttgtttgattttctactattttcattcctaatcttattttttctgtctaaacacgaactccgtgctctgtgtttagttttaatatctatcactttcatattctcatggttgatcaaactgttattaggcatccttatatcttctcctattttctttctaaaccgatgccccttctaattaaatacttgtgatttttagggcactgacaggactcattgatgactacttcaatggttattactcagaagaaatgatagagtctcaggtgataatattagttgcctttctatacatttgcaaaaatttcggggctgactggtgatagcatcatgacaacatgtaccttcatattttaggttgatcaactagttctggaggagttagttcgagaaagatttcctaaattgggtgagttccctcaaagattttttgtttcatcttgtagaatgttcacagttagtactaagctctgcaacttttgtatgtctacagttcatcatctggattatcttggagtgcaagtggcttgggttacagggccatggtttctttccatcttcatgaatatgcttccatgggaaagtggtcaggttttaaacattggaattaaagctgtcttgtttgaaagagaattgagtaactagtaaattatgctggcaatctgttaaaatttgatcatctttctctttgagatttgggactgagaacccattttctttctaaatgttcgtcttcttgatcacagttcttagagtctgggatgtgcttctctttgaaggaactcgtgttatgcttttcagaacagcactcgcattgatggaactatatggtacttgattgaaactgctggtctttcaatttaagtgatatggtttgtggaccttctgaacgcagtggcgtcatcatcgagactgctctaacttatgggttaattcacttcaggtcctgcattagttactacgaaggatgctggagacgctgttactttgctacaatcactgactggatcaacatttgatagcagccagctagttttaactgcttgcatgggttaccaaaatgtacatgaaattagattgcaagaattgcgaagcaagcatagaccagctgtgatcgctgcacttcaggaaaggtcgaaggggcttcaagcttggagagattctaaggagcttgcctccaaattatataattttaagcaagacccaaaatctgtattggtggatagcaaagcctcattgtcaaatgggagtttgtctcgatctgagtcaggatcaagtaatgctgatgaagtgttggttagcctaactggggatggggaggtagattctgttcaagatcttcaagcgcaggtaattttttgtccttcctgttggcttgaagatactcctctaggcccttagtacacttgaatggtggatgaatatgtctgttgaaacggtagaaaaaaacacttgatacctacagtcatgaaaccccctctgaaagttgtctgacaactttttcaggttctgtggttgaaggctgaactctgcaagttgcttgaggagaaacgatcagctctacttaggttagtttcttttctcaacctaaaactggcactaaatggtagaagttttatatctttccttatcattcctcaatatgtaatgtctcccaaacttctgattttgtggtagagctgaagaattggagattgctctcatggagatagtaaaggaagacaatcggcgtcaattgagtgccaaggtattccaatgaagcttgccacttgacagttaattttccaattaagcatatatgctcgcattatgttacttgtctctttgtccatgttctgaatacgaagactattttttctgtcacttttaccaccattactttcctttctctctcttttcttctcctgctggttcattgtcacgcatctctgtggtgatccaatttgaaggctcattggtgctaagttagttttgagatagtcttgagatgtgaaatgctacttgtcatgaatgtgaacttcaggtcgaacagttagagcaagaaatggccgaagttcagagactcctctctgataagcaggaacaagaaggtgcaatgctacaggtttgcatatgcatgatcaatctgttcttcttctgttttcgtttgtggctgagagagattctgagattaattgatatgtatgaaggtcttgatgcgggtggagcaagaacagaaggtaacagaagatgcacgaagatttgctgagcaggatgcagaagcgcagagatatgctgctcaagtcttgcaggtaaaaaagtttgatctgactcctactaacacagatgtgcctaggctatcaagtttaaaagagctttaattgcctctagttataggtcattactcgccttccatggagtagagttacacattagtttaggaacataattctctgtaaatcctgtattaacccttgtctgtatgttttcagagctgcgtgttttgaatgcaactttatatcttcttcctttttttgtattctcctgttctatcttagatcgtttctgtaacgaatatgataactggtctaggaaaaatacgaggaagctgttgctgcactggctgaaatggagaagagagcagtgatggcagagtccatgctcgaggcgactaagcagtatcaatctggccaactcaaagcacaaccttcaccacg

SEQ ID NO: 138578 - DNA, 1192 bp, Arabidopsis thaliana landsberg
aacaaaaatgctgaatgtacttcgaaattctaacctgacccttgccgttttgatttgctttgtcttgatagcttcaaagctatgttccgtcgattcctctgtgtatgacccacacaaaaccctgaagcagcggttcgagaagtggcttaaaacccacagcaaattatatggaggaagggatgagtggatgctacggtttgggatatatcagtctaacgtccagttgattgactacatcaactccctccacttgccctttaagctaacggataatagatttgcagatatgaccaattctgagtttaaggcccattttctcgggttgaacacgtcttccttgaggttacacaagaagcagagaccagtttgtgacccagcaggcaatgtcccggacgctgtggactggaggactcaaggtgctgtgactcctatcagaaatcaaggaaaatgcggtatgaaattatgtttttacataattcattctaaacataaaaccttgcaaacattcattattcaactgatgacattctgattgcgttttgtttttcttgttgcaggaggttgctgggcattctctgcagtagcagctattgaaggcatcaacaagattaaaacagggaatttagtgtctctctcagaacaacaactcatagattgtgatatcggcacttacaacaaaggctgtagtggcggattaatggaaacagcatttgaattcatcaaaaccaatggtggactcgccacggagaccgactacccatacacaggcatagagggtacctgcgacccagaaaaatccaaaaataaggtagttacgatacaaggataccaaaaggtcgcccaaaacgaggcgagcctacaaatcgctgcagctcaacagccagtatcagttggaatcgatgctggtgggtttatctttcagctctactcctccggtgttttcactaattactgtggaacaaatctcaaccatggagtgactgttgttggatatggagtagaaggcgatcaaaagtactggatcgtaaagaattcatggggaactggctggggtgaagaaggctacatacggatggagcgtggtgtaagtgaagacacgggtaaatgtggtattgctatgatggcaagctatcccttgcagtgagtccatgaatctccataagcgttagaaccttttccttttggataacaa

SEQ ID NO: 138579 - DNA, 2338 bp, Arabidopsis thaliana landsberg
  unsure (1)..(2338): unsure at all n locations
atgcagagtcgtgtttcaattgataaagccgataataaaaccaacttgacgaagctttttcaagaacgaggaaaaaaagccgttaaggcgcgtggattctcagccgtccgtttcgtaaccgtagactccacgcgcctctcgggtaattttcgcaggtgggtgtctctgttgatgatatgaaccaagaaaatatcttcaaattattgaacacaaaagtaagaaaaaagtgagataataaggaaattaaaacaataaattatcctttcggtgggattttttttgtcgtcttctattgtttttgtgagtgtgtgtgtttatataatggtaagagatctctgatctctcaagcttctctatagagagagtttcttctcatgctctttctaccaaggagaagattttctcgttaattttgtttgacttgcctcttcgaagcaacctgattctgtggtctgaatcttttcaaggtatatatgtcggaacaaattagagcattgattgattgttgttcttacattttctatcgatctgtttcaagaattcttgttatttctgattgatattttcgtgtgaatatatatgtagagatttgttcttatcctattcgatttgtaatcgtaaatgagatctggttacataatgctgtgaaaattgttgtctgagtcacatatttcgtgtagaaatgacaatgaagtttatttgtggctaaagaatcgacaatagatattttcatttgattgatgcagggaagagaagataagctaaacaagagaatggtgactggttgtgttgatcttcatcaatctttcaaatctgcagattcatcttctgtgccaattcctcctcctcttccatcaaaatctgatggactcaagaaaaaacttgggcatagcagcgtttcgacagccacaagagatatgtgggatcgtcttttcaatgacggatacaaagctgatgtagtcatctacacagataatggcagtatcatctatgctcatgccaacatccttgtaagctctccttatagttaggatctttagctaggagaatacagactttagcggttgattagaaagctttccatgataaagctctagacttggttgatattgacgttgtcggtttaaaaaattaatagggaactgcttccactgtgatcaaaggcatgttgaagcaagccaagagacatggcaagtggcatacaatctcaatccgtggtgtccctcatgatgctgtgcgagtttttatccgtttcctctactcttcttggtataataaattccatttcttcttgctctctatacttatttgctctgcctcttttaacattcgtcttatgatcttttcactgacgaaatctgatttcctttgtgtagctatgagnnnnnnnnnnnnnnnnnnnnnnnnnnnnnnnnnnnnnttctgtcacacgcgtacgtggttcctcagctgaaacgggtctgtgaatggcatctagaacatggtttgcttaccactgagaatgtggttgatgtgttccagcttgcgctgctgtgtgatttccctcggcttagcctcatatctcaccgtatgatcatgaaacactttaaggaactctctgcgacagaagcatggacagctatgaagaaaagccatccctttcttgagaaagaagttagagactcagtgatcatcgaagcaaatgtaagtagtgatttaataaacttcctttttcccctgtattttctcctaaattctaaatcttgaacataaacgcagacgcggaaagagaggatgagaaaacgcaatgatcagaggatatattcgcagctatacgaagcaatggaagcacttgttcatatatgcagagatggatgtaaaacaatagggccacacgataaagatttcaaaccgaaccatgcaacgtgtaactatgaagcttgcaagggattagaatcactgatccggcatttcgcaggctgtaagctaagagttccaggaggttgcgtgcattgcaagagaatgtggcaactccttgaactgcattcacgtgtttgcgcaggttctgatcaatgtcgagtccctctatgcagaaaccttaaggagaagatggagaaacagagcaagaaagatgagtcgagatggaaacttctggtgaagaatgtattggggagtaagaaaatcggaggctctcctttctttttaccggtgacaaactgttaaaaaacattttgtcaatctcaagaagggcgagttttaagcgtttcttgtgatcctatctttaaaacaagtgtaacataatgagtttgaataaatgacacatattttggtcggccaagagagtctctggaatatcaaa

SEQ ID NO: 138580 - DNA, 3814 bp, Arabidopsis thaliana landsberg
tgttattgacttgggcggtaatgcagatgggtcaatgaacctccttgtgacttttgtggtaacaaaaccataggccaggggatgggaaacccacttacctcggagcttgcttatggagcaaatcgagttgaaatatatcggtacgtgaattactttgtactgtagtttgtatggtttattctgaaatcacggcctttattccgagagaattgtaggactgtaaaagctaaatcattcgcgttttatagagtgtattggattgagagcaagaattactcaattcctacagtgctttatttattttctcttgttaaactttagtttcacttagtatttcactataacttatacagctgtaccatgtgtccaacaactactcgattccctcggtacaacgatccgctaaaggtaactaaatagcttgtacattggaaggtatatgttcttgacttcattgacaggttccatttttcttccctgtttgtgcagctcgtagaaacaaagaaaggtcgttgcggagagtgggcgaactgctttacgctatactgccgcacgtttggctatgattctcgtttggtattctgctaactaacattatctcttcccacaaaagttttgcttttgcttttgcttttatatttgtaatgtgtatatgtaatatttttattcatttacagataatggacttcacagatcacgtgtggacagaatgctactctcactcgttaaagaggtaaacttcatctgccaaacaaatgtctattgatttcctctgtaggaactttcattataccgagtaatttgtgccgttgtttttttctgcaggtggatccatcttgacccttgtgaaggagtgtatgataaacccatgttatatgagaaagggtaagatttcttgcgtaccagttacttcctctttccatgtttctcatcgaacaatccccataatggactgccatagtgccatattctaacaaaatctctgccttctagatggaataaaaaattgaattatgtcattgcgatttctaaggacggggtttgtgatgttaccaagcgatatacaaagaaatggcatgaggtaatgctacacgaaaacagtgactgttttgtttctcgacaccaaaaacagtgacttctattaatcactcatggtcttgctgttgttttccactgtaggttttatctagaagaactctcacaactgaatcatctttgcaagatggtcttcgaaccctgacaagggaacgacgacgtagcttaatgtttgaatctctatctaagcttgaattacgagacagaaatgagcaggaagaactagagagaaatctgcattccgcagataatgcctcagtttctttacccggaaggcaaagtggggacagggaatggcgtattatgagatcagaatttggttcagacgaaaactcatctgtcagctcttcctcttgcccagttcgcaaatgcgttgatgaccatgtgaccaacatttatgactcgtttctacctatccttactcagttcgttgaggacggcttacctgtagcaagaacaaatgaggtacttaagatgatcaagcaagtcctagtggatctgaagaatgcgccttacaaaacaaggaaggctcgattgactttagattcagataactcaagttcattcccggagcagtttcttcccgcactaggcgatttgcttctcgctctttctttaaagagcgagagagacacaaacggtaaaagtgtcacaatatccgtagacgggaaactcactaaaactgctatagcattgccagttgcattggacgcgttaagggaacttgttgctgacctcagcaaataccaaaacttaaacaaagattcactgtcttttccacttgttaaacagaacagggtatgctctggttctgtcctcgcaagtggtgaagagcttccttctggcattgtaagtagtatcctattacaagtctcatcttaccatttaatcaaacttgttttggttattcctaaatatcatgcctcactcactgcctcaggcaaccgcagcttttgatggaatccaagagtccaaatgggaagaaccaaatggtgcaaaaggtatgaaatatagcctgatccaaaactatgatatttgttacatgttataatgcgaatctctcctcgcacaggctgttggatcgtgtacaaaacactctacaaccagatgcaccaactcatagcatacgaactcatgtctgctaatgatgccccagagagagaccccaaagattggtaatgtctgattcctattattcaagtctagacatacacaatcaatgctttaacactgtttgttgcctccaccaggattcttgaaggaagtaacgatggtggttcgacatggtgtgtcctagacaagcaaactagtcaggtattcgaggaacggttccaacgcaaatcctacaaaataactacacctggattccaagcaaatcttttcaggtatgttaaataacttttccctgatagaacacaaatgtgttttgaattgagtttgataagagtcttatcataagacagtcccatttgcttttcttgtttttcttatgggtcataatcatatctaatgtgtatgttgcaggttccggtttttaagtgtacgagacgtgaattcgacctcgagactacaactagggagcatcgatctgtacagaagtcaccagtgatttaatgatgcattcatgcacatcaaatgtataaatattccaaaaacatcaatttgttttgtcttcactttctgcacattgatgtattccgtattcgtgagggaattggcctttgctattgctatgaaacacctctgtcttagacagaggcttacagactcatggtcacagttgttatcaacgaataataagcctccacgtgtaacttaacctaaaggtccctagttcagtaaacatggaaagtgaacaagcgagcgacaacatcggcgccgcaaaaaaagtggaatgattactcttcctctgcgagacgacgatgaggaaaacgacacatacgaagctaaaatgctcctcataggcgagaatggtctcgacggtgagagtttacctcctactcctctgcgtgacggtgcactggagctccagaagtataacatcagctccatcgagtcaacagtcgtgattcgtgagctgacgtcacaaggtctctcctttcagctctggccagcggcttctactttcgtcacgttgcttgataactaccgacgtgaccctagcaagagtccactcaccgccacactcttgtcgctgaaaaaaccatcgccgttgaacatactcgagctcggatctggaaccggcctcgtcgggatcgctgcggcaatcactctctctgctaacgtcacggtgacggatctcccacacgtcttagataatctcaacttcaacgccgaagcaaacgctgaaattgttgagagattcggcgggaaagtcaacgtggcaccactacgatggggagaagctgatgacgtggaggttctaggtcagaacgttgacttgattctggcttcggacgtggtgtatcatgaccatctctacgagcctctcctcaaaacgctgcgtttgatgcagctagaggggaagaggttaattttcctgatggcgcatctaaggagatggaagaaagaatctgtcttcttcaaaaaagctcgaaagctcttcgatgttgacgttatccactctgatgttcctcaagaaagttctagaatcggtgttgtggtttaccgtttcaccacgaaacagccaaatcagaatggtcggattgtttcgtgttag

SEQ ID NO: 138581 - DNA, 257 bp, Arabidopsis thaliana landsberg
gcctacgttgcatcacgataatgaagaataacttatagatccatccccttttgtctcctaattcttaattttttagaaagagatcattattgttctcggatggagatatttagaaaggcaacgattgtacgtctccgtagccacaacgacaaatacctaagtgccgatgaagatcaagaatccgttcatcaagatcgtcgcggcacaacaaaaaacactagatggacggttgagatcgtacctggatccaatgtgat

SEQ ID NO: 138582 - DNA, 304 bp, Arabidopsis thaliana landsberg
ggatcttagcggatattctttggaaggaacgttagctcctgagcttagccaattgagtgacttaagatctctgtaaggatcttttctttgatgactcaactccggtttttccatgtttggttgttttttcttggagtaaaccactttcttgtcgttacagaatactctctcggaaccatttctccggtggaattccaaaggagtatgggagtttcgaaaacttggaagtcctggatttgagagagaatgatttgagcggacaaattccacctgagctaagcaatggcttatcgctaaaacactt

SEQ ID NO: 138583 - DNA, 1076 bp, Arabidopsis thaliana landsberg
tttgttgatcgttaacgttgcgtcaagatggtgattgtttttattgtttcttcgaatttttctatttgataagttttttcatctgaaattttttttaagtttattttttaacttcacggtgtcagtggtttgacatcatcaaattactcagagctttctcaactgtacgaaaaatacaagaaccaaggtgtgcttgttatagtaagctttttacacatctaaatttaattaaggtaacacagtgattgtgagattcttatttattgtgtctctctcgtttttaggatttgagattcttgctttcccttgcaatcaatttggaggtcaagaacccggttcaaaccctgagatcaagcaatttgcttgcacccggttcaaagcagagttccctatattcgacaaggtatatagaaaaaaagaactctcgtttttttgagtttagggagatatcttttaattagttttgataagttatgttcttcaggttgatgtgaatggaccaagcacagctccaatctacaagttcttgaaatccaatgctggtggtttccttggtgatatcatcaaatggaactttgagaaattcttggttgataaaaagggcaaagttgtcgagagataccctcccacaacttctcctttccaaatcgaggtaccaaattcaaaactctaattcaatctggataactggatccatggttcatgtcgtgaaccaaaccaccagttgaacttttctaatgtaaatagagaatctatcaattttacgttttaacattcctaacatatgtaaaatatggattaaaagttgataccaaataagtttactaacattatttttccatgtgacacggcggaatgttgagtggtcctataatttaatactaacaatatgtttgtttggcagaaggacatccagaagttgcttgcggcttaaatttagtgttggcatatgtggtacacaaatttccaggttattgttggtataccagaaattgagatatacatacatgatacatgtaaaacctttctttctgtaacgtaaataaaattatacaatcgcatgatttgttcaataa

SEQ ID NO: 138584 - DNA, 971 bp, Arabidopsis thaliana landsberg
aagacataattttctctgttttcctagctctctcctctcaaattcttccattgctctctgttttggcaaatcgtgaactgccacgtctttaaggcatcagtgaagcaaagatggactttgacgaggagctaaatctttgtattacgaaaggtaaaaatgttgatcattcttttggaggagaagcttcttccacgtccccaagatctatgaagaaaatgaagagtcctagtcgtcctaaaccctatttccaatcctcttcttctccttattcgttagaggctttccctttttctctcgatccaacacttcagaatcagcaacaacaactcggatcatacgttccggtacttgagcaacgacaagacccgacaatgcaaggccagaagcaaatgatctcctttagtcctcaacaacaacaacagcagcagcagtatatggcccagtactggagtgacacattgaatctgagtccaagaggaagaatgatgatgatgatgagccaagaagctgttcaaccttacagcgcaacgaagctgtacagaggagtgagacaacgtcaatggggaaaatgggtcgcagagatccgtaagccacgaagcagggcacgtctttggcttggtacctttgatacagctgaagaagctgccatggcctacgaccgccaagccttcaaattacgaggccacagcgcaacactgaatttcccggagcattttgtgaataaggaaagcgagctgcatgattcaaactcgtcggatcagaaagatcctgaaacgccacagccaagcgaggttaacttggagagcaaggaactaccggtgattgatgttgggagagaggaaggtatggctgaggcatggtacaatgccattacatcgggatggggtcctgaaagtcctctttgggatgatttggatagttctcatcagttttcatcagaaagctcatcttcttctcctctctcttgtcct

SEQ ID NO: 138585 - DNA, 2595 bp, Arabidopsis thaliana landsberg
gtaaaaagatttggggattttcgaggttcactagtgactgtgcatcaggttatggaagatttcttgctggaacgaattcggataggaaagatgatattcatgagtcatgttctcagatgatgtttcagttacacaatgtttatgatgcagagaaggtagagaaactcacttttattcatgtagatttaaaaagaaacagcttttttggttaatgagattataaagagttttgtttgctttgataataatgcagataaatgtcagaatcaaaattgtttttgcttcacttgatggagttattgctgctgaagctaagaaatccaactcaaactgggtgattttagacaggtaaatactatgcagatatacacgtgtgtgtgtgtgtgttttgaaaatgcatagtttagtgattcttgaccttttgataattttaaaacaggggactgaagtatgagaagaaatgctgtattgagcaattggagtgcaatcttgtagtaatcaagaagtcacagccaaaggttcttcgtctcaatttggtgaaaaatgcagatacagagcatccagaagctatatcaaggttagcttcaaagtctgtcgagtctcggagaagctcaagaactggaaaaaagttgagggaaccgtttgtgactacagctacgcttccagaccaagaagtttctttacatactgatatagggtctgtatgaatatctagctctgatgctggagcctcaccgtttttagcttctcgagtctttgagggtctcaagaaagagaatttgtgggtcaatgatggaagcaagagtttctttgaatccgattctgactcggatggtgaaaagtggagtcctttatcaatggcatcctcatcttctcatcctgtgacaacagctgatcttctgagtcctagtggggatttatcgaaagctcataccgaaactccgagaaaatcaagatttgcggttcttaggctcgctttatcgaggaaagaacctgaagcaggaaaggaaatacgtaaacctgattcatgcttaaacaaaagcgtgagggaagtggtttctttatctagaaagccagctcctggaccgcctccactatgtactatatgtcaacacaaggcacctaaatttggaaaccctccaagatggttcacttacagcgaactggagaccgcaacaaaaggtttttctaaagggagtttcttggctgaatgtggttttggttcggtcacctaggaactttaccagatggtcaaattattgctgtcaaacaatataaaattgctagtacacaaggagaccgagaattctgctctgaagttgaagtcttgagctgtgcacagcatcgaaatgttgttatgcttattgggctatgtgttgaggatgggaaaagattgcttgtttatgagtatatctgcaatggatcattgcattctcatctttatggtaaagtttctactaatggtatacaaagaagaacattcttgttttttgttgaaaaaatgttatagatataaaagtttccataggtatggggagagagccattgggatggtcagcacgacaaaagattgcggtaggagcagctcgtgggttgagataccttcatgaagaatgcagagtcggttgcatcgtgcatagggatatgcgtcctaacaatattctcctcactcatgattttgagcctttggtaaaaagaatgttaaatctttgctcaagctctctctctgtctttccggtttgtgctaagcttgaaacttttgaacattctaggttggagatttcggactagcgagatggcaaccagaaggagataaaggagtggaaacccgagtgattggaactttcgggtaatcttacgccatgatcttgagagatatattcttcttgatttacatgtagaacacaataaccaatttctgtttaacttcaggtacttggcacctgaatacgcacaaagcggacagattacagagaaagcagatgtttactcatttggggtagtcttagttgagcttatcacaggaagaaaagctatggacataaaacgtcctaaaggtcaacaatgtctcaccgaatgggtaaaaccaaaaccaactacagtataacaaagttttagtctttaaagctctgaatgctttactaagaagaaacatttttctgcaggcaagaccattgttgcagaaacaagccattaacgaacttcttgatccgcgtctaatgaattgctactgtgagcaagaagtttattgtatggcactatgtgcttacctctgcattcgccgtgaccctaactcaaggccacgaatgtctcaggtttgctcacatctcaaaaacacttacaagttaataacttacaatcgaaattttctgagtgttaatatttctttttgtctatggaatctgtgtcttctcattgaaggtgttgcggatgttagaaggagacgttgtcatgaatccaatatagaagaagcttcacaaggaaaattcttcttagggagtttgtacactatttagggttactattacagctttttaaatgagttttgcttttgtatatgtaaaaatttgttaatgagacaaagattcaactaaa

SEQ ID NO: 138586 - DNA, 232 bp, Arabidopsis thaliana landsberg
attccgacaacagtgaagatggagaaagcttgtaaccccttcctccgcagctcaaatacagatatccgtcgggctttacgcattccagaggccgcagatgaagcagaagctttagggattatccggaaagcaaaggatgatttctaagcttaggctttttctgaggtaaacctttggtttgcttatgtagtcctcaaatgagtgtgcaccctttgacatttgacgttttata

SEQ ID NO: 138587 - DNA, 328 bp, Arabidopsis thaliana landsberg
aaaagcaaacaaagtcgcataaagatgattgaattatacaagtctaaactatcgttaaccattcttctacctacaaaccctaacttcacttcttaaccctagaagaagccctctttgctggagacttaaccgtctttggcttcacaaccttcttaaccggagtcttcttctttgtggccaccgtagcaactttcttcgtggcagcaacagctttcttagccggagatgtaaccttggccgttttggctgccttggctggtctagccttagccttgggcttcgcatcaacagctttcctcttagttgcagcagcagtggcacgaggaac

SEQ ID NO: 138588 - DNA, 555 bp, Arabidopsis thaliana landsberg
tatcaccgcttatatggtttctgaaaccgatgcaatgtttgcttcagcttcttctgatggagttgtgaatgtctgggatgtttcttttccgtctcagcctagtggtaagcattaacgttgctgcagtatattaccggttaaacgaagtgaagtatgtcttctaagcagtatctacatctttttcttcctctgtgttatctgttgcagaggaatgtaaagtggtgtgtctggactctatctgtgttgacactaaagcaattgtaacgctttcattagcggaattgcctcaaaatcctggtcgatttgcccttgctttgggcggattggacaacaaaatcaaactttactctggagaaagaacaggaaaggtgcttcccgattcgcttttgtgccaaattattctcaactaaattcaattgtgagagtttttttggtttcatcctttttcagtttacttctgtttgtgagcttaaaggccacacggactggattcggagtttggacttctcattaccgttacacacaacagaagaaatacccaatagtattatgctt

SEQ ID NO: 138589 - DNA, 929 bp, Arabidopsis thaliana landsberg
  unsure (1)..(929): unsure at all n locations
tttcatgtcgaaacgcgattagcaggaaactcgttagtcgttctgggatccctcgagggagttttgtatcagatcaaattaggagatttggttctctttccggcgtcgagagatgttcttctaattggttgatgtccaatgatgacgctagagtctctttccggagattgcctggctctgtgagcctacttcagagacggcattttctggggtgcggagatggggaagaaggtggtggtgagttatcaaagatctatgaagagagacgtgtcttagggtaattacttaaaaactttgatctatcctctgttttgtgcttacaatagcttttctcgcctcttccaaaatcatctgaaatggcacaactttgagaataggttcaatgatctattatgttgtttactggtccttaagttcttgttttgtagatcaaatcaacattgaaagaatggttcaatgatctttaattgttcaggaatatgatttgcctttgtgtttgtcttgtttccaaccgatctagtgatcttctatgaactaattctgcagaaatatgatttgttagacagatgttgtgtgttccctgtgcagtttcagggattccttgattgtttgtttgctgcattgagaatattacgtcggctatacattgctcatttctgannnnnnnnnnnnnnnnnnnnnnnnntcaagcaatgaagattgagttactcatgtgtgtttcattttattacaggtatactccggagcaaatgtttaacgtagttgcagctgtagacttgtaccatggatttgttccttggtgtcagcgctctgaggttcttaaagaataccctgatgggtcatttgatgctgaattggagattggtttcaagtttcttgttgagagttacatttcccatgtcgaatccgagaggccgaaatggattaag

SEQ ID NO: 138590 - DNA, 2112 bp, Arabidopsis thaliana landsberg
gttgataatattccacaatctcaaactgacactgaagagactcaacaatctcaaactgatactgaagagactcaacaatctcaaactgatgacactaccggcaatgcgaagatttatgtcgatgacacgttttcgccttctgatgctgcaaccgctgcggtgttaaccggaaaagatagtacgagtacaacaattgtagaagaagtgatggagccagatgagattggtttacctagtgtcaagattaccgaggctgcgacgggtacagcaagaaatggtggggggtcacctagaactgtatcatctcctagattttcaggatcaccggtgagcactggaacaccgaaaaatgtggactcacatcgaggtttaatcgataccgcagcgccatttgaatctgttaaagaagctgtatcaaaatttggaggaattactgactggaagtctcaccgaatgcaagcggtagaggtattgtactaacggatacatttggattatttctcgttttaatttgttgttgcctttcttgttcatattttcgtgtatggttttgcagagacgaaagcttattgaagaagagcttaaaaagattcatgaggagattcctgagtacaaaacacattcagaaactgcagaggctgcaaaactgcaagtgcttaaggagctggaaagcacaaagagacttatagaacagttgaagcttaatttggacaaggcacaaacagaagaacaacaggcgaagcaagactcggagcttgctaagctgagggttgaagagatggaacaaggaatagctgaagatgtcagtgttgcagctaaagcgcaacttgaggtggctaaggcgaggcatacaacagcgattacagagttgttttctgtcaaggaggaactagaaactttgcataaggaatatgatgctctggtgcaagataaagatgtggctgtaaagaaagtagaagaagcaatgttggcgtcaaaagaagttgagaagacagtggaagaactcaccatagagttgatagctacaaaggagtcattggaatcagcacatgcttctcatttagaggcggaagaacagaggattggagcagctatggctagagaccaggatactcaccgttgggagaaggaactgaagcaagcggaagaggaactccaaagacttaaccaacagatacattcttcgaaagatctaaaatcgaagctcgacactgcctcagcgctgcttcttgatttgaaggcggaattggtagcttatatggaatccaagctaaaacaagaagcgtgtgactcaaccacaaacaccgatccttcgacagaaaacatgagccatccagatttacatgcagctgttgcctctgcaaagaaggaacttgaagaggtcaatgtcaatattgagaaagcagctgctgaagtgagttgcttgaaattggcctcctcttccttgcaactggaactcgagaaagaaaagtctactcttgcctctatcaaacagagagaaggaatggcctctatagcagtagcttctatagaggctgaaattgacagaacgaggtcggaaatagcttcggttcagtcaaaggagaaagacgcgagagagaaaatggtggagctaccgaagcaacttcagcaagcagcagaagaggctgatgaagcaaagtcacttgctgaagttgctcgcgaagagctacgaaaggcgaaagaagaagcagagcaagcaaaagctggagcaagtacaatggagagcaggctatctgctgcgcagaaggaaatcgaagcagctaaagcttcagagaggctggccttagctgccatcaaggctttggaggagagtgaatcaacattgaaagctaatgacaccgattctccacgaagcgttacactttcgctagaagagtactatgagctcagcaaacgtgctcacgaggcagaagaactcgcgaacgcaagagtagcagcagcggtttcaagaatcgaggaagctaaagaaacagaaatgagaagcttggagaagttggaagaagtaaacagagacatggatgcgagaaagaaggcattaaaagaagcaactgaaaaggctgagaagggggatcctctagagtcgacctgcag

SEQ ID NO: 138591 - DNA, 87 bp, Arabidopsis thaliana landsberg
tttgtattgttccagcttctcgctgtctatcaatttgactctttagtctctgtatatctctctctctctctctctctaggtatgtag

SEQ ID NO: 138592 - DNA, 1367 bp, Arabidopsis thaliana landsberg
atgaggtacgatcaggaagcgggatcgtcctcccattcgctgccttcgggatcatcctcccattcgctgccgccgacggaagacactcctcttttgggacctcgaacattgtcgtcgcagccaaaaacctttgcaaatgtcttcatcgccatcgtcggcgccggcgtgctcggacttccgtacaccttcaagaagactggatggctcttgggcctcctcacactcctcttcgtatcctccctcaccttcttctgtatgatgctcctcgtccacacccgccggaaactcgagtccctctccggcttcaacagcatcacttctttcggagatctcggcgaatccgtctgcggccctgccggtcgtctcgtcgtcgatgttatgcttgtcctttcccaatctggcttctgcgtcagttaccttattttcgtcgccaccacaatggctaatctcctcagccgcggcaccgaacatattctaggcctcgatgctgcttccatttacctctggggatgtttcccctttcagctgggtctcaactccatcccatcgctcacccatctcgcccctttgagtatattcgccgatatcgtggacgtagccgccaccttagtggttatggtgcaggatgttttcatcttcctgaaacgaagacctcctttgagagtctttggaggtgtctctgttttcttctacggattgggagttgctgtgtacgcatttgaagggatcggaatggtaagcagaccaactaattcctctactgtctctgtatctggtgttaaaactaatagtcctgatttgtggttggatgtgaacaggttctgccactggaactagaggccaaatacaaagacaagttcggtagagcgctggggctagccatgggcttaatctcgatcatgtacggtgcattcgggctgctagggtacatggcttacggagaggagacgaaagacatcatcaccaccaacctggggacaggagtggtgagcactctggtgcagctgggcttagcaatcaacctcttcttcacattcccccttatgatgcaacctgtctacgaggtcgtggaacgccgcctttgcagctcccgttactctgtatgggtgcgctgggccactgtgctggtggtcacgctcgtggccctgctcgtcccaaattttgcagacttcttatctctggtggggagcagcgtctgcgtggtgctgggctttgtcttgccatcactatttcacttgcaggctttcaaaaacgagttgagcatcacaagaatagtggtagacgttctcgttttcctcattggtgttatgatagccattaccgggacctggactgcagtacatgagatcctgacatccaaggcctga

SEQ ID NO: 138593 - DNA, 2528 bp, Arabidopsis thaliana landsberg
atggaagtaggatctgcaacgaagaagcttcagtgccaacgtattggctgcaacgccatgttcaccgatgacgacaatcctcaaggttcttgtcaatttcatgcttccgtacgtcttcttctctccccatctttaatcgattcttctctttcttttctaagtcttcgatagtttctgataaacccatagagtagcttttgaatttgattttatgatgtgaggttacgaatttcgatttttgatcatgagaagatgattacgcaagtgtttaattaggttttggattagctgattgattacatgtagatttcatttagttgtaagtaagtaagctttgaacacagctttgattgtctaattgtcaaattttaactaagttgtttgcttgcaacctatgaattctgtgagactgtgagcttattagaacacttgatggaagaaagcaaaagtatattgcgtaaaattgaataatccaagtattagatcttttgccaccgtttatggctatgtgagggagagtgtacgtacatgcagcgacttttgaattgtttgcttccaacttttgccaccggttatggctatgtgagagagagagctcgttaagactgtccctggaagtgtaattagaacaattgtgtatagaaagaaggctttatctcaatattcatcttaacatttggccttgtatactagtgtttctttcatattcatctattgctttgagctttttattgtaattcatcttcttttattatcttttctttttccggtgtggctggggctggtctttgcactgactactggtttttgttcaagcagggagtaagtcaaatttactcttcaaatactgttttatgtttttttttttgtttcacactcgcttgctcagagaattaaagctaccaaagttcaaacttgcagccattttttcacgacggaatgaaagagtggagctgctgcaagcaaagaagtcatgatttcagtttgttcttggaaattccagggtaactaatatccttgtaccccctcataataattcctctgtctttcatggtacatattgtagttgattgcaaacactgaagatgtttcttgcaatgaagatgtaaaacaggtaaacacacaactgagaaaccagttctggccaaatcggttccaaaacatcctgttgcggcttctacttcatcttcagatgccaatgcagcaacaaaagactcttgctccaaatgccggcaaggcttcatctgctcagaccatggtttgtatctttattctctcgtctttaaattctcgttgcacattggtaacatgcatgaccttctatctaattttgtgtccttctttaccacacaggatcccaacccaaagaacagatcaagcagaccctgaacacaccgggacaagcagaagaagaaaaaattgaacccttagcgcctccagtacaaaaggctgtgatagacattaatcaaccgcaagtctgcaaaaacaaaggatgtggccaaacattcaaagagagaaacaatcatgagactgcatgtagccatcatccaggtcctgcggtcttccacgacagactgagaggggtaacacgttctttgttcaatcattttatgacccttttctttcactgtttgaatttctattgaatatcactgttttctttgtgtagtggaaatgttgcgatgttcacgtgaaggagttcgacgagttcatggaaatacctccttgcactaaaggatggcatagcagcagccctgatccggcggtctgatatattttttttcctgagattttcgattcaaagattaatcatcttttctaattgtgttttcatgttcttcttatcatatggaattctattttagatttgttatagaacctttcagttgacagatatatgtaatggttaaatgctcatcttctgtgttttggatcatgattatggctttgattgttgttttcaaaactttgaagatctttaaataatttcaccaatattagaaggactatttagcaacttttaaaacgtagagacaatttgcgaatatggaaaaataatttgccaatttatctcaaaacttttgtatttattcgactctttttcaacttcgttactctcaacgaacggctcgaatctctcttcaacgccggaggcaacaactatctccgcggcggagcattttccgatgaggttgatagtacctctccgtggagtaattcaaggccgtggtggtctcttcgtcggctctctcattccttgttgtctcttctactttctccagctctaccttaaacgacgccgtcctcctccctccgacccgacggagttaccgagaactttttcacggactaatctcttctctcgcgggaactcgatcggacgagttcgagtctcctcccgagcagttcctgtagctaaaccttccgattcgccttattacattgggttggagagagtcaaaacggatccgtacgatcggattacgaacacggatgggattattcagcttggattagccgagagtacg

SEQ ID NO: 138594 - DNA, 1466 bp, Arabidopsis thaliana landsberg
cgagattgcgatcacagagtgtcaaagcaatctgctttttctcctctcagattcaaaggttctctttgaagcttcgtaggtggttatactttgatggcggattatcatttcgtgtataaggacattgaaggagcgtcaactcaatgggatgatatccagcggaaattggggaatctaccggagaaggctccggctttcaaacctccggcgtatactccggcggaagacgagtcttcagctcctaaggatcaggcatggtttgataagaagacagaggaggagcttgaggatcttgaggacgacaaagatctcgacgatgatcgctttctcgaagaatacaggttcgtagatcgaatcgaacattctgatttttgtatttacaatcttaactttccctggagaatccttgccttggtggattgtgaattcaattttctcggatctgttgccatgtagctagggaatgcaattatcaagctctggtttttctcgattcgtttgtgttttggatatgaatgcaattgagggtagtatcttatttgagatgttgatgaataggctaaacataattgtgcaacacacttcatgattcacaggcactaatgtgttttgatgctttcataggaagaagaggttgtctgagctaagagaggctgctaaagttaaaagatatggaacagtgactcccatctcgggctctgatttcgtgagggaggttacgcaagcttctgctgaagattgggttgttgtatgtctctataaagatgggtatgttttttcaagtattcgtgaactcttgttgagccattctttactacatgcttgaaacactattaactcatgtttatttcttgttgttctctgatagtgttgcagaatgtagtttgctattgggttgtctagacgaattgggtagtagatacccagcaacaaagttcgttaagataatatctactgattgtattccgaactaccctgattgcaatcttcctaccttgctggtgtaccaccatggcgccatcaaaggaactcatgtaggcttaaagagctttggccgtaggtgcaccccagagagtaagtttgaatgaacccttgtttgtctgatgtaatctgtgcttatttgtgtttgatgattatgtcatgtctcatctctagcctttgtctgatctgagacctgatgtgaccacattggcgattgtatcatgctttgagcagattggtcttaggcacatgtctgacatacttgcaactgatttggtttttcaggtgtagccttacttctgtgtcaatcagagccagttcttaacgatggcaaaggaggagacgatgactcctcgagggaagctgtgatggctggagttcgaagacagttcatagaacgagtggtgaaggaccacgaagataaggataacgatgatggtggttacaatagtgattagaacttcaaagcttctctgtttatctct

SEQ ID NO: 138595 - DNA, 1045 bp, Arabidopsis thaliana landsberg
tctcgatccttccggcttgctcaaaaggtaaaattcgattttctagggtttcgatttgctgctttttgatctcattgacgatgattagttgtagtttcttcgatcgatgttgacgtgaatgtgtatatgcgtaggttgatcagacgctaggatttgagaagcaatggcgaatagaatagatcatgagtacgattacttgttcaagatcgtcctgatcggcgattccggtgttggtaaatccaacattctctctcgattcaccacaaacgagttctgtctcgaatccaaatccaccattggcgtcgaattcgccacccggactttacaggtcatctctcttctctcgctttctctaaatctagacaatttccctccagatcaatttggtgtttaatcttagattgtgtcgtcgcatttgcatcctctgatatttgaacaggcatgtgattgttagatctgaagatcttatgttatgaaaatgaattctcgttaggggtttattttaatgtaattgtagcaaatgaaatggctcgtctttgttcatgcttgtatgtgtaatcttgactaggttgaaggcaaaacagtgaaggctcagatttgggacactgcaggtcaagagcgttatcgagcaatcacaagtgcttactacagaggagctgttggagctcttcttgtctacgacataaccaagagacaaacttttgagaatgtcttgagatggttacgtgagctaagggatcatgctgattccaacattgttatcatgatggctggaaacaaatcagacctgaatcacttgagatctgttgctgatgaagatggtcgctctctcgccgagaaggaaggtttgtcgtttctcgagacatctgctttagaagcgactaacatcgagaaagcgtttcagacaattttgtctgagatttatcatatcataagcaagaaagctttagcggcacaagaagctgcaggtaatcttccgggccaaggaacagcgatcaatatatcagattcatctgcaactaacagaaaaggatgctgttctacc

SEQ ID NO: 138596 - DNA, 1677 bp, Arabidopsis thaliana landsberg
  unsure (1)..(1677): unsure at all n locations
cacacagaaaaggagtcggagagggtttttcgcctagggttttagaattcgatcttactcattcaaatttctcccttcagatttattcatctgttgagtaaaaccacaagggtttctctctaatgttgcccagattagctcgagtcgtcactcaaacctcaaagcttcgatctttgaccactaatggatcgatgaaaaatctctcctttttctcccgatatgggtacgcgactgttgcgccggcggcagctgatcctccgtcgcagaaggatttccccagtaaatctccggtatgatcttaaagtggtaacattttgtttactcagattaaagatctcgttttcagaagtagctgttaatgcgtagttgttgtgaatgtttaggtctcactatagtattcgaacctaagctcaatttgattctctctgtttctagtttcatcgaatgcgggactaaagtgacttctgcctccccattgtacctcatttaggattcatccctttttttctgttggagtttcattagtatgtttgtgatttagattcatgctcttttagtcaactgcttctggacaatcgtgtcttctttgatgaaaaggatttgttctatgtttgacagataaacttggataagatgttttggtcaaagccatgttcattggctctgcctaaagactctcctctcagaattgatgaaccagactatgtagggattcgtcgtttcatactaaagatgatgatgttctatagcaaacagagcatgtctatccgtggggctaacgtgatctacaagcggatcattgcacaagttgataaacctgcaatatatgatggtactttatttggtttccaacacaacttttgcaaacagagttatgtatttacattttgtgctttgtttatatatcgggtgctttgtctctgctgcagtattcaacttggagaaaacattcaaaataacgtattcgctgcttgtccttcatatgtggcttgttttacgccgcttgaaggaagatggacaggaaggtgttgaccttggtcaatacgtctatgagatctacaatcatgatgttgaactcagggtnnnnnnnnnnnnnnnnnnnnnnnnacttggttttgctttaatatagtttcgaagagatatcttagtttcttagattccttaaaataagatggtcttaatctttcttgaaattacaggttaacttgctgctagccaagtggatgaaggagttggagagaatattttatggaaatgttgttgcctatgatgctgcgctacttccggaagctaaaccaaatgacctacaaatcaaattatggaggtaaagcttctataacgtcatgctttatgcaatgagttcggtagagattacacagctaagtagctcggcttgaatttatatacaatatggcagccatagataacggatttgtctcagaaccttatatgcaattggattgtaggaacgtattttctgatgatggaacaacaacacctgataacacagatttaaaaacagcacaggcatgattttctcctctctatctctctcgcaaacacacacacattgacatactagtttaggcattgtgtaccaaacttgttaagacattgcttgtgtgtttcaggcaatggcaagatatgtccggagagaacttggttctctttctttaa

SEQ ID NO: 138597 - DNA, 1243 bp, Arabidopsis thaliana landsberg
taagatcaaatcaggaaagactaagattataggtgttaagaggactctagtgttttatacaggtcgtgctcctaaagggacacgaacttgttggattatgcatgagtatcgtgctactgagaaggatcttgatggaacaaagtctggccaggtaaaaaccaacttggcaaatgatggcattaacttgtgtgtgtaggtcttttgtgtttctgattgtgtttgtttgattttttttggttgcagaatccgtttgttgtttgtaagttgtttaagaagcaagatattgtgaacggagctgctgaaccagaagagtcaaagtcatgtgaagttgaaccagcggtatcgtctccaactgttgtggacgaggttgaaatgtctgaggtatctcctgttttccctaaaacagaagagactaatccttgtgacgtcgcagagtcttctcttgtaatccccagcgaatgtcgtagtggatactctgtccctgaggttacaaccaccggggtaaggatgaacaaaatacattcttttcattacaggaggcggtacaaccgctttgtaaacttacaaacttcattttactcaacagcttgacgatatcgattggctctcgtttatggagtttgattccccaaagctgttctctccgttgcactctcaggtgcaatctgagctcggttcctctttcaatggcttacaatctgagtctagtgaattgttcaaaaaccacaatgaggattacattcagactcagtacggtacaaatgatgcggatgaatatatgtccaagttcttggattcttttcttgacattccctatgagccagaacagatcccatatgagccacagaatcttagctcatgcaacaagatcaatgatgaatctaagacaggaattaagattagagctcgacgagcacaagccccgggttgtgctgagcagtttgtaatgcagggcgatgcctcaagaaggctgcgtcttcaggttaaccttaacagccacaagtcagaaactgacagtacacaacttcaatttatcaagaaagaggtgagaagaagtttgttttcataccttctcatgtattacaatttatgatccttatatttacgcgataaaatgtatataggttaaggacacaacaacggaaactatgacgaaaggatgtggaaatttcacaagatcaaagagcaggactagtttcatattcaagaaaattgcagccatgggatgttcatacagagggct

SEQ ID NO: 138598 - DNA, 1374 bp, Arabidopsis thaliana landsberg
aatggtgaatcagaaggaaaacgaagaaaagctctctactgcatttacagtgactgtggtatgtctttttctctaataaagattttgatcttgggccttgtggtttttattaaattttgtttgttctattctttcgccttcgtaggatgcaaaacatggtacaacaacgggagtatcagctcgtgacagggcaacaaccatattgtctcttgcatcaagagattcaaagcctgaggatttcaatcgtccaggtcatatcttcccactgaagtatcgggaaggtggggttctgaaaagggctggacacactgaagcatctgttgatctcactgttttagctggactggatcctgttggagtactttgtgaaattgttgatgatgatggttccatggctagattaccaaaacttcgtgaatttgccgccgagaacaacctgaaagttgtttccatcgcagatttgatcaggtatgcgcttaaaatttgaagtttttgtttctcttttcgtatctaatcttgaagttaaaaagctaaattttctggtttgaaaaatgacaggtatagaagaaagagagataaattagtggaacgtgcttctgcggctcggatcccaacaatgtggggacctttcactgcttactgctataggtccatattagacggaatagagcacatagcaatggttaaggttagagcaatgctaaagaaatatatcttgttgatttgtcttcagaacatccaaggacttaagctaaacccatttgtctgaaattgtggcagggtgagattggtgacggtcaagacattctcgtgagggttcattctgaatgtctaacaggggacatatttgggtctgcaaggtgtgattgcgggaaccagctagcactctcgatgcagcagatcgaggctactggtcgcggtgtgctggtttacctacgtggacatgaaggaagagggatcggtttaggacacaagcttcgagcttacaatctgcaagatgctggtcgagacacggttgaagctaatgaggaattaggacttcctgttgattctagagagtatggaattggtgcacaggtattaaccaagatcacattatcatccaaaaaagacaacaattttttttccgggtattttactaaatcttcttgaatctgcagataataagggatttaggtgttaggacaatgaagctgatgacaaataatcccgcaaagtatgttggtttgaagggatatggattagccattgttgggagagtccctctattgagtcttatcacgaaggagaataagagatatctggagacaaagcggaccaagatgggtcacatgtatggcttgaagttcaaaggggatgttgtggagaagattg

SEQ ID NO: 138599 - DNA, 1397 bp, Arabidopsis thaliana landsberg
caccgaactaacaaaatttgaaattcccaaagcaaaaacaaattacatcattcaattcaattctcaatgcctcttcttctccctacctcttccttcaaaacgacggccaccgtcgtaatcgccggcgtttcatctattgccacggcgatgattctcacggtcccttccgtttcccatttcgtagtctcttgctttccgattatttacgataacaccgtcttcctcttaaaaccaccgtatctttacttagtcatcaactctatcatcgtctgcatcatcgctacttctaaactcactcataaatcgtcctccgtcgatgactctgagatctcggaagtagtgactccaataccgataccggtaccggttcatttaccttctgatatcgattccggttatttaaacgtggttcatgtggtttctgattataccggatttgttgagaaaatcgatgacgtgtcgattaatccaacggtggaggctatccggaagtttccagaagttcaggaggcggagaagtcgaaagagagtagcgattcgccggaaccggagacggagaagccaaaattgaagaatgattcgccggagatttcgattctgaagcacagtacgagaaaaccgccgcgatttaatcagcaaaaatctcttaaatctaattcagaaggtaaaataatttagtttttttttgctcgaaattcgaattttctgggaagggcaaaatcgtaaaatgacggaggagttgtcactgtttatacaggtggaaataaaaagacggcgttgggagtgacgaagccaccgaggagacaagacacgctggagacgacgtggaagaagataacggaaggacgttcaacgccgttaactaagcacttgactaaatccgacacgtggcaagaaagagctcacgtgcaaagctcaccagaaaataaggagaagatgaccaagtccgagaatttaaaggacataaatacccccacggaggagaagacggtgttgaaacgcgagccgtcgccgggacaggaggagttgaatcggcgcgttgaagcgtttataaagaagtttaacgaagagatgagactgcaaagattagaatctttggctaaatacaatgaaatggtaaatggagggactcgtttgtaaattttcgtggtttttgcttaggcgtcggtgaaggagaaaatgacggcacagtcgcaaaagttgacttgactcttttttacaaccacttaaaagagttttttttttcttcttccggggaacaaaatttcaaaataatgcaaaaattgtgtttatgattgttatgtttcttttggggtcgagacgttatcgtgtggtacaagtgaaggattatatgttaacagtagtgagtagtgactagtgttcgaatctgttttctt

SEQ ID NO: 138600 - DNA, 1190 bp, Arabidopsis thaliana landsberg
gattgtgttgtaacaaaaaacttttacctgataggtaaagatgtaagtttttgttttttcactacttgacttcagctgaatcggtttgtcttgcttgataataacaattaagcttgcgtagttccacggggcagttgactttgaaactgtcatattattgtaatgtttagtgcttgcttttggatgttggtttaatcaatccagtaagagcttacctagaaaaagtcagaaaacgtttttaaagttatccaaaagcctttctgttcttgcattggtcaacatattgttttctcatctgtttgcctcataagatcgtgctccttcgaatatttaatgaaaacgacttgatttgtacttcagggtcttgtcaccacggagaggacaaaacttgacccaggagctgtactttttgccaaaaatccagctgagatacgcgagggagcaagtatccgtgaagtggtaagcctaaaccttattattgcgttcttacttgccttggccaatattaaaacttgacttaatgtgctttctctactacatcctaaagcaacacaggataaccatatttttttactgtccccaaaagttagacataatcatatgataatatttctgtctaaatataatatgtcttcaggtgaagaaagtgaggccacatgttcttcttggtttatctggagttggtggtatctttaatgaagaagtatgtgactttcttagacaacaaatagtttcaagaaatatgaattttaactgttttacttatatcgttaactggtttcaatcatcaaaggttctcaaggcgatgcgagaatctgactcatgcaagcctgccatttttgccatgtcgaatcccactttgaatggtttgtgtgtttttagcttagcaaagtaatgttgttccatctttgaaaaatctgccctgaacatcttttcgtgtgacagccgagtgcactgctgctgatgctttcaaacacgccggaggaaacattgtctttgcaagtggaagtccatttgagaacgttgaacttggtatgttatggtgggattcattgatggtctttgtatctaatttgctataatctaaaaataatcacattttcttgtcccactcgcagagaatggtaaagtaggacatgtgaatcaggctaacaacatgtatttattcccagggttcgttttctttcttg

SEQ ID NO: 138601 - DNA, 2151 bp, Arabidopsis thaliana landsberg
gtaactcttattgactctagtattagtccagctttgccgttgtgggttttgaatgtaccggggtattcgagagattttgttagcgttttcgtttggttttgagaagctagtgagcttccggtgctcaaaggagatgactttatcggatattgatgctcataggatacttttgaagggaagaaatgggagagaagctgttgttgcttcgttaaacaagttaaaccatagctttgacattgcacaatggggtaattcagatgggattaatggtattccgatgcaagtgatttggtctagtgaagcgtctaaagaatggagtgacgaggggcaacgtgtagctaaggctcttccgaaagcaaagtttgtcacacattcaggcagccggtggcctcaggttagatattcttcggacttttaagtcattttagttttattgaattggtcaaaagcagaaggttttgtgtttatactaaaatcaagtatgtatctctagtaatgagtaaagttataaccagatccaatttcaaaatttagagcatctttatcaactatttttgagattgttagtatcggattgttctcttgaacatactttgttctcccattagtttgtattttactcggtaggagcagagcatctttagctctatagcctttatttttgggctgcttgacttgtttgaagaacacaaacttgtgtggtcttctagttgtaaaatagcaaaggcacattaatctgaaactgtgacgttttcaagtaggtgtagagttcttactggaacttgtatcattgaagggtatatatttgagtatgttcaagattggttttcgttgttttacttatcgtggtttttcgggtttaattccttaaaacttgtggtcgttttgataatgcaggaaagcaaatccggcgagcttgcagattacatatcagaatttgtctctctcctccctaaatccatcagacgggttgctgaagaacctatccctgaggaagtacagaaagtgttagaagaagcaaaggctggtgatgaccatgaccatcatcatggccacgggcatgcccatgctggttactcggatgcttatggtcttggtgaggaatggactactacttgatatgccttttgaagttcttgttattattttacgatgtactcttaatcttatgactattttgagatttttcttttgggagtttaaagtctgagatactacttccaaatatgaatctgtgttttgtactttttgtttgtaagtcatcaaatttcaatagaaaaatatcttaaagtcatcatatttttaaatatctacatatacatttttgcagccattttaacaaataaatcatagagttggacttatttacaacccaatgtcattagcattaaatctttttccaaaataattaattttactataaattcttgatttaaattgttaacgacattatcaatcaaatttaatccaaacaaacttcaaatcaatcccttaaaattagcataaacatatttgttaacaatattttaaaacaaagttttttgttaaaacaaatattattcttactaaacgttttttgtttaaataaataaatcatgtatttgaacttatttacaatgtcatgatactgacattaattatttaggaatgaaaatatttaattaacgatttaaatcttctaaatccttacttttagaattattatgtcattacctaaaaggctcaaaatataaaaattttaaatattattatttatatatttaaactttataaaacgttattaacatttaaacattattaatatttaaacttataaaaagtttaatatatcataattttttaacatcattatataatatatagagtttaaaaaaatctcaaaaaaatttccgtcatattttgtgattcaacattttaaaaatgaacatatattaaccaattggcgaaaatgtgtgagttctacgtcccacatcgaataaaatatttagacaatgatttataaacatatcataaataagatccacattaatataaataaatttttttttttttgcaggacgggttttgctggacgggtttgacaggacgggtttggcaggacgttacttaataacaattgtaaactataaaataaaaatattttatagatag

SEQ ID NO: 138602 - DNA, 713 bp, Arabidopsis thaliana landsberg
cgattcaacatcaaatctagctgaattattgtttcgcgttgattgattgatccggagaaaggcgatgacatcgcctggatcgaagaaagttgttaccaccgacgacggatcggagaagaaagtttccggcaatctcggaaaagtaagtttttccggagatcttaatcatagtggaagccatagtggaagccatagtcgtagcagcagcagcgccggaggtggtgaaggaggaacgtttgagtatttcggatgggtttatcatttgggtgtgaataagatcggtcatgagtactgtaatcttcgtttccttttcattagaggcaaatatgttgagatgtataaaagagatcctcatgagaacccagacattgtatgtcttttcatccttcttctccgctttttaattagagcttaaaagaatcattcctctgaaatgttgtttacataatgtgatgtttttttttttttttttttttttttttggagaaacctataaggcgtggtgtcatagggccgacaatggtgattgaagagctaggacgtcgaaaagttaatcatggggtaattctcttcaatatctacttctctaatgaatggaagtatgagagtaaatgaaaaacaggtacacttactagttttatttctattatatgttgtaggatgtctacgttataaggttctataaccggttggacgagtcaaggaaaggagaa

SEQ ID NO: 138603 - DNA, 1296 bp, Arabidopsis thaliana landsberg
cggcttaatcacattgtcgatacattgtctcaatgaaattcatcaaaagttgttgaataataaatttttaatgtttccaacagaatgcggaatacggctggcatcagcgggatatgcagtgtttgggatggactacgaggggcatggtcggtccaagggtgctcgttgctatataaaaaaattcagtaatatagtaaatgactgctttgactattacacatccatctctggtacttatatattcacatgaaaatatctattccttcatcatcttttttcaattcaacaagactaatttcctacttttatgatgttatagcacaagaagaatacaaagagaaaggtagatttttgtatggagaatcaatgggaggtgcagttgctttgttgcttcacaagaaagatccttctttttggaacggggctcttctcgttgctcccatgtgtaaggtcacgtttcttctcatctctatcatcgaaaccctatatttaatcaagttaagacacaaaatctattagttttagacacaacttaattatcaacattttcattagttttgtgtgtgtgggcagatatcagagaaggtgaaaccacacccagtagtcataaatctactaacgagagttgaagatattataccaaaatggaagatagttcctacaaaagatgttatcgatgctgccttcaaggatccggtcaagcgcgaagaggtatattaatcgaatcagtcaacacataactaaaaagtgtactaataaaaaacttggttcctaaaatgtagataaggaacaacaagctgatatatcaagacaagccaagacttaaaaccgcacttgaaatgcttagaacgagcatggaccttgaagacactctccacgagatcacattgcctttctttgtccttcacggtgaagcagacattgtgactgatccagagataagcaaagccttgttcgagaaggcaagcacacgcgacaaaaccattaaactttacccaggaatgtggcatggattaacttctggtgagcctgatgctaacgttgacctcgtttttgctgacattgtcaattggcttgatgctcgtaccggcgactccgcttctctgacagtcactcccgtacatgattttacctccaatgttcaaaaggtcgttgacggtgttagtaacggtcaaggaaaatctaaacgaccacaagctagtctcctttgtggtttaaatggtggtggacgtcgtttggtccatagatcttctatgtaatgataaactaaacagagaagaatctgttttattttgt

SEQ ID NO: 138604 - DNA, 873 bp, Arabidopsis thaliana landsberg
cgtcgtctctcctccatttccgtctctggattccgccgtcactctaatcggaagttacagatactttgccaagccacagctggaactgagcctcagagcggtctctctgtctctggctccaaattagccgcccgttctggtcaagaccgtcttttgaaggtcgggttctgttttgttctctctcttcatccgtgtgccgaaacttgagaagaatttggattttttttgaaactgaatttgttatgaaattcgcaggttccaatttcgaacatcaggaattttagtattatagctcatattgatcatgggaaatctacgttagcggataagttgcttcaggtgactggtactgttcagaacagagatatgaaggagcagtttcttgataacatggacttagagagagaacgaggcatcactatcaagcttcaggtttttctttcaatcgctttctctgcacaatcaaaaatcagtttcgataagattgctcaacggtctgatttgtaactttgcggtgtatgtttgtgtaggcagctcgaatgcgttatgtttatgaagatacaccgttttgcctcaacttgatagatactccaggtcatgttgatttctcttacgaggtacttacaatattctaatctacttattgtctacggatacatttgaagcttagccttatagttatttttcatatgtgagaagttacttggtttgagtgttatatatcacctaaaagcgtaattttttttacagttaggaatatacacaaactattaagttgcagttttgatgaagaatgcactgtttatttgtacataggtttcccgatctcttgctgcttgcgagggtgctcttcttgttgtggatgcatcccag

SEQ ID NO: 138605 - DNA, 4404 bp, Arabidopsis thaliana landsberg
  unsure (1)..(4404): unsure at all n locations
atggcgggagtgattagggctaagcagctgtttctatgctcgtcgattctctcgagcaacaacaataaggttctatcacgccttcctcggcgtagtatcaatgtaattgcgggaaatctcaattcgagcgagactaagaagaaggagaaagagaagaggaagaggaggaaagagattgaggtggaaaaagctactgcggaagcagtggtcaataaggaaaagagaaggacacggtcgagcagagagtatgaactcgccgacggtgacgaagttccgtcctcacatgtgcctgtgatgctcggagaagttcttgacattttctcttccgttcgcttgcgaagtttcgttgattgtactcttggcgcagctggtcactcttcttctgtaagtttcttcttcattgttgattaattagctcaaattaggatgaacacattcttgtgctttagatgtttctttgctattgaagaatttttgtcgacgttaggatatgtaaatggattgtgaatctgtaatttgtgtttcagatcattcaaagccactctgaattgaagaattttgttggaatggatgttgatcctgtggcaaggaaactgggacactttcatattgattcgctcatgcatccaactttgaaggcttctatagtgttgaagaacttcaaatacatcaaatctgtgattgctgatacgcaaccggagttgttagatgtaggtgttgatggtattcttatggacctgggaatgtcatctatgcaggtacattttgtgattttcacatgcaactgtttctttttccttgtattgtttgcatcactcacctatgcttgtatccccacaggtaaacaatcctgaaagagggtttagtgttcttcaagagggacctcttgatatgcgtatggatcctcaggtgagggtacttatatctccttgtagtataatgaacctgagggtttttgaatctcttggaatttctgctgaaattttgttataacctatccactgacatgtgacaggcgactctaacagcagaagatatagtgaattcgtggccagaatctgaactgggaagagttctacgggattatggcgaagaaagcaattggtatttacttcaaaatagaattgttaaggctcgacttaatggcgggttacattctactggtgaactggtggatctcattcggggtacgtcaccagcaagcagaggtatgtctatctatctttcgattctcttttcttctttttgcttctgtgctagtaatttatattgggatttcttgatttgcatttgcatctcaatgcgagttttagttagtgttcctagttaaagatttggttgccaggtacaaaacacagaagagtaagcaactattaatgagtgatccgaaacaagatcatgaaaacattagacatttttgagttttcacagttgacagcaaagttgaagaagataatcctttttaatctttaatacttcgacttcgtttgaaatgttgtaggaggcagacaaggctggataaagacagcaacacgtgtgtttcaaggcctaaggattgcagtgaacgacgaactcaagacactacaaaactcactctactcatcattcgatgttctcgctccaggtgggagactagcagttatctcctttcacagtctggaggatcgggttgtaaaacaaacgttcctcgacatcttagggtttcaaagagaagagatcaacggagagggaagtagtgtaaaaccggaaaggcaaatcgaagaaagagtagagaaggaattaaaagagaaagaagagtggatcaaacagacagtaatagcgtcgaaaggagtaatactgacaaagagaccaataacaccttcagaggaagaggaaagactgaatcgcagagcaagaagtgctaagttaagagtgattcagaagttgtgattactttatgaaatgtttttttagttgacaatcaaaatttcaaagctctaactaagctttcattcaaaatagtcgaggtttttagaaaagaaagttaggaacatggaaacagaagaggattgatccaataatagttgaaccaaaaccaattaaaccaaacggaatagtgttcaattttcgaaccagaccggttaaaatgcataagtgtgtgtcgtcgtcgccgcaaaaacccagttggagctcgaaacccttcttcatcttcttcttctcctccacctaaccaatgggagcaattgatctctctttctcacagagtcttctcttctcttcgtcgcgttccaatctttcctcctccacacaccgttccgtctcttttttgccgccgggaagcaagtcacggtgtctgccgccgttgcgttcaatgagtcatgacgacgacacggcctcaaaggaggtgaagctatggggtggaaggttcgaagagagtgtcactgagaaagtggagaagttcactgagtcaatttcatttgataaggttctctacaagcaggacattatgggtagcaaagctcatgcttcaatgcttgctcaccaggttttacatttgcttttactttatgcattttcttaatttcttaattcagttgtgattctatgtcttctaagtaatgcaaatttgtaaagtcaggacatttttggttatttgttcttacaggggctaataactgatagcgataaagatagcattttgagaggtcttgatgatattgagagacaaattgaagcaaataagtttgaatggaggactgatcgagaagatgtgcatatgaacattgaagcagctcttactgatcttattggtgaacctgcaaagaaacttcatactgcaaggagcagaaatgaccaagttgctactgacttcaggctttggtgtcgtgatgctatcgatacaattattgtcaaaatcagaaatcttcagagagcacttgttgaactggctttgaagaatgaggctttgattgttcctggttatactcatcttcaaagagctcagcctgttttactcccacacgttctcttaacttttgtagagcaggtttggaatttctactttgtttaagttttggttttctgttacatcgttttgtttagtttctggttatgttataaaattgagcagcactctaatttgctttatgaggttcatcttttagatactatgtcctccttttcctgcctcagaacattgtagggttcttacatttacttaggattttactttcttagctggtattttgnnnnnnnnnnnnnnnnnngaacgtgatgctggtcgttatgtggactgtcgagcaaggctaaatttctcccccctgggagcttgtgctttggctggaactggtctgcctattgataggtttatgactgcaaatgctcttggatttaccgaaccaatgagaaacaggtatgttcctagttcttatattggttgcatcaactctctctaattatatgtctttctctttagttttatggtttctcatttattaactcttttctcctctgtttcaactagtatcgatgcagtctcagaccgagacttcgtgctggagttcttatatacaaatgccaacaccggtattcatttatcacggcttggagaagagtgggtactgtgggcttccgaggagtttgggttcatgactccaagtgattctgtgtcaaccggaagtagtataatgccacagaagaaaaatccagacccaatggaacttgtcagaggaaaatccgcaagagtcataggcgatctggtcactgtcttaacactgtgcaaaggacttccccttgcttacaacagagattttcaagaagacaaagagccgatgttcgatagtaccaagacaataatgggaatgatcgatgtatctgcagaatttgctcagaatgttacattcaacgaagacagaatcaagaaaagtcttcccgcaggacatcttgatgcgactacttttgttgattatcttgtgaagaaggtaatgtggtgttgagtttatcatatcttccatttttgtaactgaagtcagaaagataaatactgttttggttttttgatttcccaggggatgccttttaggtcatctcatgacatagttggaaaactagttggagtttgcgtctcaaaaggctgtgaacttcagaacttaagtcttgaagagatgaaaaagctgagccctgtgtttgaagaagatgtgtttggatttttgggggttgaaaattcagtcaataagttcagttcctatgggtcaacaggatcaaactgtgttgctgagcaacttggctactgggtcaacaagctcaacattactaccacctgatccggaccaaaccattagcaagatatttgatgacatttgtgtaattttcatatttattgaggatttttgtcattaataccaggaagacttcaagcaacatgtt

SEQ ID NO: 138606 - DNA, 1276 bp, Arabidopsis thaliana landsberg
cctatctaggaagcaaagcttttgatggattctttgtggaaggagaatctaaggtgacgttcaagaattggttgcatcagaggcctgaggtgcaagcaatgaagtggagcataaggctaagacctgggcgattttttaccattcctgtgagtcaaatgtctcattatccaggcttgggaaactgtataatcttctttattttgcgtgttacaactttgaatatattcatgtaggaggaattgcgggcacaacatgaatcacaacacggagatgcagtcatggagtcaattgtcaacgaacgtagtggttctgtcttgagcaaaggttctatacttaaaatgtactttttccctggccaaagaacttcaagtcgtttgcaaattaacggtgcacctcacgtatacaaggtaggcttcaaggaaatgtgattcttgtgtggtttcctgataactggtaaccttaaaatgatcatacttaaccatgacataacgttcattgcaggtcgatagatatcctgtgtatagcatggcaactcccacaatttcaggcgctaaaaaaatgctcgcctatttaggcaccaaacttaaggaagaaggtgggggttcaacagaaagaatagtggtaacagacttgagagaagaagcggttgtttacatcaatggaactccatttgtgttgagagaattgagtaaacctgttgatacgcttaagcatgttggaataaccggtgcagtggtatgtttcaatcacagctaatattatgcaaattgcaaaagcagttttttatatttgtatcctcaatgcaggtagaaagcttagaaacacggttaaaagaagatatattggctgaagttcgagagactggaggccgaatgctattgcatcgtgaagaatacagcccggcatcaaatcaatctcgggttattggatattgggagaatattcaaccagaaaatgtgaagacacctgcagaagtatatgctgctctgaaagatgaaaattacaatatatcttaccggagaatacctttaaccagagaaaaagacgcattagcttccgatgtagacgcgatccagtactgtaaagacgagtaagtatcaatcatctgttttaatttttcacatgttacatatttaccgaatctcttccgtaattaacttgtggcgatgttttaatcacagttccgctgggagttacttgtttgtatcgcacaccggttttggaggagtttcttatgcaatggctataacttgtctcctacttcaacctggtcaga

SEQ ID NO: 138607 - DNA, 1111 bp, Arabidopsis thaliana landsberg
atggtgcatctgtcggtccaagagtggagaagctttctatccggagatagtgcatctgtaggtccaaaagtggagactgttgactaggtgaagctccggtagtaatcatgttgtatttgccacaccatatagtcaacagtcttcaagtaatcaaaacttaactcttaaagcgattcagttgacctctatagaattgaataacaattagtgttacaataattgaaggaagcataaaaatgaaaatccaaatacaatacgtaacaaaacccaaacgtaaatgtagtctggtaaaaaattaaattgtcttttcccaaagccgtcctttaaacccgacgaagttgtttaagcagcttaaattaagctccttgaaagattaagcatttctggaatttttatcgactttaattagagaaaaataaaatattttttgatattccttgtaaaaatctgaagaataaagtttactccacttattaccgacacaaaaaaagttgttccacttattaaaaaaaagttattcagctataattttttaaaaaaatcctctgttatatatctcacactatcttttatttggttctttccagaaacaattgatcagagctttaaagaaaaagatggaattcaccgcagagcagctaagccaatacaacggcaccgacgaatcaaagccgatctacgtcgcaatcaaaggccgtgtgttcgatgtcaccaccggaaaatccttctacggctccggaggcgattactcgatgttcgccggaaaagacgcgagcagagctttgggtaagatgagtaagaacgaagaagatgtgtctccttctcttgaaggtctcactgagaaagagatcaatactcttaatgattgggagaccaaatttgaagctaagtatcctgtcgttggccgtgttgtctcttaggtctctcttctgagattgcactatgttatgtaactattgtgtgtgaggatctttgtgttgtgtgttttctgatttcgtgtttggatctgatcgttttgatacaattaccataagtaccaaattatctatgaaataaatcggggatttcgtgttctcagtggtcttcatattctgatcttaaggttactttg

SEQ ID NO: 138608 - DNA, 1637 bp, Arabidopsis thaliana landsberg
gttcagtgagtgtttgagctgtctctataggcaaagaaacgataattggggaccatatgttcttctttttccagatgaagacgaagccttttagtcgacgaagaagacaatgtcctctaagtggtggaacattttcctttcttcttctttaaatctttctgattgcctcttaaattttctgggtccatggcaagtttgcaccttggaggtgcttcgttgatcaatgaggtcgtttttggctcctccttgattggtttcagaagtaaacggtttaaacgagcttcagaggttaggttacaagcaaagtgcaaagattctaattcctttttgagttttttagtttaattattgttgatttgttgtttggtattgtagagatgtaggttttgtgttcaacaaatgtcagagaatgaacagagaactaaacacgaactggctcgttctgctaaaaggtgatgactttgttctctatgtgtgatttgtgttaaacttcatcactcattagtgagtaatgtacactgaactgtgtagtcgatttgagctagttatgataagatctgtgtggttctggtgatttattttttcatttagtggttgttgctttgaaaacgtttgttacagtttcattagcagctttctcttttgttacatgataagttgtgtaatagaaccgtaccaaatgcataagaataatcaaagtttcaatttttggataagtttggcaaatgtttcatagaaatagtttctctaatgttgcagaagcgagtctttgagacgtattttaaagcaatatggagtatctgtagaaaaccctgtagaaagtaagacaagtagtagacttgatgacctagattgtgaagagaagcacgatgctgttacttcttctgtcatagatgacgactctaagatggtatatatcacagaacttctggatttgtacttgatatatcttgtcacttgaatggtattatatgaaatggggagattctgactctcattagtctttggaaaattgatgagtactgacagaatacaactgaggagttgcctgatttacgccgggtagagaaatacactgagactgttggtactgcagataatctttcaggacaaaatcaccaaattctcccccatgtaagaacatatccctataaatttcatgttcttgtcttattggaacccttttagtatattcagttttcttactgtgtgttttggatccatgtgtttaagtgatgctggatgtgctactataaaccctttcattagattctttgtagatctcaactcaaattagaattgcatattcttagtttgtttttcaactagtaataatgtctctctttagttgaacacaggtgttttgttaacttctctgcttcctgttcttggattctgcatcatatgcataattgggacgttacactcaataatctccagaaagacatcacaaggtcatcatcatggctccgaaaggtggagaaccgcattaatggattggaacgagccgcttgcttctgatggacatgattcgatgtctccagaatacagagtcagttacatacttaagttctgagttgtattcgtttacagatttttttcttcggtttttaaagaagctaactgcatgcaggtcg

SEQ ID NO: 138609 - DNA, 550 bp, Arabidopsis thaliana landsberg
actgagagacatctcggtgaagaagtagcagagatgtcgacggtgtacgtgctagagccgccgacaaagggaaaggtcattgtaaatactactcatggtccaatcgacgtcgagctttggcctaaggaagcgcccaaatccgtacggaacttcgttcaactatgcctcgagggttactttgacaacaccatcttccatcgtgtcattcccggttttctcgttcaaggcggcgatcccaccggctccggaaccggtaacttctacgctctctgattattcttagggtttaagacctctcatttgtatcaaattttcttctgattgctcgctggattaggtcaattgagttttatgtgtgatatatgtaacaggtggagatagtatatatggaggtgtctttgccgatgagttccattcaaggctgagatttagccaccgtgggattgttgccatggctaatgcgagctcacctaattctaatggaagtcagttctttttcactttggataagtgtgattggcttgataagaagcacactatctttggcaag

SEQ ID NO: 138610 - DNA, 1179 bp, Arabidopsis thaliana landsberg
atggggaatatggagcctcttcgtggtgataacacgcagtactttactggtggagaagagtatgataatggggttgatgatgttgagagtccaaagcattaccttatctggaacatgaatatgaacactcacatttacccagaatttgtagttagcttcaagctgtctatccccaatgctgaaggtgattaccatttgttatttctcctgtaatttccataaaaatcaactgatgacgcattgaatgggagacagcatatagatcttactgaagatcagctatttggatcctgaaatcttcctctataagttagaaaaggatccacatcaccttgtgacctctgggggtggtaaacatacttcatcatcccaagggtccagtgagatatccatggctaatatatatgggtatttcgatgatcacatttgttttctgtagtattcgaaacgggatgacatgttttgtttgtgcagggaatattcttcctactactcagagtaggcacgagagttcgggactcaccttggaaggacccaaaggttctccctcaaatgtaagttgaattgtacctgatcagattctcattttcaagcagtcattgttaatatttgatatggacacaaacgagtaatgttgcttgtttgtatgaagcaggagccaggaagggtatcaaatggaggttcagggagcgaaaagaatagctccagcagtagaaggcccagatctcctataatgcctttccctctgctgttcaaagcaatctcgagcaaaattgctcgtaaagacatggatttgataattgctggttaccaggaactcagggtaaataatataaaccatgtcttttaccaatagtcaaggttatcatattgtattaacataatcggtgtgctcttgcaggagaagaaggtgtcgagaaaggaattttataagacgctgagtatgattgtaggagatgatgatctgctgatatctacaataacaggccttcaaaggagtttgggttagattaatgtgtcgacttctctttgctgtcgtgaaaccttaatagtttggattacgacaaacgtgacttgatctttagaaacttagtagtagtactgttatatttactcttttggtgaaactagtctccattatcctgtttttctttacttggaatcaaagagtcttttatt

SEQ ID NO: 138611 - DNA, 380 bp, Arabidopsis thaliana landsberg
acaagtcttagacagcaacgtagccttagctatggtcgtgaggatcggaaatgacttacaatggccggtgattaaagacgagccagtggtgaaacttgactctcgtgactacctcttcacgttgccggttaaagatggagagccacttagttacggcatcacgtttttccctattgatgaaaatgacatcgtttttgtgaatagtatcgagttgctagacgatttcttgagagagaattcttgtttctcttcgtctccgtcttcttcttcgtcttcttcttcgtcttcttcttcgagtgttaacaatggaattgattggaaagagtttgcgcctaagattgaagattataacaatgttgtagctaaagctattgcaggag

SEQ ID NO: 138612 - DNA, 791 bp, Arabidopsis thaliana landsberg
aagacaaaaccataaaacctctcctacttgatcaggttcagagatcaaatttcattttctctcacttttatgcatctttcagctctttcttgtccttaccacttctatcacaatatctagaacttggctatatatgacattatagatgctgcagaaatgatcttcttttatttggcaaagttttgttccttttctttatataaaaagctcgcatttagatgattatgtatatcttcccttttgcagggatatatttcaggtattgggaattggatcgctgatgaagtgctgtaccaagtaagtgatctttacacatttacatttgaaatgaagtaaagcatctatgtaaccactcatttgattcacaaagtatccacttttgttttctgtacatttgacgacagaagaaacgggtttacatgctgtacgattaattctagtttatttttttcgcaggccagaatccacccgttgcagactgcttctagcctctccaaagagcaatgtgaagctttgcacacatccatcaaagaggtaagactctaaacaccccaccaaaacagtacctaaaaaacatgggattacaaatgctctgttaatatatatgcatatgatgcattgtttattgggatttagagagaaaaagaaaacccgcatttgtaggtcattcaacatgcagttcaagtcaatgctgatagcaaagagtttcctgttgaatggttgtttcattttcgaaaggggaaaaaagcagggaaagttaatggtaagctttcccaccatctatctataaa

SEQ ID NO: 138613 - DNA, 3886 bp, Arabidopsis thaliana landsberg
  unsure (1)..(3886): unsure at all n locations
ttctgttccaattccaattccttctgaaatattcatcgcaattcgtatcggtaatttttccttttgatcgcattttttttttatctttgatcttccgtattaaacgtgctcgatctatatactcaatgatcttatatgtgtatgatcatgtaatttggaagttgaaatgtaaatcatctattccttggtgaattattcttcgatttttttctgatatagcttaatggtaattcctgtgattttactgatgtaatctggtgttgattgttgtgaattcttgatctatgagattatgtcttagatttgccaaatgttaagtttgtttgatctttgacaaaatattgtaggtttaaagtaaaaaagcaatgggaggtggtaaagacaagcatcatgatgagcaagagaaaggatttcatggttttccaggaggtggacattacccacctgctcaaggaggttaccctccacaaggttacccaccacaacaagggtatcctccagctggaggctacccacctgccggatatcctcctggtgcttaccctgctgcgcccggtggttatcctcctgcacctggaggttaccctcctgctggctatcctgcacctggagctcaccattcaggtatgcattgtctcgttaaagagctcttctttgtagttttggtaaatgttgatgttttctatgcaaaagctatggagtgtccttgtagcttgcttggattatcaacctgctaaatattgttaatcattgaatgttaataggaaaagactttataaatgtttcggttttctatgaaaaaagctaaagattgtgcgtgaagtttgctggatcattaaccttcgaactttgaatgataatagaacaatagtttgtaaatcttactgttttctttgtaaataaagcttagaactggccttgttgtttgctggattatcagcctgctaagtattgtcaagtttgaatgatagtatgacaattgtttctgaaatgttgttttttttctgtgataaaaagatgaggacatataaacttactgtcttctgttttggtgtatacattgatgttttaattttaaatctactaggagtacatgtttaatcgtgtgtgcttatcaatatgcaactttgtggtctcttatatgcattctgctactttggggttctccatgtaatactattttcttttttccatcaggacattctggtggtggactcggaggcatgatagcaggtgcagctggtgcagccgcagcagcttatggagctcaccatgttggtcacgcctctcacaacccttacgggcatgctgtaggacatggagggtatggccatgcccctgctcatggctttggccatggtggtcatggtaaattcaagcacggaaagcatggaggcaaattcaagcacggaaagcatggaaagcacgggaaacatggcatgtttggaggaggaggcaaattcaagaagtggaagtaatctcaaaaaccccacctttgatcctctcctccagtatagtctcattacctgaccgatgtttctaataatcccccttcaaacatatttcattttaactatgtcggtttagagattactggttgaggaaataattggagagtgctagtataaaccttatggtatctgcagcagaggtttctttaatctctcaatagtagatgctttgaaacctntatctaaataatttggtattgtaatgacagtttgtgtttggttttttcttcagtatcttctttgtttgatcatttgatgttggtggagttctccaaaatatttatgctattgtagatcctaacctttctatcttgttattcttcgttttttggccattattttcgtttcgctcccgatccaaattccaaagtacttcaacaatatcttatgcaataacgagacaaacacttaaggtcgtgcaagaatagtgtctgtttttcactgattcacttttacagagaacaaactgaattaattttgattattgaatagttgacatgcaataatatttgttaatccaaatgaatagataaaaaaaaaaaattccttgagagtaaagaaactaaattttggaagacaattttttcctagttttctctaaaactaggaaagtcagaaaatgagaaaacaaatttgattttattacggaagtgaagggctttccgacaaattgctttgctcagaccaaactgtaaccgacccaagcccaataaaaaagcgaatcgggtcaaacgaaaacagataattcagaaaaccctaaattcgtttctctttttttttcttcattctgagcaaagcagtaactctcaggtgcgtgtgctctccgctggttccttagaacaatcggcacacgctttttcatttcaatcttcttcttctacgaatctcttaagtatctcaggtactaatctcgatttctctatttctcgtccatggagatttagatttcaagtcagatgcttttcgatttgttacagatttataatttttgtaatcgattgattcgcagcttggattgtattgagccatcgacataccttcaaaattcttataattgtattgaaagtgtttgaatttaatgttttttttttctttctctcgattgttttgatttctgggcaagtgtcaacttttgtaacagattagtgacctttctctttatagatatgtggaagaatttggaatttacaaattcggttcaccatttttatctgaagcactgaatttgcgtttttcaagcttgagtgaatattatttcttggctcttaagattttgcatgtcaactattatttcatcattgatagcatcttgtggtgttcaagttattattttaaatattgtttgtgctactctatagttattccctatgatgttatttcgttcctttgccttagcgtgacatctttatttggtatatttgaatctgtgtgatttagtttcttcaggctgttaaactatagatttcatgtattttgtaggtctgttgagagatgtcagatcgattgacgcggattgctatcgtgagtgaagaccggtgcaagcctaagaaatgtcgccaggagtgcaagaagagttgtcctgttgtcaagactggtactttttctgagtttttgaaattttgttcataaagaacgtttttttatgccttgttttgtttctctagggaaactttgtatcgaggttggttctacttccaagagtgctttcatatcagaggagctgtgtatcggatgtggtatatgtgttaaggtacttatatctttttacattgaatgaatttgtcttactcttgttggtggacattgagtgagaatgatttttggtgtacaattttgcagaaatgcccgtttgaagctattcagattatcaatctttctaaggacttagccaaagatacaacccatcgatatggggctaatggttttaagttgcacaggttagctaatcaaaagtttttgccttgtggaatctgattgataatctttctttagggctctgatatgtttctcggcttgcaggcttccaattccacggccggggcaagtccttgggttggttggaacaaatggtattggaaaatctactgctctcaaaatcttggctggaaaactcaaaccaaatcttggcagatttaatgtaactatagactctctgaattttctctaccttttacgtttaatgtgtctattctgtagtttatgtatgattgattattctactacctcttgcgcagactcctcctgactgggaagaaattttgactcacttccgcgggtcagaacttcaaagctatttcatccgagtagtagaggaaaatctaaaggttagggtccaaactattcttgatatttattctaaggaagcagctcatgaa

SEQ ID NO: 138614 - DNA, 2866 bp, Arabidopsis thaliana landsberg
  unsure (1)..(2866): unsure at all n locations
atcaaaatcaaaaccaagttcgtttcgcggcggaggagaagaagaatcagacgggaaaatgttggagaagatcggattaccgccgaagccatctctaagaggaaatagttgggtcgttgatgcttctcattgtcaaggatgttcttctcaattcactttcatcaatcgcaaggtcttcctctctcttaatttccttactctctctatcaattggtacttgcttattgctatcgcgatctttagattcttagtttcttcgatcgaaatttagtttcgtcttagtcgattcttcttcgagatctaattcagaatctgtttatcggaaaacttcactgaatgatcggtttctggtgatgtgcctatttgatagattccatatttttgagtaaatttggtgaatctggatgttttgtggtttgtgtattactagacttgtgacttgctggattcttctatgtctcccaaaaacctttgaatttgcttaatttttcttagtttctgttggctttgtttttttgagcgagcagcatcattgccggagatgtgggggattgttctgtggaacctgcactcagcaaaggttgtcactacgtggacaaggtgactcacctgtgcgtatatgtgaaccatgtaagaaaattgaagaagctgcacggtttgagttgcgtcatggttacaaaaatagagctgctaaaggtatttatgtacctatagtgatcttatttatgacacttttgtgttatctgctagtttttgatgtaaagagattgtgaatttgttcaggaggtagctcgaaaaggactgtaaagaatgaggatgatgttctcagtgagattctaggctctgatgttgatgtatcttcttcatctgaatctgtgtctagcacagacaggaatgcttctaaagaaatggcaagtagcagtagtaataaaggtatggagttggatgctagtcctgaagaaatgcgctatcacgcagtataagcgaagaataagtacagaattcttaacggagaagggaaatctgatgaagctctaaaagcatttaagagagggagggaacttgagagagaggccgacgcattagagatatctttaagaaggaaccggaaaagggaactgtctatgcgaaatgttgctgagacgcagaacaaggctgctaccaaagaatctagcaaatcacaaaagcctctacgtcaagggggtaaaggaaatgatgatttggcagctgacctgagggagcttgggtggtctgacgatgaagataagaaaccagcaactataagtttggagggcgaattttcgtctcttctccgtgaaattccgcgaagtgctaatcctcagaagactgggggtattgacaagagtcaggtaattgcccttaagagaaaagcccttacgctgaaacgtgaagggaagcttgcggaagctaaagatgaactgaaaaaggctaaaattttggaaagggaactggaagagcaggaacttttgggtggagctgatggatcagatgatgagctatctgcacttattaatagtatggatgatgacaaagaagatgatctgttagctcaatacgagggaagccatgatttcgacattagtaaccttatgggaaatttagatgatattggagttcatggtgaatatgatgtcacagatgaagatatggaggacnnnnnnnnnnnnnnnnnnnnnnnnnctttgggttggagtgaggatcctggacaccatgagaatgtccactctcgaccatctcctaaaaacagagatgaaagtttagctgaaattcagacattgaaaagagaggcccttaatctaaaacggaatggaaatgtcgttgaggccatggctacactaaagaaggcaagattacttcagaaggaactagaggctgctgatacttcctctgaaactgttgacacaactagggcagagagggatacgagtcttaatcctcctcccagaagcaggctagcgattcagaaagaacttcttgcagtgaaaaagaaagcacttactttgagaagggaaggaaagtttaacgaagcagaagaagaattgaagaaaggagcggttctccaaaatcagcttgatgagctggacaattcgtcaaagttagctgccacagggaaggccactcgtgaaaaaggaaatgatctgcctgatattagttctctggatgatgatggagaggtggatgtaaaagatgaggagttaaatgatccgaattacttgtcgatgctaaagagcttaggttggaatgatgaagataataatcctgcaggtccttcatcagaaaaatctgacccactaaattctcgaccagggaaaacagcagaagctcaaggtgcatatgaagtacgtgttactaaaccaaggagaactaaagcagaaatacaacgagaactcttagggctgaaaagaaaggctttaactttgcgacgacagggtaatgttgatgaagctgaggaagttctgaaccagacacaaatattggaagctcagataatggagattgattcaggcaagaatctatatgctgacagtgatcagccgaaaaaacgatccaatgatcttgccaccgacagtcggctcaatggaggagatgatagcgttacagaaaatgatatgaaggacccagcgttattgtcgactcttaagaatttgggatgggaggatgaagaaccaaagaaagatgaagcttctttcggctctgtgcagtcaagcggtccacggatagcagccaaaagcaagggacaaatccaaagagaacttcttgacttaaaaagaaaggcacttgccttcaagcgtcaagggaaaactggagatgctgatgaattatacagtaaggccagtgttttgga

SEQ ID NO: 138615 - DNA, 3816 bp, Arabidopsis thaliana landsberg
atgagtcaactcattacgaaagcagctttacgagttctgcttgtctgcggcagaggaaactgtaacatgttcgtgagttctgtttcctccacctctgttatgaaaagtccgtatgagataacggcaccgatgcgaattcatgactggtgcggcggttttggcgatttcaagatcggctctaagcatgtgcaaggtgtgcatatctgtagatgatcctcatacaaccttataacaattgtacatgataattaggatttgtatatttctaaaatttgaataggaaattttaacttgaggtggatgggtatgagttctgcatcggcgatggagaagaaagatgaaaatttgacggtaaagaagggtcaaaacggcggggggtcagtagcggttccaagttattggggaatagagacagcaaagatgaaaattactcggaaagatggatcggattggccttggaactgttttatggtaaacttatacacatcccaaagttcgtagacaaattaagcactcttttatatgtagtagatatatgacttaagtatattttgaacagccatgggagacttatcaagcaaatctgtcgatagatttgaagaagcaccacgttccgaagaatatcgccgacaaagtcgcttaccggattgtcaagctcctccgtattcccaccgatatattttttcaggcatgactgtaatttcaaattttaaaatgaaacgttggttcgtttaatatgttcattggtttatttagctgattcggtttggtttggtttgtaattttgtatgcacatattatcctaccatgattcacatatatacatacgtatggattcactgtttcacttcacatgctaatgttttacattttttgttccttaatgttaaatatatgtttggtcagcagagacgatatggatgcagagcgatgatgctagagacagtagctgcagtaccaggaatggttggaggaatgcttcttcacctaaaatcaatccgaaaattcgaacatagcggcggttggatcaaagcattactcgaagaagcagagaacgagaggatgcatctaatgacgatgatggagttagtcaaacccaaatggtacgagcgtcttctagtgatgcttgttcaaggaatattcttcaactcttttttcgtttgttacgtgatttccccgcggttagctcatagggtcgttggatatttagaggaagaagctatacattcttacaccgagtttcttaaagatatcgacaatgggaagatcgagaatgttgccgcgcccgcgattgctattgattattggagattgcctaaagatgctacgttgaaagatgttgtaaccgtgattcgtgctgatgaagctcatcatcgagatgtcaaccattttgcttctgtgagtctaaaacaacaacccttttattttttttcaaaactcccgagtttcatacatttcttcgggtccatttcggtgatattaaaacaacaaatgatataagtagtagaatcaacgacatttggtgtgtggatacatacaagttcatagtttataatataaatcaatgaattttaaaaatctatggatttgttatgttgtgtggtgtttttgaattgttaatattgtgagttatttgcaggacattcgcaatcaaggaaaagagttgcgagaagcagcagctccgattggttatcactaaaccaatttcaaaagagtatcctacttggagtttttctgtttgttttttttaatgattttggatatgaatttgtttgaatgtgctaaaacatgttttaaaggtgttagagatgtaccggtgtttgtaaattgcagaattgttttggtaaaaatgtttcagactataataaaattgcgtctcaaccgtcccaatcgctgctgaaccgatacgaaccaaactcggtatcatccggttcgattatcttctttttttttgtgtcttcgtcaaggggtacaaatgtaattaacaacaacgtcaagctttaaaaaaaatgtccccgtatctagtagattccattgtttcagaaaagctttaacctaatttcacttcgtctctctctcgcgctcccaatttctccgccggcgggaaaaccatgtcgcacttcggaaggtcaggtccaccggacatcagcgacacctactcacttctcgtccttaacatcaccttccgtaatctctcaagtccctatttctgtttctcaacctctaatcaattttcgtgaactgggggtttctaagagattaggttttgttgttatgtgtaggtacgactgctgatgatctctatcctctattcgcaaagtatggaaaggtcgttgatgtgtttattcccagagatcgaaggtccaatttcttcttcttctccgactgaggaattagggtttcttgatttctgtcattgagtcttgtgtcaatttataggactggtgattcgcgtggttttgcgtttgttcggtataagtataaagacgaagctcacaaagcagtggaaaggcttgatggtataattatccagatcttcttatctctcttgtgttcttggttttgttatgtgcttttggtgcctggattcaacatgaagcttctttctctgtttcaggaagagttgttgatggcagagaaataactgttcagtttgcgaaatatgggccaaatgctgaaaaaatgtaagcttctttctttgccaatgattgttcaagtttactcttgatattcgggagctcactatgaatgtttcctctttagaccgtttccgttatttgtgcaattggaacttctatcatgtaaaaagctgcatctgtaattgtattttgattcgtttgttattatcatgattcatgacagttccaaaggaagagttgtggaaccaccgccgaagtcacgaagatctagaagccgtagtcctaggcggagtcgtagtcctaggaggagccgtagcccgcctagacgtcgtagtcccagaagaagccgcagtcctcgtaggaggtgagtttcttctttaatctgcattcttatgatgattaggtgaactagtgggagttaataatggttatgttattagtcaactagcttttgttacttgatttatgaaagaactccatctctgcctaagaacagtatttgtctgaataattctctcatccgagttacataacttgtaggtcccgagatgactatagggaaaaagactaccggaagcggagcaggagcagaagctatgacaggcgtgaaaggcatgaggagaaggatagagatcatcgtcgtcgcactaggtctcgtagtgccagcccagatgaaaaacgcagagtcagaggccgctatgataatgagagccgcagtcacagtcgttccttgaggtttcttccgttgtgaacctctttttttcatgtttttgctccacaatactgtgtatcctgatttcaactttttgacatgcagtgcatctcctgctcgccgcagccctagaagttcctccccacagaaaacctctcctgctagagaagtttctcctgataagcgtagcaatgagaggtctccatctcctcgtcgcagcctcagcccaagaagccctgctttgcaaaaggcctctccttctaaggagatgtctcctgaaaggcgtagcaatgagaggtccccatctcctggtagccctgctcctctgcgcaaagttgatgctgcttctcgaagtcaatctccttatgctgcggtgggttacaaaaacacagtgtttcagatgtgtatcactaatgaaacttgatgtctgaattgtccttgtttatattttgtttgcaggaatga

SEQ ID NO: 138616 - DNA, 2416 bp, Arabidopsis thaliana landsberg
aacttcagccggagaagaaagacatgagcggcttcgtggtttcaaaaccggagcagagccatcatcgtctcttcgatttcgcaaagacggccataatcaacatcttcgcacatccttatgccactgtatctaacaaacccgcttcctctcaactccatttcatttacaaagtcttatcctttatgtctctctctctgcgtcttttctaggtttgcgaattgtactgtggcggagctcccgaaaccgacaagtgggaagctgctccgattggtcactacatcggaattggtattaatatactcttacttacatactcagtgttatatcagtacggcttcatcgaagattgataggtttgcgtttttttctatttgggggaagtagatacatcttctgggatttcttctgtacgagaagcttgggagagtcagaggaagaattacgatgtggaattctttgaagctgatccttccaaggcaaggcctttttttgtttttccatgtgtttcagctaaactaagtaatctggagcaaaagtcttagtttttgcttcattttgtgtcacaggatgattttgaaatccagctacagaagaaattggagcaggctgatttagtttcttgttggcgccatctccaggtttgagattttgtcgtttgttttctccgaaaaatgtagcatagcaaggatgtgatggtctaaaatcttctttatgtagttatgctttgaaactgaggagagtgcgagaagactcctaactaatgtagcatgtttactgaaaccagggggttattttttcggtatcactcctgactcgtctacgatttggtaatgatgttttctgtatcaatgcatcaacttcagcatttgattgcctatatattttgatcagttggactgcgctccttaacattctggtcaaacagggcaaagtaccagaaaaatgttgaagcataccacaacagaagcggtgcaaagcctaatgtatttccaaactacattcggtctgaaagttacatgatcactttcgaattggaggaagaaaagtgagcattttttatctgagataaattcattttgctatcaagttccttttgtgaacttggactgtttgtcattttcttctcagatttccgctgtttggaaagaggtaccagctgaaattttctggtgacaatgcttctgaagaccattgcttggttcacttcccaagcttaatcaggtgggttctcgggcaccatgatctcgcttttcttgtttagcaaaatgtaacactaattggatgatatgaaattaccatatcaacaatgtgcacttgttgaacttaaagcttgtatttattcttaaaactctttaagtaaacaagatttccattctactcgtgatattgcttctagttgagctacaaatgacatctagtttgtatatatctttcgagtcttggtcatctaacttattgttttggtgtttgctattcaggttagcgagggaagctggccttgaatttgtggaaattcaaagtttaacagatttttatgatgataacaggttcgaagtctcccatacttgtagattctcaatcttttatcatgagcttttgtatgtcatagttgctcctttcgaaggttgtattacaatgctgatgttgttcaactcttcttgtcagagcccagtttgcaagcttgctgatgaatgctggcccgaatttcgttgaccctaggggaaaacttcttccaagagcatttgatttgttaggtaaccttgccatcatattatgccatcttatcatatctaatctctagttttgatactttatatccttattttgcgcaggtctgtatgcaacattcatatttcagaagcctgacccagatatcgaaccttctctaacgaccccaataccttttgaaagctccaataatcatgatgaggcaagtacctttgtcttgtcatattctcgttctacacaagtataaataactctaaaatttccttttcacttgagaaaaagagtctggctatagctttagtatggactgtatagttttcagtttgtagcacaacagtgcttcagtctcagctccttgcccggatgttattgtagttgatccatttattaaattgtttttgacaactttgcagagagaattgccagttatcacggtgatcactgacgcaagtgcaccagcagaagatccatcacaaggactagggaagattgttgaacaaaaaggaatactgggaccaggccctgctgatttacgtttctctgaagcaatttgatgccttttattttaggaagatgtactgctttggtgatgtagtgaaagttgtttatcagtgccacagatgagctaaaacgagcgtctcggtttgttataatatcaaaccacatttttcatgtgttttaacaaaca

SEQ ID NO: 138617 - DNA, 261 bp, Arabidopsis thaliana landsberg
gggttaggcataacggtgtttggaatcgcctacatgtttgtccacgatggtctcgtgcacaagcgtttccctgtaggtcccatcgccgacgtcccttacctccgaaaggtcgccgccgctcaccaggtaaatacaaacggtttctttcccaaaatagatttttaattttaatagtatcttactaaatcatatttttattgttattgatcgtgcatgattatctttcagctacatcacacagacaagttcaatggtgtacca

SEQ ID NO: 138618 - DNA, 1990 bp, Arabidopsis thaliana landsberg
atggacgaggtaggctccatttcagcttgaacctccatggggaaagaagagtgatttgagttataaatctttggaaaattcctctcagggtacacgtttcttggcagattcaacgtgatttagacgcatttcgagaagaaagagcgattaaaaattacttctttatcagattttcatttcaatttacagtttttttcccttggattgaggatcttagttcttaagcgaggttacagctttttccagtggattactaaattggacgagagagtaatagtcaacactcaaaaagtctttaaccttctgtcggaacaagaagggcttgctgtccgttgctcatctcatatagtaaggcccaaaaggcccaaaggcttctttttccaattaaaactaatttttgtatagcgaaattatgatgaagaaaatcgtttcatggcacgtcaaaaaactttcgcacaacaatttttttttacaaaagggtcacttttatcagaacctaatctatcatagagttcccatcaacaaaaaacctatcatagagtctagtcctgtgttaacgtaggtgatgggttggtttcatggtttacatggacaattattatggtgtaagaaaaagatgatgggtacacatattccatttaaccaatgtgaaagattcacatcacctttttcgatttttaatagattcggttttaccttctcgtaacgtaattctaagaaaagaaaacgtcaatcatatttactaggaaagataattataatttattgctttttctctcactctctgacctgaaatctcctactgagatttttgaagtgtattcaacaatggcggatccaccacatttctctctgtttcagcaaaaatttcgtaccggagacaaaccatttctcgtaactgtttctctccttttatctttttgtttaagttactgtctttgtcatcgtcaagaactggttcctttttgttttattttgcagactcttgatgctgacttcttaatgaatcacacgaaagtgttactaaaatcggatgcttcagacaaagtttggaaagtgaaactggacggcggtaggctctccgaaggctgggaagagttcgcctgcgaccagaaattcagagacggtgacgttttggttttcaaacatcatggagacgaggtctttcatgtagctgtggtgtccccatctgtttccggcgacatacgtaacgcatcttctagccaagttattacggaagatacttatattgatgttgacgatgttgatgatgatgattatggacaagacgacgaagatgatgatgatgatgatgatgagggcgaggataatataggtaaggtgtttcatgaagtattacacaatctgtttttttttttttagtgtaaccggtatgttagtgaagattgttgtgattcagagaacatatcggagaagacggataaaagacaagaagcagattcttcatcagaccactcaggtttcatcacagcacgtgtcactcgttatagcctccttcatgaccgtttggtgactacttaaactccattttagctttgatgtaacattcaagattataatatttgttgagtgatgtgacttcttgataatgtttttgcaggatctttctagaaattttacgttgttgtttggtgggcaccaaaaaacatgtgagatcgatgtagtggatgagcaagggagaagatggacaatgaaacttgccaaaaacatctcaagtggtgtgttttacatcagactaggctggggaaacttctgctgcgctaatgggctaactcaaggagacttatgtaagtttaaacttttccaaaatgaggaaaggcctgtgctttggttgtgtccacaggaatctggcaatggccgtaaagagaagaggacgtttgatgaagtttccaaaggaaaggagaagaagaccccttcaccatttctgatagtaaagtatacacctagccgtgagactaccgggcaacta

SEQ ID NO: 138619 - DNA, 263 bp, Arabidopsis thaliana landsberg
cgagaattttggtgggtttgtgctgaaatctggaataggattagggttttttcgtgaatttgaaaatggcggagcagaagagtaccaatatgtggaactgggaggtgactgggttcgaatcgaagaagtcgccttctagtgaggaaggcgttcatcggacaccgtcttctatgcttcgacggtactcgatcccgaagaactcgcttccaccgcactcgtcggagcttgcgtctaaggttcagagtttgaaggataaagttcag

SEQ ID NO: 138620 - DNA, 1273 bp, Arabidopsis thaliana landsberg
aagggagagatccctgagctcaaggaagagcttaattcccagtataaggttttttttatcttcttaatcttactcttgtctcattccatgtggatctgtgatccgccattattacattcacgatctctcggtcgatgatccttctctccttgtaatttagttatccttatacaaattttggtagatctgtgtagttctggattttgaattttgaattgaaattggtttcgtgattttgtgggaagtgcgatgattccgttcatttttcagtaactgattgggatataggttagaattggagaggaattggtaggtttttgagaatggctaatgtggagatgtgtgtgcaatctcgtagtaactttagtgaagcttaggttggtgaatcagaacttgttcgatctggatcagtggatttggatgaagagtttatgttaatgatttaagaaggaatggttcttttctgctttggctacagttttgttaacccttgttgtttatttactgttgcataggataagagaaaagatgcagttaagaaggttattgcggcgatgactgttggaaaggatgtttcatcacttttcactgatgtagtcaattgtatgcaaacggaaaatttggagttgaagaagcttgtttacttgtatctcataaattatgcgaaaagccagccagatcttgctattcttgcagtaaatacctttgtaaaggtaacactcaagcaactcaaacaaaaccacgtggcattcctttgttctgttctgaacctgaaggggaaaggaactgataaactgatcattacaaaatcattggtttgtattctgcaggattcacaggatccaaatccgctgattcgtgctttggctgtgcggacaatgggctgcattcgtgttgataaaatcacagaatatctatgtgatcctcttcaaaagtgcctaaaggtttgagtttctaatgttacatcttcattggaatctgatatcaaacatctttattgcccttaagaacctgtttcatcttgactagtccatcttttcactatcctgtgtatatttttgtgtttaggatgatgacccatatgtcaggaagactgcggctatttgcgtcgctaagcttttcgacataaatgctgaattagttgaggacagaggtttccttgaagccttgaaggatttgatattagataacaatgcaagggttgatgccaatgctgtagcaacccttgcggagagtgaagagaacagtagtagccccatctttgagatcaata

SEQ ID NO: 138621 - DNA, 537 bp, Arabidopsis thaliana landsberg
tgaattctcctgcacctgaaagaactagatcaggactctccaggaaggtttgtgattattatttgtgtatacatacattatctagcgcttttatttgcaaggatatgtagtaatcgcaaactgtagtaatgttgctactgaagtgatagacagaagtgctcaatatgtattatcgtctgagatgaaaccttttttagatgtttcacttttgaacgaaacatgttttttttttcattgtgcagatgcttcttgctcccaaggatttaagttttgttggctacacatacaagaactttgacgctgtaaaaggattgcgtcattcacttggtaaattcacatgaccctactattattaaattatttttaatcttgtaccttgactcgtgaattctcctagtcaataaacagtgcctgataatatgttttaagtaaacgagacgcaagaatttattgttgatgaagaccttaggaagaattgaccctttttttccaattctgtagagatggcaagaactatgtctctagatcgatcaccag

SEQ ID NO: 138622 - DNA, 722 bp, Arabidopsis thaliana landsberg; identical to SEQ ID NO: 18997

SEQ ID NO: 138623 - DNA, 676 bp, Arabidopsis thaliana landsberg
tattcttttgtcggattttgttatcttgttgcagctgcaaagagacaaaagatgcttgaagagatcgaaagagagtttgaaggtatcttgaaacgtataagtataaccaataagtctttaatgaaatatcttcttgagaaccatcttagactctgtaattcctctgtttgcagaagctacaaaaggtcttgaagaactaaggcattctacctcaagcacagatgatgaagcacaatgtaatcttttgtttccctctatttaaatgatcttttagtctcagatacactactcagaacacaaatctaatgtcttgttattgttatagctgcaaagagacagaatatgctagatgagatcgaacgcgagtttgaaggtattttgacacactcaatatctgtcttaattgattcacaatatttgtgttgagacttattggatttatgattatgtttcatctttgtacttgcagctgctacaagtggtcttaaagagctaaagattaatgctcacactgtcaaagatgatgttgatgataaagaacaaggtaagaaactgttatctctactttgataacttatgtccctcatttagttttctgagatagctagatgttatgctttatttacagatgccaaaagacaaagtatgctagatgcaattgaacgtgagtttgaag

SEQ ID NO: 138624 - DNA, 3962 bp, Arabidopsis thaliana landsberg
tgaattttcacggccgacctctctctctcatctactaagctctcctccgagtattgttggcttcagaccaaatcttctccggcgctgtagcgtttcccccggtacggattcattcacctctctctctctatcgctctccctcgctctatctctatctatctgttgttttctctgaatttggtttccgtgttcttatgaattcgatggtttggtgtttcaatttcgttaatttcactgataattgttggtcttttggttctcttgaggtgaatatacttcgctatggtcgtgggggtagtttccttgacttcaattagcttttttatgtcgaatgttcttgagttgtttaaggtgatttttgattaaattcagaaggtcttatgtttgttagaatctgtattttattcattgtccttactgaggaaatttttttacttgcattgaaaagaaacataatttaccaagaggttctatgtaacgatgatttgtgggtcgatctgtattttaaatagtcgttaaaagtagaatttttgttgtatgtttgaaaggaataatggtttgagtaaggaagaagaacaaggtagatgcatgagtctatgttacatgatgtcatgacacatgctttctttatgatagatggcaagagcttggaacatgagcattgcaatggttcatagggatatagagagggattggggagatcaatgtggatattgtttttattattaatggagattcatggaaacgatctggagaaatatatatatttcaatattttaaatagcttttggagcatattggagcaaataagcatttggagcttgtggagcactgctctgacccaggattgctctcacttggtttgcttcatatatattttggtcttaccatgttttctttttcttttcttatcatcgtctcattttgatgctggggctatgtcgaaagctgtttgagtggaggttctttgtctatagcagtaaattttgatcctttatttatttcgtttcctttttattctcatgtgcagtttcccctttttaacctttgcaaacaatgagtgggcgattttctcggtcaatctatgttggtaacttgcccggtgacattagggaacatgagattgaagatatcttttacaaggtcagtttttggttatttgtttgattcagttacgggtcctctcttgaatcgttatccctataagacagtgaagattcttgagcatcttttgtattcatatttaatgctcttgtttgcagtatggccgcattgtcgatattgaattgaaggttccacctcggcctccatgttattgctttgttgaggtaagtgtattcgcttacattacatgttcctaaccaactttaaatttcgctgaaccaagctctgttgaatgtttgtagtttgagcattctcgggatgctgaagatgccatcaagggccgtgatggctataatttggatggctgtcgcttgagggtaatcagttacttccttgctattttttcagcagacaatatgggcttatgcttcacatatccttacagcagagtctaaacttttctggctgttttacattaccttgtgatgtttctttttatttttcaatagtttctaatcattatgaatgcaggttgagcttgcacatggtggtcgaggacagtcttcaagtgatcgtcgtggtggctacggtggtggtggcagcggctatggtggtggaggtggtggtggtggatcagctcggtttggcgtctcacgacactctgaattccgaggtttgtgtttcttgctagaagttggtattattaaaatttggtttcacttcacttcttctgattcttggatggctattttgcagttattgtacgtgggctcccatcatctgcttcatggcaagatttgaaggtctgatgacacttaatgttttgctgcaacattttggtttctactccctagtcttgtttttcatataaaatccatttttttcaggatcatatgcggaaagctggtgatgtgtgctttgctgaggtgactcgagacagtgatggtacgttaatttacagtttctgatgcatacttacttagcaatatatttactttttcagctttgagcagagttttgtttgggatattatacttacgtttttctcccacaacatgactatttataataatatgatcaggaacttatggtgttgtcgactacaccaattatgatgacatgaagtatgcagtaagtgaactctgtgcgtctctcttactgtattgcatgctatggtttgtataattactgatgttcaatagttgtgatttcagataaggaaacttgatgacacagagttcagaaacccctgggctagaggttttatccgggtaccatttctctatgcagtctcttcttttttccctctttgaccataattaacagatattagttatctctcaagtctttcaacattttacttcgtttgatgcttcattctctcccttcccattcgtaaaacatctatgacttttgtagtctcaattggttaggctaatttaaaatcatgatctcacaagtttgtattcatcttatgtctgtgttttctgctcatatgcaggttaagaaatatgaaagctcccgatcaagaagcagaagcccaagcagaagcagaagcagaagtcgaagtcgtagccgaggccgtggtcgcagccatagccgcagtcgcagccttagcaggagcaagagcccaaggaaggatctgaggtactacgtttgttatcactgaacctttgtatatctcccattttcaatacctaaaaatggagttgtgtgtttacgaatctttattgcagtaaatcaccaaggcgatccctttccagatcgatttcaaaatctagatcgccatcgcccgacaagaagaagagtccccccaggcaagtcttctgcccttcttttgtgttctttctctcaaccatcatgatacttttattcgttcttttatttctcctgtgattattgtgacatgttgctttttaccaattcagggcaatgtcgagatcaaagtccaggtccaggtccagatcgaggtctccgtccaaatctcctcccaaggtatagaactaagctgcctgcgttttagcatcattttaccaagttataggcaaaacaccaaacagaccaatctaaaaaaatctttttctcaggttcgcgaaggcagtgtgtgattttgttaggcggtgaaaatggccaaaagaaagagtgcgaaaattctcaagtcaagatccattctctgtgtgtgtttttttgctgttttcggataattgacattttctgctgttctctgcttctttactcacaaatgatcatctttatactattatgacctgttatgttatggatgtttccgtgaccatcacaatacctctgagttttgtattgttagtcctgttcttgtttaaaccctatgaagtcttagcgaacctggatctctcatctaaattatcaaatatttaactgatttgtataaaatgggcataatattaaagaaatcaaattaaagttaagatatttgacatggtttatagacggtcaaatgagttgtttactcaacaaggttcttccacaaagtcgacaaaatttatatatttgacatgatctgtttgtcggcatcttttagtattccatcacaaacaaaagttgagaattaggatgaagtgcgcatttccttgcataagtagggatacaacttcaacatcttaggtataatgttaaaacatttttgtacaaacttttagctaatatgtatctttacaagaaatatcagaagagaaaatatatctatcttaatacgtatttttggataaatagtggccatatatataaggtccccaacttagaaacgaaacaagatgttataaattcttatgtagcccggaccggctaagagaaaagtgggatcatgtacccatttaaaa

SEQ ID NO: 138625 - DNA, 2122 bp, Arabidopsis thaliana landsberg
gtgatacaagatatttgctttagtagctacagtcagtggattgcaattgtttcatctaagagcacctgccatatttatgttttgtccccgttcgggggagaaaatgttcttgaaatacgaaactctcaattcgatggaccgacgcttgctccaacattatccctgccatggtggtcaagtccgtcgtttatgaccacccatttttcatatccaccaccagcgtcagttactctttctgtggttagccgaatcaaatgcaacaatttcttccatgctgcaagttccgttgtaggaaaacccaccttcccctctggctgtcttgctgctgttttccatcaatctgtgccacaagaatcgcagtcgtcatctcctgccttggactacttactggtttacactccatcaggtcatgtagttcaatacaaactcattccatctcttggaggagaccaggctgagagcaatacgcgaaatggagcaacttctgggctgacctctgaagaggaactgagagtgaaagttgaaccagttcagtgttgggatgtctgtcgaagagcggattggccagagagggaggagaacatatgcgggcttacttatggtggacgaaaaaatgctgagttaactgttgatacttctgatagtgaagatcaaacaaagcctctggagaaacaccatgtttatcttgccaatgcagaggtgctgataaactccggaaaaaaaccaatctggcaaaattcagaggtgccatctacgtctctgctggtcatgtcttcttactatatagaatgtacaatggctgacactcccttaaattttatcaattccagatatctttctatccgatgtatccaccagactctgatggcaagaacctgaattcgcatcaaggtggtggggagacagaaatcgggaaagtatctgcgaacgaggttgacattaggcgaaaggatcttctgccggtatatgataattttcacagtgtgtataccagtatgcgcaacaggtaagttacctcgctaactgcatcacatcttataaactgcgtctgtcattgatccaattttgaagtggttcttctttgcttgtagaggattttctggggaaagagattcagattcttcttcttcttctgaccctggacaagttaaagaaatgcatccattcaatggtaatcaaatttactttcttaatccatgcattataagatatgtcaaatcttaaaactgaagttttagcaggtatggtttaccccgaagatgaggaaagaagagggagtgcccattttgcactaactccaaaccaaaatcctcataccggaattgtaacatttaaacagcctgtagtttccatttcttctgctgtgaaagacactgattatatagacgacgacgctcatgtcttgccaaagaacgcctccctgcccgctgaaacaaaaattgaaaacagcagtgggataagtggagattcaaatgtaagttctaaccgttctgatatgagcatgaatgcagcagacgagggtgaaggacccattgacggctccccaaacttcgagcagtttttcgaggaggtggtctccaatgaaactgttacagaaactgagcataaggatgctccatctgatggaaaactcgatgatgatgaggacgatgacatgcttggtggtgttttcgctttctccgaagaaggtaagaagaatacatcccatagcctgtaatttttttcgatgatttgaatcctcttctaacggtattatctcaatatatcatcaacatttttggatgtgttacaggttgagtttagttaaactatggccaaagaaagctctaatggagaaggggtcacatactaatcccgtttgctgcaacttttactcactgatgatctttaataccctgaaaaaataacatttaaaatcaatttcttttatcatctgtttctgtaaatgcttgtaaatgtaatgttcattatcaacagtctctcgatttccatggactgtttctttgtaatctttttttttcgtgtaactctctctattcattcatcaaaaaaaaaagagaaaaaaaaggaaaaaagcaggcaaaaaatagaaataaagatttatttcgtttgggtttttact

SEQ ID NO: 138626 - DNA, 2913 bp, Arabidopsis thaliana landsberg
acagctttctactttttgaagaaggtattgtattctatgattggctcatctcttaatgaataccgtagaatcgaatcgacactttgtgtttgtgggtatagtccaatttgctcttttaattcttcttcttcattgtaacatttataaaaggtttgttttttgtgtggccgaaagttgtttgacatttgattctgattcgtttgggatcagaaactgtttaatcacttcacgttctctcttcggctctatatatatatgtaggattgtttctttaagggacttgtgtgatttagcttcttcgtttccttggtatttgatcttcttttatgtgtgtgatcttgttaaacagaattttggttagcctataatcaatctcaaattggaaacagaattttgtttttgtttcatttatctgtcatgaaacaaatgttgctcttcactgatttttttatcttagtggaaatgtttggaatttaggatcttttgatttattagtttgctgcttcagaacacatactggtttgtgtctcaatacgcttattacttattgttttggatctctctgaaatggtatcattctgtatgcaggtaatcgttctgttttttcgttgattactgtttgaggttttcattgaatcttgtctcgacatgggctactataacaatgtaagtgccttctgttttcttttttcccctagaacttttttttggatatttttgtcatctttctttgttctaaagcatgatactattgcaggtctttgatgaatgcaacgaccaaactgatatcggtaataacaaagcctttaatataggattaagccttgttcatgattcttttgtttcttagtttcaaagctgaactattaactccattgcttatctatatcaggtcgggttatacgcgatggaagggaagtcattctccaagtaagctcatctgtctttttatagtgtaacacttatagtttatagttgttcaattgtggtttgatccttgtcttttttatcaggcatataattgggaatctcataaatatgattggtggagaaacttggatggtaaagttcctgacatcgcgaaatccggctttacttctgcatggttgccaccaccatctcaatctcttgcaccggaaggttagaggaaactgattcctagacataatgagcctttgtacagtttgagttttgaaaacgaataaccattactaactgcagaaacgttgttactatatcatttcaggttatcttccacaggacctttattcactaaactcagcatatggctctgagcatctattgaaatccttactgcgcaagatgaaacaatacaaagttagagctatggctgatatagtcatcaatcatcgtgttgggacaactagaggacatggtggaatgtataaccgttatgatggaatttcattaccgtgggatgaacacgccgtgacttcttgtaccggaggactggtgagtgatgatgattaaattacatcttttgacatatcattacgttcttagagactctaaaggaaaagttttctactataacagggtaaccgaagcacaggggataatttcaatggagttccaaatgttgatcacactcagcattttgttaggaaagatataattggatggcttcgttggttacgcaacaccgtcgggtttcaagatttccgttttgactttgctagggggtaagttttaggcttttcgcttaggtgacttgtttatttgcttgtggagtcctcaatctgtaacatttgaatgtaaccgatgcagttattcagcaaactatgtgaaggaatacattggcgcagcgaaaccattattctcggttggagaatgttgggattcttgcaattacaatggccatggtctagactataatcaaggtttccttgcgtttcttcatcttatagcgtatgacatgtatgactagtgagtctagttccatgattctagtgttatgtaactatgacacttgttttttctacagatagccatagacagcgtataatcagttggatcgatgcgacgggacagatctctgctgcatttgacttcacaactaaaggaattctgcaggtaagtagattcttcaagacctctaaaattcattgagttttgcttacataatcccaccattgtattgaaacacaaatgcttcttgttacaacaggaagccgtaaagggtcagtattggcgtttatgtgatgcccaagggaagccaccgggtgtaatgggatggtggccttcaagagctgtcacattccttgataaccatgacactggctctactcaggttacttaacaattacttctgtaatcattttcttttagccttcatatgtttgcttaccttttttgttgctctcataggctcattggccgttcccttcacaccacgttatggaggtaaagtagctctctaaacaaaagtctgtccatttacttgcattttaagtctctccctaatcgaagaagatcggttttgtgtttttgtagggctatgcatatatacttactcatcccggcattccctgtgtgttctacgatcacttttacgattggggaagctcaatacatgatcagattgtcaaactggtattctgttcaatctctgcttatcattggaccatcatccatggtccaaaattttcgatctcttctaagacctgtcctctgtgttttttctttgttattattcattgacagattgacattaggaggcgacaagatatccacagtaggtcaactgtccgtgttttaaaagcagaatctaacttatatgcagccattgttggtgagaaaatatgtatgaagcttggagacggctcttggtgcccttctggtagagactggactctagcaacaagtggccatcgctatgccgtctggcacaag

SEQ ID NO: 138627 - DNA, 1764 bp, Arabidopsis thaliana landsberg
atgctcacttggtttcgcggcgagtttgcggccgccaacgccatcatcgatgctctctgcgctcaccttatgcaggcctccggcggatccgctcaatacgagtctgtcatggcagcccttcatcgccgcaggctcaactggatccctgtcctccagatgcagaagtaccattccatctctcaagtcaccctccagctacaacaacatttggctaaaggctttcatcatcatctcgacgacgaccacgacgatgattctccctccagcgacatcactgatggaggatcccgggaagaagaaaccctctccatctgttgtaagcacgaggacgaatgtgaatcacgaggagcctcactcctcaagcagtccaagcgtttctcggccaaggaacatgttagaggacatacggcaagttcatcatcctctttaccaaagctgcagacttgcttttaaaaaacacatctgaggtttgattgtttagtaactacgtactactgaaacaacatatatatatatatatatatatttaaaggcttattagatcctatcaatcatcattactcattccttagtgtgtaatctcgtcgtcccgatggatattgaatttgcttcattaattgtttccatgactaagaagactgcgtggttgctcctctatctcgcaggccaatgttgtcaaaggccttaaactctaccaagatgtcttcactcgacctcaactctccaagcttctggattctattaatcagctccgagaggctggtcggaatcaccaactttcaggtgattttatcctttgaatttaattgcgtctttttttctttcataaaccttacacacgagagtaagtttctctcatctcaaatgcaggggagaccttcgatctgttcaacaagaacaccaagggaaccaaaagagagcttcttcagcttggagttcctattttcggcaacaccacggatgaacactctggtaatgacaacaaggcagggacttggtgcttccgctatttctagacatatacataccatctcctaatttataacccgtccttgcagtggaacctatcccaacccttgtccaaagtgttatcgaccatcttcttcaatggcgtctgattcctgaatacaaacgaccaaatggctgtgtgatcaacttcttcgatgaggtacttacttacacttccatttccagaatccagatcaccatctctcgatccttccttccagctaaggtttgggattgttttcaggacgaacactctcaaccatttcagaaacctcctcacgtggatcaacccatatccactcttgtcttgtctgaatcaaccatggtgtttgggcacagactcggggtcgataacgatggcaacttcagaggctcactcactctcccacttaaggaagggtaatggaaacactcccccgatgttgattgtatccgagttttctttctaatcagaaaatgaatctcgcaggtcgttgctggtgatgaggggtaacagtgcagatatggctaggcatgtaatgtgtccctcgcccaacaaaagagtcgcaatcaccttcttcaaactcaaaccggactccggtaaggtccagccgccgcccaccctatggagaccaggcaccccttctcctctggtgatgctagctccggcgcccaagaggctagacgctggcactggagttttcttgccgtggacaccgccagtgtcaagaaaaccagccaagcatctcccgccgcgtgtccagaggctgcgtctct

SEQ ID NO: 138628 - DNA, 1813 bp, Arabidopsis thaliana landsberg
gataaaccccttggagatgaccccatattgtctcaacatgactctcaaaggtagacagcatgaatctcatcgtacattctaaagcttattatgttttattcacccactctgtgccatacgtgtacgtatgaatggcaggagaaatcacgattatagaatagagttacaatcctaagaaactttatcgttagcaaatcggcttaagaaactttatctttagcaaatcggcttatgagcgtattcaccttaaacttagatggttgcttggaaatttttctgctactagcctttgaagtcatgcttacttctcctgcagctttatcttaatgctattgcaacaaatctacttttctctatctggtttgatgtgcctttgagcttcctcctagttaagcatgctgtttctgtgataggttttcgacatctccacctacgtcaggcacaaagtcatatacactttcaagaagttcagattctcaatttcctggacagccctcctctgtaaatagtttcaataatgcgcgtaagacaaacagttcacctgcaacaaaaaggacgagatctccacctgtatatccaattgaagaggatatcccgcgaaactctttcccttctcaagattgtacagaagggtacaatatttaatcacgcagtattgactctttgcattaatctgtggaccagttcttaaagttttctaaacggtgtggatttcttatagagaagagcaagccagggcaaagagactggcccgcttcaagggtgaactggagcctattgcagaccgacctgttgatattcaacttactaaatcacctgtaaataaaactatgaagcctctggacaacaaacaaacattcaattcgcttgaatcaagtagggatgccctgaagggagatgccttgcctgattatgaaaactcggagcagccctctcttatcattggagtatgccctgacatgtgtcctggtaagcatatgcctgagacatgcattaaattgacaactgagtgtaaatagtctttggttcatataatctgataaaaaaagaattgtgttgccaacgatatttattttgtccataaatgatggctagttctagttatagtaatctgatcgcagaacaaatataatgatggacttttttcttcattttcccagagtcagaacggggggagcgtgagaggaagggtgacttggaccattatgagcgtgtggatggagataggaaccagacaagcaaatcccttgctgtgaagaaagtaagctcacctttttaatatcatttaagcttcagattctttcttagatgaaatatactagaccactcatttgccatgatgactacttatatatctgcctttggatagtatactaggacggcggagcgagaagcaattttgatacgaccaatgccaatcctgcaaaatacaatggaatatttgctgagtttgctagaccgaccttacaatgaaaactttcttggcatgtacaatttcttatgggataggatgagagctatacgtatggatctaagaatgcaacatattttcaaccaagaagctattactttgctggagcaaatggtttgtgttttctgatcttatataaatctcattaaacaggatgataaacaatattcttttttaaatgcgtgtgttcttactattgattttcctgttacagattagacttcacatcattgcaatgcatgagctatgtgaatatactaaaggagagggcttttcggatgggtttgatgcacacctgaatattgagcagatgaacaagacatctgttgaggttgttcaaat

SEQ ID NO: 138629 - DNA, 2247 bp, Arabidopsis thaliana landsberg
  unsure (1)..(2247): unsure at all n locations
atggcgtctccaaatccctacaccaagcgccgctctccgccgaatgtcgttgtaccgccacagcctcggtctaaatccataggaggaggaggatttttctgtaagtctgttctattcgctctttttctcctcgccttgccgttgttcccttctcaagctcctgatttcgtcggtgagactgtgctcactaagttctgggaactgattcatctcctattcgtcggcattgctgttgcttatggtttgtttagccgtaggaatgttgaatccgctgttgatttaaggatgactcgtgtagatgagtcttctttgtcttatgtatctagaatcttccaggtttcttctgtttttgacgaagagtttgatgataattcttgtgagtttgttgatgtgaggagtgatgagagtgtgagtgctcgagcttctgtggttgggaaatctgagtcttttgttgttgaaagcggcgaattggaagaatcgtctgaatttggtgaaactaatgaagtccgagcttggaattcgcagtattttcagggtaagtctaaggttgtggttgctcgacctgcttatggtcttgatggtcacgttgtgcatcagccattaggcttgcctattaggaggttaaggtcatctttgagagataatgctgctcctcaagacaaatcttttgctgatagctgtgatggagctgttaatgcggaagctgagtcattattggctgataatttttttgatgaggtcttggctgctccggcttcacctgttccatggcaagctagacctgaaatgatgggaatcggagacaactatccttcaaatttccagcctatatctgtggatgaaacccttaaatcgatatcttctcggtctactggttcttcttcatctcaaactagttatgcatcccagaatcagaacagattctctccttctcgatctgtttccgcagagtcactaaactcaaatgtggaagagttggtcaaggagaagagtcgccagagttcatcacggtctagttcgccatccttgcccccatcaccttcactgtctccatctccaccatcgccagaattagtgcccaatgatactcnnnnnnnnnnnnnnnnnnnnnnnnnnnnnnnnnntcccaggcgtgcgtcacattctcggcattatagtgatggttccttgttagaggaagatgtaaggcgggggtttgaaaatgagttggaggggagtaaagtcagaggcagaaaagcagaattcttcagtaagaaggaacggggatctaaatcacttaatttggcagctgaaagttcccggagagggaacaagtctcgcagatcctatcctcctgagtctatctcatctcccgttggtggtgctgatgactccacaactagaagacaagatcttcagcaaaagagtaattgtcatttgcttgaagaaaatatcaggaaaggagtggaagctgaccataacaatctgagggtcaaaaagggaaggagtcacgactctttggagctaacagcagaagattctgcaaaagatgagaaggtcagtgaatcttttcctgctcttgatgtagtgttccaaccaacaaatgctaaagcttcaaggcgcgccatgcgttcttcacgagggggacgtgacactttgccggagaaggatgttgtcaccagaaaattagaggatgacactgtggattcggataagtccaggaaaaaggaccttcctggtataagctaggaaagttgacaccggaacattgtgctcattttgaaagtcatgttgtcatgtgcaggagctgcattatggaatggtgcaacgagaagcaagaatgccctctttgtcgaacgcccaatacccattcaagtttggtttgtttgtatcattctgatttttaggcacaatgggatcaacaaagacaggcactgcagaaaggcaaagcagctaagacagtgacacctaaggacagtgcatctgctacaggaatggaatctgcttcggcttcagactttttgagtaagatcaacaagttatgagagaagacagaataaatatatttctgacatcattctcgatcccatgcctacctttttctctatgatatttagtgcagaaaccacagaggtttgttgttttacatttcattaaaaagagttggagatgttaggtggtctttcacattctatattacatataataatctcaattggagatctattacaagacaagaaaatctcatattaggcacaataccatttt

SEQ ID NO: 138630 - DNA, 6449 bp, Arabidopsis thaliana landsberg
atgatagttcaaggactcgaagtagttgtagaaggcgggggagagaagaacggaatggatgggagactagtcggaagagagggaatggatgggagattagttggaagagaaggaatggatgggagattagtcggaagagaaggaattgtagttggaaatgaaggcaaagttggcattgccgtgggaatggtgggaagatttggttgtggcaaagctgatggcattggaaatggagacattgcagtgggcattgttggtaaagatggttgtggcaacgtcgatggcaatggaggtagtcccattgttgggataggcagatttgggatttgaggaagaggttgttgttggagaaggcggcgtgaggctgagcaagtgttgatcatcatagaggaagagaggcacactagaaaagcaatgcggaagagcttgtatgatgccattttgctttggttgtgaatctctaattatggttaagcctttctaattgcttctcttgtattgcttgctttgtgttgatgagaaattcaaagatatgcgattgagtttatatagcggcaagagtctctatggataacaaagaccttttattcaaatatcatatatggtttggttaggtgtactttatggttggcttgagctattgttagttcaacttaatgtgtgtttaatagattattttgacaattcaaggatttttattgaagttagttcaacactcaccactatctaactctaatacacatgttaagtctataaccaaacttttaaatgtcattttaagcttataaataccaattaccaccgtaagtatattataaaatctgatgtaacaacataaattttgtgtaaagctatgaaatatgaaataatctccaaaacaccaaataaaacaaacaaaaattatgatcattattttgtcacagctgtaccaaaaactccaaaatggaatttcccggtcaaaccggatacatggtttgccaaataaaaaaccggaaagacgaacaactaatggtttgacggatatgaccggtcgaaccggatagacaagcaattgaattttgaaaatctgtggtcattcccgaaaagtcaacctaactagacagaatcgaaattcaaaattccgtctctttggtacagaatacgctttggaccttctcgagcccgtcggaactgtaactcagtattattctggcgccgatgactctccggtcagttcaatcccgaagtaagcggaaaccgattgatgtatttgattactctgacgaggatgaccgtgttgaagaggagtcgaagaaactccttcgcaaattcgattccccagttactaaaaaacaccactgcgccatcgataagtatgaattccttcgatgctgtgagtgtttcttctctgaatttctcattgaattttgtttttggctgtgtcctgcaaaatatttgggaaggaagatcttatttctcattgaatttccccaagtttaacatggtaacacaagagaaggaatatgttattttttgtgttaatatctttctattgcagttgcgaaggatacccaaagcgagagtaaagtattgcaacacattgttattgatgttgaaggtaatagtaggaaaattatatcttggagaacagttctcaactacaaatgatgaaaattgtgtagaattccaaattttcagatgctagtgtgtgtggtagcatagaaatatccaattatggcttatgcagtcccagtcaaagaagaaccgtcaagatgtgaactcagcggagatggaaatgtgagcctttgtcatgcagtcatgatggagttattacaaggaatgagaatggctagaaattttctaatttttgttgtacaatatattgcagagtgacctgattgatgttatctccaatggctcccatagaaggattggaatcgattcattaacgtcatcatctctgtcggaaaatgatgaaggtttttagtattctctatctttagtttcagtaatcatttcctgtttgttatctcaaaattgcttgctctaaagaaactgctgaattcttttagtttcaactggagaagccacaaatcctgcttctgatccacatgaagttgtaagtcttttcgagtatatgctgttcttttaactagagatagttaaggatcacgaacaaaatgaaaagcataagctctacttcctctgaaaagttgttgatatgctgtttgtctcaaggcttatgcacttgggtttatatgcagacagtaactcatactctttttctttttctgcacatacaggatcccgagaatgcacaagttcttattatccctgatgttattatatatggagatatatactgtacaaactcgaagttaacattttcacgcaactgtatgaatgttgaaagttcttcagtaaatgcaactaaagggacctttagttgtcagtggacaatagaagatatcatcaaaattgagtctcagtggtgtttagaggtgagttctgtaagatcctcattttatgttgtatttttgaattgtatttttaatgatacttgagttgtattttttaggttgagactgcctttgttaacgtccttctgaagtccaggaagcctgaaggagttgatattgcgaaagatatttcaggtctaccataaagttcacttttgtttatgtttgtgtggcttaagtgcaaagggagttttcaagcgagggggttccttaaatcgttatctgaataagaagggcatacacatcataatccctctattgctagtttttgatgtttacaacgtcaagtctagtctaactaacatctgtactcatgctgacaggaattgatctcctaaaattttccgtgtatgaccctaaatggtctaaagaagtagaaaccatcagatcgttggactcgagatacaagaatatttggtttgacaccataacgtaagtcacttagaaatactattggcaccattgtgttggtatatacattgcagttctccccacttcctctccttccatcattattatgttggtggtatatgatataactggtcttttgctcaagtcttgaaatctatataaatttcttttgtttccacatcgttaatagaattgatgacatagtggacaaaatatatatgtgctatcatataaaaaattctcttgctttcaactgtttccttgttacctaaatagatttcttggatgctgaacgaatcaacatatgaaaagcttttttccttaacaaggatcacttatgttttaaatcctgtaaagggttttgggagaaagaagttacgaagataggaaaactatctggtgggttataacttctaacttttaatttgtcgttgttgaatgttgacagagagagcgaggaaattgcttttagtggacatgatttgggaacttcactcaccaagtgagtatgaactataattatcttcgaataatgcggtttataattatgttctttggtaaatgtaatctgacagtttggggatgtactcttcttttatgttattttatgaccttatcttacctcttgatatgtgctgtttgtattccgatcttcagcctcgctgattcatttgaagatctagtttaccctcaaggagagccagatgctgtagtagttaggaagcaagacattgagcttctgaagccaagacgtttcatcaacgatacaatcattgatttttatatcaagtaagttactatctttccatattaacttaacattagaaggaaataaaaacagtatctgtagagcagagaatgcctacaagccaaaagcaaggcttgtcatattatatttgctttcatttatatttaccgtttccatgcataacctagttcgaagcagcttgtaaagttgggtttgatacttgcaggtaccttaagaatcgaatttcaccgaaggaacggggcagattccactttttcaattgtttctttttccggaagctggctaacttagacaaaggtacacctagcacgtgtggaggaagggaagcataccaacgtgtgcagaagtggactaagaatgtggatctttttgaaaaagattatatatttattcctataaactgcaggtgaaaatatatttcacacagatgctattttttcttaccgctattaagatgacttattcttgcatttgattgcagttttcactggagtctggttatcatctgtcatcccggtgaattggttccttctcatggtaagattaactcgttctgttattttcttatgcttgttgacttagttttacaacttataagtaaattttcactcttttgatgatgaagtcgaaaacccacaaagggttccctgcatcttgcatctggactcaattaaagaaagccacaaaggtggtcttataaacatttttccgaggtatgctctaacacgtttcattaaagttcactgccattacattttacttgttcttgacatttgggtttcaggagaccattttaagtcgtgatacttttgaattagtctcgagagttattactagttacttcagtgttggatgcacattatgcatatgaggttggatctatttttttgtttgtttgagatcaaagctggcttaggagtgtttgggtttccagttgatgattgattctttctataggaactctttgttaattttctaccggaactctttgttaattttctacccatttacatctttttattatttcgtttttccacttttccttagcatgcttagtcaaatatatggattttatcataactatttaaatgtccatcatgtggtcatagttacctacgtgaagagtggaaagcgaggcatgaaaacacaacaaatgattcctcaagagctccaaatatgcagtccatctcacttgaggtattgcttcctaacaaggatgaaatgatcttgatttttgaggtcagatagaaggcacatatcaaatcagttttggtcggtaggctattttcgaaaagcatgttactattctagtggagtcaactgatattaccattgtggattttgtgaatttctttagtgccttttctgatgctattgcctcatttcacaaattcagctcccgcagcaagagaattcttttgactgtggcctctttttgctccactatttggatctttttgtggctcaagctcctgctaaattcaatccatccctcatctcaagatcggcaaattttgtaagtagtcttgtttccatctcttgaatatgatgaagttgcatctgacatactgaatttactatgccatagtaagcagatcgttgttagtttactattttcttaaaattaaatgtgactattgaaacatgcatttgagaatactattttatctgtttcacaaatgatatttaagaaaattgaaacaaatttttataatcttatttacaacttaagttttcttatgatatgaaagcactccaccgagaaacagtgatttgaatgagatggtttaatttattttctgcttcttttcagctaactaggaattggtttcctgcaaaggaagcttcacttaagcgtagaaacatcttagaattgctttacaacccccacccaggtcatgatccaagtattcttccagctaattccaaaagtgaaccaccctcattgtggagtttccaacaggaatgatcaagaaactgaaagtgagaatgtgattgagtgctgtaactggataaaaccatttgatggttcctcatcaaccgttacagacatttcccaaacgaagacttgctcgccggatctgattcttagcaaagaagtttcttacagcggaggttatgaccctccgtcttctaagctccgaaaggtcttcatgtcacctattgtggtaaaatttcattttctatatcttcagtttagattctactgctaagtatcttatgttgataatgtttctatacaatttctcaaaccaggaagaagtgcaagaaagttgtgagaaaaaggaccatttggaaatggacatacagaaatccactggtcatgagatagaaacattgcgaaaagagggatgcatgctttatattgaggacagtgatgatgaagaagctgtttcagtagaatacgtctctgattctcaagattcatatgaagttgagatgaaagtagaagatgatgatgacgatgagcttatagttactggagaatcttcagggattcatggaagcagagaaatcaagtctgattcagcatcgatcgaaagagtgaacaaaagtagagattcaactgctgcctcttgttataatgactttcttcttgtgttatctgatgatgagaggagctcagacgacaaagaaaacatcttaataagttcaaatgtgatggccaagccaaaaacttgatactttaatgaagatgaatatcgccaatctaatgcgattattatttttatggttttctaatctctttgcccataatgaatatcatgtca

SEQ ID NO: 138631 - DNA, 5751 bp, Arabidopsis thaliana landsberg
cagcacgttgagttgcataatccaaatccaccgcttcatacagtgggttatatacacacaaagatgtctcctatggaggtagcaaggaatgcaagtgaagatgctcggtcaatttgtttccgagagtacggttctgcaccggaaataaacatatatggcgatcccagtttcacctttccgtgagtttcaagttgactgcattttttatttcttagattcagtttgtagcttttgttctcatgtggttaccaatatctttttcttctactcctgtaggtatgttccaacgcatttgcatcttatgatgtatgagctagtcaagaactctctacgtgctgtccaagagcgatttgttgactctgatagagttgcaccaccaatccgcattatagttgctgatggaatcgaagatgttactataaaggttggttaccctgcactttttttctcctttttgctagccatttcgttctttgttgcatcggtttgatccaatcattgttgtgagttaatataacaggtctcagatgaaggtggaggtatagcaagaagcggtcttcccagaatattcacctatctttacagcactgcaagaaacccgcttgaggaggatgtcgatttaggaatagctgatgttcccgtgactatggctggatatggttatggtcttccaattagtcgcttgtatgctcgatatttcggtggagatttgcagatcatatccatggaaggatatggtgagtcaactacttcttcttccgtttcatattttcagatcaatagacataaaagtctcttaacctgaaatatctcaatcagcattcataagacagattcagttttgattaatgtgtattgttgaaatgtgcagggactgatgcatacttgcacttgtctcgccttggagattcgcaagagcctttaccctgagaacatctctatgtcaggcaaagtaaagaaagctttgacatgtatttatggtagatgagggatatctacaatactgaattatttatgcttgtccagcttcttctaatgtacagactacagacattattttctcgtattacgctttcttgattttagactcagatatggagctttttccaagtgagttaatctcctatgatttgttttgattcgatccaaaaccaccttgtatccgaaagtcagcaaaacattattggtttatattcgataaaacagctacaagaaggtcctggatttggatcggttactttaaatattcttcactggttcaattttttccaagatttctgaagaacaaataagagatcaacacgacggcgtttgtgacgttgacgattttataacagccaaacgtcatcgtttctggatttatacataacgacgtcgcgtggtttctcttttttttttttttttttttttgggcagagtttcctccttgtctttcgtgaacccccagcctcacttcttcttccaaaagccgaacccagactctgttctctagttcccatcgacgttcttgatcctctctggttcgcacccgtgtttttaatcaattctggttcgcataggtgactccggtactgtttcttcgtcgatgtaagtcttttctttgtctcttgtagctcaaaccctaaatcgttgcatccttttgtgttatgatgctcaactatgacttctgcaaaaccatcttcggatttcttcaccttaaatccatggctcagttcccttattcgtttgatttctgtatagttactctaatttgtgattgagattgtatttgttggatttctcggcatggttgtgttatggtctcgtggaactgtacgcgtgagcttagcttgattatatcgttgatgaatcatgtggcattaattctttgatattgcgaaagcttaggtcgaattatgtagaatcaggtctctggaagatgatacctgtatgtcaaagtttttgtatggtaacatgagagagttttctcttcttgcagagccttttcctatggccacaacagaagatactccagcttctgctggtccaagatatgctccagaggacccaactcttccccaaccatggaagggacttattgatggaagcacaggaattctctattactggaatcctgaaaccaatgtcactcagtatgaaagaccttctgcgcctcctccccactctgccacaacaccgaagctagctcagattcctgtaccctcttcaggacaaggtcaccaagctcagcatgaacaagcaaaaccagttggtcatgtgtctcagcagcatggtttccaacaacagccacagcaatttccatcccaacatgtaagaccccaaatgatgcagcagcatccggcccagcaaatgcctcaacaatcaggtcaacagtttccccaacaacagagccaatcgatggtgccgcacccacatgggcatccttctgtacagacttatcagccaacgacgcagcagcagcagcaagggatgcagaatcagcattcacaaatgcctcagcagctgagccatcagtatgctcattcacaacaacattacatgggttttcggcctcacatgcaaacgcaaggacttcaaaattcacatcagacacctcagggtggtccccatggtcagcagtttccgagccagcaagagtacaactcattggctccgaagagggagggggatgagttccatgggggtaagaaaactgggttttctcaaccccatttaccaaattctgaacgttcaccatctcaaaatacccactttgaagccaatgcagcatcacaaaagacgaatgcaaacttggctatggctcagaaatgcaatggacctcaagcaaatgctgcagtcacacagtttcaacagccaggggcgaacctaattcaccagcaacttggacctagggcgccaaatcaaatggaccagacaatgttgcaccagaagtctcacgtttcccctttccaatcaaataatacttatgagaataatctacaatctaggcctggtaatgactcgtacgttaacatgagaatggaagtgccggttaggggtgcccaaccacttcatcctgcagcaatgcctaaggttagctgcagatgatctcttctcctatctgtcttgttaaatatttctgcctcactgttatttcttacgaaaaataagtatttaataaaatgctatgcaggatataaggataagtggtggtccaccaacaaatgctgatcccgccatggggcaaacagggcatggaacatatggacacgctggtccagcttttccaaataaatccttggtgcggcctcattttgtcacatctcctgatgttccccatctctctcccgttgaaatataccgaaaacaacatgaagtcacaacaactgtaagttcatatttcttgaattcctttgcttaacttgtcagtttaatgttttaaagctataatgtgctgtaatattttgcaattgttgtttcagtgaatgtttgtccataaaactctactgagaatgtgggattggacgaacttcaactggaataagtaatagcattttagaatagtgttaaaccttgcactttctcatgtattctaatctgtttacggcctttaataattaatcgtttgttgcgcagggcgagaacattccagcaccatacatcacatttgaatctagtggtctcccacctgaaatccttagagaggtcagttttataatgaactttatcagtggcgtaggttcttcacatatatggtgtgctaatgtttttgtctttgtttttcagttgctttctgctggatttccatcgccaacaccgatccaggcccaaacatggccaattgctctgcaaagcagggatatagttgcaattgcaaaaactggttctggtaaaacattgggatacttgatccctgccttcattcttctaaggcactgtcgtaacgactcccgcaatggccccacagttttgatcctagctcctactcgggagctagccacacaaatacaagacgaagcactaaggtttggacggtcgtccaggatatcatgcactgtaagtttaatttgagtctcgttgacagttatcgctaggctgatagagccatactgtgtttttgtttacgaatctatgttctggtcatcagtgtttgtatggtggagctccaaagggtcctcaattgaaagagttggaacgaggagctgatattgtggtggcactcctgggcgtctaaatgatatactggagatgaagatgattgatttccagcaggtttcccttcttgtgcttgacgaggcagaccgaatgcttgacatgggttttgaaccccaaatccgtaagattgtgaatgaaatacctcctcggagacagactcttatgtacacagccacttggccaaaagaagtaagaaaaattgcaagcgatcttcttgtgaaccctgtccaagttaacataggcagggtagatgagttggctgctaacaaagcaataacgcaggtgatgatcatctaaaccattttatatcactgtaaagcaatacttacacataacttggtgatgaggttactgaagcaaacccatccttataacgcagtatgttgaagtagtcccacaaatggagaaagagagacgtttggagcaaatccttaggtcacaagaacgaggttcaaaagttataatattttgctccacgaagaggctttgtgaccatcttgcacgtagtgtcggacgtcattttggcgctgttgtgatccatggagacaagactcaaggtgagagagattgggtgcttaaccagttccgaagcgggaagtcttgtgtactgatagctactgacgttgctgcccggggactcgacataaaagacatacggtttgttgtaataattcctggtatatatctctttgcttgtttgttatcaagattacttacctttgttcgtgtttatactacttctcgagttctgatccaactaggatttcacaactggagttgaagactatgtccaccgtattgggagaaccggtcgagctggtgcaactggagttgcattcactttctttacagagcaagattggaaatacgcacctgatttgatcaaagtcctggaaggagcgaaccagcaagtaccgcctcaagtaagagatattgcaatgcgtggtggtggtggtggtggtcccggttatagccaggatcgaagaggtatggttaaccggtttgactctggcggtggtggtacccgttgggattctggtggtgggtttggtgggcgtggtggtgggtttagtggccgtgagggtgggttttggaggccgtgagggtggatttgggggccgtgagggtggatttggaggccgtgggggaagatttggaatgagagatgactcatttggacgtggcgggaatcgtggtcggggttttactggtcctgatgctggtcatatgaatgtgggtggtagaggcggatttggtcggtttggcaataataatagtatggagacccgaggctttggtcgtggtagtggtagaggctttggtcgtggtgttggacggtttgacaacagaagaggtagaagtcgcagcagaagtcctgatttggttcggccacggcgccgtagctcgagctatagccggagtcgaagccggagcgggagctatagtcgtagccgtagccgtagcaggagctggtcacgttcaaggagtcgcagccctagacatagccgtgaccgaggtggtcataacaggagcagaagctatagccgtagtcctagt

SEQ ID NO: 138632 - DNA, 2886 bp, Arabidopsis thaliana landsberg
cactctctcaaaaatcaccaaaccaaactcttcactctctccaacaatggccaagaagatgagttctctcatcatcatcttcaacattctccttctcctcacaactcaaacccacgcgcacaacgtcacgcgcctcctagcaaaccacccatcattctcctccttcagccatttcctaacacaaacacacctcgccgacgaaatcaaccggagaagaaccataaccgtttgcgccgtcgataacgccgccatgtcagcattaacctcaaaaggctacacaatctcaactctcaaaaacattctctccctccacgtccttttagattacttcggaaccaaaaaactccaccagatccgtgacggctctgctctcgccgctactctgtttcaagccaccggagctgctcctggaacctcaggattcgttaacataacggatctgagaggtggtaaagttgggtttggtcctgacggtggagatctgtcttctttctttgttaaatctattgaagaagttccgtataacatctccattattcagatcagtagagttttaccgtcggagactgcggcggctccgactcctgctccgtcggagatgaatcttaccggaataatgtcggctcatggatgcaaagtgtttgctgagactcttctcactaaccctggagcttcaaaaacctatcaggtactttactaaacccctgattagtaattaattacgataattagtaatcttctgtttaattaatcaataattatatgcatgtcgctgtgtactaattaataaatgtaattggtacacttatcactactaaccctgattttagtaaaagtattagttttctgttttccatttataacataaataatcaataagtagatgcatgtgtctgtataaatttagaaattattaaaaaaagaaatcagatatttactacttacataattaacactgattagtagctctatctaaaatgattatccttttaatttccgttgttaaatgagaagttacttattcagaaaagatgcatgtgattgtactgttgtattgtagccaatagctattgccacattggttttgaaacaaaaagaaaaaggtcaaaaggtgttgactgtttcgtaagcaatgagcaaatatagtcaaacatatagacttaattacctcaattatcggaacataattagttagttttccaattcaaatttatgaaaccaaattctattaactaaatttttaaaaatggttcatctttttcaaatatgaaaagtaacaataatttgtctccactaactcacactagccattataattgagtagctacaaaagtttcaacttcactatcttaatcaagtcaacttcaagatagaccaaattgatcttgagagattaaaaccgggttttggattgtgtttatgttgtaacaggagagtttaaaaggaggcatgacagtgttctgtccaggagatgatgcaatgaaaggtttcttgcccaaatacaagaacttgacagctccaaagaaagaagcatttctcgatttcctcgctgtcccgacatattactcaatggcgatgctcaaatccaacaatggtccgatgaacacacttgcgacagatggagctaacaagtttgagcttactgtacagaacgatggagagaaggttaccctcaagacaaggatcaacactgtcaagatcgttgatactcttattgatgagcagcctttagctatatatgcgactgataaggttttgttgcctaaagagttgtttaaggcttcggctgttgaagctccggctcctgctccggcaccagaggatggtgatgttgcggattctccaaaagcggctaaagggaaagcgaaaggaaagaagaagaaggctgcaccgtcgccagataatgatccttttggtgactcggattcgcctgccgaagggcctgacggagaggccgatgatgcgacggcagatgatgctggtgcggttaggatcatcggaggagctaaggctggtttggtggtgagcttgctctgcttgtttgcttcttcttggcttctatagtttcacttcttgtttcttctattcttccatgttttttttttttgtgaatcttttatttatggtttttgggggaaagtaaatgaggattatttgtttccctctattgttgagttttttttatttatttaaaagttggttgtcgaattaaatagtcggtagtttatatatttgtgtgttcttgtttcacgtgtttgtttagttgatgatgtaaacaagtcctgattttggtgatcttgtcatatttttcttgtttttgtatttgtctaactgattttcacataatgagtccaaaaactaattcagatcatcacaaatcagaaatttgaaaggtaacgaaatttacattgaatcaaaggaaaaaaaagcctttaatgtgttatatacaaaatacaaataaaaaaagtagctagctacgaaattaggtcttgagccacgttactagccacttgatgattggtctcttgagtacgctatttatacatattgggatgagctcaatcccaatatgattgggaaagttagaataaaagaaactaacaatatacgaataattcctaatcttatgttaacactcactaaaaaaaatgggagtatatataaaattattaatggtgagtgtcaatcttagttttatccgatggaaaaaggttgttaagtaattttaatgtatttataaatataaaaaaactgacgaaacttagtgactcgtaaaagaaattttttggtaaagaaattgacaatgaacaattgttgtttgggtctatgatcatcatcacattcagtacaaatcctatttacgataacaataaccacaacaagtag

SEQ ID NO: 138633 - DNA, 960 bp, Arabidopsis thaliana landsberg
acctatgtcagctgcacggctgcttgtatctaaatccattggagcttcatggtctgatactgctgttcaagctacctgcactcacttgaggcaggtattgattatctcatattcactgattttcttgggttttacacttgaacctagttgtataaagacttgaagatggccattacatcttcttttcttgatactttaagttcttattccctactaactattcagacgacttaacttcatctgatgcttgcagtatcacaccatgcgcaatgttctcttcatggcaaagtcagagtttagagaggtactcttctttcaacaatgtgttgtatagagtttagagtctcattttgaattcaaagtatgcaaagtgtttacttgaaagctctacaacatgaccaagcttgccctatagttgatctccaactaaagcattctaggtgacgatccactgtttcatttttggcatataagcttgcagcagagccagattgggatttcatgagagaaaaccagagcaagcttgcatttttatttggcattgatgatcattggggtccactgcaactctttgaagaggttacttggtttcccttcttctcgcttaatcaaaatgcattatcctaacgatagaaggaaggtctctcatagaatctctccattgtccagatttcaaagcaagctccgcatacttccttatctatcgagagggaaggtcacacgcacggattctgctgcacggtggctggctcggcatgggttgcgcagcacgtagccactctaatcaagaaccggttttcacagctccagtaaagtacattcccctgtctcttccttccaacaaaataagtgtcaaccatcaaaatgtttgttttaaacagattagtttaatagtaattgtcagagagatggtttatgtaaaaaatgtttggttatctaattacaaagaaattttaggag

SEQ ID NO: 138634 - DNA, 2095 bp, Arabidopsis thaliana landsberg
atgccgtttgtcaaagtctcaagtcagcttcaaacgacgacgttttcctgtaactttaccatcatcgtcgttgttctttcccgaagcggatctcttcgtctgtgtgatcggaggatctgcaagagttccttacccatacaaactcagagagagactgagagatattcgttacgcaatttattatggcttctgtaagcaaatcgaatcatctcgaagaagatgatgatgctgaagaagaggtatgccagttactacatcctaaaacttttttgttcttcttctgctgttcgtttttgtattcaatgatcagcaattgttttgcaggtgcaacatttcgatgatttcactctagcttcttcctgggaaaggtattcatcttcacgatttcaattgctttgattcaatcactaatgtcattactaatcccgtcgcttttttaggttcatctcagacattgaagcaacttgtcgtcaatggttagctgatggtcccaaaaacctggtggtacgtttgcttttccaaatgatctcatccatcttcgatcgagttctataagtgagaactcgttagaatcccatgaatgctcgagttttcttcttcccggacgttatagctggttgtactattttggatattattgatgatcaaagatggagttagtcttgttttgtgaaatccactttagtttcgttatctgcttgacctcttaggctacctgcatttggtgagtgcaggaaaagggtgctgttgcagtggaggattcaaagaatctgtttacggtcaaacacgaacttaagaatgttgcaaagagctattgtatggagttctactttcaaattgataataatggtagccaacaaggtatatgatttcaaaataatgctgtttatctgggagaaactgtattttctgtttcataattcagtatctgactgatgcagctggaattggtaattggaacagtaattcacatgatctccagctttgctttggggtgaaggattttctggtacactttaaatccacttttttttctttcttgaaatagttcctgcccgtttacatatatgatattttattgatttttatggcatcttctagttgattgctccacaaagtgccagtggggtgcttcttgatacaccagagtctagcaagcttctgagtgcggtagctattgctttgtctaactgtggcaggtacgatatcctagccagtaacatcactttagcttttgcatcgtcaagtgaatctcttacgatacactgtttctttgagttgatccaaattgcctaccaattactccgaagtcttggaaatcagagttgatagaaatgtgttatccctgtctttgctaagtagataatgattagacgcatatttggttgagtgattattaagaatttttatactactttggtatctagcttgtggccagcctttgtccctgtgcatgacccttcacgcaaagcatatattggaatccagaatatgggcactgtttttactagaagatttgaagcagatcgtgttggcagccaagttcccgtgaaactcatgcacctggaagggctatatgagttgtttgtttctaagtttgtaagtcttcgtggctcttaattagtgatgtccattagtatggctattgcttatcaaaatggacctgaaacttaagcattagccatcaattctatcacgtaattaaattgtttagctagatattgtattcatcgatgacattttattatttgaaggtttattcaggagtggacttctcgatgcatactttcagagtccattttatgatgaggctaacataccaaaccttcccatatgacgaggaggatgaggaaattgatacggatgaggttatgggtgacaaatcagacactgcagaacactatggttctgagtcacgcaataaggtgctctgggatgatgactgtccttggagtgagtggtactctgctgaagatccactaagaggtacatccatgcatcatatgaataaaattcgtatctttttggactacagtctacacaatacattactttgaggatttgttttttactctcagtctttcggaatagttga

SEQ ID NO: 138635 - DNA, 1645 bp, Arabidopsis thaliana landsberg
gtcctttcatcaattcaatggcagacccaaggttcatgcttctctctctctgtctaacctcggcttgaaatctttttcagattttgattgttcctttttctttttcctgtttgtctccagagttgcagttgttactggttccaacaaagggattgggtttgagatttgcaggcaactagcttacaatgggataactgtggttttaactgcgagagatgaaaacaagggtcttgctgctgtccaaaagctcaagactgagaatggtttttctgatcaagccatctcctttcaccctcttgatgtctccaacccagacaccatcgcttctcttgctgcttttgtcaagacccgcttcggcaaactcgatattctggcaagtttctcttttcttttcctattatcatcaatctagatctactaatcgtggctttaatcagtttcactgtcggatcttattaggtagctgcacttccctttccatgatcacatttcttaactaagatctgatcctttttagggattgagatacttcttcaacaacttcttgtctgttgcgactaggatacatacatgttaactagaaaggatataactcttaagcgagcattatctgaaaatagcaattctgttctgtctactcttttctgatttcttgtttggtatatatgtcttcaggttaataatgccggagttggaggggcgaatgttaatgttgatgttctcaaagctcagattgctgaggtacactttcctactttctcttacctttttgaaatatatactgcacaagcttgagaggtggtcttacatataaatgactactagtgcaggctggtgcgccaactgatatttccaagataatgagtgatacatatgagatagtcgaggagtgtgttaaaacaaactactacggcgttaagcgaatgtgcgaggccatgattcctctccttcaatcttctgattccccaagaatcgtcagcatcgcttccaccatgggaaagttagaggtaccatcttgatttcttctagtcaataaacttaaaggaagggatcgtttatgaaattgactctttggctggttaattctcgtattttggtgttgggtaaaggatgaatcttgtttgtgtgcagaatgtttcaaatgaatgggcaaaaggagtgctgagtgatgctgagaacctaacagaagagaaaatagatgaagtgatcaatgagtacctcaaggattacaaagaaggtgcattacaagtcaaaggttggccaacagtgatgtctggatacatactatcgaaagctgcagtgatcgcattgacacgagtattggctaagcgacacaaatcgttcatcatcaacagtgtttgtcctggtttcgtaaacacagaaatcaatttcaacactgggatcttgagcgttgaagaaggtgcagcgagtccagtgaaactggctttggtccctaatggagacccatctggtcttttctttgatcgcgccaatgtctccaacttttgattcttcaatcttatgtgttcggttgggtgttggtttgtatattttattatctcatcaatttagcagaaaataaagtgaaccccaaactatatatcaaccaaacttggttatattataaagcttcttcaatatttat

SEQ ID NO: 138636 - DNA, 2616 bp, Arabidopsis thaliana landsberg
tccatagcttccgacgagagagaagaagcaaatattcgatcgctctgggtttttgatcttttagggtttctggcaaatttggatggaaacctcaactttatccaaagatagtcataaaggaagaagctttcgttgttgtttccattgttccagctccttcaaaaactcttgtctctattgctttcacagctaagaattctcgattccatcgttgtcgttttcgattttgacgaaattgggttcttctagattttggttatggaccgtatagctcaatcagatctctctttaggattcggtagctcccacgctttacctctacctcatcctcctagaatcccaatcgctgatgactcaatcacgcttcagattgattccagcttccgtccttcgtctaatcctatgcctcctgttcctcttcagttacttgagcagagattcgatgtcaccggatcctgtagccgagttgttgaggaggacgatgacgttgttggtgataatgatgatgatgatcaaagagaagaggagcaatttattctcttgggtcatcctatgaagttgaaacgaggtagaggtgggaattcgtattcattggcatcatcaagtccttgtaagagatttgtagttgattcagggattgaaagtaggcgagctgttgttagagcttggggtaatcagtcgattgaagaagctgatcctgagattcatgagtttatggaaaaggaaaagcagagacaatttagaggtattgagcttatagcttctgagaatttcgtgtgtagagctgtgatggaagctttaggaagtcatttgactaataagtactctgaaggaatgcctggagctagatactatacggggaatcagtatattgatcagattgagattctttgccaagagcgtgcgcttgcagcttttggactaaatcatgagaaatggggagttaatgtgcagccttattcgtgcacttctgccaatttcgctgttttcactggtcttttgatgcccggtgaacgaattatgggattggattctccctcaggtggtcatatgagtcatgggtattatacaccaggtgggaagaaagtctctggtgcgtctatattctttgagagctttccatataaggttgaccctcgtacagggtatattgattacgataagcttgaggaaaaggcgcttgactatcgtcctaagatacttatttgtggtgggagttcatatccgagggaatgggaattccctaggtttaggcatattgcagataagtgtggagctgttttgatgtgtgatatggctcatattagtggtcttgttgcaactaaggttcgaatcttctactactatacttttattgatatgttgattagttctgagatttttaatggtttaggttgcatgtctagttattgaatgtcagaggtagcagtattagatagtttcaatttggttaggccatgtattgatataatgtgtttgtgttatgattgttctatgttctattgaaaccttagattgtttgattactttctatgcaaagccttcttctgtggtgactttgaaataatatgatgaatgagtttttggtgtgtcagtcaatattgtttgaaactattcgtatatgtagacttttgttatgattctgttccaggaaatattgtttctgaatttggtttggtatttttgttatctacaggaatgttcaaatccatttgatcactgtgacatagtaacctccactactcacaaaggtctacgtggtcctagaggaggtatcatcttctacaggagaggcccaaagataagaaagcagggccatcactctagccattgtgacacttccacgcattacgatctagaggaaaagatcaactttgctgtttttccatctctacaaggaggtccacacaacaaccatatcgctgctcttgccattgcattgaaacaagtggccactccagagtacaaagcttacatacaacagatgaagaaaaacgcccaagctttagcagcagctcttcttagaagaaaatgcagactggttactggtggtacagacaaccatttgttgctgtgggatctcactcctatgggcttaacaggtactgaaatcactcaacctaaacataactactcgtcgatcgaaatttaaaattttgtctgattttgtttgtatctgttttccagggaaagtctacgagaaagtgtgtgagatgtgccatatcactttaaacaagacggctatattcggggacaatggtacaatatctcctggaggtgtaagaataggtaagcacagatagattggtttgcatattgtttttgagttagcgacatgtcacattcgtattcacatcgatccttttatcaatagggacacccgcaatgacaacccgaggctgtatagagtctgatttccagacaatggcggattttctgataaaggcggctcaaataacaagtgcgttgcagagagagcatggaaagtcacacacggagtttgtgaaaagtttatgcaccaacaaagacatagctgagcttagaaaccgagtcgaagcatttgctttgcagtatgagatgcctgcttctcttattcgaattgaatgaaagaaaact

SEQ ID NO: 138637 - DNA, 848 bp, Arabidopsis thaliana landsberg
cttctttattgcttatagcttctgagcatcaatggatccaaatcataataatcttctcatctttgtagccttttttgttctctgcttagccaccaatggtgtaaccggatatgccacggtcacaggctcggtgttttgtgaccaatgcaaggatggagagagatctttgtttgattttcctgtctctggtaataataattccaacatttttacattgctgtctatgcttgtgttccttaagatgtgtttgttgatttgttgcaggaatcaagattagtgtcacatgtgctgatgaaaatggacaggtctatatgtcaagagaagagactactaattggcttggaggatatgtaatgagatttgatgggacaccggatctaagtaactgttatgctcaagtttcagacaatggagttcaacaagacccaagtagctgcagcattgcttcaggtcctgcacagaaacttaaactaatgttcagcttttttgggattgaaacgtttgctgcggatgcccttcttgctcaaccagttcagccaagttctttttgtcctaaaccacccacagctccggtcatgcctcctcctcaagttccggtaatgcctcctcctcaggtcccggttaagcctcatcctaaggtcccggttataagtcctgatcctccagctacattgcctcctcctaaggtcccggttataagtcctgatcctccaactacattgcctcctcctctggtcccggtcataaatcttcctccagttacatcacctcctcagtttaagcttccaccattgcctcaaatccctccaatgccatttgtagagccatcagcttgttctcaccagtga

SEQ ID NO: 138638 - DNA, 536 bp, Arabidopsis thaliana landsberg
aacagtttcttctgggacgcctttcgcttcatttgtagcttctttggatcagaagaagagtaagaagaaggaatctgattctcaagcaacatattttattactgttggtgaacgtggtgttgtgcgcatctggaagtctgaagggtgagcctttaataggttttgttacgttgataatgtttggtgtaaagtcatataaactatcctggcgtaagaaaaatgtattgaaatctttggctgtttactttgacagttcaatttgcctctatgagcaaaagtcgtcggatattactgtcagctcggatgatgaggaatctaaaagaggattcactgcagctgctatgctgccttctgatcacggactgctttgtgtgactgctgatcagcagttctttttctactccgttgtggaaaatgtggaagaaacagagttagtgctaagcaagaggctggttggatataatgaagaaatagctgatatgaagttcctaggtgatgaagaacagtttctcgcagtagctacaaatctcgaggag

SEQ ID NO: 138639 - DNA, 499 bp, Arabidopsis thaliana landsberg
cttatcggagagatttattccggtgagaaaatgttactccttcgtcgttattccggcggaagtctttactcgatcctccctatcagagcctctattgaatctactattcgtcatttcaacagcctcgagcctttgcaaagctctgattcgactccaactaaaggcgattacttcgccgcgatcaaccacgttgtcaatatcgtccgccgcgagattcacccggagagatcattgaacagtctccgtctacctgtaacctccgaattcgtgttcagagtcctccgcgcaacttctcgttcctccaacgattctctccgattcttcaattgggctcgatcgaaccctagctacacaccaacctccatggaatatgaagagcttgctaagtccttagcttcacataaaaaatacgaatcgatgtggaagatcctcaaacagatgaaggatttgtctctcgacatctccggtgagacactctgcttcatcattaagcaatacg

SEQ ID NO: 138640 - DNA, 1214 bp, Arabidopsis thaliana landsberg
tcaactccctaagtctcatctcaccatctctctcttcttcttttttttggtgacccagaagagattcacttctatctccaacaatttcgtattctctcataatattcaattttaaatcgaataaaactcgcgtcaatttcccctctttctttctgggtatatattcttttctgcttttctttttttgtttcttgggttcgagctacatagagagaggtatgatgaatccgagtcacggaagaggactcggatcggctggtgggtccagctccggtagaaatcaaggaggtggtggtgagaccgtcgtcgagatgtttccttctggtcttcgagttcttgtcgttgacgatgacccaacttgtctcatgatcttagagaggatgcttaggacttgtctttacgaaggttcgtatccaaaaaccaagatcttctcttttcatttttttttatttttttttgttcgtttaatctcacgagagagagagagagagagagagagagagaaagagagttcatggtctcttgctccaatgatgggtttatttgtggtccattctcgaaaattatgttattttgaggaataattatggttttcatatcggtggttgactaactttgctccccctttaatagaaaccatttcggttactttttaagattcacactattaatctcgagcttcttcatttagatcacaccattttgatctactgatagattcacatgtagatccattgtatataataagttaggggaggtttcaaatggattcaaatcttgagtctttgatctttgacttgagttttggttaaatgtcaattcatgaggtccttgttgtcagaattcaaatctctgttttttcttttatctttgaagatatgaaacattttggttgttatgacatgcagtaacgaaatgcaacagagcagagatggcattgtctctgctccggaagaacaaacatggattcgatatagtaatcagtgatgttcatatgcctgacatggacggtttcaagcttcttgagcatgttggtctagagatggacttacctgttatcagtaacgttctttttactccctcaaatctcatctaagtttgaatctttttttatagattattgatcttgtattcgtttaactagtgatgtctgcggatgattcaaagagtgtggttctagaagggagtaacgcacggtgcggttgattacctta

SEQ ID NO: 138641 - DNA, 1726 bp, Arabidopsis thaliana landsberg
attgatggctatcatcattgtttattgtgttttttccctccaagagatagcatacaatgaggtaagagtgttacaattcacttgcatacaatcatatgggggtatctttaactgtagcttttcgattgattcttcgatagaggatttgatattttgggtgcccttttctgtaactttgcaagatattctcactctgggctgttagtgaccgaagctatggaggattgagcttctcatctcaagatgttggtgaagttttagctatatcaggtggctgttctatttaccttacattgtttggtggatcggtccagaaaactatgtctacttatttgcaatttctctgtgaaggagctcattgcttaaccagtcgttgtaaaatctatctatttaaactctttaggcttcacatctttgtggttcatactgatttggttattgttttgtatacagtcgttgttttcaactctgtttctttagtttcttgatgtattgtctatccatctcccccttggatgtttatcatgatttgagttacaattctttcaggacttgggcttctggtgtttcaacttttggtataccccccgttaaagaaatcagtgggactccttgcggttatacgtctttctgcggtaaatcttctttttttgaatgatgttatgtgctttgacatagtaggaatggtgtaacaccccggtttcagaaatatggtagtgcatgcggagaagtttaaaagaattgatttgaccacctatgtcaccaaagtgcatttattttttcggagtaggaatgggttgtccaataatcccatcctgttcatttctttacattttgttgtgcaggtattgctgataccgctgctttcgtgttacccctatatagctttgctttctgggatgactctccatttggtgataaattgtgcatccatcataaaaaacgctttgtctgtgagttcttgttataaccctgatgcttttgatacaacatatcccctcatctaacaataagcaagattctaaatatgtttccgtgtaatgtgcagatctctcttgtcacaggactgtttatcatgttgaacaaagccgtggtatggttctttggctagtgtatctctatcttttacatcggtaacttcctctgccatggctcatactctcacttttctttaatataacattgtagcctcagaatcagagaggtgctgctaatggcatttctatgaccgcgatgtctgttttcaaatcatttggccctgccggtggaggggtcttgtaagtattgtcaaatgcactcacattcttgcaaaaactattagcaagtacaagatgtagacaagcttcacattgctaattcaccttttatccatgttttgttacctctacagattctcatgggcgcaaaagagacaagacgctactttccttccaggtcaaatttttgcacactgtacatgttaaactaattttttagccgtggtttaaaaactgcgaatcatcatcaaggattttatgtgaaagacagtgttttaattacgttttgaaaagtacacacaggtgatgagatggtgttcttggtgttgaatttggtacagctcgtaggattgatactaacgttcataccttacatttcccaaatccagtaaaaggtaaaatccattactctttctccttatagtgaggaatcaatgggaaactatgattctctatgattccagtaaaag

SEQ ID NO: 138642 - DNA, 552 bp, Arabidopsis thaliana landsberg
agattccagaatatcacgtacttacttggtggtatcagaaatctacgatttttctggtgagggttttgaggtgtggagctagggcttttgctgctagatagttgatttttcaattttccgcagcagaaatgggaaatgcgtcggagaatttcgatattgaagatctcatgtcttatggagacgatttgatcaacttattgaatgttaagaatggttttgatattatatctcaaagttctgagcagttcaaagctctcaattttgcttgccatgaggatttcaatcagatacaaggctctattgaaggtcagttttgtttttccgatttgattctctagataatttactagataaataatgtggctttagctggattgagcgaggaatttttttggtttggacgcagattgtaagacgaaactctatgcttgtaagaagaaaactgaggaagcatattcagatattgcggctgaagatgaaattgaacgtcttcagaaagagcttgacgaagagatggaacgggagtgcaagctaaaagacgagcttagataa

SEQ ID NO: 138643 - DNA, 1829 bp, Arabidopsis thaliana landsberg
cggttctgtactatcttcagagcttcgagaatgtcgatgttaatggcggccaaatccacttcactctttagctcaaaccctacaatttcagctaaaatagggcaaaaccctcgcgccgtcagatcggtttatccgacggtgagaatgcagtcacgtgttcaccgtctgattgaagagcaaggtgctgtgcttattcccggagtctacgacgcattatctgcggctattgtgcagcagaccggattctccgccgcattaatctccggttacgccctctccgccgtaactttgggaaaaccagatttcggtttgataacgtgcgccttttttttttgttggtcttctttagtagaaactttatcttctgtcgttttattcgttttgctttgtcgttttagacctccggagatggcagcaacggcgagatcagtgtgtgctgcggctccaaagattccaatcattgcagatgcaggcaagaacacaatctcaaacactcttctcttgctgctctaaatgactttaaccatagttgattactttgatctttatttgcgtagagataattgcaattttcatttttcaatatcttgaagtgatttggaaaatatcagaagtttgttctgttctgttctgttctgttctgttctgttcaaaagatatattctttgacattaatgttcagatactggtggaggaaatgctctcaatgttcaaagaaccgtcaaggacttaatcgcagcaggtgctgctggttgcttccttgaggtaaactactagtctctacttatttttaatgtattttcatgtgtgttagatttaatcactcatagtgttgtgttaatctttctttcttgtgctatcttagttgttgacttgttgtgttcattagagtaactacaaaaacagtttcttcatcctgacttgtactcatctaatttcgggtttcttgcaggaccaggcatggccaaagaggtgtggtaagagacgttttttttctgtttcatcctcggcaaacctataagctattgtcaaaatgtccaataatggttttaactggttagctctctcaattcgtcatttgtgtaggacatatgcgtggcaaagaggtattggtaccattccctcatcgtttgctaccaaaatctatacattgaaacttattactttatagtccatgagtgcagatgattattatttttctaatttggaaacaggtcatacctgcggaggaacacgctgctaaaatagcatcagcaagagacgctattggagatgctgacttttttctaatcgctaggactgatgctggtgcactttccgcaaagacaggactttcagacgccattgaccgtgataatctttatatggaggttactactaaatcatgttgtgttattaaagctttaacttttgagaagacataatggtgggtaatagagacagattggaaaaatgtgcaggcaggagctgatgcttcctttgttgaggcaccgagggacgatgacgagcttaaggaaatcggaaggcgcacaaaaggttacagactgtgtaacatgcttgaaggtggacgcacgccattgcatacgcctgatgagcttaaagaaatgggattccacttgatagttcacccccttaccgcactctatgcatcgactcgagctctggtcgatgttctcaagactcttaaagaaaacggtagcactcgagatcacttgcaaaagatggctacttttgaggaattcaatagtttggtggatttagattcgtggtttgagcttgaagctcgctattcaaacctcagaaacgctcttgggacaaccaaatcatga

SEQ ID NO: 138644 - DNA, 710 bp, Arabidopsis thaliana landsberg; identical to SEQ ID NO: 55418

SEQ ID NO: 138645 - DNA, 4617 bp, Arabidopsis thaliana landsberg
cttgatataataacaatagtcgctgaacgcatcagatcagccactcaaaatgttcgactgtccagattcaattataaaagagtgatctttgagtcggactctcagttcttagtgtctttgatcaagaataacatagaccatccaagcctagcttcaaggatccaagacattaggaatctcctccagcactttgatgaagtcaggtttcaattcatatggcgcgaaggaaatagagtggccgatagaattgcaagggaatctctttctttagtgaattatgatcccattttgtattccgttatgccagactggatcaaacacattgtggttttagaatccgtgtaatcaaacacataaagttgttgttgagccaaaaaaaaaaaaaaaatgttcgactgtgaaccttctcttgacttgcaatctaacggcattgaaggctttgttgtactcatggctattgcattgagaatgagataaataaagaacaacattgagactcagtgcagactggaaggagcaaattgatagacctctaaatgaagagctcaatgagaaagctcctgagttggtgctgagctggatagacaagtgttttaatgtatagagtcgtaatccagtctaaatacaaggttaaaggttgttgtaaagggaacacactctactttctcgggactcttctttggtcaatcaagaattggtgcttgtttctatgagtgtctgaacaaaaccagagagtatgagtttgatctttaacaaacgcaacaaggcatacaaaggcaaatccatagtaatgacaaaagatatctaagaaagaataagataagtaatacatttgcttaccaaaaatgaacaatatagttgagaacaatgtgatagaccaaaatcttatgtattcattcatcaaaagagaacagtttatattggaattctaaacgttttgcctactattgaaggtttcacaagaaacaaaacaaaccaaagactagaaaacaaagtgtaattcaatagtctacgttaacatgacgtgttttcgcaccgaagacaataatatataaactgtgatgacagaatatggagtcatggactatgtaaggctaaaatagattatggagtcatggacgaatgaagagtttttaatttcgtgaatttcataaataatgtgagcctcataataccactagttgtagacagcggttctttggtggtcgatattgcatggattatgcggtccactccacgatctaattattacaactatatacatatatttatatatcatgcactatatttgtattttacaatcttaaaaccataacatatcaaaacactttgattagtaacttttgtaattttataagcttcttgtgatttttatgtgataaaacataaacgacaccaattcgtttttttttgttttcatacatattttctataatatctgtcaggatctaataattaatatactgctctaaaagtatatatcatatcaattgtctccaagttttggtgaaacacctcaaactcaagttaataagactattttggttgtattcatgtttttttttggctatgttccattctacttacttcttaaaacaatgtagtgtccaataacagcataaaccagataagaataataattatgcgtgtagaattttggtgaaacacgtcaaacttatttaacaaaacatatatgtttcatttttttttggttaattttttcccaattttttttattttgaaataaattttccgatagtgacatataaccttatgtagtctgtcaattgtcatatttttctatttccatcatcctatatacttaacctttgttaaaactctttagataagaacttccaatattttccttacctatattttaatttccagttttatatatttagtacttaaaaaaattcaaatggaaaatatgtttgactctaatttagacacatataatatatatttccaaatactaaattacaaattgagaaactcatgaacaatagtgcatccacgtcgttatccaagttggatttctttctaaaacaaataattagaccttttaaaaaaaaatataaataggtacttgttaaaaagtaggagagcccacaaataaggctttggccgcttctgcttggactctccaacaaaaatcaaactcttttaaaaacaaacaaattgaagagcgattatacgatcacggagaagtcaagatccggtgacgaatccaacttcttgtgacggagctcaagtcgagagagagaagactgtactagtagtagtagctgtggatttttgtgtcatcatcggagatcggaatcttcttcttcttcttcttggagcttctataagtggagagaagggggaagatcaagcgacggatagtgataggttttgctgtatgtcagtagattgtgttgaaactgattttggtggatttggagaacttgcgaaccctattcaatggcctcagctacgaaaaagacttcggcatgtcctcaccacggaggctctcttccgcctcccaaactcgtctccgctgctcccgataccgttgctgtatggtccgacgctgacgatcagcgagcctctaaagtttctttggaatccgttatccgccctgtcgattcgtttcctgataatactgccaagaaacctgccaacaaaggtttgatttgatcgttgatcgtccttcattcttctgatgttagctcgcgattcgtttgaattacttgacttcttgtttactggaatttgttgatgatggttactttttgtgaaattggttcttgtctacttgatggcttctgattgagatctaattgtgatcactattgtggtttctgtgaagttgattttctgttgtgatcaccaatgcagggatttctgtgatgccaaggactgaaaccaagcacccattggatcctctttctgctgcagaaatatcagttgctgtggcgactgttcgcgcagctggtgccaatcctgaggtgcgcaaacttacttgattcttgactaatgcagaatgcttgataacattgtcactgaaactgttttactttttctttggcaggttagggatggcatgcgtttcattgaggtggcatcagtggaaccagataaacaagttgtggcgctcgctgatgcttactttttcccaccgttccagccatcactacttccaagaactaaatctggacctgtgattccgatgaagctccctccaaggcgagctagacttgttgtttacaaccaaaagtctaatgagacaagtgtatggattgtggcattgtctgaagttcatgctgtcactcggggtggacatcacaggggaagagttgtttcctcacaagttatacctgatgttcagccacccatggtatgttaaactatgttttaaggaattggatctctaagtgacttttagatgctaccgttgtttgccagtctctaagtttagattcttttgattttaggatgcggctgaatatgctgaatgtgaagcgattgtcaaagacttcccaccattcatagaggcaatgaagaggagaggtattgaagacatggatctagtgatggttgatccctggtatgttaacaacatcatcgtttctgttgacaattaaggtgtacttcttctctgagcctacctcttaatgtattgtgcaggtgtgtgggttatcacagtgaggctgacgctcctagtcgtaggcttgcaaagccccttatatactgtcggactgatagtgattcccctatggaaaatggatatgctcgtccagttgagggcatttatgtacttgtagacatgcaaaacatggtggtgattgaatttgaagaccgtaagtttgtgccactccccccacctgaccctttgaggaattataccccaggtgaaagtagagggggtgttgatagaagtgatgttaagcctctccagattattcagcctgaaggtccaagttttcgtgtaaggggttactttgtcgagtggcagaaggtagatttccagtaatagcctacttgaaaccaagtgattatgcttaagcttatttctaaattggctcaacattttgtttacagtggaactttcgtattggattcactccaagggaaggtttagtcatacattcggtagcatatgttgatggcagtcgaggtcgaaggcctgttgcacacaggctaagttttgtggaaatggttgtgccttatggcgatcctaatgagccacattacaggaaaaatgcttttgatgcaggggaggatggtctcgggaaaaacgcacattcgcttaagaaggtttgacatcagttttttttttggtgttcttaccactcagatctcagtttgtgtttaacaatcggtttttataggggtgtgactgtctgggatctatcaagtacttcgatgcccatttcacaaatttcactggaggagttgaaacaattgagaactgtgtttgcttgcatgaagaagatcatgggattttgtggaaacatcaggactggagaacaggattagccgaagtgcgaagatctaggagactaactgtctcttttctatgtactgttgccaactacgagtatgggttttactggcacttctaccaggtta

SEQ ID NO: 138646 - DNA, 5290 bp, Arabidopsis thaliana landsberg
attccgttatctcttattgaatcagttatatggatcgctcttacatactacactattggttttgctccttctgctgccaggtacatttgctcatgaaaatcactaaggaacttgttttttttgcttctattgtcattcccttgaactaaccaaacttgttccattaggttcttccggcagttgctagcatacttctgtgtgaatcagatggcactttctttatttagattccttggagcccttggaagaacagaagtcatcgccaactctggcgggacattagcattgctagtcgtatttgctcttggaggctttattatttctaaagggtaagcagataatcccttttgatatcgtgttcagcttctttctctatgggattattaagtgaaacatatattatgtcttgtttcgcagatgacatcccgtcgtggctgacttggtgctattatacatcacctatgatgtatggacagactgcattagttataaatgaatttttggatgagcgatggggcagcgtaagatttctcacctagacctcatctggttgacttctcttttcaaattgtgatataaattctgttatgttacatgatgcagccaaacaatgatacacgcatcaacgcgaaaacagttggagaagtcttgctgaagagcagaggcttctttacagaaccatattggttttggatctgtattggggcgctacttgggtttactgtgttgttcaacttctgttacataatagccttgatgtatttgaaccgtaagtgctctcattttgaactttctgactattcagaacaagaatcatttttagttgacaagatcttgaaattttttcttgtagctcttggtaactccaaagctactacagttgtggaagaaggtaaagacaaacacaaagggagtcacagtggaacaggaggtgaaatcttttacctcttcaattctgcagccttttcactttggttattctgactctactaaaaaagttgcaggttctgtagtggaactcactagtacttcaagtcatggaccaaagaaaggaatggttttacctttccaaccactttctctagcattcaacaatgtgaactactacgtggatatgcctgcagtaagcaactgcgtctcatacttgttctcgttgtatcgctttacaaatgcaccttaagttgtattcattgtttcctttaaattctgcaggaaatgaaggctcaaggagttgaaggagatcgacttcagttactaagagacgttggtggagctttcaggcctggcgtattgacagcattggtcggtgttagtggtgcgggtaagactaccttaatggatgtcttggccggtaggaaaacaggaggctatgtagaagggagtattaacatatctggttacccaaagaaccaagcaacatttgctagagtcagtggttactgtgagcaaaatgatatccattctccacatgttaccgtttatgaatcccttatctattcagcatggcttcgtctttccgccgatatagataccaaaacacgagaggtaagtattactatacataacgtttcatttgtttttcataatcactcgcatgattttataatctggtaacctttttttgcatgtagatgtttgtggaggaagtgatggagttggtggagcttaaacctcttagaaactctatagttggtcttcctggtgtagatggtctttcaacagaacagaggaagaggcttactatagcagttgaattggtagctaatccatcaataatcttcatggacgagccaacatctggtcttgatgcaagagctgctgccattgttatgcgtactgttaggaatactgttgatacaggaagaactgttgtttgtacaattcaccaacctagcatcgacattttcgaatccttcgatgaggtttgcttccgaaattttttccacttttaagtccctgaaccaggataaagttaatcaatcatctttggtttaatgcagttgctgttgatgaaacgaggaggacaagttatatatgctggaacactaggacatcactcacaaaaactcgttgaatactttgaggtgaatcattggttttgcttttcctctctcttggtcatatgaatatggaactatatctagaacttttcttgcaggctattgaaggggttccaaagatcaaggacggatacaatcctgcgacgtggatgcttgacgtcactactccttcaatggagtcacaaatgagcgtggactttgctcaaatattcgttaactcctctgttaatcggtatgtgttttaagaaaaatgctactactaatgcagagttgttacactgtgtttctaatatgaacttgatgttttactcaggagaaatcaggaactcatcaaagagctgagtactccaccaccgggatcgaatgatctctacttccgaaccaagtacgcccccccattttctactcaaaccaaagcttgcttctggaaaatgtattggtcaaactggagatatcctcagtacaatgccattcggtttctcatgacagtagtcattggtgtcttgtttggtctacttttctggcaaacaggaactaaaatgtaaggcatcttcttttctctattccataagtaaactatcatcttatcaaaatgtgacgtattcatccaaaaacaccaaaacagagagaaagagcaagacctgaataatttctttggagccatgtatgctgctgtattgttcctcggtgccaccaacgctgcaacagttcaacccgcagttgctattgagcgaacggttttctaccgcgaaaaagccgctggaatgtactccgccattccctatgcaatttctcaggtacttaaccattctaataattttgcctcaacttttatatgctacttttcctaagatatggttatctaaaaatgatgcaggtagcagtagaaatcatgtacaacactatacaaaccggagtttacacacttatcctttactcgatgatcggatacgactggactgtggtcaaattcttctggttctactactacatgttaacatgcttcgtctacttcaccctatacggtatgatgcttgtggccttgacaccaaactatcaaatagctggaatctgcttgtccttcttcctcagtttctggaatcttttctccggtttcctcatccctagaccggtaaataaactaagcaacttccatttgaattaataatataaaaaaaaagtgttttaagagctagactaaacttttaacttttgatgcagcaaataccaatatggtggagatggtactattgggcatcacctgtggcttggacattgtatggaatcatcacatctcaagtaggagacagggattcgattgtgcacatcactggtgttggagatatgagtcttaaaacgttgctcaaaaatggattcgggttcgattatgacttcttaccagttgtagccgttgtccacatcgcctggatcttgatctttctctttgcctttgcttatggtatcaagttcctcaacttccaaagaaggtgaagaaaacttttattagaatagatttcaaaaatctttatagattagtgtttgaatgaattcatgtaaattttctttgtcttacctaattatttatttattgtcgtttggtaataataaataacagttcatgtttacaatatgatattttccttattcatacttggtatatgctttattctctagtgattctcattacaaagatatttgtgcaagtttggactcgtcccaaatcaagaaaaatgttgtagtcaaaatgcttttcagttacgagtctgaaacctgacaacacaaaattataaattgtttttatttattttttcctaatcaaaacgattttttcctaatataaaatttgatattttgaggggtaaaagaagcaataattgagaatattgagatactaaaattgtgacgagacgcttgatgggttccacttaaatatctgatatgattacacgtggcagactatgctccgtccctaatgagcttcgtgtgattttgattaattttgttaacttttatttttgtcgtctagttttttaaatttattaattaatttttatttatcttctaatttagattttattcctttaagctttttcgctcctcactctctcttcccaaagttctctgtaaaactctctctccgtcttcaatggtttacacgatttcaggcgtacgttttcctcatcttccatcgattaagaagaagaattcgtctcttcacagtttcaatgaagatctcaggagaagcaacgctgtctcattctctctgaggaaggactctcgttcttctggtatttgctccatctcctttgtttatatctccgtgtgtctccttctagtggcacgggtttcgagattggtgatttccatggagtcaatgtgtgggattcaatttttgtatcctgcttcgtggaacattcttttttatggaggattgatttggtgtataattagaatttagatggttgatgaagtttaggagataatgagatctttgaggtttcggcaatgacgaatttatacatgttcgtctctggaattttggtgatattaggtttataagaccaagtttcgacttaatgcgagctttgcatctagagatttcccagttcaatggtcctctatattatgtatctattattgttgattcaaatctagaagtttgaatgatagtagcagtgttttgttactcttcttatttctctgtggagtgattcttatatccattgtgctaatttcttagggaaggtttttgctcggaagccatcgtatgattctgattcgtcttccttagctaccactgcatctgagaagctccgtggccatcagagtgatagctcttcatctgcctctgatcaagtacaatctcgggatactgtctctgacgatactcaggtttgttggcatgagaaccaaccatgaacttgtgattagcacgataattagatagaatccctttctcccctctactgttcttaaatgattattattaggtgctcggcaatgtagacgttcagaaaactgaagaagcccaggaaacagagacactagatcaaacttctgcactctcaacatctggaagcataagttataaagaagattttgcaaagatgtcacactctgtcgaccaagaagttgggcagaggaagattccacctcctggagatgggaagagaatatatgacattgatcctatgttgaacagtcatcgtaatcatcttgattaccggtaa

SEQ ID NO: 138647 - DNA, 2940 bp, Arabidopsis thaliana landsberg
atgtctgtgtgcattggcagttgtgaggttgatgagcagaaggagcagatgcaagccaccaattctatctcagtatctgagaacttttcacgtgaaaaattgaattcatctcctgcaaggggtactccaaattgcaactcagtatgccgaatttctaccgcagaaagtgaaaatgctatgcagaacaacagttattacagcaccaatgttcagtatggtgagaacaaatcattaaatgttgacactgtcaaagaagaaagcaaagttgaaacaggcacaactcaggtgaagaaagttgttagttctgatgtgcaatgcactgttgagtcttttgagactgcacttgactcattggtgaggacaaaggagaccattggccgagcaactcgcttggctatggacttggcgaaatttggcgtttcggcaaaggtatgaaacgttctctctgcttgtgatcttgtcttatctgtttgtggatgccacatgttaattagaggtggaatccaatcggagacaaatttcttcttatagattgttaaaacattgtacctggatctgtcccatgctatatacctatttgcatttatcaaatagttaattgcgagaacatgtcaaattgtcaataccaactttatgtattactacgaattagagaaacaccttatatatattgttttgtctactgattttaggatgctgtaggcatccagccactcttttcaagcaaaggactagggcaatccttattatcttatcttaccgttttaatgtggaaagggactttttgcacggtgcttttgtgtaatttataaaacactattttgcagacttttgtctaatgttgttaatgatgctctaagaatctctatgtctaaaattaggcgatggaaattctggcccacactttggaaagtgagtcaaatttacaaaggagggtggatttatttttccttgtggattctattgctcagtgctccaaaggtttgaatggtgagtatgctgtttttgcttagttgcatcattgatgttctcaatggcgagttaactttgtgaatactacctttctattcaggtgatgctggtggtgtttatctttcatccattcaggctatgctacctcgcctattaactgctgctgtcccagctggagctaccacacaagaaaaccgaaaacagtgcttgaaggtatgcgattttagttagatattctttttcttatgaatactaactctcaccctttctgctattatataggttttgaggctttggcttgaaagacggatccttcctgaatctatagttcgtcaccatataagagaacttgattcgcttagtaatgttcctgcttgcctctattctcggcgatccgctcgaacagaaagggcgctggatgaccctgttagagatatggagggtatactggtggatgaatatggaaggtgagagttgagtctaatcagttttgggatcttgatttctttatctctagggtcataacttttttcacctttttgtttcagtaattcaactctccagcttcatggattctgcatacctccaatacttagggatgaagacgaaggaagtgactcggatgggggtgattttgagtctgtcacccctgaacacgagtcaagaagccttgaagaacatgtcacaccgtccattaccgaaaggcatacccgtatactggaagatgttgatggtgagcttgaaatggaagacgtggctccaccttgggaaggtggaagcagtgctagtgcgatcacagatcaagctgataatagagagtctgcaaattgtctgcttgtccctggaacttcacatcagaatgttacctcgtcatctccaccagctcgccctatgcagaatgctcagttggcaatgtctaattcctactcaaatggctttgactaccgcagaaatcccagcatgcaggtgcgtcctttttcttcttttagaatcttttgcagttaacaaagtgaggattcagacatagttaataacttaatttgtggttaatattccagggcgactatcatgccggtcctccaaggatgaatcccccaatgcattacggaagtcctgaaccatcttatagttcccgagtatctttgtcaaaaagcatgccacgtggggagggttctaacttccagcataggccatatccatcttctcatcccccacctcctccgccatcacatcattattcatatatggagccggaccaccatataaagtcgcggagagaaggtctatcataccctcacagatctcattacacactggaatttgacgaaaggaattatcaagacagctatgagagaatgaggcctgaaccatgcgagaatcgagacaattggagatatcatccgccctcttctcatggtggactccgatacctttttttttttttttccttataattctcatgcatgctaataggcatatatgaatgcatatctgcgcacacaagcacttgctcatggatgctaataggcgtgaatgcttttcttttttttatattgcaggtccacgatatcatgacagacacaaaggacctcatcaatcgagctcatacagtgggcatcaccgtgactcaggaaggttgcagaacaataggtggagtgattctccgcgtgcatataacaatagacactcttatcactataagcagcattcggaaggtcctgttccagtaggaatgagaggtaatatggaatttcatacttgttccacgtcatgaatcagagccttttcttatactggaattgtttcctaggtttagaaactctgacattttcttttgactggggattttatatcattaggtctctgacattcgagattgttttgcttgtcctgtgggtatatcttgaatataaaaatgaacttggagtatgtttgtggatatgcagatccagggacgtggcatcaaag

SEQ ID NO: 138648 - DNA, 1131 bp, Arabidopsis thaliana landsberg
ggtggaaatggaagttcttctcagaagtatctcgtcgtttctaaatctgtcatcttctaaacatattgatttagacccgtttgagaagtactataagagagttgaagagttattgagagtgttgaagcctatagcagatgttgttgttacctctgattttgtttttgatgagaaacttggtaaagcatttgaagaattgactcaggatgttgatcaatccattgatcttttcaggagttggcaagctttctctagtaaagtctatttcgtaagtccctaaacttctcttctcgtctcaggttgtatcttagctatatagagttttaacatatgcatagattagtttgctttatgattgttcggaagttttcttttgcctttagcttgaatccgtgacggttttaagatcaaattagtgaccattgtgttattctgcactcttgcttgagttttggttactgataaatcatttcgttgatgatagcctcttaatatctacgtctaggttcttcaaattgaatctttgctaccaaagatgcgggacaccattgtggatacttttcagtttctcatgtcttctaagaaccatctacctgatgagctaagcccagcttctcttgaggtaccttctctttacatttagaggaaatttgtatcaatttatatgctatagatatgtggtctgttcagaacattagctttaggttggatattaaattggatcagttactgaattttgtggaaggggttgatcgtagtgatgctgactgctttatgttttgttgtgttgtccacattagcgattgaatcaaattgcaggagatacgaatggttaatttacaaatattcgtaattgcagcaatgtctagagaagattaagcatcttagttatgaagaaatatcttctgtcattgacggtgctttgagggatcagagagatggtgttggacctagccctgagatcttggtgaaaattggagagaacactggtcttagatcaaaccaggagattctgattgaagctgttgctctagagaggcagaaagagatggctgagcagtctgagaataatgcagaagtcgagttccttgaccaactgattgttattgtaaaccgcatgcatgaacgtct

SEQ ID NO: 138649 - DNA, 976 bp, Arabidopsis thaliana landsberg
aaatcaaattcaaggataaggattggtactaggagaaaattatcaattcaataaggaggaggaatagagagctaaagaaaaagaaaaaagactacatttctacaaggacgttggttcttttagtcgtcgtcggtcgtcgaagaaagatcttctccttctttcttcgccgtacgatcgtcgtctaatgggagaatcatcaaatccaatggctacaagttcttcttcctcctcctcctcaattcctccttcgtctccaacaccctctccgacgtccacaaccactccgccacgtcaacatcctctcctccagccaccatcttcaaaaaagaagaaaaacagaacaaacgttttcagagtcttacgcaccgtgtttcgatctttcccaatctttacaacaccatccgtagcatgcaaaatcccggttatacatcccggtttaggcttaccggatccacatcacaacacgtcaagaaatcaccgaacgttatttcggataccgtaaggccgagtaagtctttccattcaagaaaaccctaatgtttaccttttttagtcgtgagctcgccatgcaaccacggcgcttcaaatgagcttaagcacgggaatggtgagagtagctctcgagactgagatacagcctcgagctgataatagcaattctgagaccaagaagaagacagatattttggaagacccgttatggacaatgtattgtaaaggagagaaaacgggttacggtgtgaaaccgagaagcgacgcgaagaagatcttaacgtgatggagttgttacgtccggtgtctatgggcgccggagttttgccgggaaactcggagtcggaaggaccccgacggcgaaatggcgtatatgagagcttattttgagagagttattgggtctaaagattcagagactttttatatgttgagtcctgaagggaataatggacccgaacttagctttttctttgtgagagtt

SEQ ID NO: 138650 - DNA, 898 bp, Arabidopsis thaliana landsberg
gcattgatggattatatcaaaagtgactttgacttaagtgtttactggaagaccttgaacgataatggcataaccaaagagcgactcttaagttatgatcgtgctatacattctgaaccaaattttagaggagaacaaaaagacggtcttttgcgtgatcttggacactacatgaggactttaaaggttacttccccaagtttatgttagccccttttatgagtctagctacatctttctttggcaaagttggtctgatttcctctttctccttttcttactaagagaaatcatttaacttgtggccttctttattttgtctaggctgttcattcaggggcagaccttgagtcggctatacaaaattgcatgggctaccaagatgacgtaatgccgatatactgaaaagttacagttatttcttcttcttggaattggcaactgaacatttgtgttgtccttcagggtgaaggtttcatggttggggtgcagataaatcctgtatcaggattgccttctggatatccagtaacttttctctcaacttccctactcatctcaagaatttaatacacctgttaaatcagtccaacttaaactgtgttggcacttccctcaacaggacttgcttcgtttcgtcctagaacatgttgaagaaaagaatgtagagccacttcttgaggtgaaatgttttcataattactaggtcgtttttatttgtactgttaatttgacttctgtgaatcgtagacttaccatgggaaggaatattgatgtagggtttgcttgaagctcgtcaagagctaaggccacttctgctgaagtcccatgaccgcctcaaggatctgttattcttggacctcgctcttgattctactgtcagaacagcgattgaaag

SEQ ID NO: 138651 - DNA, 1068 bp, Arabidopsis thaliana landsberg
atgctgaagatgaaggctttgacaatgatgagagccagttatttggttcttgatgaggcagatcggatgtttgaccttggctttgagccacaagtaaggtctattgttggccagattcgtcctgatcgccagactttactattttcagccactatgccttggaaagttgaaaagttagctagggaaatcctttcagatcctattagagtcacagttggcgaagtggggatggccaatgaagatattacgcaggttgtcaatgtcataccttctgatgctgaaaaacttccctggctacttgaaaagctccctggaatgattgatgagggtgacgtattagtgtttgcatctaaaaaggccactgttgatgagattgaagctcaacttactctaaattccttcaaagttgctgctcttcacggtgataaagaccaagcatcacgaatggaaactctgcagaagttcaaatctggagttcaccatgtgctgattgccactgatgttgctgcccgaggtcttgacatcaaatcgcttaagacagtggttaactatgacatcgcaaaagatatggacatgcatgtacatcgtattggtagaacaggccgtgccggtgacaaagatggggttgcctacacacttgttacgcagagagaggctagatttgctggtgaattggtaaacagtctggttgctgctggtcaaaatgtgcctccagaactcacagatcttgccatgaaggtaattacaactccttctttcttgtatcttccagattgttcattctactaactcctcaaattttacctctgtaaatcaataggatggacgattcaagtccaagcgtgacgggagaaaaggaggtaagaaaggccgaggaggaggtggtggaaacaaaggagtacgtggagttgattttggtcttggtattggatttagctcggaatctagtaggacaccttcttctaaagctgcaccaagtagaagtggggcaatcaattcagtgagaactggagtaatggcccaattcaagaatagttttgtcgctgcaacgccatcaaatccacaaaa

SEQ ID NO: 138652 - DNA, 294 bp, Arabidopsis thaliana landsberg
gctttggaagaagttgagaagaatttttcttctctaagaggaatactttctggagatggtgagactgaaccaaatgctgatcaggctgtacagttagcattagagttttgcaaagaagatgttgtctctcttgttattcataagcttcatattttgggatgggaagtaagtgagattttttacaattgtctccctctgtgtgtgtttaatagaatctgttacgaacctgttgggtaaatgatgcagacaagaaaagatttactgcattgttggtctatcttgttgaagcaaaag

SEQ ID NO: 138653 - DNA, 1905 bp, Arabidopsis thaliana landsberg
attattttttattattataaatctaaaaaagttttttttttttttttttttgttctcgaagcagtaaaatctactacaacagtcaaagagagagagcaaacatgctcgcttaattcacggaatcgagacgtttctacaaactcaattttatattttcagctggaatccgaactctgatatagaaagcacacaacgttcacctccagtgacttctctctatctctaaatctctcttgcgtcacttaaaaagtcggtgcttcctacttaagtgttcttgagagtgagacgtttcatttctgggttcaagggtgtagaataaacacttgagtgaagtttaaagcttgagaaagacagaggaaagaaaaatgggtcaaagactgaatctagtcttctggatttttgtctccattcttgcctttttgagtatgtctttacactcaaatcctcttttgggtctgcatttacctttgattctctcttctatgtttcactatctcttaaatttgtcttcttgatgttaaagttcgatgctttactttttgtcctgggttaatctctgtttcactgtagtagttcttgtctgaaaatctcgaatctgttagctttgaactacttttaggtgtttggaatcgacatttgagattcaaaagcagccatttttgagacttgttttgtggatttgttgcagattttggtatggctagcaagattgggatatgttatggaagaaatgctgataatcttccaagtcctaacagagtctctgagctaatccaacatctcaacatcaaatttgttcgaatctatgacgccaacattgatgttcttaaagcttttgcaaacactggaatcgagcttatgattggtgtccctaacgctgatctacttgcatttgctcagtttcaatccaatgtagatacttggcttagcaacaacatccttccttattatccatctaccaaaatcacttcgatttcagttggtcttgaagtaactgaagcaccagacaatgccactggtctagtcttacctgcgatgcgaaacattcacacagctcttaagaagtctggtttggataaaaagatcaagatctcgagctcacattcccttgctatcttgtcacgctccttcccgccttcgtcagcttctttcagcaagaagcattcagcgttcttgaaaccaatgcttgagttcttggttgagaatgagtctccctttatgatagacctgtatccgtattatgcttacagagattccactgaaaaagttccgttggagtatgctctattcgagtcatcttcgcaggttgttgatcctgccacgggtttgctttactccaacatgtttgatgctcagcttgacgctatctatttcgctttgactgctatgagctttaagaccgttaaggttatggtcactgagtccgggtggccgagtaaaggctcgcctaaagagacagctgcaactcctgagaacgctctggcttacaataccaacctcatccgccatgtcattggtgatccaggtaatctttttatgatcattagatacaaagatagatggaagcattttatgaactgatttgttttctattggttaggtactcctgcaaagcctggagaagagatagatgtgtacttattctcgttgttcaatgagaaccggaagcctgggatagaatccgagagaaactggggaatgttctacgcgaacggaactaatgtttacgctttagacttcactggggaaaacactacgcctgtttctccaacaaattcaaccacaggtaccagtccaagtccaagttcaagtccaattatcaacggtaactcgacagtaaccatcggaggaggaggaggaggaggaggaaccaagaaatggtgtattgcttcttcacaagcttcg

SEQ ID NO: 138654 - DNA, 2984 bp, Arabidopsis thaliana landsberg
aagagagaaccggttcgaacaaaaacggcaaaaaaaaaaaaaggggagcagcaacctttttccaattttgcgtgaagcagcagtgaagaaaaaaaggaaaaaaagtgagtgagagaagaagattagaaacgacgatatatacggagaatctcaggatttcgatcatgtttttgttttttctacttttggtactctccatggcgacggagcgtcatcattttgagcttgctaaaggcatcaatggccttgataagatcgttctccgcgagtctcgcggccgctctgcagaggtaaattttcacgcggcgtcgtgctctatctctagttgatctgagatttagatcaatttgattggagatcgatttttgtagtatgattacgatttgcaaatctcttagatccttgggttttagctctagtgttattgagttctgtatttgtttatgcaatttgtgttaatggaagaaccggatctgcgtgtttatcttcgacgaagaatgtgtaaaattaatgtttagtgtaatctatgaatctgttgatgctttctcagaggtgaattgttttttttgaataattgatcatcttattagttattaagtgtgagctctctgcaaatttattgatctccatctttgtctgttctgtatcattacgttttttgtttaatttgagttggtgaacgaatgcaggtatacttgtatggaagtcatgtaacttcttggaagaatgagaacggagaggagttacttcacctcagtagcaaggtactcctccatatctataccatcttccacttgatcacgaaacgggacatttggttcatgattaatgtttccaacttcgttagagatgatatggcctcttatgaagttcaaattgatggtaaacatttatgtatctcatgttatttctctggttgattgtgtctctataacgctaaagacacaatctagaatgattggctcactaaagctgatgaaagatttgggaaaatctttgcctaaattttgctatttacatcgatcattatgtaaactgagaaaggatcttcacttcattttttgcttaatttcctaaagaagtatgtgacagaacagacaacattttactttgaagtctagtaatttgctcatactagaatagtctttcttgctcggttatttgtgtgttttagctacaaataatagaaatgaaaccatgtgttatgaattctgcaggccatattcaagcccccgaaaccaatacgtggagggattcccctatgttttccacaagtacgttattatatttcttcctttggttgttccattttacggttcattatgctcatgaaattctgtttttgtatgtgcagttcagtaactttggtacactcgaatcacatggctttgctagaaataggatctgggaagtcaaggctaacccacctccgttgccattaaattcttgttctagtgcttttgttgacctgatcctaaggccaactgaagacgatctgaaaatctggcctaacaagtaagattcttcaaaactcgctctttatattttctcagaacattatgctcgtatttaagtagaaatatcttacaggtttagagcactactaactttcatctcggtgtgtccatttcagttttgagttcaggctgaggatagccttggggaccgaaggagaattaactctgacatctcgtatcaggaacaccaactctgatggaaagccgtttacattcacatttgcttatcacacctatttctctgtctcagacatcaggttaaatctcattgcatacatttatttacttctttttcaagaagatttggaatacaaacaaagattatgtaataagcattagtttttcttgtgttcagtgaagtacgggttgaaggattggaaacgttggattatcttgacaacttgaaggacagagaacgttttaccgaacaaggcgatgcgataacttttgaatccgaagtaagttttctattccaaactctcctcttttctgaaatatctctttttgtctagtatcatcatcactcataacaaaacacttgttacttggtgaaaaaataggttgacaagatttatctaagcacgccaacaaagattgctattttggatcacgagaaagagaggactttcgttattcgcaaggacgggcttgctgatgctggtaatcagaatctgagtttgttattgagatcagaatctgagctttgtttaatatgactgaatcatttgataatcgtcttttcagtggtgtggaatccttgggataagaaatcaaagacgatctctgacttgggagatgaagactataagcatatgctttgtgtggaagctgcggctatcgagagaccgatcacattgaaacccggtgaagaatggaaaggaagactcgaactctctgcagttccttctagttactccagtggacagcttgaccccaagaaagtccttgagtgactctttcaaactccaaaaacagcatctttctcccctctttaattgcaggtaacttcagtttactcttttccatttagattgttcttgagaactttttaattaccgtagttacatttgttttctgcagtactataaagaaacgagtgaaggagagcttaaagatcatcggatatactatttaaagaaactgagatattgaataaaaattgttgcttcttagttctcttttgtaaccacagacaataacgatttgcgaactgcgaaccaagcatgcctggtctagcatttgtctggtcagagtccaaaaggaattacaacttataaaatttgtaggttaaacttaaaaggctaactgcacgggacaaaaggttaagggtgggttgttcttattggtctaagagtaaaactaaatgaaataaaatgttatatataccttgaaaacgataaaaactaaccattagtatattaaacttggcaagaagaaactaaaaatatgaataaaggaagtgaattc

SEQ ID NO: 138655 - DNA, 1652 bp, Arabidopsis thaliana landsberg
  unsure (1)..(1652): unsure at all n locations
atggagaccaatctaaagatctatctagtttcatccaccgactcgtccgagttcactcacctgaaatggtctttcactcgttctacgatcatcgccttagacgccgaatggaagccacaacactccaatacgtcgtcgtttccgaccgtcactctcctccaagtcgcatgccgactcagtcacgccacggatgtctccgatgtcttcctcattgatttgagttcgattcatcttccatcggtttgggagctgttgaatgatatgttcgtgtcgccggatgttctgaaactagggtttcggtttaaacaggatttggtttacttgtcttcgacatttactcaacatggatgtgaaggtggattccaagaggtgatttgcttttgaaagtcttgaactttgcttcgtagtgttagtttaagctaattgtagtcgaattcttatcaaagttttaacctttagctctgttatattctcttgtacttaaagttcttgtgtttggatcacgtgtggtgtttatagataggtaagtattgatttgtgtgtttattgacttctgttgaaagtagattgttgaattgtgtttttcttttatttgcctttttaggttatgttgctttaaagctctatgtttgtgattgttgatgtgaataggtgaaacaatacttggatattacaagcatatacaattatctgcaacataagcggtttgggagaaaggcgccaaaggatatcaagagcttggctgctatatgtaaggaaatgctggacatctctctctaaaggtttgtcaatgattcctgcaagaatttgacttttcgtgaaacgtactgttaataaggcttttcttaacaggtttttattctttaggaacttcaatgtagtgattggtcatatcgtcctcttacagaagaacagaaactatacgctgccacagatgctcactgcctgctccagatattcgatgtatttgaggcgcatcttgttgaaggaatcacagtgcaagatcttagagtgataaatgttggcttacaagaaattctgactgaatcggactatagcagtaagattgtcacagtcaaactttgcaaggctacagatgtaatcagatcaatgtcggaaaatggtcaaaacatagccaatggagtggttccaagaaaaacgacactaaacacgatgccaatggatgagaatttgttgaagattgtcaggaagtttggagaacggatcctgttgaagagtactgatcttctaccaaagaaacttaagaagaanccaagaagacgtgtcgcctcaagcactatgaacacaaataagcagttggtctgttctgcggactggcaaggtccaccgccatgggactcatctttaggcggtgatggctgccctaaatttctattggatgtgatggtatttgaatcaatttctgttttctgttgctcttttgtttcttggttttatttaattagaggacaagaatttgatttcacctatttagtatctttgtttttgaatgtaaccattttcagtagaatccatgtggtatcataatcagtttcttgtaaaactactttataggttgaaggtttggcgaaacatctacgttgtgtggggattgatgctgcaatcccacactcaaagaagccggattcaag

SEQ ID NO: 138656 - DNA, 2701 bp, Arabidopsis thaliana landsberg
ctttgcctcactctcttctctcatcgtttttcatatttcttctttgattcacgtttcttttcttttcctctcattgactattctccctcacttctctctctctcaactcttgtgatatctattcaaagatggttccatgaaatttggttttggtcagtgagtgaatcttctcttcttactccatcatgagtgactccactaacagcgtctctccttcctctgattacgcctccatctcctccggcgaccaggttctccacccttactcaatttcgatctgggcacgaatctctttctcttataatttctgtacaagcgaagttgttatgagaatccctttctgggttttgccttttagaacataaagtcatttcctttacgagtgtgatcttgatgaactcatatctggatttgttccttacatgttaagagcgattggttactttggctttgtaactttaatcacgggtcagtcgcaaagttttttctttttgatagaaaatgtgtcttgtgtgagtttgatcactttatgtatttgcattgtactgatatgaagtttcagagtcgttgcttatgttaaagcatagctttttgtaggtctcagactcgtccatgatgtaatttgaatgaatcaatgttttcattttgatttgcagagtcttcagcggagtcgaaggagtggagatggaaaccgagccgttgtgcgtgagtcccgccattggcatgatgtattctggtcagccatctttgtgatccacttgatttgtttgggatttgtgctcgcggtgcttggactcaataggtttagaatatcagataggttaaacatcgataggtacactcaagggttcttggagaatcataaaggtctaacagaggattactggcctctctatgctgttgctggtggcattggagtctttatcagttgggtttggtcattgctgcttggctcttacgccaatgagatgatgaaagtttcggttcacatcttaacaacctatctagctgtagttagtgtactatgtttctggtgcagactgttcttttggggcggtgcattcgctgttggatctctgttgcagttcttgtatgttatttcagttatagacaggtgcgtccgaggttgaactggttgaactatgactgaacccctatggtcaaatggcaacaactttttagttctgatgatttgagttgttcatgtgtagacttcctttcacaatgctggtcctacggaaagcgctgaaattagtctggggacttcctaaggtgataatggtggcacatgctttcacagtagtcatgcttttgtggatgtctctatggtcttttggagcagctggtgttgtggcatcgagcatgggcgatgagggacgatggtggcttcttgtggtgagctggcaagttttgcatttttactcacggtttctgttttctgctttaagtgtctgaaagtaaacatgtttagaattcactcaatcattggaacatataatatatatgcaggttctttcggttagcttattctggacaggcgctgtgctatgtaacactgtccatgttatagtttctgggatggtgtttcatgttctctttcactgtggtcaagaagagtcatcatcgttgcctcctagctctttggtagactcacttaggtatgccgtgacaacatcttttgggagcatatgttacggttcactcttcactgctgccattagaacacttcgctgggaggtagtctccagcatcctttgctgttcgtaaaacattatcattgctcctcttgttaataacattagtctgcaactttcttttgcagataaggggattccggtccaagatttgtggaaacgaatgtttactttgctgcgttgatttcctgtttcatctagttgaaacactagttcgtttttttaacaagtatgcatacgtccaggtatatatataaatatagacagtttttaaacaagctcatcatctccctcctatgagcaatgagactcagaatgaaaaaaacgtttggttaattatcagattgcagtgtatggaaaaggattcaacaaatcagcaagagacgcatgggaattgtttcagtcgacaggtgtagaggcacttgttgcatatgactgctctggtgctgtacttctgatgggaaccatctttggaggactcatcacaggctcttgcattggtatatgggcttggatcaagtacagtgaccgagttataatggttgcatctacggctatgttgatgggaatggttcttgtgagttttcttttgtgcactcttttagtcacccaaaaaattacatgaccaacttgttcactttgtttcattgatccaatgtggtgttcaggtgggtttaggaatggtggtagtcgaaagcgctgtgacatcgatatacatatgttttgctgaagatcctttgttgattcagagatgggatgctgatttctacactgagatgtctgaggtgcttcaccgtcgtctccaacatcgtagctcgcgagcccgtgaagttttgacgaccgcttgattagcctatgcctcctcttggaaaataggagatataactgtagaatattatgctattagagggtgctaaaagcgggctaacccgtgtggctaaaattattttgtcaaatgatttatgctttctatttgttgaatcatgaataggaggctgtgggcgttt

SEQ ID NO: 138657 - DNA, 1121 bp, Arabidopsis thaliana landsberg
ctaaatctgattttcaaccaaaagccaaattcagcggaggaactgtcgttttcctttcttctttacttcttcacctttctcctatttcatcttaacatataatcatcagaagaaagaaaaattctaaaacaaaagaggaacttgagaattttatgcttgagacaaaatggcagaagatacgtacgaggaagagtgcgactacttgtttaaggcggtgttgatcggagactcagccgtcggaaaatcaaacctcttgtctagattttctaaagacgagttccggtttgactctaaaccaaccatcggagtagagtttgcttaccggaatgttcacgtcggagataaaatcatcaaggctcagatttgggacaccgccggccaagaaaggtacacggacataattttgtgacctcgtgactactctactctgttccttattttgtatgtttctttgagctttaattttgaccaaatcaaaaatattattttacaaaaaaatgaaggaaataaattatgtaatataacaaagaagagtgaactatcaatacttttattaggttaaaaagatacttataaaaatacttgtaacattccttaattattatttgtaatctaatcattgtaatttttatgagtaaagatttcgagcaatcacaagttcgtactaccgtggagcattaggggcattactgatttacgacatcactagacgaacaactttcgacaacatcaagaaatggcttttcgagcttagagacttcgccaatcccgaaaccgtcgttgtcctcgtcggaaacaaatctgatctccgacaatctagagaagttgaagaagacgagggtaagactctagcagaatcagaaggtctctacttcctcgagacttcggctttagagaatgttaacgtcgaagaagcgtttctagtgatgatcggacggatacatgaggttgttactcagaggatagcttcggaaaacaaatccaacggtgctgcgacgcctcacattaacggtaatgggaacggtacggtccttccggttggtaaagaaattgtgaatatacacgaagtcactgctactcaacccttattaagctcatcttccaactgttgttttaagtaa

SEQ ID NO: 138658 - DNA, 754 bp, Arabidopsis thaliana landsberg
ctgcaattcctctgtcgttctcaccagttaacagctacagcacaaaactgtaaccacgcttccgatctctaaaacctgagagagagagagagacagagagacagagagacagagagaagtgtttcaatagtttggcgtgaagatggccggaggaggcggatacggcggcgcatcggggaaagttgattacgtcttcaaagttgttctaatcggagattcggctgttgggaaatcgcaactacttgctcgattcgctagagacgaattcagcatggattctaaagccaccatcggcgtcgagttccaaactcgtaccctctccattgaacaaaaaagcattaaggctcagatctgggataccgctggtcaggaaaggtacgatttctaagattctctgcgttttggaatcttaatccgaagaattttactggatctgtaaatgtttccatgaaagcgacttggtttgactagaagatgttgcatagatttgtttcctattttgtacatctactttatcttgaccagatcctgaatttgttatcatcgaagtgttttatcggatagaacaataaaggtaatctggaaaactatgtctaggaataatgctccatctcaattttgtgtgatttttagctgatttgaatctatttggctcatttctatatttggaacagaagatttgggattggtctttcgattcgtgactttgcttttgttgcacttagcagatacagagccgttacaagcgcatact

SEQ ID NO: 138659 - DNA, 1256 bp, Arabidopsis thaliana landsberg
agtacataccaagaagaagaagaggcaaagaaaaagatgataacgggaaacgaattctacacggtgatgtgtgccatggcaccactctacttcgccatgttcgtggcttatggatcggtaaagtggtgcaagatccccacgccggcgcaatgttccggaatcaaccgttttgtctccgttttcgccgtcccagtcctctctttccacttcatctcacaaaacaacccttacaaaatggacacaatgttcatcctcgccgacactttgtccaaaatcttcgtcttcgttttgctctctctatgggccgttttcttcaaagccggtggtctcgattggctcatcactctattctcaatcgctactctccctaacactctcgttatgggcatacctttgcttcaggccatgtatggagattacactcaaaccctcatggtccaactcgttgttcttcaatgcatcatttggtacgttatcaaattactatccgttctttattcatttaccctgtgattgattagaaaacctcataataatggaattattttgtgatttcacatatttttaccacacattttttcatggattttgtaaccaaaacttaaatgaatttcgttactctaggatataattcaaccaaatcaaatgtttttactaacccaagcttcttattagttgaattatttaattataacgtatgataatataagctaagtgtgtatacatgtataggtatactctgctactattcctctttgaactccgagcagcgaggttgcttatccgagcagagtttccgggtcaagcagccggatcaatcgccaagatccaagtcgacgatgacgtcatttccttagacggcatggatccgctccgtacagaaactgaaaccgatgttaacggtcggatcaggctcaggatccgacggtccgtatcatccgtacctgattctgttatgtcctcctccttgtgcttaacccctagagcctctaatctttctaacgccgagattttctccgtcaacactcctaataaccgtttctttcacggcggaggaggaagcggtacccttcagttttataacggtagtaacgagatcatgttttgtaacggagatttaggcgggttcggatttactcgacccggattaggtgcaagtcctagaaggctctcgggttatgcttcctccgatgcttactcgttgcagccaacaccacgtgcctcgaactttaacgagcttgacgttaacggaaacg

SEQ ID NO: 138660 - DNA, 625 bp, Arabidopsis thaliana landsberg
ctttcttgaccttccaaacctgtcagcgtctatatatagcactgatctctgtaatagacttcgagcatttctcgttgcttgtccgccctctggcccttcaccaacagttgcagagctcgtgattgcaactgcagactttcaacgtgatctttccagctggaacattaggtaggtcgtttagattatttgatttgttgattgtctgttatttttgactggtatcatatttcaatttacagtcctatccaaggcggtgttgatgcaaaagagttgtttcatctatatatcatgatttggattcaagataaacgccttgcattacttgagtcctgcaaacttgataaggtatgtatactgaaatttccgagtggttttcttcagatatttttttttctctatattttcccttgctctttgttcttctcagcctatgtcgtatcattaaaactaacttctttgatcattacaaaacctgtcattcaagcaggtaaaatggtctggagtcaggacacagcattcaacaactccattcgttgatgaaatgtacaagaggctgaacgaaaccattcaagactatcaagttatcatttccagatggccagaatatatctttgttctggagagt

SEQ ID NO: 138661 - DNA, 667 bp, Arabidopsis thaliana landsberg
atgctaaaaggacgattcattaaaatgttgcagatgaaggggaatgtatgtttgggaatcttgaatggcacagaaataggtctccagaacctaaacctcatcggcggtacagtctttatattacatacattggcaatttccttatcttggtttcgagattaaatcaatgtttctcctttctattgaacagatatatcgatgcaagatcagatgataatctacgataacgagaaacaatcaatcgggtggatgccagtggattgcgatgaacttgcttcactaaaagcagctcaagtatatgaatactgagaatgttatatatagttgggacaagcaagagctcatagttgtaattagatatttgtatgtactgattggatcaaatcctatgacaattgagttacatgatgatacttatattacaaagtgactttaaactttttaagtagaaatttagttttgactgttgtgaagtttcttcttactcgaaaaaatcacaactttaccacaaatatctccgttgccggcgaaatcactttgctcactctctcaactttgaaaggagactcaagtttctcactttctctcttccatggctttctcatactctttaacttctccgtcaccaaattcgactctctcctattccagtacccatcaatttctc

SEQ ID NO: 138662 - DNA, 1037 bp, Arabidopsis thaliana landsberg
atggatcttgtaaagccagaggagataagtcacccaccaatggatcagcttcagggtttagagtactgtattgactcaaaccctccatggggtacttagccttgaaaccattctctgtactttattggttgacttttcactttccggaatcctgatgatgatcttattgcaggagaagctatagctttaggtttcgagcattacattctggctttaggaactgcagtgatgataccttcaattcttgttcctatgatgggtggagatgatgtgagcattatttcttacattcttcactgtttcttaatccaacgaatctctgttgtgaattttgcttgtctgactgagattaatgttcctcccaaaaacaattgagtagggtgataaagtgagagttgttcagacactactgttccttcaaggtgttaacactcttcttcaaacattatttggaactcgtcttccaactgtcattggaggctcatatgcattcatggttccaatcatttcaatcatccatgactcttctttgacccgtatcgaagatccacaattggtatgtttgttcttctctttgaatagtattctcaagatcctaactccatactaatttgaatctgaaattaaacagagatttctaagtacaatgagagcggtacaaggcgcgatcatagttgcatccagcgttcaaattatcctcggtttcagccaaatgtgggctatctgttcaaggtatatatatacatacatatttcagtacttgttatcatataaaggtttatagattttaacgagttttcatcttaattttttttcagattctttagtcctattggtatggttcctgttattgcattaacaggttttggactcttcaacagaggattcccagtggtacattactgtcattcctctctttaaacatccaacaatcatcccttttggttcttattttatactgttcgtgttgtttgcaggtgggtaattgtgttgagataggactccccatgcttattctctttgtcatcttctctcag

SEQ ID NO: 138663 - DNA, 1749 bp, Arabidopsis thaliana landsberg
  unsure (1)..(1749): unsure at all n locations
tcagaataaaaatgggttcgagtaagtttaaacgagccataggagccgtaaaggaccaaaccagcgtcggtctagccaaagtcaatggtcgaagcgcttctttatctgaacttgacgtagccatcgtcaaagccactcgtcacgaagagtttccagcagaagagaaatacattagagagattcttagcctaacttcttactcacgcagttacatcaacgcttgcgttagcacgctttcgagacgccttaataaaaccaaatgctggaccgttgccctcaaaaccttgattttgatccaaaggctcttaggagaaggagatcaagcctacgagcaagagatcttcttcgccactcgccgtggaacaaggcttctcaatatgtctgattttagggatgtttcgaggtctaattcttgggactactctgcgtttgtcaggacttacgcattgtaccttgacgaaaggcttgatttcaggtaagagttcttgtgcttgatccaggttccgattcgggatttcaagttatttatgtaatttgaatgatatctaagatatgcgtttttttttttttttcattgcaatttttgaggatgcaagcgagacacgggaaacgtggagtttactgcgttggaggagaagctgacgaagaagaacaggatcaagctgcggcagatctctccacggctatcgtggtcaggtcacaaccgatcgccgagatgaaaacagagcagattttcatcagaatccaacatttgcagcaacttcttgaccgtttcttggcttgtcgcccaacaggtaataacttgcgcctcaagatttctttctctgtgtgtgtttgtttcttggataaaaatttatataaggaccaatgttattttgttaacaggtaatgcgaggaacaacagagttgtgattgtggctctgtatccgatagtgaaggagagttttcagatatattacgatgtaacagagataatggggattttgattgaacgattcatggagttagatattcctgattcgatcaaggtctatgacattttctgccgggtctcgaaccaattcgaagagctcgatcagttctactcttggtgtaagaacatggggatcgcacggtcttctgagtatccagagatagagaagatcacacagaagaagcttgatctcatggatgagtttataagagacaaatctgctttagaacacaccaagcaatcaaaatctgttaaatctgaagccgatgaagatgatgatgaagcgagaacagaggaagtaaatgaagagcaagaagatatgaacgcaataaaggccttacctgaacctccaccaaaagaagaagaagacgtaaaacctgaggaagaggcaaaggaagaagtgatcatagagaagaaacaagaagaaatgggtgatttacttgatcttgggaatacaaacggcggtgaagcaggacaagctggagatagcttagcgttggctttatttgacgggnnnnnnnnnnnnnnnnnnnnnnnnnnnnnnnnnncaggatgggaagcgtttaaggatgattctgcggattgggaaacagctttggtgcaaacagctacaaacttgtcaggacaaaagtcagaactcggaggaggctttgatatgttgttgcttaacggaatgtatcagcacggcgctgtaaacgctgccgtgaaaacatcgacggcttatggagcagcggaacgggacgagtatggcatttggttctgcagaagaccagcag

SEQ ID NO: 138664 - DNA, 2447 bp, Arabidopsis thaliana landsberg
atgaagaaagaacctgtccatatccttcctctgtaccttccatgtctcttgatgtttcttctttcatcactccgtcaaatcaccggagacgcaagggctagagccgttaaagtcacttgctcacctttgcttgagcacaacgaaaccgcttatgtcccaaatttcgtagccacaatggagaaaatcagcacacaagtacaaacttccggttttggagttgctctcaccggtacaggaccagacgctaactatggtcttgcgcagtgctatggtgatcttcctttaaacgattgtgtactctgttacgcggaagcaaggacgatgcttccgcagtgttatcctcagaacggaggtagaatctttcttgatggatgttttatgagagctgagaattatagtttctataatgaatacaaaggacctgaagatagcatcgtatgtggaaacacgacgagaaagagtaagacttttggtgatgcggtgagacaagggctgagaaatgctgttactgaggcttctgggactggagggtacgctcgtgcgtctgcaaaggcgggtgaatctgaatctgaatcagcgtttgtgttggcgaattgttggagaactttgagtcctgattcttgtaaacagtgtttggagaatgcctctgcttctgtggttaaaggatgtttgccatggtcagaaggacgtgcgcttcacactggatgtttccttcggtactctgatcaagatttcttgaataagataccaagaaacggaagatcaagaggtaacacaataaaaagattcatgctttctatagaatctcattcgcttgatggtcataagtaattgtttttgcaggctctgtggtagtgattgtggtgtcagtacttagctctgtggttgtcttcatgattggagtagcagtaagtgtttatatctgcaaacgtcggaccataaagaggaagagaagaggtaagattagtttcttgatttgtgatgaattggtttaagaaggattgagtgtttttaaccgagatctttggtgcttaacaggatcaaaagatgttgagaaaatggcgaaaacactaaaagacagtagcttgaatttcaaatactcaacactagagaaagccacaggttcttttgacaacgcgaacaagcttggacaaggcggatttggaactgtctataaggtatgtgtgtgtatgatcatgtctctctttctataccttcctgtaaagcaaatgagtgatatagtggtatctctctggcttgtttagggggttcttccagacggaagagatatcgctgtgaagcggttattctttaacaacagacatagagcaaccgatttctacaatgaagtcaacatgatcagcactgttgaacataagaaccttgttaggctgcttggttgcagctgctcaggaccagagagtctccttgtctatgaataccttcagaacaagagccttgatcgattcatctttggtaactactactaataatactatatgatgagtttttattgttgaatcttgaatgcagcagcacactaaacctgtcttcattattacttttgcagacgtgaacagagggaaaacattagactggcagagaagatacacgatcatcgttggaaccgctgaaggattggtgtatctgcatgagcagtcgtctgtgaaaattattcacagagacataaaagcaagtaatattctgctagattcaaagcttcaagctaaaatcgccgattttggtctggcgagatcattccaggacgataagagccatattagcactgccattgcagggaccttgtaagtatatattcagaaaaatgtaccatttcttcaaaaagatatgaatgtttgagctgatccaatacttgtgaaactgcagaggttatatggctccggagtacttagcacatggtcagctaacagagatggtagacgtctacagctttggagttcttgtactagagattgtaactggaaaacagaacaccaaaagcaaaatgtcagattactcagacagtttgatcacagaggtaagttagacatattttgtctatgggtctgcaggtttcacttctcaaactaattgtggtgttatgttttttattgaaggcatggaagcattttcagtcaggagagttggagaaaatatatgatccaaacctcgattggaagagtcagtatgacagtcacatcatcaagaaagagatagcaagagttgttcaaatagggctattgtgcactcaagagatcccttcgctaagaccaccgatgtctaagttattacatatgctaaagaacaaagaggaggtcttgccattgccgagtaatcctccgtttatggatgaaagagtcatggaacttcgagatggttctgatggtgattcagctggttgtgcatctcttgccactgtctcacaaagttccttttatggtagatga

SEQ ID NO: 138665 - DNA, 1056 bp, Arabidopsis thaliana landsberg
tcgtaacaacttcacaatccacacctctctatttaaacagcgtttcccacattttttcatatattcatcaaacaaatctcaatcagttcaaaatcatcttccaacacaaaaaaaaaaaaacagagcaacacttaacgataacattctccatgatgatcaagcaatcaccattcttgcttttaacaacaatcttgttcacggttgctgtgtttgtagcagcgcttgatcctgcacctgaagaccccattttcgaactctacatgcacgatttacttggaggaagcagccccaccgcgaggcccatcacgggtttgctcgggaacatttacaacggtcaagttccatttgctaagcagattggtttcactcctcctgagaacggtatagccatacccaatgcaaacggcgcactaccaacggttaacggcatcaatggtgtacctcttgggaccggcttgtctggtacagcatactctggtcagaacctaaacggaattcagactcagttgggtcctgatggtctcagtctcgggtttggtaccattactgtgatcgacgatatactcacatctggtcctgacttgggttcacagccacttggtaaggctcaaggagtttatgttgcaagttctgcagatggaagcacacagatgatggctttcacagctatgcttgaaggaggagagtacaacgacaaccttaacttctacggaatttacaggatcggaagcgccatgtcttatctatcagtgactggaggaacaggtaggttcaagaacgcttgtgggtttgcagaggtcagaccattgattccatcaggtcagcatgaagtggatggagcagagtctttgcttaggatcattgtccatctgaagtactaaacaaaacccaaaagtagccttaccaaaagatttcaaatttctacatgtgtgcgtgtgtgtgaatgttcttttgttgttgtatgtaacagttattgatcgaaagcaaatcatcgaaagccatgaaacttctaagattgttaaaagtgtattttttgaacattgccttaaagtctaa

SEQ ID NO: 138666 - DNA, 431 bp, Arabidopsis thaliana landsberg
atggttgttattctttcagccagcaagccattgacaaagcacttgaatgtcgctattattgacaataatcctcttttggggagaagaaatatcatagagaaagggcatcaacctgatcccagagtcagtacagtcacacctgcaacaatatccttcctcaaaggtacgtagtggactttctcgtttcttcccacagtttctgctcattattctttcaaaatggtgtgaactctcaattgcgtaagcttaatttaatatgctggttttgccacttggaacccttatttgagctcaggctttgtcctcattcagtccatggatatcctttttagttattactttggaatcatgtatttggtttgaattatgcagatattggtgcctggaaatacattgagcaacagcgacatgcgtattttgataagatgcag

SEQ ID NO: 138667 - DNA, 2250 bp, Arabidopsis thaliana landsberg
caatctcacgtcagatctctcctctctgagctctcatcacgagtcaacccctttctcagtcgaaattcgcatgcttaaactctgagagaagaagatgactatgacggagaagaaaccaccttccgacggcaaaggaggttggggtttcttcaagattccatttcgtaactcaagcggtcacagaaacgccgcttcaagtgctgctacttctccgtttccatctggagcttcttcttcttctacttcttctcatctacataaccatcatcaacatcatcatcaacatcaccatcagcaccatcatcagcttggttataccggtcctcacggtgatggatcgggtcaaaatcaacatccgactccttctccttcagtttcatctgttgctaagtcttttcttcctactaaacgaagattgaagcttgatccttctgagaaactctattttccttgtgagcttttttcgaatctcattttgatcggagtagtttctctggaattacagtctttttttcattgtctagggtttgtttctgaagatttgagatccattgacactagtctaaaatttctatcttttagtagaatttgagtatttgactgatctgattatgtggattgatacataagtttgataattgactcaataggaaacataaagtttgaaactttttggaagttaagagcagaatcttgacattggattataattctaacttaccattgctctaaatatggtcttcctttaagcattctgaaattaggagtcttttatagatacgaatgattttagctatcaaatgattttgcaggaaggttttggtgtatacttaggccatgttttttttttcttcatgatttggattttggaagtttagttgttttctgttacaagtaatgctgtggagtactgaattagattattactttgttttgaagatgagcctgggaagcaagttaggagtgctattaagattaaaaatacaagcaaatcacatgtagccttcaaggtttgttttttgatctaaagcgttttggttattgggtctttggcattattgtatatgagcttactcgttgctctttcagtttcaaacaactgcgccgaagagttgctttatgcgtccacctggtgctattcttgctcctggagagactattattgctactggtatttgttttttttgttttctcgcctctgttcttattcttcttgatgaggctatcagaacaatggcttattcaatgtttctctgattgaaatgtgcagtgtttaaatttgttgagcctcctgagaataatgagaagccaatggatcaaaggagcagagtgaagtttaaaatcatgagcctgaaggtgaaaggtccaatggactatgtgcctgagctggtatgttgatcttctgatcttatctattagctgatctttgaacatgaaaacagtagtaacatatccgaatccagatagaacataagatattgacccatctctaaaacataagatatcaatgactagactaagaatgtgttttggtctgagtagaggtttccagttaccttttaaggcacaaacatataaccaagcattccactgaatgctgtttccatctaaaagacatatctattgcttttgttcttgtttttttctcagttcgatgagcaaaaggatgatgtctctaaggagcaaatattgcgtgtgattttcttggatcctgagcgctccaaccctgtgagtatccgaataattttgcttatgatgacgattctattattttacgacctccctctttaataatctatgtgataaatgacataggcattggaaaaactgaagcgtcaattagcagaagcggatgcagcggtggaggcacgaaagaaacctccagaggaaacaggtccaaagatgattggagaagggcttgtgatcgatgaatgggtcagtctcatttgctatccagtgtctcttccattagatgattgtgaaaatctgacattgtttttgtcttacctctaaaaaaaacacagaaggagcgtagagagagatatcttgcacagcaacaaggcgaaggagctgactctgtctgagagactaaaagagttttctcaggacaaaaacaagtgcgcttgtgaagatgaagaagaagggaccgctatattgaatttatatgctaacttctagattcacgatgcaatatattacgatcatgcttgtaaaaaaaaaagacaatgacggaacttttttcatgaaaaa

SEQ ID NO: 138668 - DNA, 145 bp, Arabidopsis thaliana landsberg
ctgtatctctatcacaaaatgatgggaaagctaaatcagcggtcactatggcatcttgcagttcgtggtgctttgtactgtcggtgtctctgctgcatgaatgatgctgattttgctgattggccaaccgttcctccaattccag

SEQ ID NO: 138669 - DNA, 1551 bp, Arabidopsis thaliana landsberg
ccctttctccaacacctaccaaaagcctctctctctctctagttcttgatttttcaagatttcaagaaaacatggctgaccaaagtggtgggttggttatgatgagagagtacagaaaaggcaactggacgttgaatgagacgatggttctcattgaggccaagaggatggatgatgagaggaggatgcggcggtccatcggccttccaccgccggagcagcaacaagatatccggagtaataaaccggcggagctacggtggaagtggatagaagattactgttggagaaaaggttgtatgagaagtcagaatcagtgcaatgacaaatgggacaatctcatgagagactacaaaaaagttagagagtacgagagacgaagggtagaatcgtctattaccgccggtgagtcgtcttcatcttcagctccagctggagaaacggcgtcgtactggaagatggagaagagtgagaggaaagagagaagcttaccaagtaatatgttacctcaaacataccaagctttgtttgaagttgttgagagtaaaacgcttccttcttctaccgccgtaaccgctgtaaccgctgcagttgcggctgctgctgctgctattagtagtggaaacggttcaggcggtggacaaatccataaagtgatacaacaaggtttaggatttgttgttcctaaagtacatcaaatcattcagcagcaacctgttttgttaccacttcagccaccgccgccaccaccaccgtctcagccgttaccacgaccactactactgccaccgcctccaccgccttcttttcatgctcagccaatactgcccacagtaggtaccttctttctctctcttcttaacttctaagtttagtttttattatttgagagttaaataatctgacatttaaagaaaaacatacatttgtaatttatgtctgattacacttgagaaataatatctttaatatacagtttaatgcacactcttatgtatacttttgtttgatacaactcttaattaaacactttattattttcagtgaagaagtacaaataatatatacattacattatctttaatatttttttatattaacaagttatttggtttggattatgtttaataactttgttgaagaaggatagtagcacagattctgatacaagtgagtattcagacacatctccggcgacggaggagaacaatgccgacaaccacaaccgccggtcccagcggcggcggtgtagatgtggaggaggttggacgtagtaagagagatgaagagacgacagtagcggctgcgttatcaagaagtgtgtcagtgatcgcaaacgcgattagggagagtgaggagagacaagatcggagacataaagaagtgatgaacgtacaagagaggagattgaagatcgaagaatctaatgttgagatgaatagagaaggcatgaatgggttagtggaagccattaataagctagcgagctccattttcgctttggcttcttcttctcgccataataatcagcatcaaggaggtccaccatag

SEQ ID NO: 138670 - DNA, 66 bp, Arabidopsis thaliana landsberg
atggacgaccaagagtttcgtagtctcctcgacctcttcccagtcgtacgttctcgtgaccaccgt

SEQ ID NO: 138671 - DNA, 302 bp, Arabidopsis thaliana landsberg
gcgggttcagaatagtgacagtttttgactacgctgcgattgctatgatcctgattctacgcttagtagggatatatcggaggagacgcctagctcagcaggttagacatctagcagctgcagcaattgagccggaattagagcaaagggaattgtaacagacacgtgaatctattaagtcttgtgcagtttgatccttgtggataagtttggtagtagatcatagaaacctcgagagtcgtgtgcagttttacagacaatgatattgcagactttaaaagtatatacatatctccttttct

SEQ ID NO: 138672 - DNA, 4202 bp, Arabidopsis thaliana landsberg
atggcgggtaatgagaacactcaaaatcgagcagctcagactagagaaggaaggaagcagctctttgcagttttgcaaagtgctaggggatcttcaggtgaatcttgaacactaatgttattcaaacataacaattgatactcttcttaagctgtatggatgtgtctcttgagagtaaccaatcctctgttaatagtatgggttgtgggttcgaccagagtcgttcgtatcaatatccggctttctaacatgtgagatgattaacagcttctgttctaaaggaaaagctttcgtctatgggttcctctggaattttagccgagcatcaacttcaagctctgctacaggagcacaaggggtaggtggatatttctcatgcaatcactgttggaaaatttcgcaaaaaaaagttactagcatgtgctgtgaattccgtaccaaatgactcaaatttcatctgcttcatagttcactctgttacttttctacagccagagtcagctaacaatttcagatatcgcacggaaggcgttcttgtatagtgtatgactgctttaccttcttgcttagacattatgtttgttttattatttggaactattttgagcttagtccatgaattaatccgtacagcattttatggagggtcatgccaaaactgctccaatatcaaggttaccccttattacggtcgtggatacaaaggatcaacttaaagacattcctgtttgccaggcatgtaactgttgtttagtgtttcttttctgtagtatctgatttatgcctgactgattggattatctgacagccatttcatttggagctgaatttcttcaataagccaaatagagttcttcattatcctgtgaggtccttttatatcgagggccttaacctcatggctcacaatctctgttctggaacagacaacatctacaagaagctgtacacatcggtataatctgatatcatgtgatttcgttttagtttttggtttccttttacttacagaacttttctgtttcagatccctggaaatgttgaatatcattcgaaacacattgtttacagtcgtaaaaggcacctctttctggttgtctttgagttcagtggtgctacaaatgaagttgtgctttactgggaaaatacaggttcccagctgcataatagcaaaggaagcactgctaaaggtttgtctaatcattggattcccttgctattctttagagaacttcctatcctgcctcataacttttagttttgaaaacattaaacggtatcatactgcatccagtcatttaaatataccaggggtacaatgtatgctataaaacagtagttactaacaatcaaggaagctgaacgtttcaacgaatgatctgtttacttgatagagatgcaagcttagaattatttaagccgttcatcctttttgttttcctatgtttccaaaggcgtaaacgaacaagagaagagtaacctcaaagctatacttttttggtatgcaggttgtgatgctgcctttatcggcccaaatgacgatcaatttgcaattcttgacgaggataagacaggactgtctatgtatatcctcccaaaacttaccacaatggaagagaatgagaagaatttgttatctgaagaaaaccaaaagaaagaggcggatccttctggaattcagggtccacaacaattcatgtttgagacagaagtcgatcgtgttttttccacaccgataggtgatgttgcatcagataatctcattcttgaagttacagataatctcattcttgaagttacagataatctcattcttgaagttacttatcaattggagcatgccattgctaactgatgcctctttaaattacagagtccactctgatgtttgcttgtaatggaacccaaattgggctggcaaagttgtttcaaggctaccgtctctcagcttcagatggtcattatatttcaacacaaggtgagggacgaaagtcaatcaagttgaagaaacatgaaatagctcttcaggtatgcaacatctattataacttcgtactgtttattagtagtttggtgggaaattttccaaccaaataaacttttgatatctagtatttgattctatgaccagctcagtaaatgcagtcgttttattccttaccctttaatgtggtttacatctggccggttctctttgaaattaaaacgatcatgttcagaaaattgactcgtcatgttggtgttagcgttctattgctgtcaaaaattggttgaatcgacaattgatattcctgaaattttggtcaatcaacttttgtattacgtagagattcttagaatatgttttagatttctaaagtagttttttccatcaattgtataaagaactaattgttgtctcaaaatgtacaggttcaatggcaagaaacaccccggggatatgtcgcagggatattaacaacccaaagggtgctgatggtgtctgcggattttgatatattggcaagcagttcaacgaaatatgatagaggcttaccatcaatatcctgattaaactatctttcttccctttcaatcatgtgcattatatgctaacactttttagatgcatgctcattgactattgaaaatccttaacttatgcgtactttagatctcttctatgggttgggcctgccttactcttttctacaacaactgctgtatgtttacttggctgggatgggaaagtgaggactattctttccataagtacaccatacgcaggtaagtagatcttgattctctatatgcttaaggtgattttactgtatttcattctctgaaatttatcctcttcaacgcagccctagttggtgccttgaatgaccgcctattgcttgctcatcccactgatataagtccgaagcagaaaaaggggatcgaaatcaagagctgccttgttgggctacttgaaccgcttttaattggattttctacaatgcaacaaacatttgaacagaaagtagacctttctgaaatattgtatcaaataacaacaaggttaccccctttccttttttctttgcttacacgttgttacatatttaatgtcaaatactttggaataggtgtgcaggatacatcaatgagtttctttgtctctttccctagctatctttattgactgcattccatgctaactatattagcttctttttttatatatataatggctgcaggtttgatagcttgcgaattactccaagatctcttgatattcttgctagaagcgctccagtatgtggagatcttgctgtatcactagctcaagcaggccctcaattcaaccaggtgagtcgagttcagtagatcttatgaccagaactctcccccagaagatgtgttctcttactaaacggttttgaaaaaattaggtattacgttgtgcatatgcgataaaggcgcttcggttctccacggcattgtcagttttaaaggacgagttcttgcgttctagagactatccaaaatgtcctccaacttctcttttgttccagaggttccggcagcttggatatgcctgtatcaagtaagtaaactttctttgcaggacatatgtagcatctgaatatctaaaaaatatagttagttattgttggatggcctattcaaagctacaatatgtgtgggagttttagcgtatcttgaactggaccttgaaaagttaatctcaagtatttttaccgcctccccagtcactatctatagttagttggaactccgatataacacttcttgatccttgtacctaaattacatccctatgctagtttctcatggcaatatttttggcaagcttcagtcatctaactactttgtacattttgtactgtagatatggtcaattcgatagcgcaaaggaaacttttgaagtaataggcgactatgagagcatgctagatctttttatatgccacctcaaccctagtgctatgcgtcgtcttgcccagaaattggaagaagaaagtggagatcccgagttgagacgatattgtgaaaggattttacgagtacggtctacaggatggacccagggaatttttgctaattttgcagctgagagtatggttccaaaaggaccagaatggggtggtggcaactgggaaatcaagactccaaccgacatgaagagcatacctaagtgggagcttgctggggaa

SEQ ID NO: 138673 - DNA, 306 bp, Arabidopsis thaliana landsberg
gcattttgtacatccctgggatgggtcctcttaacaatgaagatgttacaaacccgaaaacaaagaacattcgtctctacgtgaagcgtgtgtttatctctgacgattttgatggagagcttgtgagtcttttatgggttctttcttatgtagaaatctctttagatttgtggttcaatttttatctgactatgttacctaatctgtttgcagttcccgagatatctgagctttgtgaagggagttgtggactctgatgatcttcctcttaatgtttctcgtgaaattctccaagaaagcagaatt

SEQ ID NO: 138674 - DNA, 148 bp, Arabidopsis thaliana landsberg
gaaagtgaggactttgatcaccggaaaatatcatatccatgttcggtgtcaggcgttcatcaatcttggaaacaaagctgctggtgttcttgtcggtgataacgccgttaagtacacgttggctaataaatgcagtgtgaacgtttag

SEQ ID NO: 138675 - DNA, 2797 bp, Arabidopsis thaliana landsberg
gcacacaatacaaaaaataagggtttctttatcttttcgtttcttccaaattttgtaatggatttgatgcaaatggataagcgtttggattcaacggagcaagtggttgaagaaatcatgagaattcacagatctctacccgcaagaccaggaattgacgaagttgaagctgccaagggtttgattgacaacgttgagaaagaagatcaagcttgtttagaagccattgctagacagaggaaaagctctgaagttcctggtgagcttttcatggtgttgcaagaaatgaagaagggttatgttcagtttcgtagcaaagaacagataagagaagctttgaagcttctcgatctggaatctgttcactctttgttcgatgatttcattcaaagagcttctaattgcattgcttctccttcctctaacggctctgtttcgtctcgtcctccgctgcctccggcgactacgacggctgctcgttctgattctcagtcaagtttgaatttttctgagagagctcccgttcgccccaaggatatggtttcgcgagacgatagcttcgtcacaaagtctaagccttcttctctctacagtgatggttttgcagctcctcctcgaagaccacagattctcgattcaacacttaccaccggtaagttaacccttctcttctcttagtcccgttgattcaaagctctagtttactcaattggtactcgaacttatgattctctagatatagaaagtttaggacttggaattgtttaaagtttaaaccttgcaatagattaagttagtaactgtagtgtgaatcgtttgttatgtgtaggcaatgatggagagaagctgagtttgataaaacttgctagtttgattgaggtatcagctaagaaagctacacaagagataaatctacagaacaagttaacggaacaactcgagtggcttccagattctcttggcaagttatcgagtttaacttcgcttgatttgtctgagaatcacattgtggtgttgccaaacactataggaggactttcttccttgacaaaactcgatttgcattccaacagaatcggtcagcttcctgagtctataggagaattgttgaacttggtttacctcaatcttggtagcaaccagttatcatctctgccttcagcgtttagtagattggttcgactcgaggagcttgatttgagctgtaacaacctcccgattctccctgaatccataggttcgcttgtgagtctaaagaagctcgacgttgagacaaatgatatcgaagagatcccatattctattggtggatgttcttctctgatagaactccgtgcagattataacaaactaaaggctcttccagaagctattgggaagattactacattagagatcttgtctgtgcgttacaataacatcaggcagttacctacgacgatgtcttctttagctagcctcaaagagctggatgtgagtttcaacgagctcgagtcagtgccagagagtttgtgttttgccactacacttgtgaaactgaatattggaaacaatttcgctgacatggtatcgctcccgagatcaataggcaaccttgagatgcttgaagagcttgatataagcaataatcagatccgtgttctacctgactccttcaaaatgcttacaaagttgcgtgtgtttcgtgctcaggagaatccactacacattcctcctcgtgatatagctgaaaagggccctcaggttctgttctctctctctgtgtctctctatgtcatcatgtgtctagattctaaatggtactcactcacggatgagttcatcatacttacaggccgttgttcaatacatgaatgatcttgtggagacgagaaacgcgaaatctctaatggttaagccaaagaagagctgggtccagatgtgcttcttctcgaaatccaacaagagaaaacagagcagcatggagattgtctaacacagctgataatgtctctgaccctaaatcaggtaacactttcctttaattcccaaactcaaaaatcaagattcactctcagtattatacaaatacaacaaataacacatgttttgtttttccctccttcgttcaggtaattctgttaaagctgttgacagcacaagtgacaaacatatccagctatcttcttcacacgacaatgcattgatttgcattgcaactccaagtactgtagatgtttcactattcattctttgtttgtttctttcttcactattcacatgtatcaatgtgcacaacattgtttcattcatgtctctccacatatcatagagcccatcccaaaacagaatcgaaccatgtcccttgtagattgaggttttcattaagctcttaccatgtttgtctatcgtctctggttttgtttctttggtttgaaacttaagacactcacatctgtgtatatggatagagatgtgatgtaaatgtgatggctttgaagtttagaggagagatgtgacatgagttggctttgaacgtggttttgtctagagagtaacttggttaattaatactcccttgtaataatgcaacttccttttggttttgttttgtctatgtgtataatcgtcacgagacatggtctttctttcatgtgtgttatcatattatgatacatgtgacttcacatgtgaaccaatgaatgaagcaaaactttgttcaacatcaaaaccccatatctctcttcattctgtggaaaaaaacatccagtccatacagagtctttattgggctggatctggggttgcattatttagg

SEQ ID NO: 138676 - DNA, 1314 bp, Arabidopsis thaliana landsberg
atgtcgacaacaggatccgatgatgttcgggtcatgacccgcaagagtatggatgatccaggaagacctccgggtattgttcttagtgcagctacttcattctggatcccagttgctcccaaacgtgtttttgatttcctccgtgacgaaaattcaagaaaagaggtaatgcaaaagtttaaaattattacttcagaccaaattgaataaacaaagaaaatagggttagaaccttgcgagtcacgatttgtagatttaggtttgttaatttaggttttgaactttgatgcagtgggatattctgtcaaatggaggtatggttcaggaaatggctcatatagccaatggtcatgaacctggaaactgtgtctccttgctccgagtcaatgtaagacttgacattattaactatcgatattttctctttgttttatcgttttcagattgaggaaactttgttgttgttgtaaacagagtggaaactcgagccagagcaacatgttgattctacaagagagctgtacagatgcatcaggatcgtatgtgatttacgcgccagtggatatagtggcgatgaatgtggttctaagcggtggagatcctgattacgtggcgttgttgccgtctggttttgctattttaccggatggttcggttggaggaggagatgggaatcagcatcaggaaatggtttctactacttcttctgggagttgtggtggttcgcttttaaccgttgcgtttcagattcttgttgactctgttcctacagctaaactctcacttggctcggtggctacggttaatagtctgatcaaatgtacggtggagaggattaaagctgctgtttcttgtgatgttggaggaggagcgtagttttttttcaggtatgattccacaactaagatcttaaccgaatgggattcttgtggagcaagtaacaagtgttttttccttatgcagaagaagtaagaataagagaaaaggaaggattaagagcggttatggtttctcattttgtgttttttgaaatccaaaggaagtcaagaacgcaccttttgcgtttaatttcatctcaagctgatgaaaaaaggtaaagtggttcgggtattgacttctgctggaaaccacggttttaaattgtctattttgcgtttcgttgacagttttttgaacaccttttgggtttcccctttttgcgttctccgacccaagttgtcagtttctttgttgttttgtattgtaagcccttttgttgcacttgacagatatggagttaaaatctttgttattagtacactactagtttctgtt

SEQ ID NO: 138677 - DNA, 3116 bp, Arabidopsis thaliana landsberg
  unsure (1)..(3116): unsure at all n locations
atgagaagacagggaaactttgcggactcatcacctgccagtgcatatggagctggacagatacaggatccccattctgatttccaaggtcaattagaggcattcacgcctgagagggatcagccatattcagattcacaagctgagggtcaatggagatgggaaagagatggccctaatatgtcaaggccaatggctactgccgcttacaatgaaggttagtctttacttcatgcgttggtgtttctagtcaggtctttgtgtcttagcattattcagaagagcaaccatcatctgatgggtttagcgtcttttattatgaccaacagttcttcccttaaatcgtgagtgttccaatgacattttacatgggatgagaggagtattagttctggttgagatatttgcagaaatctttagaggaaagatctgcatctagtgtctctcgagctttaggttttatcgcttgattccagtgttctgtttacacaggacaacaaggtgttgattcatcgaggacgtattaccgtggccaaatagatccaaaatcaggaatggagaagcaaggcagtgatccaagagctcaaccacaacaccaagaaaatccaaaaaccggttaatgataataaccgtggggtgcagacatttgaaggtcttgaacagaagttcatggatgatataacaagactagcaaaagatcaaatcgaagcagaggatgcagagatcgccagacatcgagaggttagcaacaaattggaaagttctgctactgaatcactctagtttgggttttaattagttaatctgaactctgtgtgcagaaaataaacactataaacgctagatacgaagaacagttagctacacttagagcacggcacacaggtaagagagaagagatcatgaggaaagaatcacaagctaggcagcaacaattcaagcagcaaaccatggggatgatggaccaataccatccaaacgtggttggtcaggccaatttaatgccatctggtcatccccaaggctacattggcagtgctcaagatccagcggctgtggcggatgcaccaccaagatcatatggctcagatcggtttgaagcatacggagagagagctaggtttcagggaggaaacagagatcacgggttcgagcctaggggtccataccctggtgggaatgtctatgacaccagctcacggttctactgatgtgatattacttgaacatattgtgttttaggggattcactcactcccactttttttgtggctttatagatcaaaatcaagcttttcagactatcctgaatttgaaaatgaaatcagggttccattttttaatcctgacgagagcattttagaattcattgttgaaccgtttaaagaaattgctgtacttaggtactttccaaataaaaatnnnnnnnnnnnnnnnnnnnnnnnnnctaatttaatagccaatttcacaaataaaaaccataatgtaatttagcattttttgttcttcgttatatcgactaatttatacagttaaaatatcatccatttcaattcaatggaaaccttagtctttgaaaaaatagatgatacttgtcaaaataagtaaataaagattattcaggaaacaggttaaatatgttttatgttttttttgtgtctgcaaagttaaatatgattttatgtagaaacataaattcgttgtcaaatacaaaaaaatgcgataatttacaaaataaaaattatgacaacaatagttagaactttgtgaaataaaactaatcatataaatagtgttaaaaataaaataaaaataatcatataaatttccctcctttccatatatcatcatcatcttcacaatcacaagagacaacacttcccacaaaaataaaaaacaaaaaaaaataaaaatttggccaaatctctctcttttttttgcttcttcgttgtagatgctgctggttgtctgaaaaacatttatctttcgctctgcgaatcttcctgtgcggaggaggaacaatgaacgggacatcgcccgacgaatctcccgattcgacaactcagcggatcgattcgttcaacggcgagcagagagtctacttcgttcccttgaggtaatctcatctccttcttcttcttcttcttcttcttcttctctctctatcgtaatcgtttgatttcatgtcgtccatcttccttttgattgagggaatattcggcgaatctgaatcgcatccgagtgagtttgattttgaatcttgtgggagcttacaaaaacttgatttgatctaaggattctggaacttatggatccttttcggatgtataggagatggttatccttgttttaagctttatagcgatgtattgtttcaaacatctagctgaagaatctaatgaatgtgatttcgatttactatgtggcgagatttgcttttgtgttctttattatgattaggtgatatatcttattcactttgaagaatttagtgctcagcaattcagatttcatagacaatgacagttgcgtaatcacttttgcttactttcttaagcctaagaggctatgttttgaggctttagtgttgattgaaatatatatggagtgtcctgatatggtttcgtgcacgatcgttgagtcaattaaagatctacgatatacgatactctttttttttttttcagatttatataagtactctcaaatggtatttggaaattagtcagttaagcaatgtgatatttaaacttggaattttcaggtggtggaaagatgcgcaagattcaatgccttctgaatcagttgaaaaaagagagatcttgtatacagcaagttgcgggtcgtcttatggaggcccaatgaagttgataaataacatttttaactctgatattttgttcgatctgaggagagaaggagatgcgttacagaatggtgaaacgggagaagcaagcgtctcaggcagggactttgctttggtctcaagtgatatgtggctgcaggcactaaaatggtaagtgttgttttctctctacatatctgatgcttccttctagaatggcttgggtaaatctgtcactatccttgtcatttttagtgttacatccaattga

SEQ ID NO: 138678 - DNA, 623 bp, Arabidopsis thaliana landsberg
cactgcagccttcttgccgtacccggcttgagtttaccaacacagaagacttactggaggagaatggatgttgtaacgaggaggatgattcgtctgaagtgattcaaatggcagctgagtcattagtccacatatcggagatatcgtatcaaaaccaagacttgcaatcaaagcttgtgttaagaaccaacagctcatctgaagatcaagattttccagataaaccggagatgggtaaagcgaaaccgggatgttcctacgattcatatgagcgacacacgttaggaataagcgaaaccaacactgaagaagacttctgtgtgtcatcaatggctctagatgaacttaataacatcacaagagataataacaaagagattggactcaagctgagaagagggagaagaatgaagaacttccaaaaagagatactcccgagcttaacgtcgctttctagacatgagatccgggaagacatgaacatcttggaagcagttttgagatcaagagagtacaagaagatgcagggaaagacgaaagatgtcaaattcaaagcaaacccaagaaacaaacgttcaccaccacaaagatgcgttggtaaaagaaggcgaaaaaccgaatga

SEQ ID NO: 138679 - DNA, 4232 bp, Arabidopsis thaliana landsberg
gtatcctactttaccgaaccaatacttcttatctcttccgatcaagcagcttgctcatgctgaaggagctctcgtggctttgtgggtgacaaatagagagaaattactaagttttgttgagaaagagctattccctgcgtggggaattaagtatgtagctacaatgtattggttaaaggtgagctaatcttgcagctctcagtccccatcttggtttctgagttgcacatatgacttgacattttacatacttgctatgtaaatgtttcaggtgaaaccggatggtacactgatttgcgacctggacctggtccatcataaaccttatgagtaccttctactaggctaccattttaccgaagtaagtcaattcatttttttgtcacttgaataatctgagaaaggaacttctgtttgaacagccatgttgtgtatacatgtcatagcttgcaggatcagaaaagaggtcagattttaaactcttggacaagaaccagataatcatgagcatccctggtgatttttcgaggaaacccccaattggaggtattcttatgtttatattttcaacagctttgttctgcgattggcttcatcaaattcaagagtagataatgcaattttttcaaattgcttggtctaaagctcccctgattcttgtttgtttccacttggactttgtgtagatatactactgaaacacactcccgggtctcaacctgctcggtgccttgagctatttgcgagggaaatggctgccggatggacctcttggggaaacgaaccgcttcactttcaggactcgagatactttttgaaagtttagtgggcgcattccctagggtgtaaccaagaaaaaggctggcttgggccctcatgatcgtttttctctatgactcattctcaagctggggacagttaggagagaacccttggaaagaagtggaaggttcggttcatcgaaaacgatatcgtttgaagaaggcaacactagagtaagcctgaaaaaagtatagtgttactaaagattattttgtctcagaactgtaccatcaatttagtaagctttttccttttcctttcataaacagatgtatttcagatacaatttatatattatcagtacagttagatcacatactatattagtatcactattctgctattcactagtagatttctttttctttttcaacaaaatatgaataaaataaaggcaaaagcgtgttaaatataaattcaataagtgactactcgttggaagatcatatctgctttgatgggtctatttgtggggcaaatccactatccagttttccttttgtgttcaatgaactatacaattgtcaaaaaaaaaaaaatacatgagaattaaagaaaatcatcatgaccaatgaagagcaggtcccaacaataattccgaattataggctctgattgttatagcaatcaaacaatatgcatacaaatcacaaatcaaaattaacgatatttccaaacatagagctttccagtttgacttaataatgttgtgtgaatatcctcacatttccattttcgactctctttagtaatttttgaagtagtagaatgatacaatgttttgttttatcaatcacacagttttgtgaaatcacgatttttatccactatttaagaaaaacatcaagtggaagaaataataaaccaataccatcgcaacaaaatgcatatcacgagtatagaatgaacaaactacattgtcaaatacttaattgaggacttaaacttcgctttcagacaacttggtttggaaacttgaccatccgtcatgttgatatacataatccatctcaaatgtagtagatcactatatcagcatgtgttatcaaacgcaagttgtcactaatatcggagcttctagttccaaatgttgaaccaaagtacaattgaatatacaattatacatccaaacacgtccatgcttctccactcgagttctctttggaaatctatataatccgtcggtttggtattttactagttgtacgtagtgtctcccctcatatgtattgagtctttatagtttgttgcctcgtatacgatagaaagtaaaggctaaaaaaccatactatttcataaagggtttatttagttaacttttaatctaaaccatgtatcactccgttttacgtatattcgttttcacaaataatctactaaataattttgtaatgtgataaaattaaagaatagacacatgatacatagacagtcaggacaaaagtaagcactcattttcttctattcaaactatagtgaaaccctattttatttttatccatacactatagtgccaaattaatctaatcattaaatgtgatgaggctcaaaacaatttgttttcttatttaacatggccgatcccctcataaaccaatcagatggtgtgttttccggtcatactcgtgtaggacccacttcattacaatggccccacatgtctctctatctttttctcctctttataaaatcagctccttttcttacacagatttagagaaacacaacataaaacgtacttcttcttcaaaacgcgaaaccacactgtaagttacgtacaccaccacctatcctcaccattcatcatcgacacgtggctggtttaactcaaatcaacggtgaattctttttgcttttttattttaaataatgaatgaaaagattcttctataattccagcgaagaagaaagaaaaaaaaaagcgtattcctcgtgagcactaacttctcactcctctcttcttcttcttcatcagtctacgttcacacaatctttcacccacctattcaaagctctctccggaagtttcgaggggttggttgttggttttcccgatgacttcggatggagctacgtcgacatcagcagctgcagctgcggcggcggcagcagcggcgaggaggaagccgtcgtggagagaaagggagaataatcggaggagagaaagacggagaagagctgtagctgcgaagatatacactgggcttagagctcaaggtgattataatttgcctaaacattgtgataataatgaagtccttaaagctctttgtgttgaagctggttgggttgttgaagaagatggtactacttatcgcaaggtgaagactttctccattttttccagatctgagcttgttttattgatgtttttgatgtttgaatctgaattcgttgatttcaattgtggttaaatgggtttgaatctgagaatttgagggttttctcaaagtgaatttgaatcatcagaaactatggatggatctgatttctcaaagtgaatttatggggtttctttctaattttagagttattattggtatgctaaagtcttaatcttttatgtatgatacttggtccaaagtcattgcattgtgtttcttttgcttacctgtgattgattgatgtttgattggttattgttttgcttttgttggagtatcagggatgcaagcctttacctggtgagatagctgggacttcatctcgagtaactccatattcatcacagaaccagagccctctttcatcagcctttcaaagtcccatcccatcttaccaagttagcccgtcttcttcatcattcccgagtccttctcgcggtgaaccaaataacaacatgtcctctacattcttccctttcctcagaaatggtggcattccttcttctcttccttccctcagaatctcaaacagttgtccagttaccccaccggtctcatcgccgacttctaagaacccgaaaccgttgcctaactgggaatctatcgctaagcaatccatggccattgctaaacagtcaatggcgtcttttaattatcctttctatgcgggttctgcacctgctagtgccgacacatcgccaccagttccatgctccggctactatacctgaatgtgatgagtctgactcttccactgttgattctggtcattggataagctttcaaaagtttgcacaacaacagccattctctgcctctatggtgccaacctcgcctaccttcaatctcgtgaaacctgcaccacagcaattgtctccaaacacagcagcaatccaagagattggtcaaagctccgagtttaagtttgagaacagccaagttaagccatgggaaggggagaggatccatgatgtggctatggaggatctagagctcacgcttggaaatggtaaagctcatagttga

SEQ ID NO: 138680 - DNA, 507 bp, Arabidopsis thaliana landsberg
ttccagttaaaatcttttgcaatgtctaaagcagttctattggtcgctctctgctttttaccggctctagccatcgcggctagaccgaacaagaaccctttcgtcgtgcgaggccgtgtctattgcgacacttgcctcgctggtttcgaaactccagcctctacttacatctccggtacgttcataaacatccaagatctactttaatcgtatttacaaattcagttatggatcttgatatgttcacatttttgccaataatgttcttatggacttgtggatctatagagttatgaatatgatctacgttttcgggttttgtactaaagtagatttgagatctttaaggtgattaggctaattgattatatactatactatgaataatataggtgcagtggttagattggaatgtaaagacaggagaacaatggagttaacgtatagccacgaggcgagaactgactcgacaggatcatacaagatcttggttaacgaggatcatga

SEQ ID NO: 138681 - DNA, 1049 bp, Arabidopsis thaliana landsberg
ggactcatttgcgatttttaagatttaggcaaaactcttctctgtttcgacgcaaaaggaagcatttttaatggacgcattgggtggttgcggcggcgctggtggtttctggggatggaatggcttcgatcaacggagaaagaagaagtcttccggtgatagaggtaagaaacgtaattctggatcgtcggattccgtcgatgtgagcagagacgccggcggttatcggtttcctttgaagcaagctgtgacggccggagcactcactttcaccggtgacacgattgctcagctatcagggagatggaaaaagagaaccgctcttaaacaatcatcttctgagcttgacgaggtttgtctctgaccaagttttggttattttcgagtcatagatttgaattttagaggttttagtgaatgttttgattgtttgaaatattacatgaatcaagttcctagtgtggtatagtgagaattctactgaaactggatctttgcataaccaaaaatgttggtgagtatggttgtttagtgagtagtgacagtctttggttaggttatgtttgatttgaattcttgttggggtgactcatatttactctcttgcaaaatggtctcgtacattggtggaacttggcttgagactaaggatttatgattggatcgttttacttagggggaattgtggaacattttctcagaacatgactggattcgtgcgctgcggatgagttcttacgggtttctcttgtatggtcctggttcttatgcgtggtaccaattccttgatcattctttgcctaaaccaactgcgacaaatctagtgcttaaggtacaaatctaggcgtgttttgttaatttgtacttggaacacgttgtgatatagtttttactgcttatactgatcccatgttaggttctgcttaaccaagtaatccttggtccatctgtgattgctgttatatttgcttggaacaacttgtggctgggaaagctctctgagcttggaaacaagtatcagaaagatgctcttcctacgcttctttatg

SEQ ID NO: 138682 - DNA, 1720 bp, Arabidopsis thaliana landsberg; identical to SEQ ID NO: 64367

SEQ ID NO: 138683 - DNA, 4222 bp, Arabidopsis thaliana landsberg
  unsure (1)..(4222): unsure at all n locations
ttcattcctccatcctatttttcttctgcaccaaagtgttattcctcaactttatatattacacaaatgtctttagccgcggataatgtgttgttggtggaagaaggaaggccagccacagcggaacatccatcggccggaccggtttatcgatgtaaatacgctaaagatggcctcctcgatctccctaccgatattgattctccttggcagttctttaggtatggatcttgagaccctttacatttattatacttaaaaaaaaatttcggttcaatgctgattaatgtaagctaaattaataacaattcttgtataagatatgtattaatttgatatagaaacttgtctcactcttctctgtgtattcttatttcagtgaggctgtgaagaaatatccgaatgagcaaatgttgggccaacgcgtaacgactgattctaaggtacaaatattataatactatagtctctaatattactttatacttttttatgtagactattaactaatataatttcattatttatcaacaatttcaagcattaatgtgtgtgtatgtaggtcggtccatacacgtggatcacatataaggaagcgcacgacgctgcaattcggattggatcagcaatcagaagccgaggcgttgatccggtacattattactatgttatgacatgatccaatcaatcaagtatataatttatttgaaagacatttgccaaaaaaaaaggttcttatttttcttactttttttgtggagtagggacactgttgtggtatttacggagctaattgtccagaatggattattgcaatggaggtaaaaaaaaattgacctatatctaaaatttagggttcaattttcctttttattatagagttttttttgttttgaaagaaatatagatgattgagattgagaagggccttttgttatagagtttctctaagttgttatattgcaggcctgcatgagccaagggatcacctacgtgcctctatacgattctttaggtaccctctatacgttgatatatacgtaccgatcaatatatatacaacattttatcttaggcttgtcttcatattatatatattcatgagttatgaaaacctaatccgaggttgaatgtcgatgtaacaggcgtaaacgcagttgaattcatcatcaaccacgccgaggtttcgctagtatttgttcaagagaagacagtttcatcggtaagtcaatttttttaattgaaatcagtcataccataactttcattttaggtttcttgtccaacaagaaagtatttttgttttgcttttgtaattaactcttgaaagtttttctgcagatcttatcgtgccaaaagggatgttcttcgaatttgaagagtaagttacatgtctttaaaaatcgataatattttgtataaatatgatcttaaaatctaagatagttcttttgctttgacttacggttttagctattgtgagcttcggggaagtctcgagtacacaaaaggaagaagctaagaaccaatgtgtttctttattttcatggaatgagttctcactaatggtcagtgtttagtactagacgaaaaatataacttctataatttacaaacattttgacttatagggttaactttatcaagatttgaatttctttctctcgtgggtcttaaataattatttgaaaatcttatcagggaaacttagatgaggcaaatctacctcgtaagcgaaagacagacatctgcacaataatgtacacaagcgggacgactggagaacccaaaggtgtaatcttaaacaacgcagcaatttcggtccaggttttatccatagacaaaatgcttgaagtcactgatcgatcggtaatttttttgttacaatttagcagacacatgattacataattggaaattatattttggtttatttctttggaaattttgtagtgtgacacgagcgatgtgttcttctcgtacttgccattagcacattgctatgatcaagtcatggagatttactttttatctagaggctcctctgttggatactggcgtggcgtaagcaaaattttctcttaattttgaatccttttttcccacaaaatgcccattatattttctgattttttgtttaaatttgagacaggacattcggtacctgatggatgatgttcaagctcttaaacctactgtgttttgcggtgttccacgagtttacgacaaactatatgccggtataatacttttgatcaagtcgaaaattcgagtttaccctcattttattcaagttttactgaattttcttctattttatatgggtgcaggtataatgcaaaaaatatcagctagtggcttgatacgcaagaaactgtttgattttgcttataactagtacgttttctatgtttctccaaattattataaagaaaaacacggatcttggaattatctttaaaatcatcttgtgaatacagcaaattgggaaatatgagaaaaggattctctcaagaagaagcttctcctcgtctagacagacttatgttcgataaggttagtgtatttatctatgatgtagaaataaaaattattaaattttgtagtcactgattacaataaatgttatgatcttctcctagccttctcaaatggaagataagatggaaataacatgtaatatagacttacagtttcagaaaatttaaattgtgacagataaaagaagcattaggaggaagagctcatatgttgttatcaggagcagcgcctctacctcgtcatgtagaggagttcttgagaatcattcctgcctctaatctctctcaaggttatggtaagtgtacctaaaccgaatttcgagtcatacaccgatctcttggtttgggctaagccgattctaatgaaatgtgacaggattgactgagagttgtgggggaagcttcacgaccttagccggagtattttctatggtggggacagtgggtgtgccaatgcctacggtggaggcaaggctagtgtccgtaccagagatgggttacgacgccttttccgctgacgtgccgagaggagagatttgtcttagaggaaattcaatgttttctggttaccataaaagacaagatctaactgatcaagtcctaatcgatggatggttccacacaggtattgttgttgatccaactagttatggagtagataaaaattggaaaaatgttttgaatgtttaaatgtatatccaactagttatgtgtaggtaaaaattggaaaaatgttgatctagatgaagcagaacggatcatgaatatcacataaatcgaatatatccgctttgcattaacttttagttgtaacaaataatatgattgaaaagcaagtgatagtaattggtagaagagtggctggtttttccactcgtatgtctcgaatggttattttgaaatttacttaaaatggatatgtagactctaaaacttagtctatattttaaccattagattgttagttacaaaagaaacttgtattggataatgttgaaatttgatttcatttatatgagtaggagatattggagaatggcaagaagatggatcaatgaagatcatcgataggaagaagaacatcttcaagttgtctcaaggtgaatatgttgctgttgaaaacatagaaaacatatacagtcatgtcgccgccattgatgcggtattagttgcaaatataactcttaagtagccgttaaataaaacttagctaatgatctgttaatcatttttccagatatgggtatatggaatcagctatgagtcatacttagtgactgtggtatgnnnnnnnnnnnnnnnnnnnnnnnnntgggccaaagaacacaaagtttcagcagactttgagtctatctgccgaaaccaaaagactaaagagtttgtcctaggagaattcaacagagtagccaaagacaaaaaggtttgatttgttcatgattcttctacttataaattcttgttttatattttcaacatttcaactaataaaattgtgggttttgtcttacagctgaagggatttgagctgatcaaaggtgttcatttggacacagtcccgttcgacatggaaagagatctcatcactccttcatacaagatgaaaagacctcagcttctcaagtactatcaggtatattaaaagtctattccctttattttcacattagaaaacattcaaggct

SEQ ID NO: 138684 - DNA, 3527 bp, Arabidopsis thaliana landsberg
atgctatcaccgagccaacatcaacgatggcgaggccttgtgttagatatacaatcgagagaagctcatggcgatttcttgagagcaaatggttccttaattcatagccccgtttccaaaaggttcaagttttctccaatgtccagccctagaactgggagacgtgttggatcaatgagtccttcctcgtcaagaaacagaacgaatcagaagaatttcaaaaacaggaaccacagtgcagatattgaggaaggtgttgtgtcccctttaggagatggtagtgataagtcttatattccaagaacatggtctctcactaatctcttagctcctagaaaatctaagaagacagagtcttttataactcactcaaaccctgagtccatgaacgggaggtatgccgttgaggttgatccggttacatccatggtcagtattctatcttacaaaacttggttataccattaataagggagattatcttgttgagtatttcagttgatgaattgattcattttccatttgtcttagctttagagaagctgtttatcttctgctttacttgattttactgttctttttactagaaaggggagcgtttactgcctattcgtcgtacacgctctgtccccacattcttcaacaaagatggaagtgtaaagccgtcaagtgttttccgcgtgattcctactccgtctcgtggggatgagaagagactagagatgacgcaggcatcgaaattgagtaaactccacggttacaaatcaccttcccagacatatctttgtgatgccatattttgactctatgtaacaaactatgtgatatgtgttcagatgaaaatgatgatggtggagaagatgttcctgaagaagaagctgtgtgtagaatctgtatggttgaaatggaagaagatgaagaagcttttaagatggaatgtatgtgcaaaggggaactagctcttgcccacaaaacgtgcactatcaaatggtttacaattaaagggaacataacatgtgatgtgtgtaagcaagaggtgagaaatctcccggttacccttctacgtgtgcaggattctcaaaaccgttctagagcagccagggatatcgagatttcacggttcaataatgaatggcaagatattccaattcttgtcattgtaagcatgcttgcatacttctgtttccttgaacagcttctgattatagatatgaaatctagcgccgttgcaatagctttaccgttctcttgcattatcggtcttcttgcatcaatgatatcaacaacaatgggtaataaagaagctacttcgaaattatatattttttcgtattctatattgatcatcagtcttaagtggtttggtttgttgcagtgaagaagaactatgtatggatctacgccaccgttcagttcggttttgtggtccttttcgctcagcttttctacagagttgtaagatttgatgtaatgtcacagagaaaccttactttgttgtcacagagaaaccttactttgttgaagagtttttgattcctcacactctctctcattaacttgtgtgtaggtgaagcagccggtaatgtgcattgtcttagccactatgatcggatttggactcaccatgaccggcacaacagctattaacgagtatttgaaatggaggagaagcaattcccacctgccagaagagccagcaagtactcaggtggtttgacagcagcgtagatcttttgagtgaagctagagtccctaaagggttggatcggttttcaattaaccggtcgggattcggttttcggtttagctttaatcgatttgtctaggttgagatcagatttggttttcaatacttccaagtctttttttttttgccaactaaaatataaggaatgatgataggcacacacatgacacataaaatcataatgaacagtagtatgattagcaatcccatatttcttggataacacttcttcacagcttttttgacaggtcactataacacctttttcagttcatttttcattttcaatcctcacccacccaaactctcccttcaaagcaatgtctctcctctctctttctcaattcaaacaaactttattaaacctaaaagaaacatttccaatctctaatgacttagttgatagaatctcatttagttacctagtaataatcttcacactagtaagagaatcctactcttcaccaaactacatctctctctatataacaaaccccaaaacatctcaacatacacacacaacaactacaacaatggctacttcaagaacattcattttctctaatctcttcatcttcttcctcgttatagccactacttatggtcaggctccagctccaggcccttcaggtccaacgaacataaccgcaatcctagaaaaggctggtcaattcacattgttcataagacttcttaaaagcactcaagcctcagaccaaatcaacactcagctcaattcttcctcgagtaatggcttaaccgtgtttgccccgactgataacgccttcaacagcctcaaatccggaaccttaaactcattgtctgaccaacaaaaagttcagcttgttcagttccatgtcttacctacactcataaccatgcctcagtttcaaaccgttagtaaccctttacgcacgcaagctggagatggccaaaacggtaaattccctcttaacatcactagctccggtaaccaagttaacatcaccactggagttgtcagcgccaccgtggctaactctgtctacagcgataagcagctggccgtttatcaggttgatcaagttttgctgccattagccatgtttggatcaagcgtggctcctgctccggcccctgagaaaggcggctctgtttcaaaaggctcagcttccggtggcgatgatggaggagattctactgattcatctgatgcagagaggactggattcgggtttgggatcagaatcactaccgttgcagccattgctgcttcttcttctctgtggatataactcgagagagagcttttcttgagtctccacatttggaattttaagaataacgagagctttaagtttttgttgtactttgagattgttttatagatgtgttattacgtgtgattgttttgattaagattgcacaaaactttttttgatgaaagaaaggaaaatgtgatattgagtataatttgaaaagattagtcttaagttacatgattccatcatgttgttcaagttagaaaccgaaaccaccaaaaccgccaccaccaccaggaaaaccaccctcgaaatggaaagtgtattgttgtccaccaccaccaccaccatggaacggattatatcctccaccgccgcctccacccatatcttcaagatcctctcctctgtcaaatctcgcccgcttatcgtcatctccaagaatctggtaaaattaaaaggttaaaatgtcaagagaatgagagagaccatgaccatgtgtgtgaatatgaaagagtgatgtggaattttgttgaacc

SEQ ID NO: 138685 - DNA, 1852 bp, Arabidopsis thaliana landsberg
  unsure (1)..(1852): unsure at all n locations
cttattatctctcttcttcgttgatactattttggtgtattttcgttctcgtgctgttatctacgacaagtactacaaatgctttagtgaaaatcccgaaaaacacgaccgttccggcggtaatagtgttcggtgattcaattgtcgatgccgggaataacgacgacatgataacagaagctagatgcgattatgctccctacggcattgattttgacggtggagttgctacgggaagattctctaatggcaaagtccctggtgatattgtaggttagtttgcctgtaattttattttcattaaaattttcattgtagtcttacaccttgcattctttttattggatagctatatctatcgaatgcatgaacttgattaatgatttgcagtccgtgactagtttgattttcttgctctataaaatggtgtacaataaagttaagcacacaaagttgctcactttataataattcaaaaatagtataacacttagacaaaacaaaaaatgaagaatatcagaagtgatctaatgattgtctcataattggcataactcatttgttcttacagcggaagagctagggattaaaccgaattacccgcttatggaaattcgaatttaaaaccagaagagctcttaaccggtgtaacatttgcttctggtggtgctggttatgttcctttgacaaccaaaatagcggtagttaattttgagtacctatgcataatttaactttatctaaagaagttatgttaaaataacaacaatttctgtttatcttgttaaagggaggaatacctttaccacagcaattgatatattttgaggaatatatagagaaattgaagcaaatggttggagaaaagaggacaaagttcataatcaagaatagcttgttcgttgttatatgtggtagtaacgatatcgccaacgacttctttactctccccccggtccggctacactacaccgtcgcttctttcaccgctcttatggccgacaatgctcgttcttttgctcaggtaaagacaatttacaattgtaacttgtaaggttggtaataaggcaataactaatgtcacgaataaggttagtaaaatgttgtctttattaaaacttgtttttatttatgtggtggcagacactctatggatatggagcaagaagaatacttgtatttggtgcaccaccaataggatgtgttccttcgcagagaaccgtagcaggaggacctacaagagattgtgttgctaggtttaatgatgcagcaaaacttttcaatactaagctctctgcaaatattgatgtcttgtcaaggactctacaagacccaacaataatctatattgacatctatagtcctcttcttgatctcattttaaaccctcatcaatatggtaatcaatcattattactttattttcaacatatttttaacatcccaaatctgtttttataataaaagattaaaagtgtatatatctttattatgaatcttataggatttaaggtggccaataaaggatgttgcggaaccggattaatagaagttactgcgctatgcaacaactatacagcttctgtatgtcccataagatctgattatgtgttttgggacagttttcatcctactgaaaaagcttacagaattatagttgcaaagcttttggatagatacctcaacagattcttctaatcgatatagctcctatttcttagcatgttccatacacttttaaataatcatttcaactcannnnnnnnnnnnnnnnnnnnnnnnttttctctttttcaaggcttgtaatggtctcttatgatatttgatggttatatatatacaaggttatact

SEQ ID NO: 138686 - DNA, 745 bp, Arabidopsis thaliana landsberg
cttcagcaatcacactctctctttgttcgagtaccaacaatggcccttcaagctgcttctttggtctcctctgctttctctgttcgcaaagatgcgaagttgaatgcttcttcatcatctttcaaggactcgagtctttttggtgcctccattaccgaccaaatcaaatccgaacatggatcttcctcgttaagattcaaggtacagaacaaatctacatttctaccattacagtgtagattagtatttgcgaatggttagtaaatggttaattgattatgcagagagaacagagcttaaggaatctagcaattcgagcccaaaccgctgcgacttcaagccctacagttacaaaatccgtggacggcaagaaaacgttgaggaaaggaaatgtggtggtcactggagcctcgtctgggttaggtctagccacggctaaagctctagctgagacagggaaatggaacgtgataatggcgtgcagagacttccttaaagccgagagagctgctaaatccgtagggatgcctaaagacagctacacagtgatgcatttagacttagcctcgttggacagcgtgagacagtttgttgataatttcaggagaacagagacgcctctcgatgttttggtctgcaatgctgcggtttatttcccgacagctaaagagcctacttacagtgctgaagggtttgagcttagtgttgcgacgaaccatttgggacattttcttctcgcaaggtt

SEQ ID NO: 138687 - DNA, 1357 bp, Arabidopsis thaliana landsberg
atgttgaaacaagagagtaacgacataggtagtggagagaacaacagggcacgaccctgtgacacatgccggtcaaacgcctgcaccgtgtattgccatgcagattctgcctacttgtgcatgagctgtgatgctcaagttcactctgccaatcgcgttgcttcccgccataaacgtgtccgggtctgcgagtcatgtgagcgtgctccggctgcttttttgtgtgaggcagatgatgcctctctatgcacagcctgtgattcagaggttcattctgcaaacccacttgctagacgccatcagcgagttccaattctaccaatttctggaaactctttcagctccatgaccactactcaccaccaaagcgagaaaacaatgaccgatccagagaagagactggtggtggatcaagaggaaggtgaagaaggtgataaggatgccaaggaggttgcttcgtggctgttccctaattcagacaaaaataacaataaccaaaacaatgggttattgtttagtgatgagtatctaaaccttgtggattacaactcgagtatggactacaaattcacaggtgaatacagtcaacaccaacaaaactgcagcgtaccacagacgagctacgggggagatagagttgttccgcttaaacttgaagaatcaaggggccaccagtgccataaccaacagaattttcagttcaatatcaaatatggctcctcagggactcactacaacgacaatggttccattaaccataacgtaaggcttttgtatatttgttaccccttcaatttagcatcttcccataaagcagcagggtgaattctttcatcatacacacaaatccactgatccactgccaacagttgatctatagcacatagaaatttcaccagaagtctataataaaaacaatatatgcttccttttgcatcgactctctttagtcctcttaccagggggattgagaatgtctttgtttctgtcattaggcatacatttcatccatggaaactggtgttgtgccggagtcaacagcatgtgtcacaacagcttcacacccaagaacgcccaaagggacagtagagcaacaacctgaccctgcaagccagatgataacagtaacacaactcagtccaatggacagagaagccagggtcctgagatacagagagaagaggaagacaaggaaatttgagaagacaataaggtatgcttcgaggaaggcatatgcagagataagaccgcgggtcaatggccggttcgcaaagagagaaatcgaagccgaggagcaagggttcaacacgatgctaatgtacaacacaggatatgggattgttccttcattctgata

SEQ ID NO: 138688 - DNA, 2254 bp, Arabidopsis thaliana landsberg
caacttctctctctaatggccaatcgatcggaggaagcagagtacgagaacgattctcggcgaaatcatcaagacaagaagaaagaaggagttttagatctggtactgaaacgacctttacggtggctaagaatgctcattgaagagcttcactggagcttcttcttcggtgtgattatcgtctatggagttagccaaggacttggtaaaggtctcagcaaagtcagcacacagtactacttcaaagacgagcagaagatacaaccctctcaagctcagatttacgttggtttgattcagattccttggattattaaacctctctggggattgttgactgatgttgtcccagttttgggttacaggagacgaccctatttcatattagccggtaaattcactgaaagttagtttctttgcttcttaatgaatgaaagatgtaatttttttttgttcgattcgattttaggttttcttgctatgatctccatgatggtgttatggcttcacacgaatctgcatcttgcactggctttgtcctgtcttgtggcaggaagtgctggagttgctatagcagatgtaactattgatgcttgtgtgacacaatgtagcataagccatcctacacttgctgcagatatgcaaagtttgtgtggtttgtgttcttcgattggttccttggttggtttctcccttagcggcgttttggtgcacttggttgggtccaaagtaggctctttaaagatctctttgaatgcatagagtcgaaatgcttcaagtgttttccactcattttgtcttctttttttggtggcagggtgtgtacggtttactcggtgtgacggcaggattgcttgttgtggttgggatggttctgaaagaatctccttctcgcagtctaggtcgcaagcatgtaagtgttttgctaccctttggtccaaccagattctttaagctagtaatgtaatcgagtaactgtgctttcaggttaacgacaagtttctggatgctggaagtgcaatatggaaaacctttcaatatggtgaggtgtggcgaccatgcttgttcatgctattgtcagctgcagtgagcttgcacattcacgaaggcatgttctattggtacacggattcaaaggatggcccttccttttcaaaggtgctttcaccttttgcataagctctagagctgtaattcaccttccatggccttgcttaaaacatttgggaactctctgtgatgtttttggctaaggtagttattttctgttgcttaggaagccgttggatccattatgtcgtttggtgcaattggctctcttgtgggaatacttctctatcagaactttctgaagaacttccctttcaggaatgtcgtcttctgggcactttccctatctgtcctgtcaggatttctggatttaatcctggtgctgcgcataaatctgaagcttggtctccctgattacttctttattgtggtagatgagtttgtttcacatatgataagtagaatcaagtggttacccttactttgttctcagctccaagctctgccctgccggtatggaaggcactttctttgctttgctcatgtctattgaacatataggacatctagtgtcgtcatggggcggaggagtactactccatgccctgaaagttacgcgtactcagtttgataatctctggttggttattgtgatcaggagtttattgagggtaatcccaattggattggtctttttgataccaaatgttgattcaaactcaaccattctccctgctgagatgttaacaagtagaataagtgaaggtgttgataccgagaagatagagatgaccgctctgatcagtgatgaagcttgagttatatcagttctgtttttaggtacaggaacatcagattcttgagatgaccgttcattgtttgttgttcttatggtttagataattttccttcctcgcagaagatcatcgaacatttttgcttacaattcatcatttgctataccgatacagaaatatatttatttataagattagtgggagaattcaaattggctttgccaaaagagatgattggctttcatgatatgaagggagcacacaaatggatattaagttatggtgtaggcatcagactctgcagttttctccgacaattcctagcctctcttgtgtggtatcatatattactctctggtttttctgctgataatttcgatggatcccgacttcattttcatatgaca

SEQ ID NO: 138689 - DNA, 3314 bp, Arabidopsis thaliana landsberg
accagtgaagactacaatgtggcgccggagcttcagtacattaccgaagaagaaatgggacgcggtggtgatcggaggtggccacaacggattaacagccgcagcttacctagcacgcggaggtctctccgtcgctgttctcgagcgccgtcatgtcatcggtggcgcggcagtgacggaggagatcgttcctggattcaaattctcacgctgcagttaccttcagggcttacttcgtccttgtatcattaggtgtgtttgattaaccttcttccgattttgttctgatcgttcctggattgtttgataactttgatttttggattccaaagagaattggagttaggtagacatggacttaagcttttgaagagaagtccttcatcgtttacaccttgtttagatggacgttatcttctgcttggacctgatcaagatcttaatcattctgagatttcaaagttctctaaacatgatgctgatgcttacccaaggttatttgtttttttagctaattctcggaatgtgatattcaaatcaaataagtttttttttttttttttgctttacagatacgagaagcagctagagaggttttgtggattcatggatcctcttttggattcaactccacctgaatctctgcaaagtgcctcttcttttaatgataagttgagcaacaaaatgtacaaatctgctttctgggctcgttgtctccggcaagcagtttctttggggcataaagatatggtgtatgatctcctttttcaaaaacaattaagctgatttgttttgttatctttcactgttttgtttacatgctctttgtttttatattgtgaagggcttttatggatcttttattggcaccagcttcaaaagttttgaacaactggtttgaggtgcttttcttatcttaacacatattggttatacaactagcattagcaagtagtctgatgttgtattgacacacgtttttgtgttggccttatgcttgtagtctgatgtcctgaaggcgagtcttgcaacagatgctgtgattggatctacggtaattgactttcttaatatcttactcgttctatattgggggattaatgtagtgatctgaacattaattcacaggccagtgtccatactccgggaagtggatatgttctcctacatcatgtgatgggagaaacagatggagagaaaggcatttggtcgtacgtatcttgattgttaatttgtattttcctcttgatattttgggaatgtagaaatagctgtgtatgttttacataagtgttgatgcataagcaattgaagaactatcttaccagatattagtaaacatgcatctctgtaaggtgtaaatgaagagcacaagactatctgtttaataaaacaaggcctggctatcgtgagtaactggtaagaaaataatatgcagttacgttgaaggtgggatgggctctgtctccatggctatagccaatgctgcaaaggaagctggtgctgagattttcacaaacgcagaggtattaaattctagatcattttgaggttatccctctttcctacgatattcagaacagtggagttctagtatcatttctctcatcagaaatcagagcagcttagtacattcatattttccaggtttctgaaatactaactgaagactctagcatcgtgaaaggggttagtttgtcttcaatgatttgtggatgaagtgaaaacgtgaatcaaactgatatgacattacctggtataaggttttgcttgctgatggtacacgggtggagtcatcggctatattgtccaatgcgaccccttacagaacttatgtggtaaatctttttaaatcataagttccaaactcccagtatatgtcagttaaaattttgttgtttgctaacaaatttacgtttgttctttctgtcttggataacaggagttggttccgaccaatgttcttcctgaaaatttcgtcagtgctattaagaactcagattacagctctgtaaggattccatgtcgtttaagtccctcactctctggatcaagagaagatagatttctctataggcggaattggttttttttttaattacaccatctagctaattatctggtgatttgttgtttaattgttgtgaacaggcaactaccaaaataaacttggctgttgacaagttaccacagttccagtgctgcaacacaaatcattcaggtccaggtccagagcattttgacgctaaacacattggtgcagagaggaatcattcgtgctaatttgttcctcattatatgtatctcaaagaacaaataataatacaaataaaagtgatcaatggctctgttctatcttctctctgtcagcatggcagaggttcactcagcatgtcaatgattctgaaaatggcttaccatcgagaagaccagtgatcgaaaataactattccatccacactagagaacaccatttctcccccaggtacacattctcccccttttgcttgtttaggatttgaactctgaatgtgattttgtatgtagggaagcatgtaatcaacttgttcatccagtacactccttacaagccctcagatggaagctgggaagatcctacttaccgagttagtttgttatacacgcttggctaaacattcctttacactacaagacatgccaaacccatctggatttgcttttgcttgtgtaaaaatcaggaagcctttgcacaaaggtgtttcaaactgattgatgaatatgcacccgggtttagctcatccatcattagctacgacatgttgactcctccggacctggaacgggaaattggtctaacaggtatataaagtgaagtacttggagaaagatcccaagtacatgcgacatggccaaaccatattgacatgactgcccatttgtattctgcaggcggaaacatctttcacggtgccatgggattagactctctcttcctgatgcgccctgtgaaaggatggtacgtgactccgaagtactcaaaacagtctttacgatttatgattatgaaattcaaaactttgttggactgtgtgaaacaggtcaaattacagaagccctttgaaaggtctctacttgtgtggcagcggagctcatcctggaggcggagttatgggtgcacctggaagaaacgctgcacatgttgttcttcaagacttgaaaagaatctagcgagtataatctcagactgtgcaatgttaactctcatgtgtaagttgtttgttactgctctgaaaacctctgtcgtagggagaggcttacagacatgtacaata

SEQ ID NO: 138690 - DNA, 3601 bp, Arabidopsis thaliana landsberg; identical to SEQ ID NO: 30367

SEQ ID NO: 138691 - DNA, 2538 bp, Arabidopsis thaliana landsberg
agaaaaaagaaaaaaccttataagctagtcataccatttcatttcattatattgacaatttaaaaaaactgatcatactatgatcatagtatgatggcggttgagcaagtatgcccccatcgtctagtggttcaggacatctctcgttcaagtaggcagcggggccatgtcttcccctgggggtcatctgcacacatggccgagtcacctcactcgttctctccggaagaagactctcaggttacataccctctaaactcggtctactcgactcactcataaaactcgaccttgctcgtaacaatttctcaaaaccagtgccgactcgtctcttcaacgccgttaatctccgttacattgatctctctcacaactcaatctccggcccaattccggcccaaatccaatccctcaagaatctcactcacattgatttctcctccaatctactcaacggttcactccctcagtcactcactcaactcggaagcttagtcggcacactcaatctctcttacaacagtttctccggcgaaattccgccgtcgtatggccgttttccagtctttgtcagcttagatccggccccaataatctcaccggaaaaatacctcagattggctctctcttaaaccaaggaccaacagcgttcgccggaaactctgagctctgtggtttcccattacagaagctgtgtaaagatcaaggtacgaaccctaagctcgtcgctccaaaaccagaaggctcgcaaatcctcccgaagaaaccaaaccctagcttcatcgacaaggacggaagaaagaataaaccgatcaccggatccgtaacggtttctctcatctccggagtctcaatcgtaatcggagcagtttctatctccgtatggctgattcgaagaaaattaagctccactgtgagtacaccggaaaaaaacaacacggcggcgccattggatgatgcggcggatgaggaggagaaggaaggtaaattcgtggtgatggacgaaggattcgagctcgagctcgaggatttgctgagagcatcggcttacgtcgtcggaaagagcagaagtgggattgtgtacagagtagtggccggaatgggatcaggtacagtggcggctacgtttacgtcatccaccgtcgttgctgtgagaaggctaagcgacggagatgccacgtggcggcggaaggatttcgaaaatgaagtggaggctataagtagagtccaacatccaaatatcgtacggctaagagcttattactatgctgaggacgagaggctcttgatcactgattacatacgcaacggcagcttgtactctgccttacatggtaatttactaatcttcattaatcaaccactaattatgagactaatctcaattttgttttatgaatcttggtgttgacaaaaaagagaggtttgttttggagtttgtgctcttgaaccagttgattggtgaatctgtatagatagagttttttttttgtctatattagattgtatgataatagaaaatttgttggcgtcttcttcttggtcttttctgtttcaaaatcacatgtttggtaactgttatggttccagagaaacttggatttttcttctcgtcgaaaacaacaacgtaaattctgtttttgcgacagttttggattaggatagagcaatgtagaaggtggtgcaaagattctatttgtcttagcttgatgagagaatattgttggttacgtttaagaggttaagattggtattaaggtcgtgtttaatgagacagaaacaagcagaggtcagattaagatatgagcatagagttgagatttttttccagaatttgtttgttgtttgtgatcattgatttgagaagagggttttgatttttttgtaggtggaccctcgaatactctgccttcactctcttggcctgaaagattacttattgcacaaggaacagctcgtggcttgatgtatatacatgagtacagcccaagaaagtacgttcatggcaacctgaaatcaaccaaaatcctgcttgatgatgaattactgcctcgcatctcaggcttcggtcttacacgtttggtatcaggttactccaaactcatcggttcgctatccgccacaaggcaaagcttagaccaaacctacttaacctctgctacaacggtgacaagaatcacagctcccactgttgcttaccttgcacctgaggctcgggcttcttctggttgcaaattatctcagaagtgcgatgtctattcgtttggggttgtcctaatggagttgttgactggccgtttgcccaatgcttcctctaaaaacaatggcgaagaactcgtgcgtgttgtgaggaactgggtcaaggaagagaagccgttgagtgagattttagacccggagattctgaacaaaggtcacgcagataagcaagttattgcagccattcatgtcgccttgaactgcacggaaatggatccagaggttcgtccgaggatgagatcagtgtctgagagtctcggccggatcaaatcggactga

SEQ ID NO: 138692 - DNA, 649 bp, Arabidopsis thaliana landsberg
aattaatctacgtcacatactcgattttagttgtgagctgcaaaagtctcagtgattgctagtaagaaaaagtttgttcatctgcttttggtttggtccattatattgaatcattaagcgaattttgatgatacattgtgactactttgggttacatcatcatttatcttttacaaagggtttttgagtgtgactttatgatgtgtcaccaaacctcttatgacccattcttacggtgtagcaacatttcatttgttgagtatgtctaaagttagagcagaagaggaacaagtccttatctccaaatatgaaaaaaagttttgaaaacttaaatgatgagagagctttagttggagggtaagtggacctaactctactaactccaacatacccttttgtttccaatctctatatatctgctcacaactcacaaggaattcccttagttacacaattttaaaataaatataccgttacacaaaatacacaaaaatggcaaacttgtgtacacttgttggttttcttgtcatcatcttcttcaatgtgtttgcacctgcctcttctgccagtcaccccgtcgaatggtcgctcgggaaagactatagctcgttggctaccggaaagtccttcgcggtcggcgataccatcg

SEQ ID NO: 138693 - DNA, 832 bp, Arabidopsis thaliana landsberg
gggttatcgattctttttgattcgttgtcattcgattatagaatttgtattagaaatcggaattttcgatctatggggaggagaatattgaacgatgcattgagaacgatcgtgaatgctgagaagcgagggaaagcttcggtggagttgaaacctgtctctaccgtaatgtcttcgtttctcaaaatcatgaaagagaaaggtgagatttttcacttcttctttcttctggtctaattgggtcttaattcatttccctaatttttcatctacttgtttagatttatcagtttcgtcgacattggttttagtcacttttgcttgtagtgaagtatgattacatgatccatagtctctattgttttgttggtccttgagctgatcctaacacgtatagctcaagaattttcatgtgtgatcactcgatgtaagagattggttacaacatggtcccaatgattaagctttgttcttggttaactatgaagttgcagaagattgaaaagtttctgttttttgattcttatggataagttacatcttgatctatggttggagaaagtcatatctgctcctgtttagtttatggtctaacttaagtttgtttcgatcttcgtctgtgttttgtatgtttttagttaggaatttgaagtagttcttttcaaagttgatagtttgtgactgaagtataaagataccatttctatgctcaaaccgcagaatcagctagttttttgtctgttactttacaaaatgtatgttgatgtattatgtatagggtacatcaagaacttccaagtccatgatccacacagagttggaagaataactg

SEQ ID NO: 138694 - DNA, 1439 bp, Arabidopsis thaliana landsberg
aaaatcaaagtgaatgttgttatggcaaatcgaaattcaaggaagcttatattttcaatgaggccgagagaaaatgaagaggaagttgagaaaaaacgaactcttatggctaagcttcgtgttggggatgttgtgaaatgctgcatcaagaaaattacctattttggtattttctgtgaggtactaactactaacttacagaagttaaaatatctttgaaccttcttgctttattgactggcaagaacggaatctagaatgttgtgtaaaactaaaaagttgggttgaaacagctagaaggtgtccctgcattggttcaccagtcagaagtttcatgggatgcaactttagaccctgcttcatatttcaagattggtcaggtaatatctcgaactatcgtaaacactgctaaggaatacaactgtttgacaaacctttctttttgttgttatcagattgtggaagcgaaagtgcaccagctagattttgctcttgaacgtatcttcttgtcattaaaagaaattacggtgagaaagatctctcaaaagtttatcttgtagcaattggtaactcattttgatatatacctagacccgtttgatgtctttatgcagcctgatcctcttactgaagctttagaatctgtagttggtggtgataatgatcagttggggggacgattacaagcagcagagctcgacgctgaggtattaaagaccttctgtgattttatgtgatgaaaccattattacaggtttctgaaacctttcttctgcagtggcctgacgtggaatctctgatcaaagagctggaaatggttgaaggaatccaatcagtctcaaaaagtcgtttcttcttgagtccgggtcttgctccaacgtttcaggtacacagtttaatcacctaaaatgtatatatcaaaacacgaaaacatctaacagaccgctaaagagttgaatactgttgcggcttccttagcgaaaaaatgtgaacgttttatgttttgatcggaagctaagagctctggtttgctttctctctctttgtaggtttacatggctccaatgtttgagaaccaatacaaactgcttgctcgagctggaaacagagtacaagaggtaaaagaaagaaagagaaagatctaacttataacatctgttttattttaatcttggatgattcagtttttttcctttactgtttatctgcagcttattgttgaagcatccttgagcaaagaagagatgaaatctacaatcatgtcttgcaccaacagagtagaatgagaatattgaggaaggaaggaatgaatgaatccactatttttttgtattcttgaaagtggtatcattcgaagacttataccaagtgtacaacatcaatacatgatttctaatgtaatacttcctgatctttttaatatatgaaaacattttccc

SEQ ID NO: 138695 - DNA, 1099 bp, Arabidopsis thaliana landsberg
ggtcgtgttctcgctagaagaaggtcctggtgtgctgttcaaggccttggctgtttttgctttacgaagcattaacttatctaaggtaagttccaaggaaaagttggatcctattatcagtaattcattccaaaaatagaaatatatgacgtaacttttgctcttctttagatagaaagtcgtccgcagagaagaagaccgttaagagtagttgatggttctaacaatggaagcgctaagtaagtagatttctaacacacaacatgcagacatcttttttgacaaagtagttgagtgattgttttgtgatgatgacaggtactttgattacttattctacattgattttgaagcctccatggctgatacacgtgctcagcacgctcttggccatctacaggtctcaatcttgtaaccccagagcttttatagctggtcttaaggctcaccaattctaaagatccttaccttctggttttgcaggaattcgcaagtttcatccgtatcctcgggtgttatccaatggatctagtcagataaccgagcaactcttcaattgatttcatgttaccataccgtgaagaacatgtgaatatacccaaacagaagaacagggtttgtggctttggtatacttcaagaatcttctttcaccattttctcattttagaactttagcttcaaactcttcattgttgagacagatacaattgatgtagcattttgttaagaatatgttctgtacattaaacaagttttttcagttaatatcaatgaataaggttgtttgatgcaaaaccctctgataccaaaatctctctggtttttaacgatcatattaatatgtgattagtttcagaatcttcattacaaaaggtgggggcattgttgaacaataagactgatctttcagttcgaatcaggaaataaggccgttcccaaaccaaaaaacaaaaaaaacttaaaccaagaactgtttatcatcagttcgaaacagagaaaccctacgcaccaaatttggtgtttcatacagttttttaacctagtcacaaaagcttcactaaggaagactaacttcgagctctgaatagtttgatctc

SEQ ID NO: 138696 - DNA, 4850 bp, Arabidopsis thaliana landsberg
atggccgatcatttgattctttctcttcaagctcctccttttctcatcttcccttgttctcttcaccgttcatggagatttcccggtggaatcagatattccgttcctgagttccgattgtcctctcagctacagttggctaattccatttcaccttcaaagtcttcagcttcctcttcttctccaccggagaattctgctccagagaagttcgatctcgtgtccagcactcgtaagtcttcgtgtttcctcttcttcttttgttttatcttccttcaccggagaagttttgaattttagttttttccctaatttttgaagtgtctgaacactcaattactaggttgtaaccaattttacttcggattcaagtatcaaaacctaaaatattttttagtttcaagtttaagaatagaaaagttatttactttgaaatctgagctatactcttatattgatagttgtttggatcttgcagagcttaaagatggaagtcatgtctttcggttcggggatgcaagtgagattgagaaatatctcgaggctgaagaaaaagcgagatgtgttgaggtagaaacgcaaaatgctaagattgctgaagaagccagtgaagtttcaaggaaacaaaagaaattggtcagttctattattgaaacaagtactgagaaagaggaaacagctgctccttccgatcttagcaatgtcattaaaataaaggatcgtaaaagggttcgttctcctactaagaagaagaaagaaactgtgaatgtatcacggagcgaagataaaattgatgccaagagtgctagtgtttccaatctgagctccatagttagtgtagcagaagctattccaattagctctactgaagaagaagctgttgttgagaaggaaatcacggctaagtcatataatgtagagcctctttcttctgaagccatgaagaaagtttctgtcaataaaataggagactgtgagacaaatggttatcaagagaatcgtatggaggttcaggcaagaccgtcattgtctacacaacaggaaattacgcctgtatccaccattgaaattgatgacaatttggatgtgacggaaaagcctattgaagctgaggagaatcttgtcgcggaaccaacagctacagatgatttgtctcctgatgaactcctttcaacttcagaagcaacacatcgcagcgttgatgagattgctcaaaaacctgtaattgatacgtctgaggaaaaccttctgaacacttttgaagctgaggagaatcctgtagttgaaccaacagctacagctgctgtctcttctgatgaactcatttcaacttcagaagcaacacgtcacagcgttgatgagatcgctcaaaagcctattattgatacgtctgagaaaaaccctatggaaacttttgttgaaccaaaagcagtgcatagtagcgttgacgagagcactgaaaagcttgtagttgttacgtctgatgtggtgagtactaactctaaaccattaagtagttttaacaggtgtagaaggaaagagacatcagagagtgttgttgaacagaattagtgccaccactctaattacttatcattcatgaaggaaaatgatggagaaaatgtagcttcaaccacagaagatgaaataactgtgagggacacaataactgatagtggtagcatatccaataatgatgacacaaaagtggaagatctccaacttcctgtacctgaaacggccagtcaagaaaaaattaaagcggcttctggcaggttagtaagtgatatatttaactcttcttagacaaactatactattgtcttgcacagatacagctacatgcatatatgtatgtatctattcatattttcatacagggctaggaatcatattgcagcttttataaaagcatgattgttttgctatggttggatgtttgacatctaaacagggaagaacttgtgtccaaagcattttacttggactctggttttgcttcactccaaagcccctttaaggtacctgtaattctttctgtttagtatacacaaaaataagagacaggtgttgaaatattaattattaacactctatatctcaagatctttcatatcttggtctcatttccaaccacctcaaaaacatcatttttaacattctgacaatttttgaattttaaatccctatacttatgttatgtggttagtaatttagaaataatgatgtccaggcattggcaggtcgggaagatgcttattttatctctcaccacaattggataggtattgctgatggagtctctcagtggtcatttgaaggtaaatactgtatataagtattttcacatagttttccaaattcttgcagaaactcagtcacttgtatttggccttgccgaatatatgtttgattcatctttcaggaatcaataagggaatgtatgctcaagaactcatgagcaactgtgaaaagattatttccaatgaaactgctaagataagtgacccagttcaagttctccatagaagtgtcaatgagactaagtcctctggatcatcaacagccttaattgctcatcttgacaataatgtgagacttggtccctaacatatatattacattggaaatccttttgagatagagtcagtctgtgatcatgtaaaattactttgtaggaactccacatagccaatattggagattcgggattcatggtcattagggatggcacagtattgcagaattcgtctccaatgtttcatcatttttgttttcccttgcatattacgcaaggctgtgatgtcctaaaacttgcagaggtacgatgtcgttacttaagcaagaaatctttattttcaagtaacagacactcttgaatggttcatctacaccagaatatgtgcaacataagtggtcttgctttacacaatttgcaggtttaccatgtgaacctggaagaaggcgatgttgtcatcgcagcaactgatgggctctttgataacttatacgaaaaagaaatcgtttcaatagtttgcgggtcactgaaacagagtctggaacctcaggtgctcaatggtcttgaattatctcctctttttggttgaacaagtagtttcggcgggtgttagttgtgtacgagtcacttagctctcgttttcaaatggttttgagatgaaatgtgctgttatcaatgcgttggggatatatgagtttgattaatgtttgtgcggtgtaacagaaaatagcagagttggtagctgcaaaagcacaagaagtaggacgatctaagacagagagaacgccatttgctgacgcagctaaagaagaaggatacaatggacacaaaggtggtaaacttgatgctgttaccgtcatcatttcattcgtgaaaattgtctctacataaatatgcatcttcctattaattgtaaataatggagagagccgcacacattcacaacaccattctagtttttccaaaaatttcattgaaacgatgtacactggagtaagtttgcattcctgagctatatatgtgagccggatcagtcctggatctgacccgatatccagtttccgacccaaacctagtaaacacagtacaatattactcaacccttgtgacttgctctaaggccttctcagacaaaacaaaaaaaaggatgaagctttttcttagaaatgcttttaaaaccttaaaccctaagagaaaactagcgacgacgattcttccttcaatcaatttaattctcgttaaacccttctctcaatccaccaccattcccaaaaaacaggatcgagttcgtgaccatggctacgacaattacatggaagtggagaaaaaaatccgcaaagtcgtcaaatttcacagcttgattctctctcaacccaaccacacaatcgcaatctctcttctagacacgctcgctcgtcgtctaggtctcggcttcaagcaacacgaaccaggtgcttttctcctcaagttcccacacgtgtttgagatatacgagcacccagttcaaagaatcctctattgtcgattaacccgtaaagctttggatcaaatccgtcacgaacacgaagctgttctcgaccaaatacccgacgccgtgacccggttgaggaaactcgttatgatgtcgaatacgggtcggatccgtcttgaacatgtcaggattgctcggactgagtttggactccctgaagatttcgagtactctgtgattctgaaacatccacagttctttagactcattgatggtgaagagactcgagataagtacattgagattgtggaaaaggatcctaatttatcgatttgtgcaatagagagagttagagagattgagtatagaacaaaaggaattgatgcagaggatgttcgattctcattcgttgtgaattttcctcctggatttaagattggaaagtattttcgaattgctgtttggaaatggcagaggcttccttattggtcaccgtatgaggatatatcgggttacgatttgagatcgatggaagcgcagaatcgattagagaagagatctgttgcttgtattcatgaattgctgtctttgactgtggagaagaagatcacgcttgagagaattgctcattttaggaatgtgatgaatttgcctaagaaattgaaagagtttcttttgcaacatcaggggatattttacatatcgactcgaggaaattacgggaagcttcatacggtgtttcttagagaggggtataagagaggggaattggtagaaccgaatgatgtttatttagctaggaggagattagctgagcttgttttgatgagtcctagaaaggctaaggttgatgcagagttg

SEQ ID NO: 138697 - DNA, 595 bp, Arabidopsis thaliana landsberg
atgggttctcgacgagaccgtgagaaacctggatattcaaggcctggaaagaaacacaaatcttcaagagatggagaaccaatttctgaacattttatgggtccaccatattcatcaaggcagtaccacagcaattactcaaaatcgagtagatatgctaataatattcagcctcacgcatttgccgaccagatgaagcctgtaaaaggtagtctagcagaccttcgtggtgacttatatcggcatgggaagaatcatggagatggcttttctgttgatcccagatatatatctgatgacttgaatagtaaaagcaaaaagttgaagtctgagagggactcacctgatactagtttgagatcttatagagcttctatgcaacaaatgaacgagaggttcttaaattctgattttggcgagaaccatgtgcaggaaaagattagggtgaatgtggtacccaatgcaaggtctggtgttgcggctttcagagatagcaggatgttcatgggaaatgatgatacagagtcggattcatcccatggctatgatgatgaggaggagagaaatcgcttaatgcggaacaaatcttctgtct

SEQ ID NO: 138698 - DNA, 1283 bp, Arabidopsis thaliana landsberg
acgagctttctcccggaaggcgacttggacaacattgtacatgagctagctgaagaaactggtgtgaaagaagatgaagtcttgtcacggatagagaaactctctgaagtgaatccaatgcttggtttccgcggttgcaggtttcttactctctttgtttctctctgtctctttgcacctgaagaacaatctgatgatcggtaaacttgtacgttataggctcggaatatcgtatccagagctaacggagatgcaagcgcgtgcaatttttgaagctgcagcgtcaatgcaggaccaaggtgttactgtcattcctgagattatggttccacttgtaggaactcctcaggaattgggtcaccaagttgatgtaattcgtaaagttgcaaagaaagtatttgctgagaagggtcataccgtgagctacaaggttgggacaatgattgagatccctcgagccgcgctcattgcagatgaggtaaatgtaacaagacacaaaatgtgttttaggcacttgaaaccatgttgctatttgctaagtaggaacctttttcttttgacagattgcgaaagaggcggagtttttctcgttcgggacaaacgacttgacgcagatgacgtttggatacagtagagacgatgtcggcaagtttctaccgatttacctcgccaaaggaatcttacagcacgacccttttgaggtataatgactaccatttcgtttgctctctatccataggataaaatcttgatagccatttttttgtgtttggaccaggttcttgatcagcaaggtgtagggcaattgatcaagatggcgacagaaaaaggacgagcagctaggcctagcctcaaggttgggatatgtggagaacatggaggagatccatcttctgtgggattctttgctgaagcaggacttgactatgtctcttgttctcctttcaggtaattgattaatttccaaaccaataaacactttttttacaacactattgtataactcagattgatgtaattttgggatttctgttgttgttgttgttgttgttgttgcagggttccaattgcaaggcttgcagctgctcaagtagttgttgcatgatgaagaaaaaacttggtggtgttattctgtgaataaaaaagctttggtttctgttccataaaaatgaacaaaatcaaagatattggatttaactatttttgtttccttctaaagaatgtagaatataaagccttcatgtaataattgaattgctaataaaataaaaaccattgtttct

SEQ ID NO: 138699 - DNA, 319 bp, Arabidopsis thaliana landsberg
ttaggtccaagggagagaccaccgccgccgaagaaaagggggcggcggaaggaggaggaaggtgaggctgaggaaattagttggtctgcggcggcgccttcgttggctgtggcggaggaggaatttgaggaggagaattgggcttcggtggtggataatgaagctggagagaggttgagaaaaagagaagcagaggaagaagaagagaggaggatgaagagaaaggagaagaaagttagctactttagtgatgagagtgatgatgaagattagcttcttagattcattttatggtttgtgaatactgaaagagagagat

SEQ ID NO: 138700 - DNA, 2145 bp, Arabidopsis thaliana landsberg
cacttagcagagcaaatgaagaagacgaagcacagtgagaattcaccggccagagatcaccaataagtgttgtagtttccggttacttcgaataaccttcaatggagcttccgttactctcgtatgctagctccgcgtcgttttcacggacaggcttatgctcttcttcttcttcctcctcaactagtatctatgagtttccggagagaagacggagtttaaaattgagattcaatggtggagaaaggtcacgaagcgttatagcttccgctgaacggagcagtgaagggattgagaagacaacagacaccgtcggtggcggaggaggaggaggagcaggcagatttgctggtactgccatggaggttactacacttgatcgtggttttgctaactccaccaccgttgattttccgatctgggacaaaatcggcgccgtcgttagacttacttatggaatcggtgagtagatttacattaaatgtcttctgtttcactcctctgatatgtgaaacttgaaattttacctttgtggtgtcattagtaatttttgtgtggatgaaaagttaaaatgtgtgattgaatcattaggaatatatggagcaatggctgtagcaggaagatttatatgttcagtgactggaattgattcatctggtggatttgatccttctcttgatgcactacttgctggacttggctatgcaacaccaccaatcatggctcttctcttcattcatgatgtaagttagtagtgataatgaatgtctctttaaatggctatgaaggtttggggtttatgagaaagatttggttgtttattgtataggatgaagttgttaaattgtcgcctcatgctcgtgccattagagatgttgaagatgatgagcttcgaggtttctttcaaggaatgtcagcttggcaggtgaagaaccctcaacacagaatcttattgattgaatctttgagaaaaaatgttaaacctttgtcttgtgtttctttagtttatcttagtagttactgcaagttcagttggagaagagctcttctatcgtgctgcgtttcaggttttgtgccttctaatagtcttcaattgttttgtttctctttctgttttaggtatgtgaagtttttcgtggttttgatattgttttgacagggtgcactagctgatatattcctaaggggcacagatctaatctcggattctcgaggaatggttgctttggtattatagattttctgttcttccttgtctccttcttgttccttgaactcgtttaagtgtatttgacttttaattgtttgaattttcagactggactcttgccaccatttgtaccatttgctcaagtatttgcagccactattacagccgctctcactggttctctctactacatagctgcttcccctaaaggtttccttctacacttaaaacatttctctatgttacaaaacctttaacctcatagctgattttgttttgttatttctcttagatccaacttatataatggcaccggtcttgaaaactcgctctgcccgagacgagctgaagaagttgtttgcaggttcgtaaaactcagtttagcataaggatttagatatgttcactatcacacactaaggattctatgttcctttttgcagcgtggtatgagcgaagacagatgaagaaaatctactctcctcttcttgaagggcttttgggtctatacctcggctttgaatggattcaggtttttacttcttctgttcacgcatttcttttttcgacatgtcgtagtaaaatcgttgataccaaactgaaaatattgcagacaaacaatcttcttgctcctatcatcacacatggtatatactcagccgttgtattgggtaatggtctctggaaactacaccatcatcagcaaagactccggctacgtgttcagaaacttgaaactgaaggtgacaacaactcaagatagataaataactgtataaaacattatcctttgttttaaattttgtaaagtgtctgaagtattgagccaccattgacttgtacaaatagatagaagcaaagtaaatgtatagaaccatttagttaataagagagtagctatgtgaagcttttattttatgatcttccatctgatt

SEQ ID NO: 138701 - DNA, 1313 bp, Arabidopsis thaliana landsberg
atggatttagttaatgttcattccaatgaccaaccaattctcatcaacaaagacatgttcaccaacaatcaactatccgaaccagtcaaagatcaaaacctccatggtttagccgaaatattgactcttcagagatgtggaggtacagaggaaattaccagaccgggtcaagaccaagactataagagtcaggagcagacttgctccgtgttctgtgagatcgaggtgataggagaagaggtcgggaagagaccacaggagacagttggttaatatcgttaagagacaagctcgatcaagcacatagagacgacgacacaacgatctggggagagctctgcatggagacgttgaccgaagttgaccaaccaaaactcatgaacgggcaagaaaaatcattggacatacttgacgataagggcaaattgcactgtctggatgtatttcgtcagagtctgctccagtctaatgctacaccgaatcaaagatctagactaatgaggttgactaagaatacgtatgtggtggacaagcgattgcaacaactggtaaattgcgtgacagagctaagaggagctggtgtaaagctcaggagaaggaatactgaccggttttgggatattcaattcaaaaatggttatttagagatacccaaactactaatccatgatggtaagctaaaaagctttcatttctttcctactttttattcattactcacatatgtttgcataaaaatctaatttgttcaaccggctatgtcaagaagtggttttcgatcccaaagatagtcatctatctcgactgtctggtgatgtaaaccgttattacaatcgtaagtggaatgttttgaaggctaccttgacacacaagtacttcaataatccttgggcatatttttctttttctgctgcagttattttgctacttctcacattatgtcagagtttttatgctgtttatgcttattataagcccaattctaaactctagttgggggtttttcccatcaatttggaatgtttgtattttcttgtttttcaacattttctatgtacttgaccaagattttgcattgtaataattgggttttggaataattatgttgttgcaaagcaattttaagaagtttgattttattaggggtgcaaaatttgtaaactaaccaacccaataaaaagctaacctaataacctaacccattaatggtctcttttgtttttttttcgctggtcatgaaatggattaatccatgtaaaaggattgcaataaatttatcacgaaaaataatttatccaaaatgtatatggaat

SEQ ID NO: 138702 - DNA, 459 bp, Arabidopsis thaliana landsberg
agaaaggatcgttgacaagaactaaagatctccaagaagataatggaagatccacttttattgggagacaatcagataatcaccggaagtcttaagccgacgccgacatggaggatgaatttcacggcggagctcaagaacctcagccgcatggcgctgcctatggccaccgtgactgttgctcaatatctattacccgttatctcagtcatggtcgccggccaccgcagcgaactccagctctcaggcgttgctcttgccacttcttttacaaacgtatccggcttcagtgtcatggtaactactaactagttgttattaatcctcagtttcaagatccattcgaatctcaaagtcttgaatgtttttttgcagtttggtttagcgggtgcacttgaaactctatgtggccaagcttatggagcaaaacaatacgcgaaaatcggaacttacactttc

SEQ ID NO: 138703 - DNA, 990 bp, Arabidopsis thaliana landsberg
gcaaaaactctctatttctctttcgccggagataatgggagaagggaaggcctccactctggttttcatcctcgtcgtcgctcttagtttagtagccttcggcttctccatcgccgccgagcgccgccgcagcatcgtaaattcactcttctctctctgtcccacttttttttttctcatttagggtttttgttctttaatgaactctagttcgaattcttaggttataatagtcaatagtatgattctgttgaatctttctatttctggatttgtttcgtaattacttgcaattttcagcgaacatgttatttggtgcctctaatttgaattcaagattcttcaagagtcagtaaattgggggaaatcttgaaactaaagaacaaatttttcagagctatgttcatgtttttgtagctgaggactagagaaacatttaagtgacttagcttagttatagattgagacattgagttataatctgttgtgacacttctttaaggtcattatttctctgtttttgtggcaggggaaatctattcaagacccaataacaaacacaacgttctgcgtttatgactctgatgtagccactggttatggagttggagctttccttttcctcctctctagtgaatcattgcttatgagtgttaccaaatgcatgtgttttggaagacccttagcccctggaagtgaccgtgcttggtctattatctatttcatctcttcgtggtgagtccctttatcttaaacctctctaaagcaatgtatatatcttcaagtttagcttcatcttgagagtgatatatattgaaagagctttagattgatttctgtttttgaagctttgaacatatcaatggattagtagtttgatttctaaaccaatattttgatattcaaatttgacaatttcaggatgacatttctggtagcagaagcttgtgtaatagcaggagcgaccaagaacgcataccacacaaagta

SEQ ID NO: 138704 - DNA, 2435 bp, Arabidopsis thaliana landsberg
cctctggcggccatgaacgaagaggaggcaccatctgagcagaagaagacgttatcattggtaccctcaccgaccacgaatctgtttcttcctgatgacatacttttgagctctctaagccgcatttcaagattgtattacccaactttctctcttgtctccaagagtttccgctctctaattgcttcaccagagctttatcagactcgctccatcctcggccgcaccgagagttgtctttatgtgtccttacggttacttaacgactctaacctccgatggtacactctctgtcgagttccggatcgaaaactaacaaatttctcaggtggtcatttattggttccgatcttatctcgctatgctcctcctgctcattggtcgagtgtggtcgctgttgattataatatctacgctattggagggcctatcaatgatgcaccatcctctagcgtctcggtcttggattgtcagtgtgagaaatggcgtgaagctccgtccatgcgggtggcacgaaactaccccactgcgaccgttcttgatgggaagatatatgtagcaggaggctgtgaagattgcacttcattggattgtatagaagtgtttgatcctaagactcaaacttgggactctgtggcaagtcctggcaccgagagatgcgagagacttgtatacaagagcgtagggatcgaaggaaagtatcacttgtttggcggtgcgggtcatgtggcttacgacccgaaagaaggtagatgggactcagttggaatggatatggagatgggtcggacatgggtttcatattgtgtgataaacaatatattgttctattataatgatagagagtttaaatggtatgactataaaggaagattttggagaaagttgatggggttggaacggctaatcaagtttctatgctatagccgtcttaacttggcggcttacggtgagaagatggcggttttatgggatacttttgtgccttctagctctaagaacaagatgatttggtgtgcggagattacgattgaaaggcacgacatatacgagatttgcggtaagactgaatggtttgatgttgtgcttagagttcccaaatcatatgaattggtacatgttcttgctgctactgtttgattcatgatgatttggagagtttgtgtagtattgggctatttaatttgatggatgattgtttattgtttctatattgaggcccattaaaaaatgatttatatattaagcccacaattgaattatcacacactcgcaatctgaacgagtaaagcaaacgcgttcgagaactctcatagcagtgaagtgaagtcaaatccctagattgacttgctcaacggccctttcatctcgataattagccaatgtcttcaccggagaggaagtggattagggtgacgtcgacgaagaatccatcgggtaagaggaagaagaagatttcaccggtgccgacgccgataccgtcacttcctgatgatttgcttgtaagtatcttcgcacgagtctccagattgtattatccgattctctctcttgtctccaagagctttagatctctcctccgttcaccggagctttacgagacacggtcactattaggccgaaccgagagttgtctgtatttgtgtttacaggagggaaatcctgatccgaaccctctctggttcactctctgcatgaaacctgacagaaccctaaaaaatggcaagaagaagaagaagaagaagatgtcaagtggtaatcttttgatcccaattccagttcctaatccccctcttgagcactggtcaggtcacgcgtctgttggttccgatatctacttctttggcggatacatggaggagaatgtgcgttcctctagagtcgtgatcctagactgccggtctcacacgttgcgtgaggctccaagcctgcagatggaaaggtcggaccctgctgctagtgttattgatggaaagatttatgtagctggaggtgtcgacggtgatgatgcagattccttgtacccgatagaagtgttcgacataaagacccaaatttgggatcataggcccatcccttactgggagaaagactggggcgctctatcaagaagcgcgtatgttgatggaaagttctacttgacgattgggatgaaggttatggcttatgatctagaggaaagtagatgggactttgctggatatcagatgggtcagagttggttttggtcttgtaattgtgttatagagaatgttttgtactgttatggtgatgctttccgatggtttgacactaagctgagattgtggaaagttatgaaggtgaaaggactacctaagttgtcccgtaatgtcgatgttaagatagcagattatggtggaaagatggcgattttttgggacaatccttccccttctgcttccgatacgaaccaa

SEQ ID NO: 138705 - DNA, 782 bp, Arabidopsis thaliana landsberg
tttcgctatttttatttttaattgatactttttttttactatcattcccagatcaaggtttgtttctcgatcgaattcatgcttctctgatctgagatcagttagatacgactgcgttttcctcctcgaatttgatcatcggacattctctttttgtttcctgggtttatagtgccgcacgtcaatggcgtgaaccgcggtcatggctaacaaaaacgcagaatcatcttcacagcctcctcctcatgtgcagccaaaccaacaacagcagcagcagccaccgattgccaatgaacaagagcaggagcctcatgtgcgtctctctatttttggaaattcatctcgctccagacccgattgttgttcttcttcttcttccaatgttgctcaatgtttgtttttgttctgatctcagggtgacacctgcagtattcctcctgcgcagtctggaaacacagactcgcgttcccgtggtggcaacacggtaatttcttaatgagatatttatttgctttttgatcgaattgcctctgtaatggaacgcgaagcaggagaaattacttgttcacaatcccacttctgatctcgtttttggctacaattacctgcattttctgtcttctccattggtcattgttgcgcgatgatgagcattcatgtaatcattaggcatgtcctggttttctttcgagcaaatctcattccgatcgattaatggaaatatggaattgaattattgcatcattgacttaagacttgagagttttaccttttcaggttaa

SEQ ID NO: 138706 - DNA, 1314 bp, Arabidopsis thaliana landsberg
atacatcttcctcatcttctctctccgtgttgactcttgaggcgatccaacaaacaacaacaacaacgccgcgattctcgagggtaagtagtcatacgatttcagctgattttccaggatggtttcaattttgggtttatgcagaagatatttaatagattgtgtgtccgcaatctgaaagttgctgctaggtttctgtttgttatacctatttagattctgataggctgtttcaattattaacatgagttgttgaatctggaatttgcaggaccaatccgttcagagagattaaagctgagctgagcttctccttagaaaggaagatactgcttgttctacggaattttgagagatgcctcgggacttgtcaagatcgaggtcaccgtctccatcaccttcacgtcgtagaaagcactcgaggtctcccgtaaggcagaggcatagcaggaggagtagaagagacagaagcccttctccatactcatctcattcgtatagcaggtgatacccctagtgtttgttttttccgctattcgtttgccttagttatcattcgtttatacgaactgtaagaaacattggtggaacacggttatagatagacatgtaaagtttacagactcaagaattgcttttagtaaagttcctacttatagatatattttctacccttctctaaaagagagtgcaatgtctggatgctgctggctctgtatcgtaagcgtttttttgagtgatgctgcgtattggaaatatatcgtgtttatttggctgttgtgattaaatttgttgcaagagaatatgttttatgacctgagctttgtgatttttagaatgaaacctgtatattcggtaaagacataagttaagctgggataatagcactactgatagtctgatctagtttatattttaattgtatctgtagattattagttagaatcagttttaagagcgactatattatgttcttttaaatggagtttgttagcaatagtgatacaaaaccaccactattccttaggtaagataatatagtaatttgttgagaacatggctgagaagctaggaaaatgatacatgcgcttaccattataaaatagctcagtttcttcccgttcccacgggaggggaaatgagcagctgttggattgctcttaggtgttctttcattgatcccttgtctcgttagcttctcttcgtgtgataaaagttggagctgataattctttacagtgtatgaggtaactgcacatacttttgttttctttatgtgtaactgtgggctacctgatgcctagtcttcacgtg

SEQ ID NO: 138707 - DNA, 1641 bp, Arabidopsis thaliana landsberg
ccagaagaatatctcgaggagttaaagaatggtcttaaggctatccttgaaggaaatggtgcgcagcctatagatgagtttatgtttctgcagaagtttgtccagacgagatctgatttaacttcaaagacacttgtcagggctcaccgagtgcagcttgaagttcttgtggttataaacactggtatccaagcattcttgcacccaaacatcaatctctctcagtcatcactcatcgagatctttgtgtacaagagatgcagaaacatagcttgccaaaacgaactcccggctgatggttgtccctgtgagatatgcgctaataggaaaggcttctgcaacctgtgcatgtgtgtgatatgtaacaagtttgactttgcagtcaacacatgccgctggattggctgcgacgtgtgttctcattggactcatacggattgtgctattagggatggggagatttcgatgggagtttctcccaagagcgtatctgggatgggagaaatgctgttcaagtgtcgagcgtgcaaccatacttctgaattgctgggatgggttaaagatgtgtttcagcactgtgcaccgaactgggatcgagaatctttgatgaaggaacttgattttgttagtaggattttccgcggaagcgaagatcaacgaggtaggaaactgttttggaagtgtgaggagcttattgacaagattaaaggtggtttggctgaagcaactgctgccaaattgatattaatgtttttccaaggtaacttcttttttatgaaccaacattactatttgtctgcagagtcttaacccttttttgttactgttttaccgaagagatcgaatcagactctgcgaagagctttgaaaatggagaaggtggacgtttgatggcacctcaggatgcatgcaaccgaattgctgaagttgtacaagagactttgaggaaaatggagatagtggctgaggagaagatgagaatgttcaagaaggcacgcatggctcttgagacatgcgatagagagctcgaagacaaagccaaggaagtttcagaactgaaagcagagaggcagaagaagaaacttcagatagatgagctagagagaatcgtgaggctgaagcaagcggaggcagacatgttccagcttaaagcaaatgaagcaaagcgggaggctgataggttgcagaggattgtactagcgaaaatggataagtctgaggaggaatacgcaagtaactatctgaaacagaggctgagtgaggccgaggcagagaagcagtatctgtttgagaagattaagctgcaggaaaactcaagggtggcatcacaaagcagtggtggtggaggagacccgtcacaggtgatgatgtactcaaagatccgcgatctgcttcaaggatacaatctctctcccaaggttgatcctcaatcaaacgagcgtaatcctttcagatccaatccttaatgcttctatatatatatatgtagttttcatatcctaaatttcatcactgtgttttgtaaaacgagtgtttgttgccgtgtaggatctatctatattactgacgttttgtaatttgtgtgttctcactttgttgatatgaagttgtttatctatgttatggtttcttggttggttg

SEQ ID NO: 138708 - DNA, 3139 bp, Arabidopsis thaliana landsberg
  unsure (1)..(3139): unsure at all n locations
gcttccatactcagaaaccccaaaacgcttatttctcaaaaatctccactctctctcttctgtctcttcaatcacttggggttgtgtcactgaatctgcatcaatggcgattccagattcctcactcttttctgcttttgactttagctctagcttcttcttcacgaaatgccgttgttgttaaaaagtgatttctccactatcccatttcctttggcatttattctccactctctctcacttgtcttcttcttcttctacgatcagctcaccaatgtcctgaaccattctcctctgaatcaacctctaaggtctctctcactttcgatctctgttttccctcttgttttggggtttattagcttcgttgtttattcctttaaaagatttcttctttctcaatttcaattactccgtttagcttagctggagaaaccctagtttgtagattgcagatctgggttaatcaagtatctgtgcacacatttatgtctaaaattagttactttcgtaattggatttgttttttttgtgaagatttattatttgaagtcaaacagatttcagctgattgaatcaatgtgtgcatatagcttccataatttcatattttgatttgagaatcgagtaatgttgctttggactttatcatcagcattcccactttggtttgagaaattacgctattgtatctttgtcattattaaggaagcttttcgttgtgttgatgatctttttactcatgatacctgtgatgtgtaggtgtcattcttggctactttatccatagatacatttctcatattgagtttagcttttatgtggctataaatcattacatgatgtgttttgtgttctcttgcagttgctgttgaatgagaaagctttgatgtgagcgagcctgagagtgtaacaaaggactgatgatgaagattattgcggcgtttctcttcctcttggtcacgacttttgtttcccgttgtttgtctgcagacatagaatcggacaagcaagcactgcttgagtttgcatctcttgttcctcacagtcgcaaactcaactggaactccactattccaatctgtgcctcttggactggtatcacctgctccaagaacaacgcccgtgtaaccgcactccgtttgcctggatctggactttatggacctttaccagagaaaacatttgagaagcttgatgccctcaagatcattagccttagatccaaccaccttcaagggaacattccatctgtcattctttcacttccttttatccgatcactatactttcatgaaaacaacttttctggtactatccctcccgtcctttctcatcgcctcgttaatcttgatctctccgccaactcgctctcgggaaacattcccacgagtctacaaaaccttacccagctcactgatctcagcctgcaaaacaattctcttagtggtccaattcctaacctccctcctcgccttaaatacttgaatttgagcttcaataannnnnnnnnnnnnnnnnnnnnnnnnnnnnnnnccttcccagcatcctcatttcaaggtaatagccttctatgcggtgctcctctgactccatgcccagaaaacaccactgcaccatctccttcaccgacaacaccaacagaaggtcctggtacaaccaatataggtcgtggtaccgccaaaaaagttctctccactggtgctattgtgggcattgcagttggaggttcggttctgttgtttatcattcttgccatcataaccctttgctgtgccaagaaaagagatggcgggcaagatagcaccgcagtgccaaaagctaaacccgggaggagtgacaacaaggctgaggagtttgggagtggggtgcaagaggcggagaagaacaagctggtcttctttgaaggaagttcatataactttgatcttgaggacttgctcagagcctcggctgaagttttagggaaaggaagctatggcacaacgtataaggccatcttagaggaaggaactacggtggtggtgaagagactgaaagaagtagcagctgggaaacgggagttcgagcagcagatggaagccgtgggaaggatcagtccacacgtgaatgtagctcctctccgtgcctattacttttcaaaagacgagaagctactcgtgtatgattactaccaagggggcaatttctccatgctgcttcatggtaatatgatgttttacatgttactcaaggttataaaaagtggctttaaagtaacactttagatgaattctatgcaggaaacaatgagggaggaagagcagcgttggactgggaaacaaggttaaggatctgtttggaagctgcgaggggaatttctcacatccattctgcatctggtgctaaactcctccatggaaacatcaaatcaccaaatgtcctcttaacccaagaacttcatgtctgtgtctctgatttcggtatagctccattgatgagccatcacaccttgatcccatcaagaagcttaggttacagagcacccgaggccatagaaacacggaaacatacccagaagtccgacgtatacagctttggtgtactgttgctagaaatgctgactgggaaagcagcagggaagactactgggcatgaagaagtggtggatctgccaaagtgggtgcaatcagtggtgagagaggagtggactggagaagtgtttgacgtagagctgatcaagcagcaacacaacgtagaggaagaaatggtgcagatgttgcagatagcaatggcatgtgtgtctaagcatccagattctaggccttcaatggaggaagtggttaacatgatggaggagattcgaccttcagggtccggtcctggttctggtaacagagcctcctcgccggagatgatcagaagctctgatagcccggtttagattggttttaaattctctttctctcattctcaaatcattatttatttttgcttttccttcttcttcttcttcttcataaaccgtttattttagttctctatgtctgactgcataatttattccaatcaatatctggaattgtagtgtaattgaaaccctcaccatgaatggttgtagttcttagattggttataagtgtgcgactagttttgaatt

SEQ ID NO: 138709 - DNA, 808 bp, Arabidopsis thaliana landsberg
agaaaaaggaaaagaatagtcccctcttctgcaaaatcaaaaacatatttgcatcatcttcacaccgtcatcatcatcgtcttcaatttacttccaccaaatcaaataatctctcaaaaaccctaatttctctttttcttctctgatcaaaattgttcgttcctctcccttttcatcttatcggaatgcttattttctggtcgccaatcgaagtctaaaccctattttcttaatcttctagggtttcgaaaagggaggagagtgaaagatatacatacatacacacgaaaggggtttaagatgtctcttccgctactggagtgtaagtacgtgacggaggagtttgttcgtgaaggtaagaatggcaactatggaaccaagctgcccagctctgtgccgatgcttcgtttcctctacgagctctcttggattttggtatacacacaaacaccaccttctcttcctactactatccaatcacgcgtatatgttgttcgagttcctcaacggtgcctcgtgatggattattaggttcgtggcgaattgccaattcagagctgtaaggcagtgttggaaggtgtggagtttttggataagccatcgagagaagaattagcttcgtgttttgcggatgttgtgactcagatagctcaagacgtaagtccaattacagttttgacatccttagctcagagatgattgtgcaaggttattgatactgatcgttggattgattgggttcgggtctctttgctttgttttgcaacttaccatgttcggagatcaacgttctcgtctaatcaaattg

SEQ ID NO: 138710 - DNA, 823 bp, Arabidopsis thaliana landsberg
tgcgataggatctatggcagtaagtacttatatttactcaaaatcgtttaagtacaaatactcaaacgttgatcaactaacgtcatttcgttgtttaggcacttcaactctggtcgaagagtgtacctttcattcaacacccgagatactcgaacccatcatacagggaggaagcagcgaaacgcgatcaagaacttcgttgccccgggttagatgggtctgattctgataaaaccaacaaatttgatgggttaaaaggagatggttgtagtagtagttttggaggatgtcgctttgcgtggcgagatgcgaactggccttggtcatgaatacatacactctcaaggtaataaacacactatcttttcacttgtctaaaaatgtttaaaaaccagaactgatactaacctattcttcatacctgaaaatgacaacaaattatgttctatcaaatcctgaaatatgaaagttacacccatttttggtctttgctcaatgagaaagattttgcaggcttcttttcatccttggaatcatcagttttctcttttgatttagggggtagcagatcatcaagagtttcggaatttacggtcattgtccaatgatatgattggtataaatcatttgaaaatctcgtctcaaatttagttggcttgtttaaaatttggcttgaacacaagtgaaccttgttgattaatagaaaaatcaactttgcattttgattgattcgtttgtaataattctcatctccgaaaatcctaacctctgtttgttgataagtcttcatgtgatcatgtgacttgatttcttgcaagttaaa

SEQ ID NO: 138711 - DNA, 510 bp, Arabidopsis thaliana landsberg
gaggagactgtgtctgtgctgacgtggatgcttcccattggtttagaaggtcaatccaaactcaccacgacgtcgtcgtttaatcgtttagtggaactgttgagaaatggtgatcaaaacgctgcgtttttgataaaagagcttcttgagcttaacgtaactcacgttcacgcgttaacaaagatcaatggcgtccaagaagcgttcatgaaatcgattaatcgcgattctacatgcgtcaactcgttaatatcaatccaccatatgatcttgacaaatcaagaaaccgtatcaaggtttcttgaattggatcttgtgaatataacagtggagatgctagtggattcagaaaacagcgtttgcgagaaagcgttaacggtattaaacgtgatttgtgaaactaaagaaggaagagagaaagtgagaagaaacaagctggtgataccgattttggtgaagaagattttgaagatttctgagaagaaagatttggtttctgtgatgtggaag

SEQ ID NO: 138712 - DNA, 648 bp, Arabidopsis thaliana landsberg
aggttggatgtaccagaagaagtgaaaagtcctgctgattttcggttatcaccatcatcaccattgtctgcatcagcgagagaggaggatcacttagatgatgacagagtttcggatgtgggacctagagcagtgagattcgttgaaccttttcagagtagtgaatgtgatgagagctcctatgtttctgatggagaaagtatagctgcaacgcatagagctgaaaggaaaggtaaaagaggatcgtgttaccggtgccagttggggaaccggtttactgagaaggaagtctgtattgtctgcgatgccaaatactgtttcaactgtgtgcgcagagccatgggtgcgatgcccgaaggaagaaagtgtcaagcttgcattggttataggattgatgagtccaagagagcaagtctcggaaagtgttcaagaatgctcaagcgccatctcacggattctgaacttcgacaagtcatgaatgccgagatcacctgcaaggcgaatcaattgccttcacgacttatcattgtcaatgacaagcctttaagtgaagatgagctttacacgttgcagacatgtccaaatccacccaagaagctaaaacccggacactattggtatgataaggttgctggctactggggaaag

SEQ ID NO: 138713 - DNA, 1937 bp, Arabidopsis thaliana landsberg
cttgttgaatgtattattattcctattgatcatcacgtgaaatatagaaaaataaaataaaaaagcaaaatccacttttgtgttttccttttcgtttacgaccaaagagatccactttatgctctcttcattttctccatgtaatgatttttctcgagagatttctgaaaataaagtcgtttctttttttttttgccttggtcactcaagactctcttcttcactctctgttttttgtcctcttctaaaatttagagaaaaaaacgaaagttttcaccaaaaacagaggaggagctatgtcatcgtcgacgatgtacagaggagttaatatgttttcaccggcaaacacaaactggatttttcaagaagtcagagaagccacgtggacggcggaggagaacaaacggttcgagaaagctctcgcttatctggacgacaaagacaatcttgagagctggtccaagatcgcagatttgattcccggcaaaacagtagctgacgtcattaaacgatacaaggagctagaggatgatgtcagcgacatcgaagccggacttatccccattccgggatacggcggcgacgcctcctccgctgcaaacagtgactatttctttggtctagaaaactccagctacggttatgattacgtcgttggaggaaagaggagttcgccggcgatgactgattgttttaggtctccgatgccggaaaaggagaggaagaaaggagttccgtggactgaggacgaacacctgtaactaccaaatttcttcactacttctaattaatgttataaagatttgttctaaaaaaatcgatattttatgttataatactatagaatttaagtttctaagcctaacaatttgtttattttggtaaataattttggaactaaatcttgttttatggtattttgaggtaaatatatctcttttattaatatttacttgaaattctctgtttttatatgaactcactgaggagaatatttcttttgataattaaaatgcctaggatttatacttttcttacaatttatatctattttcaaatactttcttgaaattatttatcttatgtgaagttaactaaatataatattgatttacttttctttgtttgacagacgatttctgatgggtttgaagaaatatggaaaaggagattggagaaacatagctcgtaactttgtgaccacaagaacgccaacgcaagtcgcaagtcacgctcaaaagtatttcatacggcaagtcaatggtggcaaagacaaacgccgttcaagcatccatgatatcacaaccgtcaacatccccgactctcctgacgctgcagccgcggataacgcaaccgcaaacgcaccttgctcgccaccttccgtaggaggaaaccagcgggagacatcggagtgggaaggtcaaacactatacgatgaaacagcagctgcgttttataatcaaaacgcgttttcagaaacgctacttggaatgtcttcgacgccctacatggcaaaacttcaggagcagagttttctgaacgcatcgcaattcgaatcgtacaatgcgtatctccaaatgtagctcacaaggtgaagatctcggagaagttacgagttatataatcattaataatttttgttttttctcttaatcggcgtgcatatacaaaaaacaaaattagctgctatttttttattacgagatacttatttgttgttttgtttaccatctttttccgtggttgattcaacgagttttcagcaaattaattaggttttgttattttaattacttgagtgatttatttttgtgatttggaactcttttgagctcaaattgtttattaatctatgctgtgtctgtcatataggctttcattacagtatttttccttgttggtggatatttataattaataaattatgattgtaaatc

SEQ ID NO: 138714 - DNA, 335 bp, Arabidopsis thaliana landsberg
gtttgtaaacagcctggccatgaagctggatttaaaggagcaacgtatatcgattgtcctatgaagccttgcttcttgtgtaaaatgcctggtaaagctcctgctatttcttatcgattcttgcttacatgtgagctttttgatgatggtgagtggagaaaatgttaatttactcaatgttttcgctgtctactgcatcacttgaaggccacaccacaatgtcctgtcctcatagagtggttactgaccacggaatactcccaacttctcataggaatacaaagaaccctattgactttgtgttcaagcgccaactccaaccgagaattcctcct

SEQ ID NO: 138715 - DNA, 2141 bp, Arabidopsis thaliana landsberg
tgaaggaatcaaaacggtgcgttccggttacggagcacacacagataagataggaaaccctaaaagtgcttcttcttcttcgtcttcttcttcagttttaggttacgatcgaagcaaaagcggcgcatctgaatcccaaacgagtgacgatgacgatcgattcgcagcaaaaaacgagcaaattcagatggggggaaatggacgaagacgacgatctggatttcttgctccctcccaagcaggtgattggtccagatgagaatggtttgaagacgacgatcgagtacaaattcaacgatgaaggaaataaggttaagataacgactaggacacgtgtccgcaagctagcttctgctcgactcaacaaacgagccatggagaggaggaactggcctaagttcggagacgcagccaatgaggaagctggtagccatctcactatggtttctaccgaagagatccttctcgaacgaccccgagctcctggtaaattctctccctctgatgatgatgatgattctggtgatttttgtttgttgagattcgtggggttattggttcgtattgaatttggagttaaaattataaatttgtgcactttgatctaattgagttggtaaaatgttcagtcttatggctgtgctaattgtgtgaataagtttctagactcacctagaaagatgttgtttgtgatatgttctaacttgggattgctgtccaattcattgtttgattcattagttttattgtttagtctaatactattgggttaaggtgaccaattagcgaatcacatgttagccgtgaggctacttgtttgtgtgattggtcagtatgtcaccgatagcagtttattgtttgtagtccattcctgagtacgagctgaaatgtgctctcacttttgtggctgctaactgtacacatagatgttgcagcttttcattggtctcctacttgatgttaggaagctttagtttcgattgttaaagcttttctcctgtgacatgttgtctcccatttgatgtttggaagctttagtttcgattgttaaaaattttgtcctgtgacatgttgtctccttttgtgttattaccttgatgaaaaaattagattgatgtaggagtcaccatgatcttgtgtttcaatgaaccaatgtcaaatggtttgtaaacgggcaaagtttaagttccttgataatgttactagggctttcgtgatcaatctattgataggtgaatgactagttgtatagatagccatcaaagatgatgttaatcagtggcttatagtgcagacataggttgctatgtttgattctgtggctatgcattactgtatcattttaaagttgactatgagttggccattggttcacaactatctttcattctttgtgtaattgtgtgtatcttaacggtgtgtgatacttcaggtaccaaagcggatgaatcaaaggcaacaggagatggcttgtctcagctgggtaaaggtggtgcagttctcatggtgtgcaggatatgccacaagaaaggagatcactggacatcaaaatgtccatacaaggatctagctgcaccaaccgatgtcttcattgacaagccacccacaggggaatcatctaccatgtccgctgcacctggaactggcaaggccgcgtatgtcccgcctagcatgagagcaggtgcagacagaagcgctgtgggttcagacatgaggaggaggaacgatgagaactctgtgcgtgtaaccaatctgtccgaggatacccgtgaacctgacttgatggagctgttccatccgtttggagctgtcacacgtgtctatgtggccattgatcagaaaactggagtgagcagaggatttggtttcgtcaatttcgtgagcagagaagacgctcaaagagcaatcaacaaattgaatggttatggttatgataacctcatcctcagggttgaatgggcaactccaagaccaacctagaaagaaatgtctgatgttgagaccttaaaactcttctcattctcgtctttcttgttatggatttttgtttatcgaccagtttgtttgttggtttggtttctgtatgattagatgagaatttgttcaatttctctttaatacataaggcatgctttttaaaa

SEQ ID NO: 138716 - DNA, 7074 bp, Arabidopsis thaliana landsberg
  unsure (1)..(7074): unsure at all n locations
ataggatcatacccaaaataggttctctcaatcctcttactagaagctctaggtaagggtatgcacactctcctgtgctagggttatagacactagctttgctacaaagaaacccacgtacaggggcatgaatctcattgtcataggaaggaaccatacctttggaaaaagacatatgatagtagggaaccaaaggagatgaactcgggtctgaatgtagatgctgagatatggagtagaacatacgcttaccgttatgtaggaaggtaaataatatacgcggccgagccgaagatattttcaggaatagttcagtgaaatctcgcagacgcggtacggaagaccagagcttagacacgcaacgacacctagcaatgtctcccgtagacaatcttgaaaaaatctcaatcaacagatcaattggtatctccttcgagtattctcttcgggagttgcttgggcgggtgacttgcttctgcgatttttccatagcgttgctaaaccctagaatcctaaacttcgacagaaacttttcagagttttggacagagaaagtcttaaaattttgtttcatttaaaattatggaatacaatgtactatatatagtaggcctacgaggtttataataagacctaaaaaaagaaggaaataaacaaaagcccaagagatagcacatgtgtttagtgagtttgttcttcaattattaaccaattaattaagaattttgagtgtagtggcgtaattaagtgtgacgtgacgtgtcctccagcttggctagataaagagaagtggagtgactagattcggttagagaaaaagacaaaagaagagtatggcagagactgaggagtcttcatgggtttacaagaaccgagacgcgccggtggaggcgcgtgtgaaggaccttctctctcgcatgactttgccggagaagattggtcagatgactcagatagaacgctccgtcgcttttcctcaagtcattactaattctttcatcggtaatagtgatacaataacaccactgaacggtttttgtttttgttttggtcaacgaaccaaacttttctactttcctttcgaaaataaaaatcacaactttggttttacaggcagtgtacagagcggcgccggaagttggccgttggaggatgctaagtcgtcggattgggctgatatgatcgacggttttcagcgttcagcgttagcgtcgcgtttgggaattccannnnnnnnnnnnnnnnnnnnnnnncacggcaacaataacgtctacggcgccaccgtcttcccccacaacattggactcggcgccaccaggttcttaaacattctcttccactttaagcaaactttagtttctgcaaaagagagtcagagaatgagagagttttgcatataatggggttttaggaagtctatggatttaaagcttttgaattttgattaaaaagtttgaatcattttgttaagttacaagcaatgtcggattgttttaattcatgttccacaagaatttggagtttctgatgattttgcttcaattagcttttgatcacacagtagtagtactagctatgattagaatctgattgtgtttaagatctgtccatgtactgtgtttggttgttgttgatgtgataacaatcgtagttttgtgtggtatctcgatagagacgcagatttggtcaaaagaattggtgctgcaacagcacttgaaataagggctagtggcgttcactggacgtttgctccttgtgtggccgtaagtcccttgtagattgttggtatattgggatactaatttgtaaatattgaaatgaaattgttgttactcacaggttttgggagatccgaggtggggacgatgctatgaaagttatagtgaagctgctaaaattgtatgtgagatgagtttgcttatctcgggcctacaaggcgagccacctgaagaacacccttacggttacccttttcttgcaggaaggtatagatgtacatataaacattaaaatgcagtagacttgaataggcttgttgtcatttttcatggatttgtttacttggtgatagaaacaacgtgatcgcgtgtgctaaacactttgttggagatggtggtactgagaaaggcttaagcgaagggaacactataacatcatatgaagacttggagaaaatacatgttgctccctatcttaattgtattgctcagggagtgtcgaccgttatggcctcattttccagttggaatggaagtagactccactccgactatttccttttgactgaagttcttaaacagaaactcggtttcaaggtttattgaatatggaaaagaatctttataagctagaggtgtatgcattgagctcgtttaatgtactttgtcattttgttaccagggatttctagtttcagactgggatggtttggagacgataagcgagccagaaggttccaactaccgtaactgcgtcaaactcgggattaatgctggaatcgacatggtaacgaatgattttcatatgtttcgaatgatttatagaagacgaagattgttaatgaatgatatttcaggtgatggtgcctttcaagtacgaacagttcatacaggtcatgacagatttggtggagtcaggggaaataccaatggctcgggtcaatgatgctgttgaaagaatactaagagtgaagtttgttgctggtctctttgaacatcctcttgcggaccgatctttgttgggaactgttggctgcaaggtgaggtatctatagctgaggccactattgtaagatgtacgagagcatgattgactatgttttccacaactgcaggaacatagagaagtggcacgtgaagcggttagaaagtcattagtgttgctgaagaatggtaaaaatgctgatacaccatttctaccactagaccgcaatgccaagaggattctagtggttggaatgcatgcaaacgatcttggaaatcagtgtggaggatggacaaagataaaatccggtcaaagcggcagaatcacaattggtagttgaatcgaattagaagatatcagaaaaaatgatgtggacacttatatacttgtttgttttgaaatgcaggcacgacgcttttggattcaataaaagcagcagttggagacaaaactgaagtcatcttcgagaaaactccaacaaaggaaaccttagcatcaagtgatggcttctcatacgccattgttgcagtgggggaacctccatacgcagaaatgaagggagataactcggaactcactatacctttcaatggtaacaacattataaccgcggttgcagagaaaatcccgactctagtgattttgttctcaggacgtccaatggttttagagccaacggttcttgaaaagactgaagctttggtcgctgcttggttccctggaactgaagggcaagggatgagtgatgtgattttcggagattatgacttcaaagggaagttaccagtgagctggttcaaacgcgttgaccagttgccgttaaacgctgaagcaaattcgtatgacccattgtttcctcttggtttcggtctcacttccaatttcggttaactggtttaacttcaccggttaacttgtattaaaaatatgcgattaccatatgaaccacacgtttaatttaataagttaatcaaattgatgaattttttacataaagcaataatcattaattaagcattttgagtcaaaatcaatgtgtcacgtctcatcttgttatagataaagagaaagtcgtacaacaactacaacgaagaagaagagtaaagaaaatggtcgtcgaggagtcatcatgcgtttacaagaacggagacgcgccagtggaggcgcgtgtgaaggaccttctctctcgcatgactttgccggagaagatcggtcagatgactcaaatcgaacgcagagtcgcttctccctccgcctttacagatttcttcatcggtacacacattttttttttttttttttgaactttcaattttgaaaaatgcatttgcaatttactaaaattagtaactttatggatttggtgtttgcaggaagtgtactaaacgctggaggtagtgtaccgttcgaggacgctaagtcatcggattgggctgatatgattgatggttttcagcgatcagcgttagcgtcgcgtttgggaattccaattatctatggcactgacgctgtccacggcaacaataatgtctacggcgccactgtcttccctcacaacattggcctcggagccaccaggtttattctcgatttaccataagcaaactagaagtgtgctcttaaagctttgttctgttactggtctatctgatggaaacttaccttaccgaagctacttagttgattcaggtctagtttaaatttctgagcttgcttcttaaaacaaagtagaagtagtattgcagtggctatggatgagtagaatctgattgtgttcaagattggtgcttctattgcagccatgctgtgtttggccgctattaatgtgaaaacagtagtagttattgtggtaactctgtagagacgcagatttggtcagaagaattggagcagcaactgcacttgaagtaagagcgagcggggttcattgggcattttctccttgcgtggccgtaagttcgttcctttttataatttaacaactgaaattgaacgaaatgatttgtaaatattgaatgtgaaagttgttgttttgtctttgtgcaggttttgagagatccgaggtggggaagatgctatgagagttatggagaagatcctgaacttgtctgtgagatgacttctcttgtctcgggcctacaaggtgtgccaccagaagaacacccaaatggttatccttttgttgcaggaaggtatcatatgaatcagtacactgtaaacttatttgggacattaataggtttgatgtcatttctcatggatttgtttattggggttatagaaacaacgtcgtcgcgtgtgtcaaacactttgttggagatggtggtactgacaagggcataaatgaagggaacaccatcgcttcatatgaagaattagagaagatacatattcctccttatctgaagtgtcttgctcagggagtttccacggttatggcgtcttactccagttggaatggaactagactgcacgccgaccgttttctcttgacagaaattctaaaggaaaaacttggtttcaaggttcgtgtaaatttaattgaatagaaagaaaaataagctagaggtgtatgcattaagctagtttgcttgtatatgttactagggatttctagtctcagactgggaaggtttggaccggcttagtgagcctcagggatcaaactaccgctactgcattaaaactgcggttaatgctggcattgacatggtagagtgtgaaccccgtacacaaaatatttcagcttagtaaatgattttcatcatctcggatgattgaagaagcgaagattatataatctatgttgcaggttatggtaccatttaagtacgaacagttcatacaggacatgacagatctggtagagtcaggggaaataccaatggctcggatcaatgatgctgttgaaagaatactcagagtgaaatttgtcgctggtctttttggacatcctctcacagatcgatctttgttgcctactgttggttgcaaggtgagctctcttgtactgaaggccattagaccagagtgctacccctattctaagattttttcatgtgtgcaggaacatagagaattggcgcaggaagcagttagaaagtcgttagttctgctaaagaatggcaaaaatgctgataaaccgtttctgccactagatcgcaacgctaagaggattctagtcactggaactcacgcagatgatcttggatatcagtgcggaggatggacaaagacatggttcggtctaagcggcaggatcacaattggtaattaaaacgattgctagcagaggctaatagatgctgttgaaaagttaatcagtatgaatccgtctttgtctgcaaatgtaggcactacacttttggacgccataaaagaagcagttggagacgaaaccgaagtaatctatgagaaaactccatcaaaggaaaccttagcctcaagtgaaggattctcttacgccattgttgcagtcggggaaccgccctatgcagagacgatgggggataactcggaactcagaataccttttaatggtactgacattgtcaccgcagttgcagagataatcccgactctggtgatattgatctcaggacgacctgtggttttggagccgacggttcttgaaaagacagaggctctggttgctgcttggctgcctggaacagaagggcaaggggtggctgacgttgtttttggagattatgacttcaaggggaagttgccagtgagctggttcaaacacgttgagcatttgccactagatgctcatgccaattcttatgacccattgttcccgtttggtttcggtctcaattcaaaaccagtgtaacttcactggtctgattgatgtacaggaacatcggggaattatgttatgacatatattacacgcaatgtcgtatttgtataagcaaaccatgcaaaaacaatgtattgttgatgtgcttttatgaggaaaatatatgagaaggaaaacaaacattggtgttgatgtgatatacggacttatctatagactgaagtaacaaatacattagttgctaatttgctaattacaacataatattcatgagttaacacaaatgtcagatcaaactaattcttcagcctactcttcccggatttgctagtcttatggctctttaccggactcagatagaatctaaacatactcttctcaaggttttcttggctgcacgtaccaacatttgcgtttctctggagaagatgatgattttgtttgccttcaatgccattaaccaatccatcacaagagtttcttccagcctcaacactgttaatagatccatgaaacagaccatcacaagaagcttcttccaccttcaaaagcccctgacaatg

SEQ ID NO: 138717 - DNA, 1458 bp, Arabidopsis thaliana landsberg
aggagaaaaaaatgggtcaagctttgggttgtattcaagttgatcagtcgaatgtagcaatcaaagagacttttgggaaattcgacgaagttcttgagccgggttgtcactgtttgccatggtgtttgggaagtcaagtcgctggtcacctttctttacgtgttcaacagctcgatgttcgctgcgagacaaagactaaggtctcttgacacttcctcttgaatcaataccttactcgttctgtgtcattgaaggttgtaatggttttgggttactttgttgtttaggataatgtgtttgtcacggttgttgcttccattcaataccgtgccttagcggagagtgctcaagatgctttttacaagctcagcaacacgaggaatcagattcaagcttatgtctttgatggtttgtttcaatatccttcctttttggcttcttgatgttattgtgtttgccttaactaatcgatccaccatttttgcatagtgatccgagcaagtgtacctaagctggatctagactctacctttgagcaaaagaatgacattgcaaaaaccgttgagactgagctcgaaaaggtaaactactttccagccatctccttgagcaataattttgaaatttgtgcaaaaaattattatacataggttaagactctaactgctgttgtgtatataataggctatgtcgcattacgggtatgagattgttcagacactgattgtggatatcgagcctgatgtgcacgtcaagagggcaatgaatgagatcaatgctggtacgtttaaatcttgctatacaagttttcgacttttgtttgttgagaatctcacaatgttctgtttctggtgtaaacacagcttctagaatgagagaggcagcgagtgagaaagctgaagcagagaagattctgcagatcaagagagccgagggagaagctgaatcgaaatacctttcaggtatgggtatagcccgtcagagacaagccattgtggacggtctgagaaacagcgtgctcgccttctctgagtctgttccaggaacatcttccaaagacgtgatggatatggttcttgtgactcagtactttgacacattgaaggaaattggtgcttcttcgaagtcaaactcggtgttcataccgcacggtccaggtgctgttagggacattgcttcacagatcagggatggtcttcttcagggtaactctgctgctgagtagagaaatgtctcaaagtacaaaaaggctttttcagagttttagagttgtgttactacttgctactcagtttatcttttagcggtttgctctatatgggttcttaaatttcttatcgtttctctcttctaggcttgtggacttgatccattttcttgttttatgggtttgaggatagagtttgggcttgaaaaatatttgtgttattttgggttttaatgtcgttaactcgttat

SEQ ID NO: 138718 - DNA, 586 bp, Arabidopsis thaliana landsberg
acaaaaaccccaaaactctcaagaaaaaaaaaagaaaagaaatggcgatactatgcacaacaacatctccggcagagaaagaacacgaaccaaaacaagatcttgaaaaagaccaaacttctccactaatctttaacccttctcttcttaacctccaatcccaaatcccaaaccaattcatttggccagacgaagagaaaccttccattgacattccagagctcaacgtcccgttcatcgatctctcaagccaagactcgactcttgaagctcctagagtcatcgcagaagcttgcaccaaacacggcttcttcctcgtcgtcaatcatggcgtcagcgagtcactaatagcggatgctcaccgtttgatggaaagtttcttcgacatgcctctcgccggcaaacagaaagctcagagaaaacccggtgagagttgtggctatgcaagtagcttcaccggcagattctccactaagctgccatggaaggagactctctcttttcagttttccaacgataatagtggctcgagaaccgttcaagattacttttccgatacattaggacaagagttcgagcagtttgg

SEQ ID NO: 138719 - DNA, 1943 bp, Arabidopsis thaliana landsberg
atgatttgtgatgagctctctccagagactgtgatgctgttatatttgtcagcttcaggttagttttcttttatttgtcattggaaaactttaatggttggtaatttcttatcatgttgtatcaacgatattggttattattatccaggtggtcctgctcgtgaaaatgttgcgcaaccagagaactctgtcggttcaagcagaacatcaaaaagcaagctgcttgcccgagcttcccaagaacagaaaagttacaagtcagaacctcatagcaatggaaaactaatgtcggctgagtactatgaaaatcacctctggttaggtcctagaggaggaagctctggtaagtcgttttcttcggattaacatttgagtatgtctccaaagatcagacttttctcactcactgtctcgtttttgtttaggttcaaacaacctttaccctggtgacctaatcccttttacacggaaaccacttttcttgatcattgatagcgacactagccgtgcattcaaggcaggtttgtcataacttagtgtttcatttctctggagagtctgatagtttctctcagtaactatgcgatatttgctgatggattgtaataaaataaacaaactccaggttttgggcggcgcagagagaggcgagcctgttgctatgcttctttctcctctgaagccatcattcgagaacccatctactgatgatacggaagcactaaatggaagtcagtttacttttttcttaacagctcctttacaagcattctgtcaaatgctgggcctctcaaacaccaaacctgaccctgtagcacttgtgatttgaaaaccgtaaatgaaccaaccttttatagtgtggcatgcgtctttaccatttctgattacaatcttcaggaattatgtgatgaagcagagagcatactttctgcttccttttccgagtgggaaacgattctcttgacttccaaagtcttgaatcttgtctgggcacaggtcttacctgatccattcttgagacggctgattctcaggtgagtttttctcaaagttttcggaatcaaaacctcacaaagcatggactcttgtcaaatattgtcttgttgttgtgtagattcatattctgccggtctgtactcacttccttcagccgcacagaggatgatgacccgtatttacctcaatgccacccgaatctcccagagctgctctcttcggtatctaaaccggtgcagtcctcagtacaacgactagctgagcacttgggtgttgccaaatctttccacttcaccaacacataaaattagaaaaatccatccctgtggttgagagtaggttggtgggtgagagagtaggttgtttgttcgtttttgttatagaagtttgtatttgtttagggtataaagaaaagagagaattgtaatttttattttgatttgatgattctttagttttgtcatatttgtaaaagattagaacaaggtaataatcattagtctcttctttaggatggtttgctttgtgtacgaggagaggttaacaatatctgtgcattgcattaaagaaactaagaaagtgtgacattgttctatcgctttttcataaacatctatgtaagtttgagccaagaacgaattaaagattgaaactttacccaaattatctattcaactttgtgatgaatgggttttaagtttcaacatttgagctcaagaacgaagtaaaaaggttgatacttttttacaaatgatgaaaggtgccagagattgaatcctagccgtcaaataatatatcaaaacgccaagaacaaaggtgtctctgtgagattgaatcgtagccatcaagtccaatttctaaccggaaccgcttgatttcgctgtcttctagttctgcgacctatcatcgctttagtggaaaggaggaagaaacatggagatttcgag

SEQ ID NO: 138720 - DNA, 4961 bp, Arabidopsis thaliana landsberg
tgattctcatagttgcggtgattcctttgttcttttggaaacgtcggagagatgctagatcacgggaggaagttgctgaaccaccacaggtaatttatcattgtttgcgaaaatggatttgaattttggtaatgtctcgttttttttttccttctgggatttgattggttgttcatgtgaaatgcaaaggttcaacctcgtgaaaacgtggcacgtgctggtggtggacggaggatgcgtaggagacctgcagcttctggtgctagctcctctacatccaatgttcaaggtttgtatttgacagcttttgtttctctttgagttttgaggattgagtttctgctatctttgtaatttgaagcaaccttatgtagatagttgtgttattggttagagtttactatagctagcgaacactcgaaaccatcatttattcaagaatactcgataactttttagtttcatttgtaatctatcttgctgtgaatgtagtttaagtttagaaaagtcttggaactaaatgaacaattggccttggaacaaaattattgggtatgtgtgaaacagaaaacggcagtgggagtgaagatgaagatgaagatgaagctggtggaactcaagccagagcatcaaagaagaaagagaagaagcgacaagagcgggaagcacaaagacaagtgagatttttctatttattctactagaatttttggcaggattaaggatgagaaattctaggaatatcagttggtaagttacattgtgatagttttagattccgacttaaggatagagcattggcagaatattacatctcttttgggacgactttcctgattaagttctgttctttttttttggtataggctgaggaagctacacgcgagtcaaggaatacaaaacaagattggtatgcagaaatgcggaggaagaaggatgaagaacgcgaggcagaagagctgaagttggtaggtcaatcatctcagatttcgttttgttatagtcttcctgcttttgaaatactgggcttggctaattgtgacattgttacgtaggaagaagaagaaaaagcgcgacaagccaaagaagaagaggcagctgcgttagagtttgacaaatggaaaggggaattttcagttgatgctgaaggtactacagaggaagtgcaaggtgggaatcaagatttgctttcagaatttgttgaatacataaaggtatatctatcttgaataaccctataccaaacactttttgatcttcgattctaatcgttattctgtgaatataaacaaacgaaaagtaaagtggagatacaaatgttgccaatagaaacacgctcacaatgaagtatagatgtaaatgttgtttcagcccatatcaatgtacccacatgttgagccttccttttgctgtgtgatgtgattgcagaaacagaaatgtgttccacttgaagatctcgctgcagaatttcatctacgtactcaggtatcatctggctacatatttatgtggaaaactaaagaataccttttgtcagggctttttagtctgattcaattgtttgtcctcttaggaatgcatcaacaggatcgcctctttggagagcattggtatttttctctctatccaattataaaaagagcatttgtctcatctggcagtctgtaatttgcgatgggtatagtaaacccgaagcaataggaataagcaggtgagacactgatgtgaaacaatgatgggacgcttaagaactgaacccattctcttttgttcagggcggctctcgggggtcatggatgatagagggaaatacatttacatatcaatggaagagatgaatgcggttgcagattacatcaaacgtcaaggaagagttagtatctcacatctagcaagcaagtcaaaccagttcatcgacttggagcccaaagtacagcatcagctgactgaagaaattagcggcatggaagagatctcagtttcttagttgtgtttctcgggtaaaatcgtttgtcaaaaacaagagttaaaagccttaggtgctcactgcaacatgatggtgtttgggtcatataccttcttgttcttattttactagtttgagatccttaggcttgcatccatatacagtacatgaaataccatatgtttaaaattgttgtttgtcttaccattagaaaataaaataaacacacaaaagaaatggatatcatggttgctttagtaaatctttattcctcaagttaaacaatgtttgccatttatggtgctcacaaggtgttcacacaaagtcttgtgtaagaatatgatatcatggttgctttagtaaatcttaattagggttctataacttttgtaaaaagtttaataaaaaaattctaatgaactaacttagaggaatatgcggtttggatcagtctaatccagattttctatagaatatagaaaaaatgtgacaaacatacagaaattggtacttatacatttactgattaacgttattagtatattctcttttgtataatatctctgtttctccggagaaacaggggaaaactagaggaagagaaaccgttatgctctgcctctctaattcgcttaagttttattaccatctctcttttctctgttttctctttcttgcgttcctaagaaacttgggaaacacgatagagatgaagaagctccgttacgtccatttaaacctccttctccttctattacctctaatcaatcttcagtttccgacattatcattggctcaagactacgatgaaccaaagaaggatgatactccaccgccaggtctggcccgttgcaacggagtttacatgtcttacagttccggtggccgagaaaagttgtatcctcgcaccacaaacgcgactgctcaagcttggtcttttaaatcaacggccatgatcgtgaacactggtatcgaagaggtcaaaggttggcaaatgttcgtagggtttcatcacagagagatcatcgtttccgcgactggagctgtctcatctgacggtgacttcccggtcgatgcaaccaacggtactacgtttatcgggtctcagaatacggacctaaagacctcgatcctgacagctggcgattacactcagatctcgaccaatatcgagataaccggaacggtttttggcgggaaaggtacagctacgccgatgccgaaatcgatcaagctcacaaacgatggatggcaatgccctgctgctacttctaaaggtaacgaaacctatttcatgaaaaaaaccttagtttcttgttcgagaagaaacaatctgtagtgaccagttttcgattggttcggtatattttcatcggtaggcggtacaatgcaagtttgctgcaagaggaacccaaagtttaaagctaaagaaaaggtgaaaaccaagttcatgcctagacaacacggtgacctgaacataatctacgacgttcttcaagcctatgcaagcagctacatggcgcaggttagtcgccggatccatcaattgtatcaatataacctcgagagagtcatatatacataacgtaatccaaaattgatttgttttggacaggtgactatagataacactagcccgctgggacggttagaccattggaacttgacatgggagtggatgcgaggagagttcatccactcgatgcgtggagcctacgcggccgagaagaacacgttggaatgcttaagcagcaaggcgggacagttctacggggatcttgatttctctcaggttgctaattgccagaagaaaccaataatcaaagatttaccagctgagcgtaaagacgataatgtcaccggtaaattgcctttctgctgcaagaatggcactcttttgcccactcacatggatccttctaaatccaaagccattttccagttacaggttttcccccaaaacttaccatttatagtgtttggtgactaaatttaggtctaaagacaactaaaccggttttgatgtttggtttaggtttacaaggtaccacctgatcagaacagaacagcattctttcctcctcgaaactggaagattgatggtatagtgaatccgacgtacaaatgcggaccacctattcgggtggacgcgaccccgttccctgaccctagcggtctccaagccacaacctacgctatcgccagctggcaagtcatctgcaatataaccaagcctaaaccacaagctgcacgttgctgcgtctccttctcagccttttacaacgactcggccattccttgtaacacctgcgcttgcggctgcaaagatatcgataccgacacttgcaacgccaatgcccgacagcttctcctccctactgacacactcttggtaccgtttgataaccgaacgctcaaggcaaaggtatgggcaaagcagaagcacatggcttatccaaagaaacttccttgtcctgacaactgcggaatcagcttaaactggcatcttaactcggattacggtaatgggtggtccgcaagagtaactttgtttaactggggaaataatgcagtggaggattggtttggggctttggatttaggcaaagctggtttaggatatgagaatatttactcctttaatggatcaagagttccacctaagaaccagaccattttcttccaaggacttcctggtatgaactacttgattggtatcacaaacggaacgaatcctgcgagagacccgcagattcccgggaaaatgcagtcggttatctcgtttaagaagaagaatttggggagtttgaatatcataggaggagatggatttcctaagagagttttcttcaatggagaagaatgtgagcttcctaagtatttccctaaaaagagttccgggatgagattatccggtatccgattcttgccttcgattcttctcgcgatcacaacatttcatgcgatcactgatcgcttactaactggtgtgtag

SEQ ID NO: 138721 - DNA, 5045 bp, Arabidopsis thaliana landsberg
atggggtgtacatcttccaagcaagcaaaagctaacgtcgtcgccgacgtttacaaaccaccgccgtctagtttcgcggtgtttgatgtcaacgccatccaagagccatggctaaaattcgaacatgaagatgatgagaaaccgccacgctccaccgtcttcgaccgtctcgacgaggatgatgatgatgatggtgatgacgctcctaaaacatgggatgaagtcagcaaatctctagaaactaaacttaaacctgccgccgttaaaccgccggaagtggactctgttaaacctccggcgactcctccacggcggcttccgcggaagagcgcatcgttccacacactggacgagcttgaagtgagggccaaaagaagcatcgccgcgcaaatcccgacgacaatggttaagcttaagagaaccgagtcgatgtccaagctaagacccgagtcagatgatcgaaccgagtccactcagtcgtcctactcggggcctcggtcagtgaaggagaacatattcgtcaagagagacagagaacggagggagaaagaagggaacaagaagccggtgatgaactgggacccacttagggagttcccggagaagtgtccgccgggaggaggggaaggtttgattgtctacacgacgtcgttgcaaggagtgcgtcgcacctacgaggattgtatgcgtgtgagggccatcatggagcagcaaggagttgtggtggacgagagggacgtgtctttagacgccggagtcttgagcgagcttaaggagcttctccaagacgaagcatcggtggcgccgcccagagtgtttgtgaaagggaggtacttgggaggagcggcggaagtgacagcgatgaatgagaacgggaagttagggagggtgttgaggtgggcacgtgtggagagagtaggggaggaagggaggctcacgtgtgaagggtgcggaggagcgaggtggttgccttgtttcgagtgcggcggaagtgtaaggcggcggcggttggggcggccaaaggtgaaaggtgggagaggtgtgtcaagtgtaatgagaatggattgattcgttgtcccgtgtgttttgttaattaagaacattaatagtttacacaagcaaatagaggtgtgtcaaatatactttgtcccgtttgttatgttatatgtatgtgacaggtttgattttgtggaaaattgaaaatgatttgaaactgtgctaggattttcataaaatgttaaagcatgaacgtgaaccattagaatgctaaccttgcaaggtctctcacttgtatatgttgatggttttgatcattacgcaaaggagtttaacaatctcactgatttaagttttgatcgtcacaaggtaaaagctggcaaacaaagtcacttatgcctgaatactttacaaatttgttctttgttgctattttgtttgattgttatgcatccttgaggattttgtcattttgtgctatgaaacagagtaatatgaattccatcattatagtaactatggcaagttagtgttagttataatcttttaatgaaaatgcatacaagtatgcttctcaagcttagctttaagagtttctcacagttacataagaaagcagagcaatgcacaaaaaaagatacaaaaaagatagatttacttttgttcttacaaagaaacaaaaaaagaatctgacatttttctcacatacacaatgttcatggtcttcagttgtacttcctcttctttatcttgaaggaagatgatcggataatgtcatcgtcggcagtgagaacggtctcgagtggaactattgattcgggtttggtgaagtaagtgaagagaaggtagattccatccaagtaagtgttggtttctccagctttgttcttctttcttatgctgtaagccaacggaatcactcctctgttaaacacttccacatacattccacctcctgccacaagcaactgccacacacaccaaaaagaaatcccagcaacataatgaatctttcagagtctgcaccaactaaaaacttccactactccgaacataaatttcagaattcctcattagattaaacatgtgatatagcgtaaaagaacccacgcgtaaaccacaaatgataactgtgtattagctcgtttcgagcatcaaaggacatttcaagaattgagttaaaatgttatggtaaaacatgactaaaaaactaagaagtgcactaagggctcctatcttgtttcaaatggttgagacttaaagaattcacagcccacagaaggatgagatttgctcttagaaagttaaactctttacttcaattttaacaaggagtcgtcacaaacattcaattgatagctgcaagttacacaactctacattgaaaccattttctcttgctttgtcattaacgtgtaagaacagacacaagatacaacttttagtgatctcttactcaacttctaattgaatcctaaaatctctttctctctcaaataatcaaatttccctctgacatgaaacagaaaacaggtaaagttggagacttttacttacctcttcgtatttctgggtaagaccaagccgttcatcttcagacatgtctggtctcaaaaccgccattgtttcgtactgcctgagcccaggtgggcactgaggttccggtttgtcttcaagggcagttgagactcccgacccggaaggagaagtcgggtcatcatccgacccgaatccaccttcaaagaaagttccagagaagtcaagagcctgagatttcaccacaaattgagagccatctctcttctgtatcgaggcacacataggtttcgacttggaaatgaatggcctgagagagtgggagaatgatagcagcggctgcgaagatacattaggcagagggcaaattgtggaatttgatacacacagcgaagacgccattgttgtgagattgtgaaagcaaagaggagatgagagagtaaaatttggataagagatgatgatggtacacattagtcagaattctattgtacaccatgggcctttttaggttattgggcctgttaaaggcccgttttgtaaagacaattatttctatctgtattatttgtcttcgcgatcaagccagttctcggagcaatcaaatctataagaaaagaatcgtcgccggtgaagagaaaaaaccatagaagcgatggatccgcagctaactgaagtttcacagcagttcgagagattcaaggcggcgtttgcgaggaaggattacaatacctgtagcgatctgttgtctcagcttaaggtctacatctctctctcttctttgaaccctaatttgtttcaattcacttctttgcatatctgcttattgaaccaactttgggaaaattgatgggttatgtcgcgagagtttaaatctatgagagctttgatttattgaagtgagaatttttagcatataagtgtgttaaggatcttttagaagaggtaagtgctatgaaatttttaactttctactttaagggattgttgggattggtttagatttacaatttactggtgcgagtctctgatgtcgctggggttttgttgtgttcttcaggttcttcttaccaaattcacaagtcttcctccattgttcgagaattcacctaatgcagccaaggaattgactattgcaagtaagtttctctttttcattattggttttacatgagctatttgctagtaagtttagagttttgctttcaattgcatggagtgttttggatttgtctattctcatgagttatttgttaactatacttaaataccactgaagagtgtctgagggattgtactgctttagtttgtctgtctatccctatatgtatacattaatcgttgaatgctgcattggtttggattgagttattggtaatttttgttcttattgattatccgtttctaaaactttgacaattggtgtattctaggggacatttatgagcatgctgttgttctaagcgtcaaaaccgaggatcaagatgcttttgagagagatttcttccagctgaaaccttactatgtggatgccaggtaaagaaagaaccaactgtctgaacattatctttttcattttcttttggtctaacatatcttcttttcctctgcaccaggaaccgtattcctcagtctccacaggagaatcttatcctgggtcttaaccttctgaggctgctggtacaaaatagaattgctgaattccacaccgagcttgaattactttcatcagctacactagaggatccttgcatcaagcatgcagtagagcttgagcaatccttcatggagggtgcctataaccgtgtgttgagtgctagacagaccgcgcctgatgcaacttacgtctatttcatggatctcttggcaaagaccataaggtagcatcaatgagtctgtccttctctgaattagttcagtcttatgtcttctcgcgtgttatctcacctttttattgttatgactgaattcacagagatgaaatagctggatgcagcgagaaagcttatgattatgtctctatcagcgatgcccggcagatgttgttgttctcttctgatcaagaactcttaacctatgtcacagatgtaagagaaaacattttgtgcaaagtttagaatcttttttagtttcatgaactattgacgcgatttaggttttatcaaatcttataggagcatcccgagtgggaagtgaaggaagggtttgttgtcttccagaaagccaaagaaactgcaccgtgcaaagagattccgtctctgcaactcatcaaccagactctaagctacgccagagagctggagcgtatcgtgtaagattcgacttttctcactgcttgtctcttctcttctgttatgttcctggaaatctctgggtcagaaaactttgttatcatgtaatgaccgatattgagcgactcagtattttctccgggtcaatgagactttgttgtgatatcaatctgtttttccatatccttttacgttatattctattgtttagtgttcactcgt

SEQ ID NO: 138722 - DNA, 703 bp, Arabidopsis thaliana landsberg
atgactacggaggaggagtccctttctgcggcggaggagggttacaatgtacagagagaatattggcgacaagtggcggaatccgatgtaagtctttcatcttcttaattattggttataaaattgatctataattgtgattttttggattgttctgtgtttcacgaaattaaaatagattatttttgctaatgggatcttagggtttcgatattgagagtgttcaaataccaccatctatgtatggaaggatcaatggactgattccccacaactgtgaaatcaatacgccgcttccttaccgtgtcttgggcaagcactatgctaagcttgggcttcatcgttacaatatgttgaaggtaacgaaatctagtctcttttggttggtactttgttacgacatgatgctttttaaaccacattgattcatttttctttgtttacctgtcaggggactaaattcgagttcggtcgcctaatgaaattcaacatgttacaaaactgtgtggcctctttctacataactttggaagcatacgattacggtgttcctggcacatcacatcctcaaacctttcaggttcgaattgatgaaaaaatatttggcagtttggatttgacggtctctattgctagaagaactacagatgaaggatatgagttgctatataagtatcttctaacaaggaaacacgacatacaa

SEQ ID NO: 138723 - DNA, 3860 bp, Arabidopsis thaliana landsberg
atggagatggttcaggacatgaacacacgacaggttaccttttcaaaacggaggactggtttgttcaagaaggcgagcgagttagccacgctctgcaacgctgagttgggcatcgttgtcttttcaccaggaggcaagcctttctcctacgggaaaccgaatcttgattctgttgcagagcgattcatgagagaatatgatgattcagacagtggcgatgaagaaaaaagtggtaattacaggcctaaactgaagaggctgagtgaacgtctcgatttgctcaaccaagaggttgaagctgagaaggaacgaggcgagaagagtcaggagaagcttgaatctgctggggatgagagattcaaggagtccattgagacgcttaccctcgatgaactcaatgaatacaaagataggcttcagacagtccatggtaggattgaaggtcaagtcaatcacttgcaggcttcgtcttgcctcatgcttctctccagaaaatagctagaccgacttgttagagttacattctattttttgtatcagcctacagaacttaccaacacatgaaagttattgctggtgtagaattttctgtcatctatggggtgtgactttctatttgacatcaaatgaaaatgtacctggaaatttgtctgtattaatctcaagtgtacttgctaaacttgatcagctttttcgtcattctgcagtctggaatttttgtttcaaacagaatcgagacaataataagaaacagtaaaaccctttggcaaccactcaagaaactggttagtattcattgatctccaaatgcaatccacagaaacatgagtatcagtgaaagaatgatctcaaaaacgaaacagaaactcttaaatatcaccgatatacaaacccatcctagaaggcttagaacaatgtttctaatgtggtagaaactaaaaagtaatctattcagaatagtctgagtcggtctctgattcatcgtgggcacctgattcctgcaaaatagtaaaatgaaaagctcagactaatgttttatcaccgcatcagtgggacactgatgtgaataaatattaagcaaaaacaaggaaaaatgaagaacccactgatgtgaataaatattaagcaaaaacaaggaaaaatgaagaaaacgatggtaccattctcttggtatattctgtcattgctcggtgaaattcttccctcttctcagtagctatatcataatactttaccttttcctacaaaacagttgaggaacaaacaatctaggagtaagaaacttccgtcaaggtctcaaccaaagatatctaggtaagaagaataaaatgagatattgttcgccaaaaagaacaagactggcaacacctgactcattttagaacatatctatccaaccactatatatgctaacatgaaacctatttcattgcttttgtgagtcatcccaatgtcagatatcatacatttgactatgatttgaataacattatagaggagacttttagaagatagagacaatagactaactgggacagaaaagcgaaacccaaatgttacctcgtaagtcattgttttccatttctctccacatgtcttcccaatctgtacagaatgaagaacaaaacaactttagcaaaagaatcaaagtgaacataatagccaccatgttttactttgacatacaaaaccaacaaagtaatattctacaacctcgcgcatggacttgacatctggattctcctcttgatattgcttccggaaatcatccctttggagccaaaaagataagacaatatgaggcaagaggaaaatgaatacaacaagtgtttcttcgtatgttttctaaagtaaccagaacacataacaacataaataatcgcatcctaaagaccaatggcaaaatgcacacaaatttctacttaagagaagacttaaggaagtccagctgagcttaaatatttagataacaatttggaatcatatgagagagagtacctacaggaaaaagaagaaagcagtggcaggtttcttgggcatcttcgtttggagtttaacgggtttcttcttggggcttgtctttggctttctcaaagactgaagtctcagtcttgtagacctccttgcaccttcacttgacttcacagccaactctaagttcctgccaagattttacaacacaattaacaaaaatctaactaacatcctctttccttgctcttcttctcacccatttgccattggatagcataaagttcacaactttcatatccaattccctatctaaccacttaatcagtaataaccagagagactaagcagaacccttaaaccctaaacagagaaatcaaagcaaaaccaggtgtaaaaagccaaacttgttctgtaacctatcaaagccagacacaaaacttaccgactagagcctccgctgcacgacggagacaaaggccctgacttgggagctctcttcgtcattttctctcactttctcggaatcgaactttcgttcgctgcctctttggggtttttccgtaattgcgtactgaaacagattgtcggagacctttgccacgtggcgtaatctaatcaacaaaaaaggcaaagatcaaaaatttacaatttaacaaaagttaacgtttgtggcagagaggttacacatcgatggcaacatctttgcttctcagacattcctcagctgtcttcttctctcagtcttccttcttcaccaagaacaaatcttttcgctcctttacttccatcaaagtaagatttatctgtaataaaaccattgattctagaatcttgtattgaattgtgtgtttagatttccccaattctgaaattgactttgcttgtttgtatctcagatggaaaaaggtgaagcagagaatgcagtgaagacaaagaaggtgtttgtcgcaggagcaactggacaaaccgggaagaggattgtggagcagttgttgtcccgtggctttgccgtcaaagctggtgttcgtgatgtagagaaagcaaaaacatctttcaaagacgacccgtctcttcagatagtatgttcttggtcttaatccaatgttttctcgctctcattttctcacaactgctctgtgatttcttctataggttagagcagacgtgacagaaggtcctgataagctagctgaagttataggtgatgattctcaagctgtgatttgtgctactgggtttcgtcccggatttgatatattcactccttggaaagtcgataatttcgggacagtgaatcttgtggatgcttgccgtaaacaaggagtggaaaagtttgttcttgtaagctccatcttggtgaatggagctgccatgggacagatactgaaccctgcttacctcttcctcaacctctttggactaactcttgtcgctaagcttcaagccgagaagtatatcaaaaaatctggcatcaactatactatagtaaggcctggtggtcttaaaaacgatcctccaactggaaatgttgtcatggagccagaggtaaaacacagcctttgatatttgtttcatctgttttgtgctggaaactgataaagatctgacctttgatttttgtaggatactctatatgaagggagtatatcgagagacctggtcgcagaagttgcagtggaagctttacttcaagaggaatcatctttcaaggttgtggagatagttgctcgtgccgaagctccaaaacgttcctacaaagatctatttgcctctgttaaaggacaataaactagaatgtaatgagtctcatgctcaaaccttttatttctcttatgtcttgagtacaacaaacagattacatagacttttgcgcataaattgagttc

SEQ ID NO: 138724 - DNA, 319 bp, Arabidopsis thaliana landsberg
cttactcatttctactatacagtataatggcaaaccaaatctacataatctccttgatcttcttgtctgtgttactttatcaatccactaccgtcttatctttccgacaaccattcaacctagcgaaaccatgcaagcgtttcgtcttctacctccataatgttgcctacgacggtgataacacggataatgctacatcagcagcaattgttaaccctttaggtctaggagacttcagttttgggaagtttgtgatcatggacaaccctgtgacaatggaccagaacatgctctcggaacaggtggctcgtgttcaagg

SEQ ID NO: 138725 - DNA, 1270 bp, Arabidopsis thaliana landsberg
aaactaaagatgtatgttacaaggcgtttatcggaataccagaaaaagccatcggagctgaaactgcttccaccggaaggtccaaactccggcataatggtgattcaagacgaagaatcacaggccacttgctgctttggttcttgctatgagggtagacttaagggcttgccgtttccacaaaacgtgaagctgaatgcagcgtatactagtggaggaggagaacaccagacaacacatcttactccagttgtgttcattcctgttcttgatcagccattgtcttcaaacctttactatgttttacaaaggcgtgggaagcatactgggtaatttatttacttgtcatctcaataattttcactgttttctttaggatttaggaattgttactaactatctaggtatgtgaatttgtgaatataggaaagcatctgcaagtgcaacagaggaggagagggtttcaagctgcttttgctttagctatattcctgacgctaagccacaagaagcagatccttatgacatataccaacaattcgagatccatcaacgccgatcatcatctcgctattactctgccacttctgttgcttctgatggtgtaccaccaaattaccttaagaggaaagattggtgggtcagctactcgacttcgcacgactttggtctaagagatgatgcaaaagggattaacacaaagcttcgcttagactcagaacttactagtttaggtaagagtattgagatagggaaatggtatgttcctttcatatttgtgatggaaggagatgtaaaagatcagatgaacaaatcgacgttttacagcgtgacacttcaacaaagatgggaagaagttttcttctgcgaaaacattggcaatgaacattttgaggttgtagttgatgttgatgtagaaacagaatcggtgaagcttgagggacaagaaactaatttgagagaggattcaggtgatggagttgtttggtttagtgtcttaagggatgagaaagacgacaagaagataggtcttggatctgtggtcgtagagaggatgaaatgggaagaggaaaggtttggatggttaaacgaagcaggcgaaagatctaacattaagagatcagagagatttgaaggcggttcatcgcattggaagagttatcgatgttatgtattgatagagagctttgaattgacgagaatggatgggagtttggtgttcacatatgagtttaggcatgttgataagctaaagagcaagtgggattga

SEQ ID NO: 138726 - DNA, 1597 bp, Arabidopsis thaliana landsberg
acaatcattatcgatgtgagtggtcaatcaaagaaactttcctcagcgctttctcatggcacaatgagactctcaacatctggacgtatgttttcgttttcttctgatttttttttcccttggttgaaaatttgtaaacggggttttgaaatttggcaggcatttgtgtggatttgcgatatttacttggatgatggttgtgagttcaatggagacgacggagcttggcctcgccggctttgttagccttctctccgggtaagaaaaatctcgaggtcaaaatcgtcattttttgttttgaggaaaattaaacaaatttcaatctttttgggggatttgtgggtcctaatgacagagcaacaattcgctggccatggccgtcaatggcaatgtcaaaagatgtttacttctccagcgatcaaactctgcatcacgtaaagattcttccttttttattctgtgacattgtttattctaatttaagtagtagacatgcaacataagtgctttcaaataacaaatcccatttttgttgtgtgctgattgcaattagcagtagtgctaaatggtaactttcacccaccatgtcatgttctctttggattttttctatctttctgtttttaactttggtttttatggatacttcagtttctctagacttgctctttatgctcacctactttgaaatcacgtgatttcctaccgaaattaaggaacaaactttatgattggatttgtttagtttagcataaatcttgtaacctgccccaactatttgatgtttctctcactttagttttctgtagattttctttgtgctcacctaactttccaactaacatgattttttcaacgggtttaagaaaagaaaggctgtttttttgtcaacataaacttatgatttggtggtgtctactggcaggacttaaacgtgacacacactcgctcgctcctgaattctcaaggagatgttaactacgaagccattccgaaatggccatggcttgtgttcttgaccggagcaatgggctgcttgatctgcagttccatgtcacacctcttcgcctgtcactccagacggttcaacctcttcttctggcgtctagactacgctggaatctccctcatgatcgtctgttcattcttcgcacctatctactatgcattctcatgccacacttactggcgactcttctacctctcatcgatctcaatcctcggtctcctcgccatcttcactctcctctctccatcactctcagctccacgtttcagatctttcagagcagctctgttcctaacaatgggattttctggcgtaataccagccacacatgtgctttaccttcataaggatcacccaaacgtgcttatagctctcgtatatgaacttgcgatggctgtgttgtatgcaacaggagcagcgttttatgttacccgcatacctgaaagatggaagcctggggcttttgatattgcaggacatagccatcagatattccatgtgtttgtagtcttaggagctcttgctcatagtgttgccagtcttcttatcatggattttcgacgggcttctccttcttgtgccttttaa

SEQ ID NO: 138727 - DNA, 2000 bp, Arabidopsis thaliana landsberg
ccaatgcccatattgtttggtggtgatggcagttacatggctcctttctcacttcaaaatgacaacattcttaccagtctgatgagtcaggttggttccttagttaacgagaagcagtttcagcagttaaatgaaaggttgtatcgattctttctcattgttttactttctcagcttggttcgcctactacttggtatagactggtggctggtgtaaatgctcaattacgtcttgttcgccgtgggcgtctgagatcaacatttcattctgttctgagatggttagaaactcatgctaatcccgctctggaaacacatggcatacgggttgatctggcctggttccagactacagcttgtggttactgccaatatggtctcttgattcatactgttgaggattgtgaaccaacatcacctcagtgtgtcagtgaaacaacatggactgaaatccagccacggtaaatgaatgagaaattgcatgcagtctgtctatctattctatcttaatgtccatttcgtggtaacaatagtcatgataccattctttcttctgtatgtgctatgctggtttaggttgaatagaaaatatgaactgagaaatctagataaacaagatgatcacaattctttcttgatcactctagaaatttaagatttcttttgtgatgtcactgtttatcatgttttcgtagtgcacttcgtatctagttatgctgctttttgatgtcttggttttgtaacttctagttatggcgtgaatgcacataaagaaaattctccaccacatttgagagagagtaggctcttcaaccaaccccactcaaacaccgaggattatacgacacgcagaaagaactatggagggataatcgaccttgacagcttaccgagtctgaaagagaagagagatatgtttttccttctctctttcttagttcacaacacaaaacctgtgggccaccaggtacgaacccaatcaaaatctttatggtatgaatgtattcttaaatgttgtgacgttcaacttttctagaattttaatgtctcttccctctgttatcgtctttggtattgcaggatatggttggcttagttatctcgatgttacttttaggagattttagtctagtcttgctcacactcctccagctgtattcgatttctttgctggatgtacttttggctttgtttatattacctctcggcttgcttctgccattccccgctgggattaatgccttattcagtcatggacccagacgctctgctggcttagcacgtgtttacgcattgtggaacttcatgtccttagtcaatgtggtaagttttctttgttgacaacttgttatgtggagaaatgcaatgtggttcagttcacatgaggatgaatataatagttatatctgtggacattatgggtgttgattctttagaacatgctgcatgtctcacattatctgacgagttttggttctgtgacagtttgtggcttttctctgcggatatgttcattatcatagtgaatcatcagctagcaagaaaatcccatttcagccgtggaatataaacatgtgagttttactactatgcaaagttgtacctttctctgtgacaatcttatgttttgtttgttgggtttgtgatgtctgtacctttttgggggatgcaggggtgaaagtgaatggtggatattcccagcaggactggtcgtgtgtaagataatgcaatcgcagctcataaatcgacatgtagcaaacctggagatacaagaccgctcgttgtatagtaaggattatgagctgttttggcagtcgtgacaaaagtcttgtcaggtaatttttctcagaacaactaaaaacagtcctgccccaagtttggagtggggatttcagtttgttttttttgttcttttgtttctcttcttgtaattctattactccaggtgaatagaattaggatacaaaagagaaggaactctgattgttaaaagaaaaaaa

SEQ ID NO: 138728 - DNA, 5113 bp, Arabidopsis thaliana landsberg
  unsure (1)..(5113): unsure at all n locations
tttatgtctcactgtcatctatcttctctgtatttactattaagatcttcatcttgcattttccagttttgaggatcctggaccacatggatctggtaggtattcacaacatatgctgcctgaggttgaaaagaaggattttcggaagggctcacaggtatgcgttaatgcgttatgtgataagatatcatattttcccctttcttcttcctgcaaaatgtttatattagaagtttgtaggagggatttacagttcagaaaaaaacaatggtcaatgttattattgtattcatcgatgttacctttcgtctctccctgctatctaaatcatccctcactttgcttctcattcctgataatgatggctgaatttcttttcccgttagttctatataaccttgacatgttccggtgcgtctttataatcatctttttcagtggttttcaatgaagaggagacatgctatagtcgtcatggcggacagcctttactacacaaaattcaagctttactgtagggtaagtaagccttaaatttcatgtgttctcatattcacatgatatttgtttataaccagccagaccatatcttgtcgtatgtcctaatattctatctcgtgacactttttgctgcatatctcccataatatttgtgctctgcatatttggtgatcaactaagtcatctagtcaagttagcaagtggatgcccattgagattgtagcttattacaaagtggttatgctgtgtgatgttcaaacaaaactcatgtgttttcctttcttatcgcatagacacgatatgttggaatactgagacatcagacatgttttgatgtcatggaatttcactattgatctctaatcgttagcatttgtatactaagcagaattttccttatcggcttatactaatttttccacagccaaatatggaaggacgcaactgctatgcggacgagcattattttccaactcttttcaatgtcagttgtactgcttgcttgcgtcttccttttattacccttaagccttaaagtactcattttcctctaacttcatcataatctctccgctcatgatctctttctttcagatgattgatccagatggaatagcaaactggtcggtcacacatgtagattggtccgagggcaaatggcatccgaagctgtacaatgcaagagacatcactccttacctcatcaggaaaatcaaggttcctcttgttcttctctttctcaatgctcagttagatttttcttttctgcgatcttattttgtggttttaatctgatttgcagtccatccaacttgcttaccatgtcacaagcgatttaaaggtaaaacacccgagctttcttctcattatcatggttcttggaatttctgttactgatccataaccatcctctatgcagaaagtgacgacagtaaagccgtgtctatggaaaggagagcaacgtccatgttacctatttgctcggaagtttaatcctgaaactctagaccgattgatgtatctcttccctaactacacctcgctggtttgaaaggcttatcggattctcgattgtccggtttgttctttgttaagctcttaccaaagcatacaccttgtgtgataattattaggaccattcatattgctgtgattcaaagttgggtttgagcctggcacagacaagaacaagaactgctctggtgtttttttggtttatggttaacaaaacattagcgtgctagcatgcgaggtccatgacaattgttttaggtggtatgctagagttgtttacttcgtggtatcgagtaaccatgtggctatgccttttcttctgttagaaggtgagacccaaatcgctctaatccaacaaatagctggtttggcttcttattcacatacaattgcaccgttatctaatccatcatctgatgctcggcatcttttcaataattgtctttgtaacacaataatgtctcgaaagtccaaactgaatggaagttgaaggcgaggaggagctctcttttttcaactttctttcatcatcatttggagaagctatgagcttttatatggcacacttttaatttaaattgggctaacataaggcccacttttaataaatggaaactacaaataagtaaagttatgttaactaaaaaagaagaaatttggcgttacagaaaaaaggaaatcagccagctggcaccgccgttgtagtgtctataaaaaaggggaaggttatcagagagcgtcataatttctcagaactttgtttacccttcttgtttctttgtttggcatatttctctcgatcgctttatcatgacagaagacgatttggagcgataatcctctgtaagtaatcttctaattctcttgatttctagggtttctaaatttaattatcatcaaatctttctctgtttcgcatgtttctctcgatcgaagcattcatggccgaagaagatttgtagcgataatcactgtaagaattcttctaatccacttgatttctagggtttctaaattttcctattatcatgtttttgtttggttctcttttcgttttgcaaaaccaaacgaatcgcgactctgcctttcaaagtttatgtgaattaaagattgtttctttcttcttttttgtgttaggttttggttttcgttttgttttttttgtaccgctttattgttgcgatcggttgtggttttgttgctcttgttttgctgttttgtttgtttgatttcttcattgttttgtttttctttcaaacccaagagaaatcataggcagacactcaactattagtgttctgtcagattctttcttggggacattgtcccgtcgagttggcttatgagggattttgacctgagactgaaaaaaccgatcttttacccacggcttattattttgacaaatatacttgggattggtttcagtttacttgtcaaagatcaagttacccacggctttaaactttagtctttagacttagacttgagactgaacattgatccttcttggtacccatggctttaaaatctctagacatatggatcatgttcagtttcttgtttcagtttttagacaaagctcaagttacccatggcttaaaaaagtctttagacagagacttgaggttcaatataaccaattctttagacaaaagattggattgggttatgtttggtggaaggtaaatggtacccacggcttcaaattttagtctttagattgagacttgagacagaacattgatcctgcttggtaccctcggcttgaaaatatctagacatatggatcatgttcggtttcttatttcactttttagacaatgatcaagttactcacggcttaaaacagtctttagacagagacatggggttcgaagtaaccaattctttagacaaaagattggattgggttatgtttggtggaaggaagatggtacccacggcttctaacttagtctttagactgagacttgagactgaacattgatccttctaggtaccctcggcttgaaaatatctagacatatggatcatgtttggtttcttgtgtcagtttttagacaaaaatcaagttactcnnnnnnnnnnnnnnnnnnnnnnnnnnnnnnnnnnnttcaaagtaactaatcctttagacaaaatattggattaggttatgtttggtggaaggtaaatggcacccacagcttcaaactttagtctttagactgagacgtgagactgaacattgatcctgcttggtacccacggcttgaatatctctagacatatggattatgttttgtttcttgttttagtctttagacaaagcccaagttacccacggcttaaaaagatctttagacagagacttgaggttcgaagtaaccaatctcttagacaaaagattggattgcgttatgtttggtggaaggtaaatggtacccacggctgcaaactttagtctttagactaagtcgtaagactaaacattgatcttgcttggtacccacggcttgaatatctctagacatggatcatgttcggtttcttttttcagtctttagaaaaatatcaagttacacacggcttaaagaggtcattagacaaagacttgaggttcgaagtaaccaagacaaaaaattggattgggttatgtttggtggatggtaaatggtacccacggcttctaacgttagtctttggactgagaattgagactgaacattgatccttcttggtaccttctacttgaaaatatctagacatatggatcatgttcggtttcttgtgtttttagacaaaaatcaagttacccacggcttaaaaagtctttacacagagacttgaggttcaatataaccaattctttagacaaaagattggattgggttatgtttggtggaaggtaaattgtacccacggcttcaaactctaatctttagactgagacttgagactgaagattgatccttcttggtacccacggcttgaaaatctcaaacatatggatcatgttcggtttcttttgtcagtctttagacaaagatctatttacccacggcttaaaacatgtctttagagagagacttgaggttcgaagtaaccaatcctttacacaaaagattggatggggttatgtttggtgaaaggaaattggtacccacggctttaaactttagtctttagattgaaattgaacattgatccttcttggtacacatggcttgaaaatctctcgacatatggatcatgttcagtttcttgtttcagtctttagacaaagatcaagttacccacgacttagaaaagtctttagacagagacttgaggttcgaagtaacccatcctttagacaaaagattggattgggttatatttggtgtaaggtaaatggtacccacggctttaaacttttgtctttagactgagaattgagactgaacattgatcatgcttggtacccacgccttgaaaatttctagacatttggatcatgttctgtttcttgtttcagtctttagacaaagctcaagatacccacggcttaaaacagtctttagacagagacttgaggttcaaagtaactaatcctttagacaaaatattggattag

SEQ ID NO: 138729 - DNA, 1528 bp, Arabidopsis thaliana landsberg
atggcgacacttgggacttctggagtttcacatccacctgacgaagcaaaggttctattataacaaaaacgcttaaaacacaactgtctagggttcgcatctacgttttccaagcatctgtgtaaaagcattttagggttctaaactaaagatgatcacatctatcaaagtttccattgttaattcccttctttttttcttctcaaataccaaatgcctcaacaactcacaagttttattcatatgcaaatcttcttctttttttcttttcctttttttgtggcgtaaatgaaaaaagactaacgaatcaatttacattacaagttcattcatctgtattaatgtgtctgaccttacctaatttggagacggtaaacttggtgagcaagtccatttcctctgtattaataatgtagcgactaaaagttaacatatcagtatatctactaccgaattcttcaataagggttttgtttttcccaaatctcttgccttttgctaagatcgatcattcactattttatcatgtctctgtttctcaaccagcctttcaagttgtgcctaggccaacctgcgttgatgagatcctcctctcattttctctctaatggtttctaatcctcttcactgcaatttcctccttcttccatcaacggctgtggagtcgtgactcaaggtcgccacacttgtttggcaaagaaggttactgaggataaatgtgaaataatgtggtcagcttacccctgcgtggcagctagtttcattcacgacggaatgttatctttctttgatgatacatgtacatgggagtcggatatagcagtaccaatacaatattcgtcgcctccttttgtaactttacctcgttgccaaactcaaattgtcaccatcatcttctcctgaggacgaggaatgtgttgtggctgtcaagttcttgggacctcaactcagctttttcagacctgctcaaagtaactccaagtggatcaacatcagaatcgcaaacccttgcttctactcctctcgtgtcatgttttcgaagaaagatgagatgtttcgcatactcggatctggaggccatatcattggatcatgggatctccacacacacaatcaaaaaccgtttcaaagattgcggttcaaaaaccttcccaagctgacaaaaaccaaacaagagctgatggattcgtgctacaaaagcgaacacttggtggagtcaagaaccaccggtgaaacatttttggttaagtggtataggaaggccgtctggagaggtatgtcgaaactgaaaacaaaagctttaatggtattcaagctagacgacaaaggaaacgctgtttacactcaagatattggagatctctgcattttcctctcaaagtctgaaccattttgtgtacctgttagctcctttcctggtatgatgttccctaaccacgtcaacctcgcggatgtcggtgaaaagggatatgtcaatctggctgattcttccatctctgctcgttatattcttttcccagccggctga

SEQ ID NO: 138730 - DNA, 3471 bp, Arabidopsis thaliana landsberg
cagcattgggagcttgggaaaagaaagtgtggaggtaggtgtacaaaacataacagtgaaaacggcgacgtttacaggaacagagaatggggtgagaataaagtcatgggccaggcccagtaatggatttgctaagaatatccgtttccagcattgtgttatgaacaacgtacaaaacccaatcgtcattgaccaaaactactgccctggcaacgaaaattgccctaatcaggtccacatttttctcaaaacatattaaacgtcacataaaaagctattcttaatttagatattaattggtttatatatgattgatatgaatgataggtttctgggataaaaatcagcgatgtaatgttcttcgatatacacgggacatcggcgacggaagttggagtgaaattagactgtagctctaagaagccgtgcacgggaattcgaattcaagatgtgaagttgacgtaccggaataaaccagcaacaacagattgtagtcacgctggaggtagtgaggcaggatttcaacggcccaacagttgtctatgaccagaaaagaaaaatatttgtcttctttttgttagtagtgaaattgtaagtaacgtcgtattttcatatatattacggctttattcccggagggttggaatacgtgaaattatggtctagtattttcgcaaaatcaatttctaatgatgctatttgttatgcattagtcaatgcggactaaccaatgattatgaacgtaggtggatatttaaaatgaatgggaattgtgtttaataaaacgaatcaaatcgataaattgtacatcataatgcctatagcctaagcctaatatagtattatcagctatataaatgaattacgtgtaaacaatgttgtctaagtaaatcgaaatgttacaaatccaatatataaaagcaaaatttaaggatattattggacggagacggtgagagatatttcatctagctaatactaagaacatttacattggttattagtcgtgcaatctaagaacatgagtatataaaaaataaagtaacatatgttcaatcgaatttatttcaactaatttattatttttgaaaaaaataagtgacatgtgtaagatgaatttcttattaagtaccacaatgaatcgtggcagcacattgttgaatattagagagtttagggtctaaacaaaagcaaaagtgagtcttggtggccctctatcgaaaactccgttaatctgtaatgcccgatttgagttggtcttggcttggaaatgatacatgtgacgccatataatgctgcgtatggcaactcgtcgtaggtactccagggttttgggacgcacatcacggtcagtcatccacatgaaagacttctaaagacgcatcttggagtttcagattcatcgaagcgcaagatccaagttgaatatttcatgtagcttagagaattattctgtgtaacatgaaactcatgaattgcaatacaggtcgcattgctcttactgttgcaggagcctcttttattgcagggagctatctttctttaacaattggcagtctctccctcagctgttaaaccagtaaccttaacatacctcgtcaaactctactagactaataataaattatgtatcaatgataaatcatgggaaaactattagaatataatttcttatttccaaaattcctacaaaatgcgtggatattaggtcacactcaagagaattttagacaaatttggtgaggttctctgatacctcagatctagagtttcagacaaagtatagtgttgtcgcatcacataatggagctggtacagtatctactaatacgtggtttgaattacattttatagtaattttgttggtcactagtcattatcacagtactatgattatgaattagaccatacactattttaaattttatcttaccaaacatactttatgcatgcaattcataatcatagtactgtgataatgactatgatgagcccattctatgtatgatgggagatgcaccaatttaaactttgttcagttttgaagatatatagatctgaccaaagcaagaagggcttttactaagagtaaaacagaggaatatggagaccaccgtgaaaaacaagcaagtgatactgagaaattatgtgaagggtatccctaaagaatctgacctaatgattatcacagcttcagaccccgtggaactcaaggttaagcccggatcagcggcggttatggtgaggaatctttacttgtcttgtgacccttacatggggattctcatgagagaaccaactccttccactctagcacttttggatgccttcatccccggaaaggtaacaactctccacacacatacatacatacacaaggccttaataagaaattgttgttgattctttgtgcagcctatagctggaattggagtgtctcaagtaatagattctgatgatccatcttttacgaaaggcgatatgatttggggaattgtgaactgggaggagtttagtactatcaacccggctgctatattcaaaatcgacgtcaatatcaatgttcctctcagctactatactggaatcctcggttagtcacagaaactaaaaaaagtgtaatagtgttatggacctatacctatttctcttaaaagctctgttttttcataacaggtatgataggtttaactgcttacgccgggtttttcgagatatgttcacctaagaaaggagaaacagtgttcgtgtctgctgcttctggcgcggttggacagctcgtgggtcagtttgcaaagttgatgggctgctatgttgttggaagtgccggaagtaaacaaaaggttaggccatagttttgaaactcatcaatcaaatgagttaaactatctctatataagttttctctaattacataatttggttcccacaaaaggtcgatctcctgctgaacaaattcggttacgatgatgcattcaattataaggaagagcctgaccttgactccgccttgaagaggttcatatttggcttcttataaatcagtttctttgaatcattgaatcaaaatctcctcacaatatttctctctgcaggtgtgtaccaaaaggtattgacatatactttgagaacgtgggaggcaaaatgcttgacgcgggtctacttaacatgaaaacgtatggacgaatcgctgtatgtgggatgatatctcagtaccatcttgaaaccagagacaggttacaaaatctacctgacatcatattcaagaagataaggatgcaagggtttgcttcttatgactttatagatagattccttttgttcttggagtttgttcttccctacataaaagaagagaaattagcgtacgtggaagacattgttgaaggactcgagaatggtcctgctgctcttgtaggacttcttcatggaaaaaacgttggtaagcaagttctcaaggttgcttgagag

SEQ ID NO: 138731 - DNA, 371 bp, Arabidopsis thaliana landsberg
atgcagataacttgtggaactctcgggctttcaacagcaactgtaaaacttgctgacgctgatggcaaagaacatgtcgcttgttctattggaactgggcctgtggattcagcttacaaggcagtagatcttatcgtaaaggtactgtttataccgctgaggctctcatctacaaataactcaccagtgggtcatcggttattgaaaacctttttccccctttaggaaccggctactctgcttgagtactcaatgaatgcagtaacagaaggcattgatgccatcgcaaccacaagagttcttatccgtggaagcaacaaatactcatctacaaacgcaataactggtgaagaggttcaaagaacctttag

SEQ ID NO: 138732 - DNA, 1964 bp, Arabidopsis thaliana landsberg
tcactcttctccatatcccacgcctttcaactctggggctacgcaatcgaccgagtcagcattcgtggtgtcgtgtattgtagccttgacggagatccaagcgcaccacctgtctccaatgccacagtctatattgaatgtccaggcggctcaaactcaaccctcgctcaagcagtgaccaatcaggttggtgtatttacccttgtgttcaaccccggcaatacgacttttgttaatccaaataagtgcgacatcaaagtaaatcttccaactaactcatgctttatctatccaccgggtggcgttctcatagcctcagttaatgagctgcttagcatcatcctccagaatcttttgattatcgctacctatgccactacaccatttctcagccttggttaatgtttatcgctaactatgccatcggtgcttctcgacaatgatgtatgatgcgatcgtctctgccttaaagtgtgtgcgccttatatgtatactgtgattttaatgtatggtcgtctactattatatatatagggagaaataagtgaggcatatatatgctccacaaaagcttatatataagcagctccgtctttgtcatctttatgtacttaactaaaaggatactacataatagtaataagtgggtatgtattttatcatcaataattctcttaaatactagttattactgtctttatatatatatacactaatggattttgaaaaacgttagtacttccgcagtttttagttcagcttactagttggaaaaatcagagggtttatactttcttaaaaattaaattgttggactaaagatcaactgggggaaaaaatgttttaagctgttgacaaatattaatatctattaatttaatataaaatataaagtaatccaccaaaaatgattactttgctgctcgccgtcttgtccatgccaggcgacggttctgataatgaaatgaaagacggagccgaaagaaaaacccctggggtttgttgagttgcatggagattttgtataggattacttttacgaatgggccgaaagggcccaaagacagcacatatagcatttgatcactgttacgttgttttgttttacaccaactaggcaacaacaatgaaaggaacacgcctatcattgttgtttggaagatatcacaagcggccatgtatacaaatgtgtgtatatatgcgtgtgcagacgaggaagcatcccaagaactttcaaacttgtatctatatgaaaagtcattcctaatggatcgatcgacatatccaaaaacaccacaataattgagaggtgccaaaaaaacataaattaccatatcatcttgtttgtagtaaaaattaaaattgaaacattttaccgagagttaatctcatttccatgagaagtaccattcgctgactaaataaagagtgccatgtgaagtataccttattataatcaacagaatctcataaaaacttcataataaataaataaaaaaggaatcaaactatactttcaaattatgtctgtcgtccgcaacattaaaaaattcttagaaagcatttatactcccggcagagtttttgattctttagcgcaatcatgcttcaacgcgttgcgtcatataaatttaatgcattgataaagtctatttactaaccaactaattaaaaaatcttatggtggtccgatcagtctacacgtatgtgtgtggttaggattcgagcgagactcggcgtttattgtggtgcatgtatctttcgtttacttccaatttacaattctgcggaatcaacatgatttagagtaaataattgcttgtaaaaagtaaatagagattcgcattttaccaaaagaaaaggaaaaaacattggagatggggagggtccatactcccctaagccacgggtcgagtggagtacagttggttggcgcacttactcttgacgatgtttgtggacat

SEQ ID NO: 138733 - DNA, 1263 bp, Arabidopsis thaliana landsberg
atggtcatgaatcagtacactgagcttattggaagacctgcccctatgccttactggtcatttggtaagagacattgctctgttcattttgtttgcttaaagtttagtccatagcattatgagatcatatacttgtttgtgtgaactgagatgtgtgttttgctttgattttgtgaaggatttcaccaatgtagatatgggtacaagaatgtatcagaccttgaatatgtagttgatggatatgcaaaagctggaatacctcttgaggtgatgtggactgacattgattacatggatgggtacaaagacttcactttggatcctgtaaatttcccggaggacaagatgcaatcatttgtcgatacacttcacaagaatggtcagaaatacgtgctgatcttggatcccggtaaacattcgtatactatctctagtctctagtgtcttcatcaatttgattcaagccattaattctataggtattggtgtggatagctcttatgggacatataatagaggaatggaagctgatgttttcataaaaagaaatggtgagccttatcttggtgaggtttggcccggaaaagtatacttccccgacttcttgaatccagctgctgcaactttctggagcaacgaaatcaagatgttccaggagattctccctttggatggtctgtggattgacatgaatgagttatcaaatttcataacttcgcctctatcctctggatcttcactcgatgatcctccttacaagatcaacaattcaggggataaaaggccgataaacaataagacagtacccgcaacatctatccattttggaaacattagtgaatacgatgcgcataacttgtatgggctcttggaagctaaagccactcaccaagctgtggtggatataacgggaaagagaccgtttattttgtcaagatccacgtttgtaagctcggggaaatacacggctcactggactggtgataatgctgcaaaatgggaggatttggcttactcaatccccggaatcctcaactttggcctgtttgggattccaatggttggagctgatatttgcggtttctcacatgataccaccgaggaattatgccgtcgatggatccaggtagagtgattaattctcagacataacctgtagatttcttcatgagttcatgatctaactctggatcttagattatcagcttggagctttttacccttttgcaagagaccattcgtcccttggtaccgccagacaag

SEQ ID NO: 138734 - DNA, 1778 bp, Arabidopsis thaliana landsberg
aatgttgagacgaattgaaaaggaaccagaacaactactatcaacggtgatcgatttcgccgggaacggagaagaaaaccctagatatggcggagaagcttgcgccagagaagagacacgatttcattcacaatggtttctcgctttctctatcccctcgctctatttctctaatttcagctgattccatttcacgagatttggtttgaatgttcttcgatttccgatggttataggtcaaaaggtatttgagtgggatcaaaccctggaagaagtgaacatgtacataactttgccgccaaatgttcatccaaagtcattccactgcaaaatccagtcgaaacatatcgaagttggcatcaaaggcaaccctccctatctcaatgtcagtttctttcgctatctttcaatgtttttgatccgtttgtctcataaatctgagttattcgatgtggtatatataactcgattcaattgtctaaattttgtcaattttcagcacgatcttagtgctcctgtgaagactgattgctcgttctggactctaggtactccattttttgtttttgtgtctgtattgggtgcttgtttttgatggttaggtttctgtttttagacccgttcactattgctagagaggataaactgaacctggaaatgtgatctgagtttggtataaatagtgggacatatagtttggaatgtggaaaatttgagactaatggagggatgatggaatgtacagtatattttgggttatattatcagcgtatgtaagttactggcatagtttttttaggttcatagtgtggcactgattgctaatctggattgttatgtttgatttggcagaggatgatataatgcacattaccctgcagaagagggagaaagggcaaacatgggcatcaccgattctgggacagggtcagttagatccttacgccactgatcttgagcagaagcggctcatgctccagaggtttcaagaagaggttagctacctgtaaaagtcctcttggtttcatatggtttctgcttttgaaaaaataaatgttgttttctaggtcttctaattgatctccaaagcaaatcttaggcaccactactgagtagaatgaatctatgtcaaagtatgattactttgccataaatgatcgttttggatgagtcattcccatgattgttttctttgttcaagctctcttattttgtttcttatgtctctctcaagtagtgaatcttttgtgttcatggataaacagtctgcatagagctggtgatagtaaacctatagtgtagccggatttttatcagtttcatgaataaacagtctgcatagagctggtgatagtaaagctatggtggatgaaattgctcagccttagtctaaccggattgagcaaattaacatggcaagactgcacacatgggtgtgattcatgtatgccttaatggctttgtcttattggttttgtttctgcttgtatgcatgagtttctatttactttgtattgagctcaagtatgcttttctttactctttcgaccaactttccttttacatgttctttctctgttggtttttgcagaacccgggattcgacttctcgcaagctcagttctcgggtaattgtccagatccaaggagcttcatgggcggtattcgttctgactaaataaataatagtcccactcttgttgctataatagtatgtccattataacaaactcaaaagtcaccatgacttaaacaaaatgtctcatgtctcataaata

SEQ ID NO: 138735 - DNA, 1274 bp, Arabidopsis thaliana landsberg
ctgttgagactatactccctttagatgctagttgcgaagacattgaggtaacgttctctcttcactagcttcctttgacgtggatttcgtgaatcttatggtccttttcctgaattaggttgacaaggatctttcatttctcaatggctatatccaacaagctatcgagagtggagcacaaccttatatttctgagagagagcgctcgggcatgtttgaaacaaccgattaccatccccaagatcatcacgaagttccaactcatgctcttcgattcgaagcctatgaacttccaaagccatcagtgccaccacaagcttcaaacgagcttgttccagtacccgagccttcttattatagcgagtcacaccagccaatttcaacatctttggtttctgaacgagagtcatcagaaattaagctgcgactcgatggagttaagcaaaaatggggtagaccgagctatcaatcgaccacagcagcttcttctactactccacaagcagcaaacggtatctctacacactcagatgcaggagttggttcatctagctcaaagcctcgaagcagttacgaaccaaagaaacccgaaatcgatcccgagaaacagagactcgctgcatccttgtttggtggatcatcatcaagaactgacaaaaggtcttcttctggtggtcacaagccggcgaaaggaactgctaacaaaaccgcaaccgtacccaaggaaaatcaaacccctgttcatacactgccaccggacttgctcgacttcggtgagccaactgccacaaccgttacaacaatggatccttttaaagaattgaaaggaaatatgagatcttcgagccaagacggtgttcatccgatgtgtgggactatactcagatgcagcacctgtgcaacaaccacaagtgtgactctctcttatccgaactgtctgatagctccaaaggaaactcacgcacgtaccaacctcaaacctccaaaggaccaaacacaaaggaagctcttgagaaagacgctcttgttagacaaatgggtggaatccaacaagtcagaaccctacactgttcaaagatctcctcggctagacgaaccattctccgaccaaaccaatccattcatcgactcacatcatcatcatcatcattccatatttggtaatgtgctgtggggtttgggaattaatatgtttccaattcaagaacagctttttgttgtacctaaattacttctcaataggaaccatttagtttacaaaacacaacagagag

SEQ ID NO: 138736 - DNA, 3165 bp, Arabidopsis thaliana landsberg
gtggatagctcgaagaggctattcagaggtatagtagcagatcttagaggaagagccttgtgttacaaggaagactgggtcgctggtctccgttctggtttcgggtacttaaatactggtttcactcttacataatcactatctgacacaaacatagaacaaagttttgatattttgagaggttttgcaggattttagcacccacaacatatatttttttcgcttccgctcttccggttatcgcctttggggagcaactcagccgcgacacaggtctttttctttgagcttatctctctcaaagttgtcatctttctttgctttctttacggttttgtgttcacgtttatttagtggaacaaaagtattcaagttatccacgtttggtctggttttttttttgggaggggttttagttttgcattctctgatttcaagagaaaaaaacaaatttgaatttgttttgaattaaatttgaggagattatagagggagcgttgagcacagtagaaacgttagcatcaacagcgttatgtggagtaatacactcaatattgggaggacaaccactgttgatacttggagttgcagaaccaactgtcttaatgtacgtttacttgtacaacttcgctataggaagaccagaattaggcaaacaactctacttagcttgggctgcttggtaattactccacaagactcttctcctcttcttcttttttatgtaaagttgtggtttttctttatggttttgtttggttgttaaattggaagggtttgtgtgtggacggctctgttactgttcgtaatggcaatcctcaatacggctgatatcattaaccggtttacgagggttgctggtgagctgtttggtatgttgatctccgttctgttcattcaacaagccattaagggtatggtgagtgagtttgggatgccaaaagatgaggactcaaaactagaaaagtataagtttgagtggctctatacaaacggacttctcggcctcattttcacctttggccttctctacaccgctttgaagagtcgaaaagcaaggtcttggcgatacggaacaggtaagatagatgaaccttctcatgctttggtggtcatttctgtgtatgatcggtctaaaagtttctggtttcttgaaaaggatggtacagaagcttcatcgcagactatggagttcctttgatggttgtggtttggacagcattgtcttttagtacaccatcaaaactcccctctggtgtcccgagaagactctttagtcctttaccatgggactctccttctttatcacattggactgtcatcaaggttacaaaaacacagcacactaaagataattgattcatcatccgagccaaacttaaagttttaatacatggatttggtctgtacaggacatgggaaaagtctctccgggttacatatttgcggcatttatacccgcattgatgatcgcagggctttacttctttgaccacagcgttgcctcgcagctcgctcagcagaaggagttcaacctcaagaagccttcagcgtatcactatgacattctcttgttgggtttcatggtataatcaatcaaactacctttaaaacattgaaaatatatgttaaaatctctaaaactttgtctttgtttcagacgttgatatgtggattgctaggtctgcctccttcaaatggagtcctccctcagtctcctatgcataccaaaagccttgctgttcttaaacgacaggtttaattacttctcagttgttgatccactcactattcaggttaagctggtcttaatgaacctgtttgattttcagttgatccggaggaagatggtaaagacagccaaagaaagcatcaggaagagagaaacatcctcacaagtgtacgagaatatgcaagaagtcttcatagaaatggataaaagtccacttgtaagtagtagactcataattcaatgttccggtgaaagaaaaatcaagatttaatttagaataatcataagctcttgcttttaaaaaccaggctcagacagatccatcagtgataattgagcttcaagatctgaaagaagcagtaatgaagagcaatgatgaagaaagagagggagacgaggagagtggttttgatccagagaagcaccttgacgcttacttgcctgttcgagtcaacgagcagagagttagcaacttgttgcagtcactgcttgtggcaggtgcagtgttggctatgccggccattaagctcataccgacttccattctatggggatactttgcttacatggccatcgacagcctcccgggaaatcaattcttcgaacgcttaacgcttctcttcgttccaacaagccggagattcaagtatatgttctgaaaatgatctgttttttttttcttcaagttattattattcagatttctcttcaaagactgatcatgcattgttgttttcagggtcttggagggagcacacgcgtcgttcgtggagaaagttccttacaagtcaatggctgcgttcacactgttgcagatattctactttgggctgtgctatggggtgacgtggattccggtggctggaatcatgtttccggttcctttcttcctcttaatagctatcagacagtacattctcccgaagctctttaacccggcccatctccgagaactcgatgccgctgagtacgaggaaatccccggtactccgagaaacccgctggaactgtctttccgggttagtccatatcttagcaatatctacatttttgaggatcccggactttggactaaaccatggaggttttcttgtcatctaaggcatcgacagtgacctaaaatatttgaatttgttgaatttaatgccaaaataaacttgttttacagtcgaatgactcgaagagaggcgtccaagaaggcgatgctgagattttagacgagttaacgacaagcagaggcgagcttaaagtccgtacattgaatcttaacgaagacaaaggcaaccaggttttgttttgttatgcatccttgatatgaatcttaactttgtgaaaagaattatagactcaagatcgctgttaaaaacctgcagatttatcccaaggagaaagtaaaagcaggagacggggacatgagcacgacaagggagtga

SEQ ID NO: 138737 - DNA, 1013 bp, Arabidopsis thaliana landsberg
  unsure (1)..(1013): unsure at all n locations
ctagatcgactgatttccactggttagtttaatcttccattcaaatcaacttccagattcaagtagaatcatcatctacgttaacatatgatgaccaattggtttccgaacactgattccaggcttcttagtatnnnnnnnnnnnnnnnnnnnnnnnnnnnnnnnnnnnnnnnnngtttagactatgaaaatggatttgtatatcttatgttgtgctagttcctagctgttagagctggaattgatctctggatacttagacatgttgttacatgagtggtggtgcgacattgatactgtttttgttgcaggagagagtgagagattcttgcagaaagcaatacaagaacaaggaagaggaagggtgttagacaccattaacgagattcaagaaaggcatgatgcggttaaagacattgagaagaatctcagggagcttcaccaggtgtttctagacatggccgtgctggtagagcaccagggagctcagcttgatgacatcgagagtcatgtgggtcgagctagctcctttatcagaggcggaactgaccagctacaaaccgctcgggtttaccagaagaacacgcgaaaatggacatgtattgccattattattctcatcatcatcataactgttgtggttcttgctgttttaaaaccgtggaacaacagcagtggcggcggcggcggtggtggtggtgggggtaccactggaggaagtcaaccaaattcagggacaccaccaaatcctcctcaggcaaggcgtctattgcgttgaagttgaagttgaagttgagtttcgttatttgcatatatattctttctttgaaaaaccttattatcaaaccagctttgtgttactactttctactgctggtttgttgttaatctcccgtttatttggtttttgtgaaagaatttaaaatgtgggttagatgagaaaattagtacaacattctcttgtatctatgtttgctatatgggttatatttacttgatgtgatttcagggtt

SEQ ID NO: 138738 - DNA, 928 bp, Arabidopsis thaliana landsberg
tttccgcaaaaaggaaattttgaggtactcaattccggacagagcctttggttacacagctctgattggtaagaagtcaattgttgctcctctaagaaaaggcggaggaaagccaacctcgaaagctcgtggccatttcatgttgaaacgcgagagaccaccacatgtcacaatcctgtgtctagtgagagatactgccgccagattgcctggtagtattgggacaagagctgatgtttgtaccttaataagagactcgcagtatatcgtggaggatgtgtctgattcacaagtgaatcaagtcgtgagtggggccttggatcgtttgcactatgagcgggacccttgtgtccaattcgattcagagaggaaactgtgggtgtatctacacagagacagagaacaagaagatttcgaggatgatggtacttcatccacaaagaagtggaagagaccaaagaaggaagctgcggagcaaacagaggaacaagaagctgtcactgtagctttccttgggaatgaagaacaaaccgaaactgagatgggttcagaaccaaagactggtgagcccactggtttggacggagatcaaggtgcaacagaccaactgtgtaatgagactgaacaagctgcagaggagcaagatggtgagaacaccgctcagggtaatgagccaacgatatgggagcctgatcctgctgttgtttccaatccggttgaggataacacgtttatctgccaagagaactcagtgaatgatgatttcgatgatgaaacatgattggtgataccaggtagatctcaaacacactctttcatattcagatttcatgatcaataagcccattagtccactgagtctcagtccattcctgttgttttcaggtgaaaatgccaagagggtatttgattaacagaaagagaagct

SEQ ID NO: 138739 - DNA, 436 bp, Arabidopsis thaliana landsberg
gtggggtaagagaaggaagaagctttggagatttgttcccagtgcggagaagaataacagtcatacgggtaataataataagaggagaagaagctggtggcagaggtttttctttgatgatgatgggaattggcttggtttgagagacgacgacattgttgatgagactactgagcttgcaaaggatgatgagatgtctgatgaagagaaattcgagacttggaagagacgagcagaggcgattgtcgagctacgggaaggtcaggaggagattgtggatagtggtgttgttgctgatgtgaccaagaaatgggaggattggattgtggattcagatgatagttttgttgagtcttggacccgagactctgctggtagtgacgacaatttacagcttgatgaattgacaattccagatggaaagaaggttaaaatg

SEQ ID NO: 138740 - DNA, 514 bp, Arabidopsis thaliana landsberg
atatgctgctttaagaagacggctcttgattgatccacatttgtctaaagatgttcgaaattcccctgacctctctattgacaatcccttatcacaaaaccctggtacaagcttttctgattcgagtttcatatacagttttgctgagattattgggtgttgattatatgaaaccatttgcaatgcagatagtacatggggtcggttcttccgtaacgcagagctagagaaaacattggatcaagacttgtctaggttatatccagagcattggagttactttcaagctcctggatgtcaaggcatgttaaggcgtattctactcttgtggtgccttaaacatcccgagtacggttatcgacaaggtatttaaaatagtgaactttaataactagagaatgtagtttttgtaatgtataatctttgacattttttcatgtttctttgcagggatgcatgagcttttggcgccactgctttatgtacttcatgttgatgttgatcgtctctctga

SEQ ID NO: 138741 - DNA, 2962 bp, Arabidopsis thaliana landsberg
atgagaacttctcctagagattcgataagcaatttgccagatgagatacttggcaaaatcttgtctttgcttccgacaaaagtggctgcttccacatcggttctgtccaagaggtggaggaatctgctaggtcttgtagacaacctctgctttgatgagtcggtggttgtttatcccaacgaagaagaagctttaagtggttcacatcgattctgtgatttcgtagaaaagacatttgctctgttaagcaattctcccatcaagaaagtgtctgtgtgtcatattcgtagatgtagatgtgactgccacgagacataccgccgttggatttggactgcaatggaacgtgggttgttggaactacacttgcacgccgaatcatttatatttgtagagagagagctgttcacgagcaacacactggttaagctcacactatccggtagatatgattttcaagttgagactgtgtttctccctgcccttaaatcactttccctctcatcttctttcgagattggttttgacaaatattgtaacctcctcgatggcttccctgcattggaagagttatacattcgtgaagctgtatctgaactttctaatgctttactatctagcggtacgtttgtgaaatgtgcatccatcaagagacttgtggtttttaccgattgtccaaagtttaaagaggatgaggatcaccaagaaccttgttttatagcaccaagtcttgtctaccttgactattctagttatctctccgaaaattatgaccttattgatttgaattcgcttgttgaagccaggctgaatctcagactattggagtcatttaacaattatggttcgtctgataatgatggtgatgtttatggttgggattttaatgttccttttgattattatggtgatgttacaaatctagttgcgggtataaccaacattacaacccttcacttgtctcctgattcccttgaggttagtcttttgctactacttcttcgtctatctattgattgttttttggtttgtggagattgataatccattgtatatagaaaagctagtttgcaaagtctttcacttatatatggttctggatatataaatcaggtatttcatttccgctgtaaatccataccggtgttcaacaatctcctccttaatttatctattgagagtaacaagcgaaatggttggcaagtaatgccacttttgatcaggagttgtccaaatctgcacactttagtcatcaaggtcttatcattttccttgctgagattcttttgttgttgtttgtgttgcccattcatgtcaaattggtctctggtttcagggttttgtccacagagtaacaagtaaatgcggagacgcatgtgcttgcatccctaagaagcagaggaagattggaaagaaagaggagatttcagagtatggaggttcttttcaagagctggaacagatgagacatttcttgggcaagttggaacgtcttgaaactgtgaaagttggtgttcacgcagaaaacaataacaacaatgagttcttgcgagctaatctactgactctccccagactctcatcaaagtgcaacaacatccaattcatctgaccttttccttccttgtcttttttcgctttgatctcgcaatgtgaaagtaacgtgacatgaatatgattatatcactaaagttggttacaatctgtttttttgaaagatccgttgttcttcttcctttgagttcaaaaatgacatttttatttttgtgcctttttttgttgttaaattgacaaagacatttaaaagaagaattttcgaagaaaaattagagagagtagaagaagcagaagcagtaatggtacgagcttcatcgtcgaagaaaggaggatcaaaaggaggagacaaagacgacgcagagtcaaaacagaggaagagattaaaaaccctagctctcgataaccaattgctctctgattctccggcgaaatctcattcctctctcaaaccttcaaagcaagttctcaaacaccatggcaccgacatcatccgcaaatctcagcgcaagaatcgctttctcttctccttccctggtcttctcgctcctatctccgccgctaccatcggcgatctcgatcgattatctaccaaaaaccctgtcctctaccttaatttcccacaggttagatcctaattggtgtttctcaatgttgaggcattgctactagtactgtgaatcttaatcttcgaaaattgtggttctttagggtcgtatgaaactttttggaacgattttgtatccgaagaacagatacttgactcttcaattctctagaggaggcaaaaatgtcttatgtgatgattattttgataacatggttagtctcttgtgctttttcacatattcggagatctctctctgttttactgtatcttgactcttgagtgttttggtaatgcacatagattgtgttctctgagtcatggtggattgggacaaaagaggagaatccagaagaagctcgtcttgatttccctaaagaactagctcaggttgatacatttcacctatttttacattttctctttaagactatggttgcgacagagatgtttaacatgatcaggagaattctttggtttcaggcagagaatactgagtttgatttccaaggcggtgctggaggagcagcttcggtgaagaagctggcgagtcctgaaattggtagccaaccaacagagacagactcacctgaagttgacaacgaggatgttttgtctgaggatggagaattcttggacgataagatccaagtaacaccaccagttcaattaacaccaccagtccaagtaactccggtccgacagtctcagagaaattctgggaagaaattcaagtatgatcctttcaacttcttcactaagttaaaacacattcgtagcgatgatacgtttggattttga

SEQ ID NO: 138742 - DNA, 453 bp, Arabidopsis thaliana landsberg
agtttagaaagagaagaagcagaagatctgattaagcggcatggtggtcgtattacaggctctgttagcaagaaaacggtctttcttcatacctttttttatttttatttttgttaagttaaaggtaatggcataaagttacaattcttgttttcagacctaccttttgtgtgatgaagacattggcggaaggaaatctgaaaaagctaaagagctggggtgtgtcctcattgattgcatatcattacagtaacattttgaggtgtttttggtcttctagcattctaacttataatattctgttcagcactaagttccttacagaggatggcctatttgacataatccggtcctctaaacctgtaaaaaagtctctacctgaaaggtcaaacaaaggcactgaaaaaatctgtgcaccaccgaagacaagtcctcagaaagaagaaacaagag

SEQ ID NO: 138743 - DNA, 335 bp, Arabidopsis thaliana landsberg
tccttaccatcggctctggaaagaagaggaaatgaagatagggaaggagaagtttgatgagagtgaaaagacaacattcggtgctgatggctctctcctctgaagataggaaagacatgtcctcgaattgttttttaaccttgggaacaagatgagaaagtgagagagagaaagagagttaatgtaatctgcctctcccaatctctcagtctctgtttttaaaagaatctgttaataaagctttaaagtgtaacttgtctcatgtgtacttcaattttctcctctttctgttctctaaaacttcgatgtggaagtaaaatatgaaaacctatctc

SEQ ID NO: 138744 - DNA, 330 bp, Arabidopsis thaliana landsberg
aggcgattctcgacgtcggtcagggtcttgacgatgctcgctcttctccatcacttcttcttagggagagaggtcgattcactcccagccgttactttgttgaggaagttatcactggttacgatgagactgatcttcatagatcctgggttaaggtgttaataataataatcatgatcaaaaacagagtgttttgtgatttgtgatcgattcatgttatgagtttatttctttggttaggctgttgctacgaggagtccacaagagaggaacacgaggttagagaatatgtgttggaggatctggaatcttgctcgtcaaaagaagcag

SEQ ID NO: 138745 - DNA, 2794 bp, Arabidopsis thaliana landsberg
atggcagctggtcacggcaatccaaatttccctgcttttctacctggtaagttgttcttgaatgtcattgttcatcctacattgtaatggttgaaagacatctttcagaatcaatctatgcatgctagtgaaattgagagctattgatgctgagccgcttggcctggttgcccatgtctagggccgcttgagaacggcacctttttgtacaggtgctaatatgcacgcctgactagtttaaacttgtttgttttcattttcatgttcagttatgcaattcggtggtcagcatggtggggttccaacttttggaatggctcttccaggttatttccaaccagaacatggtaccggaaatcctgagatgacatggtatgcagttccacagctatgttttaaaagttatatatttggtgcattcttagttgacttgctgcatgcttttgtaatttgagaggatgtttaatcttgtaactagtcttttactagcccaaacagaacctgaattattgctttcactcgtctgctgtttgttttttgtttgatttccctatttctctatctatagtaggtccttattactgctattattttcttaaattattgacaggctgccaattttggctggccctggagcattagggggttcatattgtccaccttatactgtccttgatggttcttaccaagcagacaaaccagggttaccttcctctgccggatcgtccaggtttagaaataattttctcagtattgttaatcaacatgtcatttccatatgcatatgtgtagactctttgctttttaccttagaggaagagtagtatgggaatgcagctttaagcccttaactaagtaacgtatgtgagattttagatttgtggttcctcttattctagacccactgcaaaatgcttgttacctgttagatttacatttcttaagtgcttagattagtagtttctcgactatgtacacccagaaacatgtagttttcattaaacagactcactttcttggttgggcactcatgtaaccatgtcaatcatctctgattatgagcgtctagtaaagcatataatttgagctcaagtacccaattaccttatatttttgattttttgttgcagccaagagaacagttccaataatcctaatgatgaagagcccatggagagacctggtaagtaataactcttgccaattaaatggggttgttataatggattcagaagattttgttgtgttttggcgaataagaaatttgaatgattacatggagagactgattcgtatgggggtttattgatgtagaggttacgaacaatgggaattctcaacggtcaaatagcaacccaaacaagcagcctcgtaggtgagttttgaagcaatctagtttatttatcggtcagtgttagtgtgacgtgaaaccaccttgaaatcaaagtaccacaggagtagttggatacagatatttgtggaaatgaaatgttaatattggtccaggatgaaatgaaacactaacgagcacatgttgacgagggatgtgcagatactcggagatgagctttagcaagtgagtaaagaagagtggaaaggaagaaggtcatctaatttgactaagtggagtgaaaggaggagggtgagagagaagagctccttaggagcagcaggcccttggtgcttctccaactgctttatgaagccgtttgggctgctattattgttacctatttttattaggtacgcaatttctctcaagataccaattgaagagaggttttaaccacattataatttgaacttgtgtttgctgttttgttttcaggaggttgttgtgcaattgaaaagaatttttgttttgttttcgttgttatgagagcttgagcttgagccgtgggcgtccttcatctgtaatttattcttttgtccgtttgggttcaaattgatattttgtaatgttgatatgtgttattctgttttcgtttgtcaacttctttatcaaaagttgtgtgccctattcgtacgcctgcgaagtccccccaagaattgcccatgttgagttttgatggtagttagttgtctatgttttatattttacgcaaggggatagtggtggtgctcagtcaaatttacccgattcgtgagaaatgagtcattgaggaattgttaccatatatataaagacatgcctccgctctggttatttagttatgcgacaaaaacaaaacagaccgcatagaatagatgcaacaaaccaagtgtatagaaactttattccttggcgcagcaaaaaaaaaaaaagggatagagtctccgttgattcaggtagctcagcgtcctctgagatgaaacgattgttgttgtttgtttgttgattttagtttttagtttagtggaagatgatcggtaatagcgtctacatctcaccgtcaccgtcaccgtccgaccactctctctcgcccaaccctaatctctgcatctcggcggttggtttctactgtcttcctttctctctctctatttactacaaattttgatttcaatttgggtttccgatttcgatttcaattttgaatttgatggtcttcagatggaagagcagctggttgttgatgatgatgatgatgaccttgctcctcctccaatccctgatctcgatattgaccttgaagatgatgatgacgcctgttgtcacggcttgcttcatatcgcacctaatcacgaagaagaaactggatgcgacgaaaacgcttttgctaatgaaaagtgtttatggctcctcctcctactc

SEQ ID NO: 138746 - DNA, 1478 bp, Arabidopsis thaliana landsberg
agacggagaagaaagatgagacagagcatcatcatcatcatagctatgctcctcctcccaacagattaactggtaagaaaagccattggcgcgacgaagatgaagatttcgttgaagaaagaagtaacaagcaatcagctgtttatgttgaggaaagcgagctttctgaaatgtttgataagatcttggtatgtggccctgggaaacctgtatgcattcttaaccagaactttcctacagaatccgctaaagtcgtgaccgcacagtcaaatggagcaaagattcgtgggaagaaatcaacttctactagtcatagtaacgattctaagaaagaaactgctgatttgaggactcttttggtgttatgtgcacaagctgtatcagtggatgatcgtagaaccgccaacgaaatgctaaggcagatacgagagcattcttcgcctctaggcaatggttcagagcggttggctcattattttgcaaatagtcttgaagcacgcttagctgggaccggtacacagatctacaccgctttatcttcgaagaaaacgtctgcagcagacatgttgaaggcttaccagacatacatgtcggtctgccctttcaagaaagctgctatcatatttgctaaccacagcatgatgcgtttcactgcaaacgccaacacgatccacataatagatttcggaatatcttacggttttcagtggcctgctctgattcatcgcctctcgctcagcagacctggtggttcgcctaagcttcgaattaccggtatagagcttcctcagcgcggttttagaccagcggaaggagttcaggagacaggtcatcgcttggctcgatactgtcagcgacacaatgttccgtttgagtacaacgcaattgctcagaaatgggaaacgatccaagtcgaagacttaaagcttcgacaaggagagtatgtggttgtgaactctttgttccgtttcaggaaccttctagatgagaccgttctggtaaacagcccgagagatgcagttttgaagctgataagaaaaataaacccgaatgtcttcattccagcgatcttaagcgggaattacaacgcgccattctttgtcacgaggttcagagaagcgttgtttcattactcggctgtgtttgatatgtgtgactcgaagctagctagggaagacgagatgaggctgatgtatgagaaagagttttatgggagagagattgtgaatgttgtggcttgtgaaggaacagagagagtggagagaccagagacatataagcagtggcaggcgagactgatccgagccggatttagacagcttccgcttgagaaggaactgatgcagaatctgaagttgaaaatcgaaaacgggtacgataaaaacttcgatgttgatcaaaacggtaactggttacttcaagggtggaaaggtagaatcgtgtatgcttcatctctatgggttccttcgtcttcatag

SEQ ID NO: 138747 - DNA, 2693 bp, Arabidopsis thaliana landsberg
atgttattaacaactaactccaacaagaaattcacattaatctacatatcaaaacgagatcggatttacttttgccgtagaagaggaagctcactttgggagcagattatcggcttgaaagctacggcgatctcggaagctaactcgccggtgaaattaaagctcaaatcgccggcgaaatcggagctcaagtcgccggcggcgaagtcggaaaaaatcacatcgaaaggagagtaggttcgcgattttggtaacggccgttattcttttttttttactaaatcatttactctttattttaaaattctccctcaattattgtacatcaaggagtggtatttagaataaaagatgatacaccagaatagttttttcaaaatagtgacagaacgtggctccaaaaaaaaaagtcgctttcacaaaaaattgcttctttacgttgtttccaatagtcacggtttagtggttttcaaaattaaaccggaccggctatttaaaccggtttgaactgacagtgttgtgaaaagagaactggtccactttagtagctggagacctcctacactatgcatctgccgtgagtgttcttgatgtttcaacatcccacacaagagtctcttgtttccacaatgatgaagctgagttttcatggtctttacacatataaattaattagttttctgtgaactgaattgttttgtacatactacaagaaaatttatttagggtatgtacaacattttatttgacaatcctagtcaaacaactctcatcaccctactatttatgtatccatctttctctgttatttatgtatccatcgttgataataatacagaattatataacggatgaaatcataaaattaacaatcaaaatataattatacaatattaaatattaaacaaaataaagaaagttaacaaaacaaataattaaaatttaatttaaaagaaacatatgttttcttttataagaagcttaaatattataaacatttaaatttacacactgggtgcaatcctagaattaatgggtttgagtcaatattaatatattatgatatattacaggtgaaattctaaaattaacaattaatatacaattatacaatcttaaacaataaacaaaataaaaattaactaaacaaatacaattaaaatttcagttataaaaatattgtaccatatatttaaattaatcaaaataataccatatactatagatcatccttataaaaaatcaattttcttatgaatgtacaactcaatgacgtaacattatgaaaaacaataattaacgagtctactaaattaaaaaataattttgactaatttttgatcatgtttaattctacaaacaccaatatttaaacaatcaaaacccattattaataatctgcacatgaatcgttgaccatatatacacacataataatcaatgtgcatataaagaataaagtaaatgtatgtattcaataatttaaaaacctggaacaaagaattcatagtttctactagtttttcagtgtttaaattaaatgatgttgataaaacattttagttaattttctgaaacaacttctttaaaaatagagaaacctccagcataaatttagtttgaataaatttaaattttatgattttatttactccatttgtgtttgacgaacagtccaagtctagtataacacagactgatatataatttggttatctacaacttataatatgcatctactttgaagtaattaatcatatgtcaacacatactctctccatattattttaaatgatattttagagaaaaaatttagtttcatttaaagtgatgtttttttaatttttaaatgtatataatattttttgaccaataatattttatgatatattttaattattgattgaattagttataattaataatactttatatgaaggagataaaattaaatgaaaattttgtaatttctaaataaatgcgcacaaacaataaatttgtcaaaaaacaaacattggggaaaatggtacccacacccaccataagagagtaaatgggtcggatccaaaggacagtctcgtaactgacaaattcacgccacgtcataccaacaaactgttgctgatccaaacacacgccgtcatttagcccggaagcgcgtgacatttcacgcgccttctctctatctcacccaatcagatcgttttaatggttgtttgtttaatcgatcttcttcttcgtcaagtatctcaaaatcaaaaacaagtttgcttcattcatacttcaaattctctcttcacattctccactctctgcttatgttaacgtagagagagacggcgacgtagaaggagtaggaggaggaggcttcgtcgacaatgcgagaatggctcagtatagacaatcaggaacagagaggtttttgggaggtcgaagcggttacaatccttatgtcaacggtggagcttcgtcagatcacgtagcgatcgggatccgtaacggcggtggtagtaatttcggagttgtaactcagcacgggaaagctagtcgatggcggcgatctactcgattagataggaatcgtcgttgtggtgttggctctttggtgtttgttctttgtgttgtgctcgttgtttgtgtctcagcttactattatttctctggttatactaatttcggcaaagatgataaag

SEQ ID NO: 138748 - DNA, 264 bp, Arabidopsis thaliana landsberg
gtagtctaattcgcgtcggattaaaggaagagaaccagtttcgaaatcttaccttggctttaaagttgtgtgagcggcgacatcacgggacgaatacttctgagatggaccaaagatccgagcaccaccttgctcgttacctcccttagctggagcccaggttggtcgtgctgcagtcgtcatcttcagaaaacaaaagccctaatttccgatcggagagcgaatcaaccaagatcgagataaggacgacgagaactctcaggc

SEQ ID NO: 138749 - DNA, 3751 bp, Arabidopsis thaliana landsberg
gtacatgagtggagtttagagtcttcgaagcaaatggagcaaacaaaggagctaagagaatgcaaagtgaccaaagaggagaagtgtagaacaatagatcaagtggtcgattgcttggtcgactggtcaggaccagagctctagaggaaatttgaatctaccaaaatgggcgattggtcaggaccagagctacggaggaatatgaatctaccaaactggtcgattgcgtgtttgattcgtcaggactagagctacggaggaatatgaatctaccaaagtggtcgattgcatgttctactggtcaaggattaatgttgcggacgatattgaatctaccaagtgatctattgcttggtcgattgccttccttaaccgggtcaaaacccggtttgttctagcattactataaatactcttaatctagttttagagaagggagctttttgtttagggatcaaaacttctctttaaggttctttatcttaggtttttgtatgaatcttgagtttttaagtttctatatcaagtatttcttttaaatttctcatatattttctaatgatcatggctttacaaatatcaaaccaattcctttgtatgatcatgatcatgagtgagtagtcttttagagttctttggttagggtagattaggatggtttagatgttgggttatggagtttagggctagattacttaagattcttacttattggttgcttttaaggctagatcaacattgatcatgttgatttagatactaggaatttcatgcccggaaagtgttcgatgaaattcccgaaccaaaatctttaagtgcttttcataccttacctttggaaattgttgattagggtgattagtggctagatagacttgttatttatgcttattgatcatttgattgcctatggaaattgttgatgattgattgattagtaaagggatcaatatcatggaaatgtattagtctagtgttctatggcctaaggatcattgcttgttagaagttgtttgttgctccataatccatctctttatcatttctaatcgattaccttaacccgagaattcgtctttagttttcgcttagtaatttgttaatttcccgctttgtttactttcgaaacttgttggtcttttgtttcttgctttctcttatcttgttttgcattgtttgtttgataatgcattgttactaagatttagaatactcaaaatcatcttgttagcttagattaagcaagtgtgtgtattcttggtgagttgattaaattgcaaattgtggttcgataattaattgaaagaaatgctacatcagtaggtttcgaagttaactcatcctgtatttggggtttcttagttcacacgtttcctttggggcagatccctatttgctctggtttatcgaaattaaaccggtgatttttaagaactggatgaaatagaacatgaaaacttaaaaattgaatttttcgattcctttgcatgtcttgtcgaaacctgaaagcttgagtattttctttatattcttcgtttgagagccagaaacgcaggccattaagtaaatcccaactctctttttcactgaaacccctaaatattaggtcttggataaagcttttgtaacaaggtaggtttcgaggttttactgattatttttttgggggttccttagtccataagattcctatttgcgttgtgaactccaagtttccctctattgaagttacaagttcctgttctcagtttaccagtttatactctctttgtttcgtgtagagaagatggatctcttaagaaatataccagacgagcttatttgccatatattgtccttccttacaacaaaggaggctgctttgacatcggttctctccaagaggtggcgcaatctgcttgcttttgtctctaatcttcacattgatgactctatctttctgcatcccgaagagggtaagcgtgacaggaacgaaattcgacagagcttcctagattttgtgggtagaatattggcattgcaaggtaattgtccggttaagaaagtctccatcaagtttctatttaagcttgattcagaccgagttgatggttggataagtaatgtgttggcacgtggtgtttccgaacttgatctgtcaatcgatttgtgtatggatgaatactttctgttgtcttcaaaacgtttcgagagcaagaatctagttaggttgaaattacacagactttgtattggccaacgggaaaaaactgttggttggttggctggggagattttcttaccaatgcttaaaactctcgaacttgattatgttgggttttatggcgatttgttgtttcttagagctttacctgcgctagaggaattagtcattgttgatgcattctggttcacgacctttacggatgtcaccgtgtcaaatccaagcctcaagaccctaacaatgagttccaatatttattcaggcagtatttcatttgatacacctagtcttgtttactttagtcactttaagtatgttgctaaagactaccccttagttaacatggaaaacttacttgaggctaggatcaaccttggggtaactgagggtcaaatcagacgagcaagagagccaaataacaatgacgaggttgttctccggtttccaaatgtggggaagctcatgaatggcatacgaaatgttcagtgtctagacttgtctgccaatactcttgaggtcagtttttcttttttcttttctcacttttaatttttttattcccctggtctcgaggatataacagaaagaaattaggccttggtctcaattcctggagcacaatggtcatattaaccagactacttcctaggcatcttttgatttgtaactcaatcgatcggttcttagttgatgttttaacttttcatatgtgatttagttgtgttttatcctgttcttaggtgctttctctatgctgtgagtcaatgccagtgttcaaaaacctcaaatcgttagctattaaaagtactgaaggtcgaggatggcaagcaatgccagttcttctaaggaattgtccacatttagagtttctactcattgaggtataaattcaaatcatttgccaaacatatacagagataaagttcatactttgaatctcttattgtttcgttatgctttcagggactcttgcaccatgtcacagataaatgcggggatgcttgtgactgcgttccttgggaggacaaaggtcgttcgctgacatcttgtccagtaaatatgttagagatccatgggtttcgagggacaaagaaagagatgcaaatgataaaacatttcttggactattttcctagtttgaaggagatggacatatatgctgacgaggatggtcctacaaacctcgaagctcctgggatgtttgaacaaattacgcaactttttacactctacgacgagttttatacttgtgatgtccagtttatggtgcgtggttccttatataagaagctgactgcacagtgttgtgtcttcaaggaagaaaacttacctcatagattggttcggactcttggttagaagtttaaatgtataccaagtcgtttcagttttatagatctcttacattttctgccctgttcagaaaagtttgctagatcttgtcgcttatctctcttcctgtttcttctctcaatttgtaaaccctacgatgtcaaaatcttttccttgatcatatggagagaaggatttggctaccgatacacataa

SEQ ID NO: 138750 - DNA, 4299 bp, Arabidopsis thaliana landsberg
taattaatttattttctgtaataatgtgtcggtccaaaccctgttagtttacgcaattaataccataataatcacaccacctacgatgagttaatccgtaacaccacaaattatatctcaaaactgtttctatctaattcaaaaatgaatcaaacatccctactcatagcgtacacaaatgattaactaagaattaccaaatcagtgaaaatcaactatatttaatagaaagcaaaactttttgaaaatgattgccaccgaatcacaaacaaaatcaggtttaagcttcctttggtttcccattgctgttgacaaacttcgctgcctaatgatttcacaaacactttctctttcacttacctttagtgggaaaaaaatacgaatacagagaagtgacagcaaaaacccactttctagtttctccatctcttcttctctttaatatcatcaaaccaaaacctttctcaaaccttccccaaaaaagcttcactctaatggcgtttccaataaatctaacccaaacccttctcttcttcttctgccctcttcttcatctctctttcgctgctttcactccaactgataattatctcatcaattccggttctaacaccaatacatctttcttcacaacccgttcttttctcagcgactcttcagaacctggctcgagttttctctccaccgatcgatccatctcgatttctgacacgaacccatctccagattcacccgttttgtaccacacagctcgtgttttccccgtcggaggatcatacaaattccaagtcactaccaaaggcactcactttatccgtctccatttcgcgccttttaaagcttcgagatttaacttaaggtctgctaaatttcgagttttgattaatgggttctctgtgattaacagtttcagtactagctccgtcgttgttaaagaattcatactcaaaatcgatgaccctgttttagagatttcgtttttgccctttaaagcttctggatttgggtttgttaatgcggttgaagtgttttcagcacctaaggattatataatggatcaaggaacgaagcttgtgattcctaactctgctcaaatctttagtaacttgtcatctcaagttcttgagactgttcatagaatcaacgttggtggttcgaaattgacgccgtttaatgatacgttgtggaggacttgggttgttgatgacaactatcttctcttgagagctgctgctagacgtgcttggactactcattctccgaattatcaaaacggtggtgccacaagaaagattgctccggataatgtttatatgactgctcaggagatggatcgagataatcaggagttgcaggcaaggtttaacattagttgggggtttcaggttgatgagaaacgagttcttcatttggttcgtttgcatttctgcgatatcgttagttcgtcgcttaatcagctctatttcaatgtctttatcaatgagtatcttgcgtttaaggatgttgatctctccacgcttactttccatgtgcttgcgtctccgttgtacattgattttgttgcggagtctgatcgttctggaatgttgaggattagtgttggaccgtctgatcttagtaatccggcgagagttaatgctctattgaatggagttgagatcatgaggattttgagccctgtgagttctgaagtggtatctggaaagaggaatgttgtctggatcgtggttggctcggttttgggaggttttgtgttcttgtcgctgttcttcttgagcgttttgtgcttgtgcaggcgcaagaacaacaagacgaggagttcagagagcacgggatggacacctttgaggaggtttagaggcagttccaatagtagaacaactgaaagaactgttagttctagtggctaccatactctgagaatctcgttcgcggagttacaatccggaaccaataactttgatagaagtttagttatcggagttggcggattcgggatggtttttagagggtctcttaaagacaacaccaaagtagctgtgaagagaggctctcctggttcaagacagggcttaccagagtttctctctgagataaccattctctctaagatccgtcatcgccatctagtttcacttgttgggtattgcgaagaacagtctgagatgattcttgtttatgagtacatggataaaggaccactcaaaagtcacttatacggatccaccaacccgcctttatcttggaaacaacggcttgaggtctgcattggtgcagccagaggacttcattaccttcacaccggttcttcgcaaggaatcatccaccgggatatcaaatccaccaatatcttactagataacaactatgtagccaaagttgcagactttggactctcaagatccggtccttgtattgatgagacacatgtgagcaccggtgtaaaaggaagctttggatatcttgatcctgaatacttcagaagacaacagctcacggataagtccgatgtttattcatttggtgatgttctttttgaagttctttgcgctagacccgctgttgatccgttgcttgttagggagcaagtaaatttagcagaatgggcaatagagtggcaaaggaaagggatgcttgatcagatcgttgatccgaatatcgcagatgaaatcaacccgtgctcgttgaagaaattcgctgaaaccgcagagaaatgctgtgcggattacggtgtagatagaccgacaattggcgatgttctatggaacttagaacatgtgcttcagcttcaagaatccggaccattgaacattcctgaagaagattatggagatgttaccgacccgagaacggctcggcaaggtctgtctaatggctcgaacatagagagagactatggagatggaacttcaggcataatcagtagcacccaagtgttctctcagctaatgaccaacgctgggagataaattaaagtcattgctatatagagcaagtatttatcatagtcatagagtacaatacctaaaccgggaaaccaaagcggtgtaccggtatctcagattcggttcgtgtttggtataattttgtttggtttctgtaacttgtagagctatgattgttcatttgatatggatgaatcataaaccgttaaaaccagtacattatttggttaaatattaaaccggttaagagtggagaaattaaaaaccggaatctcaaaagttcttgataaaccgtaaaccctgtgaagccacaacgctcagaaacatttctgtctctgtggagacagctgaagaagcagcagcactatcaatggcgtctctgagattgttctcaacgaatcatcaatctcttctccttccatcatctctctcacaaaagactctaatatcttcaccaagattcgtcaataaccctagcagacggagtccaatacgatccgttcttcaatttaatcgcaaaccggaactcgccggagaaacgccgcgtatcgtcgttatcacctccggaaaaggcggtgttggaaagacgacaaccaccgcaaatgtcggtctctctctcgctcgttacggtttctcagttgtcgccattgacgccgaccttggtctccgtaacctcgatctcctcctagggttagagaatcgagtcaattacacttgcgtcgaggttataaacggagattgtcgtctcgatcaagctctggtacgtgataagcgttggtcgaatttcgaattgctatgtatatctaaacctagatcgaaacttccgatgggatttggtggtaaagcattggaatggcttgtggatgcgttgaaaactagaccggaaggttcaccggatttcatcatcatcgattgtcctgcaggaatcgatgccggattcataaccgccattactccggcgaatgaagcagttctggtaacaactccggatataacagcgttaagggatgctgatagggttacgggtttgttagaatgcgatggaatcagagatataaagatgattgtgaacagagtgagaactgatatgattaaaggagaggatatgatgtcagtgttagatgtgcaggagatgttgggattgtcattgcttggtgtaattcctgaagattctgaggttattcgaagcacgaatcgagggtttccgcttgttctgaataagcctcctacgcttgcgggattggcgtttgagcaggcggcttggagactcgttgagcaagatagtatgaaggctgttatggtggaggaagaacctaagaaacgtggcttcttctctttctttggcggctaaatg

SEQ ID NO: 138751 - DNA, 940 bp, Arabidopsis thaliana landsberg
cttgaactcattgacatgactacgacccctcatcaatacattcagtgctttttatatttcttgagtcctcttgttttgctttcgggttgtgtaattcaaccgagtactgaattagaatttgacttcaggagccagcagctgaaggtgaaccaacaagtatattggatgaggctactcacactaatccagcagacgaggtttgaaaaattatttcacacatatgcttttccaaaagtggtgcaatctgttacttgaaatgggatgatgatacgaggtttgcctacaatgcagcatgttgtggagagaaaagaggaatctacctcatctgaggattcctcttcccccacagatgaatctcaaaatgatggtagtgctgaaaaggaggaatcagacgaggttaagaaagtggtaatttactttcaatttctggccaagtgcttacaaatctgagtatagttctctgaacttccgtgatgagaataactctttctttttgagacttgtctattgcattttttcaataactctaccccttctgagttatatctcggagattattgaattcctgactttttcctaacgttagagtactctacattctatcgataggaggattttgtaaccgagaagaaggaagagttgtcaaaggaagagttggggcgtcttgttgcctctcgttggacaggagagaaatctgataagccaactgaggcagacgatatccccaaagctgatgatcaggaaaaccatgagcacacgcccatcactgcacatgaagcagatgaagatgatggatttgtttcagatggtgatgaggataccagcgatgatgggaaatacagcgaccatgaacctgaagatgattcctatgaagaggagtatcgccatgattctagttcttcatacaaatctgatgcagatgatgatgtcgatttttcag

SEQ ID NO: 138752 - DNA, 1702 bp, Arabidopsis thaliana landsberg
atgatcaatgaatctgaaatttttttgattgaccaaatcgagataaggtaagagtttgtggttgaatgttaggaaattgttgtgtcaaacaaattagtgtgtgcaatcatgaatgatggttttgtgctctagggttttaacttttaattgacctagaaggatccgatagactatggaaacaaaaatcttactaataatattccgagtgtatcttataagataaccttacatttgtagaagatgttctcatactaatcaatttttttaatatcttttattagcttacacaaaataaatataatcatttattatttaaaatcgtttttaatgtaataaatacaaatataaattttattttaacataaataaaaatatataaaataaaatatttactattaagctattaattacgtatttagcatggtaaatcatatattttgcgtgggttagaagtcatcaataatatactgtagatgtttaaccgatgggctgcactacttgatattatatccaaaaccgatgaaagatttacaaatggaccaaatagtaatcaggcccaatgggctaaatcgtatatagtctgatattatgatctgtcatgccacgtcataggcatgatccataacgaattgataaaactctatggttgtccaagttcgaacaaaaatctgaaacacacttccatggcttcgcttcctgttcaattcacgaggaatcaaatctcttcaccgtttttctctgtaaacctccgccgtgagcctagatctttagtaacagtacactgctccggtaaatgtcatcttttttctctctgctttaattggtttttcaagatctctctgctacttcttcttgggtgtacggttcttcgaaatttctaagtattttcaagaatctttagctttaccttcaatgaattcatctttatagatgggtttatgaatattgttatgtcaaaatcttgcttttaaagtgaagctaaagtagtgtatgtgatcttgatttgcattatgttctcagcaggagaaaacagagaaaatggtgaaggtgtaaagaagagtctctttcctcttaaggagcttggatctatcgcttgcgcagctctctgtgcttgcactcttacaatagcttctcctgttattgctgctaaccaggtctgtcacattatatggccctttctcttttctatgtttgtgtctgaagatggctatgttttagaatttaaagaaatggataaatggattgtttttttcagagacttcctccgttatcaacagaaccagaccggtgtgaaaaagcatttgttggtaacacgataggtcaagcaaatggtgtctatgacaaaccactggatcttaggttctgtgattacacaaatgatcaaactaatctcaaaggcaagactctctctgcagccttgatggttggggctaagtttgatggtgcagatatgactgaagttgttatgtcaaaagcttatgctgtagaagcaagctttaaaggtatatagacttaaatcttgaaatttgaaagcatatggtaaaattatggaccaaaatgttaattaatgttttagtgtgaattcttttctaggggtgaatttcactaatgctgttatcgatcgggtgaatttcgggaaatcgaatctgaaaggtgcggtgtttaggaacacggtattatccgagtcgacatttgaggaggc

SEQ ID NO: 138753 - DNA, 2212 bp, Arabidopsis thaliana landsberg
tcaggtacatcattgagtagtttaatgtccacaaatgagaagccaccagaagtgaagctggagactgctttaagcctgattgattttgatactgattttgaaactcctgctccatctgttgcaattcaagcaccactatcgaccacatctcagcctgctccacagccaacaacttcatctaatgataactgggcatctttcgatgctgcacccagtgcccctagtttaaatgtatcgcaaccaccacccagtggaaacacactggattcacttctctcccagttggcagtgacttcttctgtgccaggtcaggcgtctacaccatctaacggacctgtgaatcttggtcattccacgtcacaaatctttgcaccctttcagaatgagcattcgagtgaacaggtgggcacttcattacattatctatgaaaacaattgcataaaattctgcgtcaaaattgttatatggttatccttctcggatttttgttacagccatggaacacagcacttgcatctaatgtacagaggtcaatgagtgcaccgtcattgcaacctcttcaaggagtcccttctggtggcctgcagtcttctgaagttaaaccttcgggaagatcagaattacctgcggtattcaatttattttagccatttggtctctcccatcactatatcttaccatgtgtgggattgtgatgacatgctaacctgtatgcaggatttattcgctgtaaactacccatcataccatgcaccagtgcctggatggcaagctggtccacctcatgctatgcactatggcatgcagcagtataataaccccgtggtatggtttctctgatagatttctgaatccttaatgaatttgagcatcaattacatcacagccggttactttcttgtgaatgattatctatttcctgcaacagccgtatcagaatgttccgcagccaggcaagtcaatgaacccttttgacttcagccctgggccgccatcacaaacacaaacggtatgtcctctagctcatttgacttagccagaatcaaaactttgtgtgaaagcaagcatgttttggaaattagctttgagcgaaatagctacttggcagctgagaatatgttggctttaggtcttaatgaaatacgtacgaaaacttagcttatgtgttaattggtgaaaccctttcacattacttggtcaacatctgcaattgaacaacttgacttaccaaagtatttataaaatgttcgactggtggattatgtgttaagtgatgtgaaaaccatacaggaaaatatgttcccttccatggctcctctgcaaggtgcattacctccttcaggcatgatgccttctcaaggagtacacaatcaattcaatataccttctcaaggctcagcccatccatctgcaatgccaccaagtaaagcatgccattactttttactttgttattatctgctatagaatgatctgtttactcttatcttatgagtgtttgataaactatttgctcccatttttcagggtacatgccttctcaaataccaggaagcatgccacctaggtatggccttttgattcctttaattcattagtactgattactgattgctataaacgtgatctacctttggtctctcaatgatagttggtagcgaaacctctgcttcttattttacctttccagaaccatttctaaagttatagtcgttttttttttttttttgcagcaatgtaaacccaattggcgacataaacacgtcatatgacactcaacaaacatatcaaaagtttggaagctcgtttgctgctgcagttcctttgaacccaccttctttccaatcaggaggaaacccatttgggtaagaaagagcgagaatattagctcacgagagctatgaaatgcatgaggattgcgtttgtgttctaaggtgtagtataagactataaggaggtattaaatcgaatacaaacatgggttaaataggaacgaggaaaggtacgagccatgaacttgaagaagaattggggtttgtgagagtgttagattattttttataagcatcaaaatgttttgaaatagggtttgatatttattctttggtgtttctatattccatttccattttgttgtttgtccttaagaaaatcttcaggctcctcctgtgttgtatgattttgtataacagtttacacattgaccataaa

SEQ ID NO: 138754 - DNA, 2819 bp, Arabidopsis thaliana landsberg
  unsure (1)..(2819): unsure at all n locations
cgatgggagagatagcaacagagttcacgccggttatggatgatgatgatgaccggtgcgttgtaccggaggtagagctcactgtacccaagaccgacgattcaactttaccggttttaacatttcggatgtgggttcttggtataggcgcgtgcattgtactctcctttatcaaccagtttttctggtacagaacgatgccgttgagtatcaccggaatctccgctcagatcgccgtcgtgccgcttggtcatctcatggcgagagtgcttccgacaaaaagattcttggaaggtacgaggtttcagtttaccttaaacccgggtgccttcaacgtcaaggaacatgttctgataactatctttgcaaattccggcgccggctctgtttacgctactcacatacttagtgctattaagctttactacaaacgttctcttcctttcctccctgcatttctcgtcatgatcaccactcaggtactctcacttcactttatcctctgtttcttgttttgcagtttattgaaccttgaaatcgtttcttgtgtttagattcttggatttggttgggctggtctcttcaggaaacaccttgttgagcctggtgaaatgtggtggccaagcaatcttgttcaagtctctctctttggtgcgttacacgagaaagaaaagaaatcaagaggaggcatgagtagaactcaattcttcttaatcgtcctcgtagctagctttgcttactacatctttcctggttatcttttcaccatgttaacatcaatctcatgggtctgttggctcaatcccaaatcaattctggtaaaccaactcggttcaggtgaacatggtcttggcattggttccattggttttgattgggtcactattagtgcttatcttggaagccctttagctagtcctttgttcgcttccgtcaatgtagccattggtttcgtgctggttatgtatatcgtcacgcctgtttgttactggcttaacatttatgatgccaagaccttccctatcttctctagtcagctcttcatggggaatggctcacgttatgatgttttgagcattattgatagcaaattccatcttgaccgtgtggtttactctaggaccgggtccatcaatatgagcaccttctttgctgttacttatggtctcgggtttgctacattgtctgccaccattgtccatgttttagtcttcaacggaagggatttaactctatcaactcctcagaactacctaaattttactttttaatttttttagctgaactagatatccgagagtagtctttggtgaaagtttctaattaatttccttgcaactctcttttattttccagggatttatggaaacaaacaagaggtgcttttcagaggaacaagaaaatggatttccacacgagaatcatgaagaaaaactatagggaagttcctatgtggtggttttatgtgatccnnnnnnnnnnnnnnnnnntcatcatgttcatatcattctactacaatgcaaccgtgcagctaccttggtggggagtgttgctagcttgtgccattgctgtcttcttcactccgcttatcggtgttatcgccgccaccactaatcaggtatctacttaaaaccaaatatgaaagtaaagaaactgaataaatttctaacaaattatttttgtgaatcttgttttgctaactttataacaaaatcatgaaaacaatgcacaaattactctagaaaaacccttgaaaaaataatatttcattaaaagaagtttaaaagaagttttgattaaaatatcgatattcttttacaaataatatttcattcatctatgtctcattcattgtccttttactatttagagctagagctcttttaccttatttttttgtaagtgacaacttttaatctaacaaggctcctattgctttaggaaccgggtttgagcgtcattacggaatatgtaatcgggtatctctatccagaacgtccggttgctaacatgtgctttaaagtatatggatacatcagcatgactcaggctctaacattcatccaagacttcaaactcggactctacatgaagattcctcctagaagcatgttcatggcacaggttattgcatcttaaaccatcattagttattggtttaaacgcgatataattatatactaacacaacattttcaggtggttgggacgcttgtgtctgtggtagtgtacacaggaactgcttggtggttaatggtagacattcctcatctatgtgacaaatctttgcttcctccagatagcgaatggacatgtcccatggaccgtgtcttctttgatgcttcagttatttggggacttgtaggaccacgtagaatgttcggtaacttaggagaatacgcagccataaactggttcttcctcgtaggtgcaatcgctcctttctttgtctggctagcgaccaaagcattcccagctcataaatggatctcgaagattcattttccggtcattttaggagcaacctcgatgatgccacccgcgatggcggttaacttcacgagttggtgcatcgttgcatttgtgtttggacactttttgtataagtacaagagacagtggtggaaaaagtataactacgttttgtcgggtggtttagacgcgggcactgcgtttatgacaatacttatattcctatcggttggacgcaaaggaattggattgttgtggtggggaaacgctgatgatagcacaaactgtagcctcgcgtcttgtcctaccgctaaaggcgttattatgcatggatgtccagttttatga

SEQ ID NO: 138755 - DNA, 1098 bp, Arabidopsis thaliana landsberg
  unsure (1)..(1098): unsure at all n locations
gaacaaatcacagaagcgtgttcatgctcctaatagagacttaccaccaagaaacgagcaattccttttggattttgagctgcttcagagccaattcaatgtaaagtctcgttttttaactatctttatctttctctttgtgatttcgtaagataaagtttttttttttttttccaactctttgttaggatccagagcaattgaggacgattactgagtcagttttgatatctctggtggtgcaatgtagcaatcatgcgcctcgtgctgagtttctactctttgctttgcgtacattgtgtaggattagttatatcaattgggatacttttttaccatcccttctctcttccgtttccgctgctgaggcgtcgttaagccaaggtgttcaagcagcagcggcaacggctggttcttctgctacttcttcgcagtctgtagttcctgtgtctgtgaatccaacgtcattgctgccttcagctcatggtattggttctccatcagcttcagaggtgaaatctgtggagaatgggcagcagattgcaagagctggccagattgtaagagagaatgctatgagaaatagnnnnnnnnnnnnnnnnnnnnnnnnnnnnagtctgcgtcagctcagttgcaagattatcttgattggcgttgaatctagtctcaaacccgttactcatgccgagattttccagtacatgatgaattggcttgttaactgggacaggagagatctgggaactgaggactctgtaggaaagtcgtggagatctgagaagactttagctgaatggttgcggagttgtttggatgtgatctgactgttggtagaagagggtgaatctcgaattccgttttatgagttattgcgcagtggtctacagtttatagagcacatacctgatgatgaagccttgttcactcttatcatggagatacaccgcaggcgagatgcgatggccatgcatatgctcatgttggaccaacatcttcactgtccatcatttggtacccatcgtatagtctcccaaataactgccaatgttccaccaaaagctgtaccacacttacgacattcaccaattacatatccaa

SEQ ID NO: 138756 - DNA, 1157 bp, Arabidopsis thaliana landsberg
cttgccgtaatcaacaaattagcaatcacatacttcaactacccaggtctcctcacagctcttcaatacctaacctgcaccgtcgccgtctatcttctcggcaaatcagggttaatcaatcacgatccattcacatgggacactgctaagaaatttctccctgcagctatcgtcttctacctcgctatcttcacaaacacaaacctcctccgtcacgctaatgtcgatactttcatcgtcttccgatctctaacaccgctcttagtcgcgatcgctgatactgtgtttcgtagtcagcctttaccttcgagacttacgtttttgtctctcgtcgttatcctcgctggagctgttgggtatgttgcaactgactcgtcttttactctaacggcttattcatgggctttggcttatcttgttaccattactactgaaatggtttacattaagcatatggtctctaatattaaattgaacatttggggattggttctctacaataatctactgtctctgatgatagcaccggtgttctggtttcttactggagaattcaccgaggttttcgcggcgttgagtgagaatagagggaatttgtttgagccttatgcgttttcttctgtggctgcgtcgtgtgtgtttggtttccttatcagttactttggatttgctgctaggaatgctatctctgctactgcttttacagtcactggtgttgttaacaagttcttgactgttgtcatcaatgttttgatttgggataagcatgccactcctgttggtttggtttgtcttctttttactatctgtggaggtgttggttatcagcagagtgtcaaattggataaacccattgagaaggtcagcgagaaagatagcgagaagggagaggaagatgaggagttgacgcagttggttccggggaaactagcttctgttgtatgagagaagtgtcattgttttgcagcctgccttttcaggtgtgtaaccttttgaatatcttagccttttttacattttaacgaggtttctagtaaaagtgaatacctttttctggtttctggcctctatagtattaaattttgtaaaaccctgtttcacattatcctcatatccatttatacaaaatcaatttctgttctctgtgttacaagatt

SEQ ID NO: 138757 - DNA, 524 bp, Arabidopsis thaliana landsberg; identical to SEQ ID NO: 80284

SEQ ID NO: 138758 - DNA, 444 bp, Arabidopsis thaliana landsberg
catttaatccgccagagaagaagaagaagaagaaaatagattagggtttttcattccagaatagccctaatccaaattcgaaatctttcttctgattttgatctttccgatcatgtcatcggtctgtgttaacgaagcattaaccgatgacgagctgagatgggtattgtcgagactagacagtgataaagataaggaagtgtttggtttggtctgcaagaggtggctaaatctgcagagtaccgaccggaagaagctagcggcacgtgctggtccacatatgctccgccgtctcgcttctaggttcactcaaatcgtcgaattggatttgtctcagtcaatttctaggtccttttatccaggagttactgattctgacctcgctgttatctctgagggattcaagtttctcagagttcttaatcttcacaactgtaaaggtat

SEQ ID NO: 138759 - DNA, 2520 bp, Arabidopsis thaliana landsberg
ttactttccggaggtttgactcgttgttgactttcaacaatttctggtaacttgaacggcgttttgcagtaagagcggcggcgatttttgcaagaagaagaagagaggagaaatggcgaacaaggtttctaacttctcggatctgattcaacgagttacggcgtcttgtttgttgcatccactctccgccggccggcaagatctcgctgtgaatctgccgggaagagtacgatactgaagaagaggagaatgaggaggaaggtgagattcagtacgaagacgcattggagaaggagaatggttaagattagacaattagggctaagaacggaaggaacggtgtgagtgttgagacggtgcaggagatggagatggtgatggacgaagttttcacggcggctgctgctatgaagagagcttacgttgcgcttcaggaagctcattcgccgtgggatccggagaagatgcacgatgctgatatggcgatggtggctgagctgagaaggattggttcattgagggaaagattcaggaggatgagaggtaccggaagtggtggtcgaaggaaaaacgacgccggaagaggaatgctgagagaggccgtggcgccttatgaggcggttgtgaaggagctgaagaaagaagtgaaagtgaaagatactgagattgagaatctgaaggagaaagtcaaagtggcttctatggccaacggtaacggaggcaagaaacaccgattgctttcaagccggaaagttaactgtaccacacagattgctgtgtctccggtgccggagttatttgagatgacaatgattcaggtgaaagaagcatcaaagtctttcacagggattctattgtcactaatgcgagctgcacattgggacattgcagcggctgttcgatccattgaagccgcttcagcttcatccgacggaatgtctgcttcttcgtttgcatcctcggttcagtcatctgtcccgaaccagcacgcgaagtttgctcttgagtcttacatctgtaggaaaatcttccaaggatttgatcacgaaacgttttacatggatggaagcttatcttctcttatcaacccggatcagtaccgtcgtgactgctttgcgcaattcaaagatatgaaagcaatggatcctatggagttgctagggatcttaccaacttgccattttggtaaattctgctcgaagaagtacctttcgatcattcaccaaaaaatggaagagtcgttgttcggggactcggaacagcgggagttggttgtagccggtaaccacccaagaagtcagttctatggagagttcttggggctagctaaagcagtctggctgcttcatctcctggcattctcgctcgacccatccccgagtcactttgaagcaaacagaggagccgagttttactctcagtacatggagagtgtcgtgaggctttcggatggccgtgttcctgcgggtcaagttgttggatttcctgtttgtccaggattcaagcttagccatcaagggaaaggatcaatcatcaaatccagagtttacttggttccaagggcttaaaaaggtttctttgagttcactgtttcttaggaatatattatgtcctcgtgtgttgtttaagactttaagacaatctagcttcggaaaaatcttgaaataaagagaccgttcgtataaactgttcttgcaaagaattttttttggataaaatgtttctatactaatctaaataacaaagctcacataacatagaaagtatatatgttttaattctaacaattcaaagttttatagaagggattatgtaataaggtatggttttcgactagggatctgagaatcaatcgtacaagacttctcttagaaacacttttttcacctgtcacagagtgaagatgaaacagagagaaaaatgttaaaaaaagaagagcaatccaaaattaatcatcatcgaaaagtaaatgagaatgagagaagaatctaatttacttgttctaatgtgaggaacataatggcattccaggttcctagccgtgtaaaattcgggagaaatcctttgtagaatgccataatcccctttaaatagaccaaaaacagaacattcatgattgcatcaaaagagagagattggttaaatgtgaactagaaaagaatactaacctcggtcttcatcgttttgatgaagcaatcgactgtgtttcggtaagtagagtctcccatcattctagatttcacctggaacaacatataaagaagaaccatggccgtttagggcaaataccaaagtatcaaccattttgtttccttcggtaacaggttaatactaatttctccttccgtagagcattactatctaataatgctgcatttaccaaagtcaaatcaccaagcaagaggtcagaaacataaaatgtggaagacacaaacatgtgagacgctacaccgatgtcactttcaaagtagagctatgtccattctaataccttgtcctttaaagagatattctgtgata

SEQ ID NO: 138760 - DNA, 3548 bp, Arabidopsis thaliana landsberg
tctgaatcgagaaggaatctgactcgtgtagatgagaatcggcggcgtcgaggttacgaaatttgcgtcggagatgatgtcgtcgtcgtcttcgtcggcggtggagatgttgaatctcaaagaagcttcgaattggtggtcagacgtaaacgaatctccgatttggcaggatcgtatcttccatgttctcgctgttctctacggaatcgtttccgtcgttgctgtggtacgtttcgtttctggatttgattgatgattcttcgatgaaattggtgtaacatcttatgtttgattttggtttagattcaacttgtgagaatacaattgagagttcctgaatatggttggacgacgcaaaaggtctttcactttctcaatttcgttgttaatggaggttagtgttgctgcggattttgatttcgtgtgttcatgttgattgattgattgatttggctcatcttgtatctggtagttcgtgctgtggtgtttgtcttcaggcgaaatgttcagtttatgcaaccagaggtttaggatcattcaccatcattgtaattttaatcttattgacttgtttattgtgtcaaccttctaaatttgcagtgttatctttgtagattctgcaacatatcttgcttgatattccaagtcttgctttcttcaccacctatgctcttctggttcttttctgggctgaaatttattatcaggtagtttctaatgagtatctatgggtttcttcttttgtcaatgcttctttggttttgatattttacttaacactcttttgattggacaggcgcgtgcagtatcgactgatggactcaggccaagcttcttcacaattaatgcagttgtatatgtagttcaggtattcttgcaatctttaagaaatttaagtttggtttttgtggggtcatggcatatcttattggatgtattacttccagattgctctatggttggttttgtggtggaagcctgttcgagttatggtaatcctatctaagatgttctttgcaggtaattagcttcgatcctatcgagacactctttctatataatccatagtgcctgtctcacctctcttgcgaattttatatttgcaggtgtttcattgttcgctgcccttggatttttactttatggtggaaggtaaatctgttgccactctaatatgttgacatttgacattaccatagtttctatcactaccactaaaactgtgttgtcatttttgaggaattagatacacaaaattgtgctcatatttcttgcagtcacagtcacttgcattttttcctgctttgattcctagctagactagattctcttggtgctaaagctgagtaccattaaaaatgattatattcttgcatttgtgcttaattatgtctccttttatattgatcttatggcaggcttttcctaatgttgcaacggtttccagtagaatctaaagggcggcgcaaaaagctgcaagaggtaaaccatcgattgtacaaatcataagtatagtcaactatttattgcttctcgattgtttactttcactcttatgtatggtaggttggttacgtgacaaccatatgctttacgtgtttcctcatcagatgtatcatggtaaagacacacatgaacaaatctttatgttgatatctatcaatccttaccttcttggttggattatcttctctacaacaggctatagtcagttttggaattaaatctaaccaaagcttttgtcatttaatatttgtttagatgtgctttgctgctttcgatgagggggcaaaccttgatgtgttagatcaccccatccttaacttcatatattacctggtaacctctctcttagcttaatcatagaatctgatcatgaacattagcttaatatatgtaacctgatttcgttacttgattacagttggtagagatattaccctcctctctggtcctcttcatcttgagaatcctcccaccaaaacgaggcattagaccagaaggttgtacacatagattaatgatcagaccatttttaatcccaaaactctctgcagaatctcaagctttctatttcatttctatgtttgcttcaataatagaagcttgatggcccttctccatttacgtgcttttgaataataaatctgtatgacacaatatcttcaagtgagtaatgtgcgtttaatggggatggaattcagattaaagttttaaaattatgttttcttggttctgaaaccagatatgatactaattaactgctggagtagtaacatgatacaattaatcgtaagacaataaatatgcggtcgattcataagaaccacgtctgatgctctaaagatttgtgagactcgtttttatgtaaagcataaatgatatttgttttgttttcataattgtatataaaaatgcaaagaaataaacgatttaaactacgaattaaaaacactgggtcatacagtaattcagagatcaataaagaatgaaacaacaaaacagaaattcaacaattaaacaccatgactggataggggcatgcacactgatggactaaagccaatcttcttcacaattaatgcaattgtctatgtagttcaggtatattgttatatcgtataattttgtttgtaaaatctttaagaagtttgtgaaaattcaaaatgtaattttgtatgtataactgaactttcagatatctctttggttgcttcggatgtggaaacctgttcgatcgagttatgctaatcctatctaggatgttcttagcatgtaatttggttccatcgaatttcaccaaaagtatatatttgtcttggtatatcatatatggtactttagttgtctcaagtctcttgtgaatataacataattctaggtgtttcattgtttgtcgtccttggatttttacgttatggtagaaggtaatatgtcactacttgaatatgtactacatttgatattagaatgtaaatatgctcatcttgcttgcattcttgttcaccccgctaatgcatggctagactagattctctcttggtgctaaagccgagtacatctacgtaccatttaaaatgatcatggcatgcattggtttatcaaaaaagagcttgatttcttatccttgtattatgtctatcttttggcagcctaatgttggatcggtttctagtagaatttaaagggcatagcaaaaaagatgaaagaggtgaaacatcaaattgtacaaaatcataaccaatcaatatttacaatatgacgcttcttgactcttcacactctttctctcttatgtatggttggttatgtgacaacaatttgctttacatgtttcctcatccgttgtatcttggtagagacacacacacatacacatgtttatcttgatatctattaatccttaccttcttggtttaaattttagactggacaactaaccaaaggtttattcatttaatatggtttagatatgcttcgctgctttctacgaggaagaaacccatgatatgatggatcatccaatccttaatctcatatattacctg

SEQ ID NO: 138761 - DNA, 1729 bp, Arabidopsis thaliana landsberg
gcaaagtacttggtggatgaagtaaaacaaaagagtcaaaagaatattgacgttagttcatggggaatggaatacgttgaagaacgtcctcagcaacagaacgggtacgtaattctcattttgctatgttattgatctcacttgacactagtctgttcgaataattcgcaggtacgactgtgggatgtttatgcttaaatacattgatttttacagtagaggattgagtctacaatttagccaggtaataagagatgtcatcaaggtctgtgtttgcttatgaatctgtaccaatactgttgcattttgaaatcgagaaatatcaaattcctatccggttcaaactagaagaaacattacttaagcacatgagacattattggtcatggaattaaagtaggtgttggtgaaacatgtattaagagggatactataaaatatgttcatttcgtctttaattctatcgtttgcagaaagacatgccgtacttcaggttaagaacagctaaggagatactgagactgcgagctgactaatagtgcccccatcttggtgacataaccttgctattttacaaagccgattcatattagtttagcagccttatttgcttgggctgtggagaatgctagatatcttcgttgctttcttgaaatatttgtttgattttttcttatctagaagaagttgttgataagcttttagaattctgttttattgtttagtgaaggaataatcttcaattttgtaccctggcctgaggaataattttaagtttggtggaaaattgcagattgttatgcaactcttagtctataccataagataacctcatgaatgaatgtggtaatagtggttgcagagcgtgtaattacaactgctttgtgttctgttgtttagtggaaatatgaatctccattttggcttgagtaattgcatattttgtgatgtatccatctctctaagtctctagactaacctgaggtgacaaacgcagcgatagagtcgctggataaaatgcgtaaaggaagtaagaaagcagcactgcagatggttgacatggaatgcagttacctcactgttgatttacaactcttatgcattgtgtttggtggataatgcatatcaaaagtgcagagagtactgatcagtttacaactcttaaccggaaactgagattctcggttcggtttaaccggtttctaccgaattcacaggactaaaaatattttaagttaggtaagggaaaccaaaagtccacatgtatctaatccacgtcagcatgaaattctaaacgacgttcagcgtaattcatcttctcttgtataacacgtccgattctaattagggtttatcgtttgcatcgctcttgccactacctccggagtctgtttcatttgtttaaggtgagtgaccacattgattttagaatgattatatatgtatggtttgaattcttgcttacctcttgttagctaaggttttatcttaaccattaatttagtaatataggattcttgttttcaaacagtgaatggaggaattaagccaaatcttgaagaacaataggaccgatgatctcacttggttttgctctctctcagaatctgaactggtaaatattgtttaatcattctctttctttctgcagtcaaaaactaacattgatcaatcattttttcaggatttgctcatcagcttaaaaaagctagtcattcgacgtgccaaa

SEQ ID NO: 138762 - DNA, 323 bp, Arabidopsis thaliana landsberg
ggccacgtttgttagagttcggggaaacgttggagatagaaggagacaatgccaacgaaacagaaccaccatcttgtccatattttctaggccgtcctctcttccgcttcacagacgtgtcacctgaaggaggagcaaccaaagctcccgccgccgccgctgacgaatcagccggagaagagtcaacgggtaaaggaggagacacgaatccagtagagacacctccagggtttggatttgggtttgggtttgacccaaaaggagagatggaattggtgaaatgatgaaatccttgtgatccgtgaaacgttggttgagtttga

SEQ ID NO: 138763 - DNA, 529 bp, Arabidopsis thaliana landsberg
atggagagtagtagtaggagagtgggaataaaacagaaaaagaatattcggcgtgaaaacagcagcggtcacgtaccggacctcaacaccactctccattctactttattaagcgggaaacagatacttccttatccatcgatgaaacgtcgaccacactggatacgtgtcgttctcaaagaggtctgtcactaaactatcacgtcgacccagtgtaaatttatcatccacgctctcgtggattacgtggaggaagaaatatcatttcttgtttgaaataaaaaaagaataaaaaaaattaggacagaacagaagagacacgcaaacatatccattagggtcacaacggttcttacagcttctattaccagaaaggaaagaaagccgaaatttgtttcaagataaagtaatttaagttggagcttgtttcttggtcgtacagtgtcaggtgaatagagaagaagaagatggaaaacacagacgagcttgtctccattgagctaccagctccagcttcatggaagaaact

SEQ ID NO: 138764 - DNA, 331 bp, Arabidopsis thaliana landsberg
attttccattcacacggcactgaatgatgatgacttggaggagagcttctcaagtttgtagctgtcgattgttaaatattttcttgtttcttcttgtccagatttcacatataactcaaggaaacaatgttccctctccaataccagttggtgcaaggcatgtgatttgatttttttttcaatttcatttaacttatcgaaatttttttaaaaagtatctaaccaaatgcaatagaaaacaaaatatgtgacgacaaatataaaaagtgtttttattaaagataacattaaagaaaacaaaaaggtatttaaagctaactaaaacacgtca

SEQ ID NO: 138765 - DNA, 4311 bp, Arabidopsis thaliana landsberg
gtgttgtagtaaagagagagaattgtggacacatgagctgtaggaatgacttcttatcaagcaactgtttgctaattgaaaaacaagtctaaactgtgtttatgatcctcttggggatgtctaggattttgaaccgaattcaagtttgaggcttgataatatttttatgcgtaaacatgaaacagagacatggagaatgcatatatcatgaagcatcaagtatacaatagaggcaatcatggatcaaacggtgtttatggtatcagtaagacagcggagaatgcaaccgggaccaactctctctctgagtttccccgagccatcaaggctacaaacatctcgactacaagggccaatcaaattacataatcacggaaaaaacaaggatagatacaagcaaacctaacactcgagcaataatttgagtaatagaaacaagaaaccagaaatcgaaacgaaacggaacgaaacacaaaatttcctaattaatcttgtgtttaattaagaaaagaaaacacaaaaaagttgaaaggtttagtggtgcatccacgtagcaagacattttaggtgtacgtcgaccatattgttggccgtttatagagcatcatccactctcctcgacgagcaagatcatgccgcctctggattcttctcattcatcggtgttcctgcgatcccctccgtagcaccctccgcctcctcagcgccttccccgtgtaaattaccgttctgcatgtttagaaatttgacgtggaaattgttgcaatgtaactttctgtgatacttggctattgttgcaatgtaattttcattgaagtcagtcaccaatgaccattgaacagatgttttaaaatgtccacgtaagcaattattgtttggaacgatttcgggttagcattcgtgccgttagttaccgcaataaaaggccgtggcaatatcacacttgtcttggaacgctatgtccgtaaaaaccaagcccaaagttaaaataaaaccacgcgtctcataatttcggcccaaatctttttcaactttcccgcctttgtcagaacttttaactttttggatttttggtgatggttttggggggaaagaaaacagaaaatataaaaataaaatttccgcactcccgactcctccctcttggtgtggtaggcaattctgaatcgcgaggtttagttctccggctgaatcagagaacgacgagtcggaaaacttggaaaccctagaactgaataaatgtcgacgtggcaattattttccgattccagcggcgatggtttccggtgggaagtcgctggccggattcttcagtccgtctcggattctacgccaaccaaggcgctcgaatcgacagctcctctaccttccatggccgatctcttgctccaaggtgattcttcgtttcttcctttttttgtcgaatcgtgtttgtcatgtgactcaaaggagattgaattattatttgatgcttcaaggatgctcgaagcttatagcacgggaagaagcgatgcctggggaaatcccaatgttcaggactgggctagggaagtctgtagttcttaaagagtcttcgattgctaaagccaaatccattttagcagagaaggttacttattcaggtattttatgtgacagtattgaattcccttgactagtcatttgtttctgaattcccttgaattgttacttaatgttggtgaaaatggtttcctgaaaatcttttgaatgttccatgttcttggctacactttagatttgcggaacacaaattgctcaattccccaaatgagacaagtggatacagctgaaactttgccaatgttcaggacggcctcggggaaatctgtccctttgaaagagtcttcaattgccaaagctatgtctattctaggaagtgataagattattgactcaggtgtgttcttatctcctcttttttaaagtcttatttccagtatagctgtgtgcgcgtttacatatgaacttgttctttgtgctgctactccgttcaacttccaggttcttgagtttggttgttatcagatgaaatgatgaatagtgaagaactaatcaacacacatcttacttcgtttagaggatgaatattagaagtgacattttttcatagtttatttgttaataagattctttttgattgtgtagacaacgttcttcccagggagagtgggtttggtgttcccaacagtctttttcagacagcttccaacaaaaaggttaatgtatcttctgccggtttagcaagagccaaggcattgttaggactagaagaagatgatttgaatggatttaaccatgtgaaccagtcgtcttcttcctcccagcaacatgggtggtccggattaaaaactcatgaggagtttgatgctacagtagttaagcatcattcaggaactccaggacaatatgaggattatgtatctgggaagagatctgaagtcttaaatccatctttaaaggtgcctccaacaaagtttcagactgctggtggaaaatcattgtcagtgtcagctgaggcgttaaaacgtgccagaaaccttcttggtgaccctgaattagggtctttctttgatgatgtagctggaggtgatcaattttttacaccagagaaagatgaaaggttaagtgatattgctataaacaatggaagtgccaacagaggttatattgctcatgaagaaaagacaagcaacaaacatacgccaaatagttttgtatctcctctttggtcatcttcaaagcaatttagttcagtcaacttggagaacctagcttcagggggtaatttgatcaagaaatttgatgcggctgttgatgagaccgattgtgctctgaatgctacacatggactatcaaataacaggtctttggcatcagatatggcagtgaataattccaaggtaaacggtttcattccaagaggtaggcaacctggaaggcctgctgatcagccacttgttgatataacaaatcgcagagatacagcttatgcatacaataaacaagacagtacccaaaagaaaaggctgggaaagacagtctccgtttctcctttcaaaaggccaaggatttcatcctttaaaactccttcaaagaaacatgctctgcaagcttcaagtggtaatatatatgattaatttttttaagaattttttatgttaatctaattggttggttctcaggtttatagttttggtgtcctgtctattatcaggtttgtctgttgtatcgtgtgatacacttacttccaaaaaggtgctttctacaaggtatccagaaaagtctccaagagtatatatcaaggacttttttggaatgcattcaacagctacgaccagggtaaattctttttgtccctttcacctgttcatgcgttacatagcttttttcttcattctactcaaacacacttacgaggtggtttttagatggattatgtgccagaccatgtcagaagaatcaaatcaagtaatgcagataaatatgtattctgtcatgagtcttcttcaaacaaggttggagctgaatcttttcttcaaatgttggctgagtctggtgcttccttacaacatgcatccagaaagtactttctctgtcccttgaaatgttaaccgtgttatatgtttattatatcagaaaaagtgtgtgactgttcgtttgaagcttgcatgtgattgtcactctattagatagacagtgagtattgatgtctatatctattaacttatctatcactacatatgcactaggtgggtcactaatcactataggtggatagtctggaaacttgcatgctacgacatatactacccagccaaatgcagaggaaactttctgacaatcaccaatgttcttgaggaactaaaatacaggtttcccagtctcacaacacaactcgttacttaaactcatgcaaagtctaacatggttaatctttcttaatagatatgagagagaggtcaatcatggtcattgctctgcaatcaagaggattctgagtggtgatgctccagcttcttcaatgatggtgctctgcatatcagctattaatccaaagaccgataatgattctcaggaagcacattgttctgatagttgcagcaatgtgaaagtagaactcactgatgggtggtatgaaattgctactgctattctgttacctgttttcttgactcatttccatatgatttttttaaaaaaaatcacaggtactcgatgaatgctgctctggatgtcgtactaacaaagcagctgaatgctggcaaattgtttgtcgggcagaagcttcga

SEQ ID NO: 138766 - DNA, 777 bp, Arabidopsis thaliana landsberg
atcacgattctccaaaatcgcttcaaaaaatcactctaaatcccatcttctctaccaccggagatacaccgccgttacatggccgcgacatcaaactcaggcgaagatccgactctctcttaccatcaccgatctccttttcgcttcgaattacttcaatctatctcttcctctgatcctcgttactcttctctaactccttcttcaacgaatcgacctttctcagtctctcaatcgcttccgaattcacaactgtctcctctaatttcacctcactgggacgattcttactctcaaatcactcagaaagttgtgagtctcttcgtttactcaagtcctcgtagattccttctttgattttgattccatttccgaacttgattttgcgatagctaggtttaattctgattcccaaatttcgcgaaaacaaaaattgaatgaagtttggtttcattaagggaaacttaatccaaaattggatctctagctttcaattctctaatctcaatttgcgaatttagattcgttttggtgattgtaatgctattaagttgatcttttcttaatttgcagcagaagagtagaaagaatcatcgaattcagcttggatctattgccaacatgtctggaggagaaagcatagatatagctaaagtaatagtgaaacaagagtcgtctcctcaaaatgttaaacgtgtatacaacaagtcaaagggtggtactaaactgttaaaggctgggaaacgaatggcgaatggcggtatctgctttttctga

SEQ ID NO: 138767 - DNA, 1160 bp, Arabidopsis thaliana landsberg; identical to SEQ ID NO: 70328

SEQ ID NO: 138768 - DNA, 3229 bp, Arabidopsis thaliana landsberg
  unsure (1)..(3229): unsure at all n locations
atgctaaaactatttgattgtaaggttcctgaagggcttgagaagaataagatgagtgtgtacatcacaaattcaagtcctctaagcacatacaaggcttacttaaatcaattccaaagagattttgcgacattccttaaactgcgttctgaagagatggtttctaatggacgcatggttctcactttcattggtcgaaacactattgataatccattgcatagagattgttgtcacttttggacattattatccaaatctcttcgtgacctagtcgccgaggtatgtatataaatcaaaacatttttttgtcaacataatcaatatatgttaaggagtttcaactgtgaaatgctctatgttagtgttggttttcttcatatttccgatgtgaaatcctaacaatttggtcatcatattttattgtatagggccttgtgagtgcatcaaaggtagattcattctacctaccgttttatgaccccaacgaaaaagaaataaaggagatggtacagaaagaaggttcctttgaaatcagagacttggagacacatggatatgatcttggccattgtaaccaagacgagtcaaagagaagtaaatcagggcaaaatgaagctaattacatcagagcggtgagtgaaccactgcttgtggctcactttggagatgccattatcagcatattgtttaacaagtttgcatgtcatgtgtctcaacatgttagttgcaggaacaaaacgaccgtcagcatagtcgtttcactgactaagaaaaaaactttcctcatgtcctaaagtttaatcttggcgattagtgtggagtaattcttttttcaagtttatgttacatattaaaatttggaaaagaacatagagattgatgcaattatattacaagtggtctagtgatttgtattagggttgtggtactggctattggaatttctcaagtggtactagctatcggaatttgtattagaatttttttcatgtttttttaatttattcacacagtatttgaaatcactttccaataaatcatccgttatttataaattgttatacttcagtcacgctttaaaattctcttacgatgatgaattgttgaaaatttgaattgaattgtgacatcgattttaaaatctactattattttaacttacttgttacaccattatttttttcaaaaatcatgagctttatagtgacgacttctcttagatgaaatcaaatatacacttgtaaaatgaaatcaagttttcatgctaatactcaccacatcatttctacaaagaagtttaaggacaaaaaacattgatttttaaaaaatgtttgaaaaacgtttactgtatgatttcatttagttggatgaaatcaattggtacatgtacgtagaaattagcaattcccttttttctttcagataatagatttatatgtgaatgatgaggcatggaccatatgagacaaaaagaagatataaagaacgaaagacaacatacatttgttttccttttcctttgccatcagtcgtgacctaaaccacatattattttggtcccaaataagacttcaaattcataaatgatgaagtttccagatgtatacaatgaaggcttcgaagtgcatgcagcctccttcaacataaatcagtttaatttattttcttgaaatataacaatggttcaagaaataaaagtcaccaatccttactcaaggttttttgttctctccaattcatcaacaaagcatatagaatattatacgaatgtgtattacatagatgtatgtctctgtgtttaatattatgcaggtgtgattgtaaaagtgagtataaagtggatgaagagagaagtagtaaatatccttttgtgggtgctctatgtatgaatggtggagatgtagacaacagttacaccaccaattctcttcttcaggttctttcttcttctctacatatagtatatgtttctataagacatgcatacacaaattaaagtatcatttcttaacatgtgttttatctatgttttcagaaaagagttttatcaataaccaatccgatcttagttaaaaacacagaggaaatgttgacaaacttggactttcctaaatgcattaaggtagccgatttaggttgttcttcaggacaaaacacgtttttggccatgntctgagatcgtcaacaccatcaatgtatttgtgtcaaaaatggaaccaaagccggccggagatagatttgttgtttgaaatgatctcccttactaacgatttcaacacaacgtttcaagttcataactttcttcaacaagaaactcacagcaacggnatcgtgcttcgtctttggagtccctggttccttatactcgaggctcttccctcgcaagagtctccatttcatatattcaatttacaggattcatttcctctctaaggtctacatatactttctttcatttttcacttatttgaatttccttacaagcaaaaagcctataattaatgatgttattatgaacttgtaaggttcccgatggattggagaagaacaagatgagtgtgtacataacaagttcaagtcctctaagtgaatacaaggcttacttgaatcaattcaaaagagattttacaacatttctaagaatgcgttctgaagagatggtacataatggacgtatggttctcacactaatcggcagaaacactctagataatccattgtatagggattgttgtcattgttggacattgttatccaattctctccgtgacttagtcttcgaggtatcaaattattacatatatatagaactttgaatatgttaaccgatggtttcaaatattttgtcttttgttatctacttacatagggtcttttgagtgcgtcaaaggtatattcgttcaaaatgccattttatgatccgaatgaggaagaagtgaaggagattataagaaatgagggatccttccaaataaatgacttggagatgcatgaatttgatctcggccatagtaaggaggaatgtagcttacaatcacacaaagctaaagcagggcaaaaagaagctagttgtatacgagcggtgactgaaacaatgctcgtagctcactttggagatgacattatcgatgcattgtttcacaagtatgcacatcatgtgtctcagcatgctagctgcagggtaaaaacgagtgtaactctaatagtttcactggttcggaaataa

SEQ ID NO: 138769 - DNA, 356 bp, Arabidopsis thaliana landsberg
gaaaaatcggttacacagatcgttatctcttaagatttgcaatggtttatttacttttctacagaaatggagttgatactgaggaagaaatatatcgtgttacctactttggaaagggaagaatgccggtgagatctccttgaagaaattccttgtataaaactgagaattgtcttccacttagctagatgatctgaagtatgtctgatgatttacttcagggatttggtgagaaatgcacaccgagaggacaatgtacctttggaccgcggttgcaggacgaagaaatcaagcttctcgctgaatttgtaaagtttcaagctgaccaaggctggccaactgtatctaccgactag

SEQ ID NO: 138770 - DNA, 1166 bp, Arabidopsis thaliana landsberg
gcaggttgtggtatttgtggatatctcttttgagaaagcgacagagattgatgattattgtcacagtcatcagcctcctattgcattcatcaaggctgatgttagggggctgtttgggtctttgttttgtgattttggacctcattttactgttcttgatgttgatggggaggaacctcactctggcatcatcgtttctgttagcaatgaaaatcctggatttgtttcgtgtgtcgatgatgagaggctcgagtttgaagatggaaatttggttgttttctctgaagttgagggaatgacaaagctaaatgatggaaaaccaaggaagataaaaaatgtcaagccattttcatttaccctggaggaagacacctctagctatgggcaatatatgaagggtggcattgtgactcaggttaaacaaccaaaggtgttgaactttaaacctcttagagaagcacttaaagatccaggcgactttcttctaagtgacttttcaaagtttgaccgaccacctcttctccacttagcattccaagcacttgataggttttcgtctcaagcaggccgatttccgtttgctggttcagaagaagatgctcagaaactagtggaaattgcagttgacattaatgagggtttgggtgatgcaaggttggaagatgtcaactctaaactgttgcggcatttggcctttggatccagggctgttctgaatcctatggctgcaatgtttggtggcattgttgggcaggaggttgtcaaggcatgctctgggaaattccatcctatctttcaggtaaagacttttctgtttggtttttcaggggctcatctgttcggtctttgtatgttaaacttctacttgttgagcaatgctgttcatctatgttatacaggcatttactctacatgagtcctataccaggactaaagtttctcttcccttgttagtagtatttcttttatacttggtaatgtggtaattagtttgcattatttgtgcagttcttttactttgattcggtggagtcactccccaaggaacctcttgatgcatcagagtttagaccacaaaatagccgttacgatgcacagatctctgtatttgggtctactcttcagaagaaactcgaggatgccagagtttttgttgtagagggctg

SEQ ID NO: 138771 - DNA, 1983 bp, Arabidopsis thaliana landsberg
ggcaataaagagatcaaactgtttccacaagagtggagggaaagatccatgtcacatgaacagtaatccttacatgatagcttttggattagtccagattctattctctcagattccagattttgatcaactttggtggctctcaatcctcgccgccgttatgtccttcacttattcctcagccggtctcgccctcggcatagcccaagttgtcggttcgtttcttgaaccataaagcttctagggtcttaaataagaactttcataggtaaaaaactaataggttttatgtgttttggtttcatcagttaatgggaaggtgaagggaagtctcactgggattagcataggagcagtaacagagacacagaagatatggaggacctttcaagctcttggagacattgcttttgcttactcttactccattatcctcatcgagattcaggtacttataccttctttacaagtcttgatgatcaaagccattaattactggtcccatcatgaagctttttttattctgggatctgaaacaggacacagtgaagtcaccaccatcagaagagaagacgatgaagaaggcaacacttgtgagcgtcagtgtaacgactatgttctatatgttgtgtggatgtatgggatatgcagcctttggagacttgtctccgggaaatctcttaaccggtttcgggttttataatccttattggcttcttgacattgcaaatgcagccattgtgattcaccttattggtgcataccaagtctattgccaacctctgtttgctttcatcgagaagcaagcttccattcaattccctgatagtgagttcattgcaaaagatatcaaaattccaattcctggtttcaagcctctccgcttgaatgtcttcaggtacaaatcttgcctttaaactaatgggatctgagttttaaacatgatgtgtatgtaataatcaaagcttctgtgtggcgtggaatggcttactcaggttgatatggaggacagtgtttgtgatcataacgacagttatctcaatgcttcttccgtttttcaacgacgttgtgggtctgctcggggcactagggttttggccattgacggtgtattttccagtggaaatgtacatcgcgcagaagaagatacctagatggagcaccagatgggtttgccttcaagtcttcagcttagggtgtctagtagttagcattgctgcagctgcagggtccatagctggagtacttcttgatctaaagtcctacaagccatttcgaagcgaatactgatcaacttgaatagtagccaattcaaagcgatgactaagtcagttttaaacacaatggatatatcaagaacagtcaagagaaccaagaaccatgaatttgggaattttgatcagcttttttttatatagatagaagcaataatgctgttagttcttctctataatcttctctgtaccctgaaggcaagaattgtagtcctaatgagtaaatcttcgattaatgacagagtcatgtgctacaacagaatcatgaactagcaccataatagtatattaccattgtggtaaaatttcaataacaagttcttgtacttgctcttctttccatgatctgatatttgccgtatgaaccattcactaaggcacacaagtatggattatttaagcgaaacaatcaccagagcagtgcagtaacaaaagatcaagactttatcaatgccatcataacttacataactgagtcatacatatcaattcgcttattcagtctacaactagcaaagatttctaattcctgtaaatcacatactgtagattccacattcgaggtcctcaaatatcaacttgcagcaagaagcttttgcaactgaccactctccaaagcagctccaagatctgaagcaacaagataaacagccaaggcttgtgagttacaagggaaatttggacaaaagaatgaaacttggaggagata

SEQ ID NO: 138772 - DNA, 534 bp, Arabidopsis thaliana landsberg
cgcacaagaaacttgttggtggtagctttaaaaagcatgatgtcaaggtgattgagcgagttgagaaacccaaagtggatgaactgatgaattcttatctccaacttttatctgaaactgaggtatcaattctctcttttttcgtgtaaggttgttattgattgtaatctcacacaaactatcagttagctgttttggtgttcaagtttaattgaagtaaggcaactcattttgaatatacctgtgatcttggtggatataatttttgttcatataatgacataacctacatggaaaaaccttgtgccgtgtgcactcgtcataaatgtagagcttagaaatctttaaattattaggcattcttattcaggaatcgttcatatgataaccggattgacctagttctttttagattcaaacagataaactttgcattgcggggcaaaatatcgaggaatgtatcgtagaactaattgctcggcacaaaattaagtggttagtaatgggagctgcatcagataagcattactcatg

SEQ ID NO: 138773 - DNA, 771 bp, Arabidopsis thaliana landsberg
atgaatccggcgaattttcagcctccaaatcctccgttccactgggctccgatgttacctccagacccgcctcgttgtggtatgttttggaatacaaagaacataaccgatcagcttaaacaacttcaagatacgcttaacctggctaaatcaatgtaagtaaagccacatgaagttgtatagttgtgttaatgaatcaattgagtatcggagtttcgatttctgggtatagttatagatagtgaatcacaatctagttcattgttggtgaattcttataagctggggtatatttagggagaaagaactggaagcattgaagatgatcaaagacgccaaaggttctgtggaaaatgcagtacaagattcgggagtagagtgtttgagatatttagaggctagaaagatggatttgggacagcaggaaatgctttcagtggatgctgctaactccttgatgtctaccttgagagcacagcttgagccttttaggttcgttgttgatgagaatagtccatgggaagagaaatctgcagcagtaagattgacttgcaaaatgaagaaatcaataaggaacaaactgtggaagaaacgaaagagacggtgtgctgcagagatgcgtgctaaggtggatttgtttgctctgtttagcttatattgcagtgtagcagtagttgagttattaactctatcatcctgtctaaatggtttcaggagcctgaaagatttgaacaagctgatcgagaggcagatgaatggagggaaaaggaa

SEQ ID NO: 138774 - DNA, 802 bp, Arabidopsis thaliana landsberg
tgaagaggccagctccattaatgtagaacctccttttgtcaagtttgtaagataaaagaaggagagagagcaaaaataattagagctagtatgaagatattatttgttgtatgattcttcaggtacctctcggaaatcttacaaccaaatttgtaatggtttcaagtttgttttggccctactcatcacacatttccaaaaaccttagacgtaggacctcagattataccgtaagaataaggaacactaaaactatccaaatgcctactagatcttttacctaaacaaagatttgattaacactagcgaacaaatcttctgcaccaaatcaatttctgaaatcgagcttctcaggagcccgagaaccagattctttccaataaattcggaaatcttcaattacctccacgaaatgattccgtcaaaacaacgagcgatatccatttcatgtcgataaatccaccgaagaaaccaatcacagaatcacaaaaactggatcgaaacaacaataaacaaagttcggactaataacaacaacgccacagagaatcaatcaaaactagaaaacaagcggatcaatcgatggaaattgaggaggaaaatgaagaacgtacttgtcccagttaatctccgtctgaccaaaagatgcgatacgagaagtcggtggcgtgtccatgactctctcacggaagctgcgagacagagttcgagtcgaggcgaaaatgacctaatctccgtaagactcaggaagacatctggaattaatcagaatcagaagaagaagacgatcccggcgaaatga

SEQ ID NO: 138775 - DNA, 1442 bp, Arabidopsis thaliana landsberg
cagaagaaaagattgatttaaatttgagaaaccaagcgactgtttgtttactttctttattattacagatttacaggtacagacaaagttgtatgtaagtgtgattagaacagtggatgctcttatcacgggtccacttgctctctaaaaagaatattgaagctcataattacatctttagagactaaaacaatcttaatcattcaccttcaccaagtacttgtgtccagaagaaaaagaaggaaaaaaagaacacaccattcaagaaagagagaagcttcttgtgataagaaatttcacaggttttgtttttgttttgtttatatatattctcagatttgattttgcttaccattatatgtatgaagaaatagagagaccaattactttttacattagacagagtaaaatccagtctgtgcatcttctcaatgttttttttttgtttgttggtgctttctctaagtgttcttgggtataggtcccaaagtgaagctttttctgtttctttgtgcaaacaaatcttgataaagttagtaacttttggtgaaaatcttaccctttcatggacaatcagatttgatttcgtttccatgtccataggtgagaattttgtaattgaaattgatggcactctactttgattgatggataccttcttaagtcaactcttcattgaaagcgaagctacttatatagattatatagcatctctatgatatgattcttctcttgtcttattcttgggtgggtctttgacaatgtttctgcaactttttcagattgggttttaacattccaaggagaggactttgtcttgtctctattcatcttcaagacccttatgagtttcggttcttgagtaaacaacagctaagcacagtctctgagaactagaagattaggtagtatctgtaggaggtataaaaacgaatctttagacatggaagatgatggtggtagagatggatgcgaatgatatggtgggttttcaccaaactctaactttggtgtattctctgactccgctatggatatggatttcatggatgaactcttgtttgatggatgttggcttgagacaactgatggtaagagcttgaagcagaccatgggacaacaagtatccgattctactaccatgaatgacaacaacaacaactcgtacctttacggttatcaatatgctgagaacctttcacaagatcatatctccaacgaagaaacagggagaaagtttcctccaataccaccgggctttctcaagatcgaggatctctccaatcaagtaccttttgaccagtctgcagttatgagttctgcacaagcagagaagtttctccttgaagaatctgagggaggaagaagatatttgattgctccaagaacaagccaacgtccttctttatcagtgaaagagagattagtacaagctatagagg

SEQ ID NO: 138776 - DNA, 1782 bp, Arabidopsis thaliana landsberg
ctcgctctgcagtttcctccatttttttcaaactgaaacttaaatcatccagttcctttctaatgttacttttctcctccatttctgctgaaagagacatgcttacactttcaatccggttttgcaaggcattaacttcatcttttccctggagaaaagattctctaagccaagctaggcgactttctaagctggattgggacatctcctctggtaagtcaatggaaacgatcaaatcttttagtctgttgtattcctgggaaacatttgtgagctctttcctctcttctgcaagtgaccttactttttcaacgatatcaaaagagtgaccttcttcaggtgtatatatgtttgacaggatagtttcaatattttcaatgatagagttcctcaccgataacatttcctgatatgatgcaaccatagcatcggattttgctaactcgcctttgtcgagttcagattgatccaatgctgttgacatctcttgtagtttcgtcaaacactcttcaagttcttttgttttttcagccagagactgttccaactccttctttgttagctcatatgcttccagggatacggacctatcattcaattcagcatagcatttctcaagttcatccgtcttttcggttaacgattgttccagctgccccttcattacttcagaactttcaagggcaatctccttctcttgtaattcagtcaacctattcgcaagctctgttgttttttcagacaattgatgcttcagagcatcccggttctgaactaacgccttcccctttgttacggccatgctgagcttttcttttgtgttagtacacttagtcttttctagctcaagctctgccttcaatttttcaaattctgttctcattgactcactcatttctttctctctgttcacttgttcaacaaagttcctattctcatcttctagatgactaagtctttcaaaaaaggctgcttccttctgtttgagctcaaatagctcagaacaagcagcaccaagagctgaaccaaaatcctcttggaaactaagatccaacacatcactagccaaacacttccttaactgatcagcaccatagtaaaactcagtatactttgcacctaaaaacgaaactcggttctccagatgagcaagcttttcagagatagaagaaccatactgcaactccccttccccaaatacattactaagagaaaccataatcctatccgatgcagcctcaaggtgctccaagttctgtgcctgatcacccatttcggaaaccggctgcgacgaagaaagctcagagatttttgtggtgagatcagcaatctcatcgtccctcccactaataaccccgtgaagctccttgagtgcaacctcatgctgaatccgctcttccttggcagtttttaagaacttcgagaagcgactgacaatatccacagtagtgttcccatcttcacctgtcaaatcattctcaccagtcaacagcttaaactgctcctgaagccctgcaagttcattctcccaatcccccttctcaatctatatgcagaaaacaaacaaaagaaaagatctttcaataaattttcgaggaaactcaactaaaaatttagactttagaaagaatcataaaaaaaataacagacattgaaatgagttccaaggtcatcattatcatcgtcatctgtggtaagagcttccttgctaggtgtatcaaaattcaactcttcaggagcatcaacaaacatatcttccttactatcaacgaaagctgttcc

SEQ ID NO: 138777 - DNA, 387 bp, Arabidopsis thaliana landsberg
caaccctcgcaactctatttaaacatttatcttgtgacgtttcacataacaagatatatctacaataaccccaagaaatttaacagaatgaaagtaattacttccctaatctcttctattttgcttaaattcatccacaaagacttccatgagatttatgcaagaatgtccctcctcgatcggtttcttcttcttgtaagtaattgaactttcacacatatatgcacgtagaaacacatccacactttttttttcttcggatcattaactgaattaaggaatttaaattgttaccgatatgttttttttttttcccacacagtggaaaaagttataatatgatgaataaaatacatggtgcagatcgtgcatggagtggataagatg

SEQ ID NO: 138778 - DNA, 2677 bp, Arabidopsis thaliana landsberg
  unsure (1)..(2677): unsure at all n locations
gcaaacactttgtttcttctaaaagctctttgtcttctttgttttaatgtatgcttcacattagcttccgaccctgatcccatccaagacttctgcataccaaaacctgtgacatctccttaccatgaccatcacttctccaccaatctcccttgcaaaaactcctccgaagtaaccaccgaagattttgtcttttccggtctaaaaactgccggaaacttcacggagacggggttcgccaccgtcccagtaggcccagaaaacttccccggccttaatacattaggcatctcgtttgtccgggctgatctcaaacccggatccattaacccaccacattaccatccgcgggcgacggaagtagcccacttggttaaaggacgggtttactctggttttgtggactcgaacaataaggtttacgctaaagtgatggaagaaggagaaatgatggtttacccaaaagggcttgtacattttcagatgaacgtcggagatgttacggccacgattgtcggcggacttaatagccaaaaccctggtattcagaagataccgtccgtggtttttgggtcagggatcaatgaggagttgcttatgaaagcttttgggttgagtcttaagcagattggtacgttgaagaaaagatttgatcctgtcatgtctaatgaacattgatgttttctcttaaagtcttatcgagattattacatcgaagttatcttttatgtgatggtagttcttgatcataatgttatttatatattttgacccaaacaatggtcatctttagctagacaatgtttctttctacatgaattattatcacttatccacacttcacatttagaatcctgaattattatcactaaacctacataattttggcaacgtcacaagctttgaaaatttgacaatatcttctccaatccacaaaatatatcaaaatcaatgccagttcttctttgctataaggctctaaaggctgcaaacaaatctccaatttgtcgtgacactagctaatttgatcgctgtgtactcttgagtatgtgagaaaaagaccagagactttgacactagttaacttggaagctacatttccagcaatagaagaaacttgctatctgagcataatgaaacgctgcgttttaactctcatttattctttggggttaaactcatcgttttaatcacacaacagagaaaaggaattgttaaagccggtccggtattaataattatcgagctttgcagtttcggttcacttgtttaataccgtaccgacaatttcggtttaattagatttctatatactcaatcaatatctctattccctccacattcacaaccttttcatggatcagccacggcaaagctcgacggcgtctcagccaccggaaacacctcctcagccgtcggatnnnnnnnnnnnnnnnnnnacacagattcaaccaacgccttccacaaatccgagtccctcctgcgttgtttcctctattccctcttccccagctccacaatcaccatcgctcaatccaaaccctaatcctcctcaatacacgcgtacggtgacatctccggcgacgcaacagcagcaacatctctcccagcctttagtacggccgcctccgcaggcgtactctagaccatggcaacaacactcctcttacactcacttctcctccgcttcgtcgccattgttatcttcctcatcagcgccagcctcttcgtcttcgtctttacctattagtgggcaacaaagaggtggtatggcgattggcgttccggcttccccaattccgagtccttctcctacaccttctcaacattcgccttctgcttttcccggctcttttgggcaacaatacggcggattaggtcgtggaactgttggaatgtcagaagctacgtccaatacaagttcccctcaggtggattttgttctctcatatgtgccacatttcaaagaattgtgctctgttacaaaaaaaataccaacttttttctgtatgtgtgtgttcaggttagaatgatgcaaggaactcagggaattgggatgatgggaacacttggctcaggttcccaaataaggccgagtgggatgactcagcaccaacagagaccaactcaatcgtctctaaggccagcttcctccacaagtacccaatctcctgttgctcaagtatgtattttttacccttctggcctctgtatcttgacataggaactccagctttgtgactcctttgttaacaacaactttgtttgcacactttaattccttatattttacttttggcagaactttcaaggacatagccttatgagaccttcacctattagctctcctaatgtccaatctactggtgcatcacaacaaagcttgcaagctatcaatcaaccttggttatcatctactccccaagggaagccgcctttgccacctccttcgtatagaccacaagtaaattctccctctatgcaacaaagacctcatattcctcagcaacatatttctacgtcagcagcaactccacagcctcagcaacaacaatctcaacaacaacatcagcctcaagagcaacttcaacaattgagatctccgcagcagcctttagctcacccacatcaaccaacccgggtccaaggtttggtaaatcagaaagttacttctccg

SEQ ID NO: 138779 - DNA, 4480 bp, Arabidopsis thaliana landsberg
  unsure (1)..(4480): unsure at all n locations
atggagacgcaagttcatggcggcggagaagaagatccttggctggctccagacaaactataccatgtaatattctgcttctcaatctctcttatcttctctacgctcgcctctctctcccgctactcctttctacgccgtcactccatctggatcggatctgctttctcactcgccgccggagcggctaaagaagctgccgatcaaattggtatcttcccttccgcaggtgcttccgttagagacgccgtcgcagacgccattggagttgtgatagctgctttggttctcctcctctggaaatctcgaagatcacgtacccgacccatccttccgatttgaatcttattttactagttgctgccggttcgagaaaattcgattcagagtagaatatattccgttgaagcttgtcagtgttgtatccacggataatctcacaatttttatcaaaagtttgatcatcacaaaattttggtaatcaatctcctttgattttacttgtttgaaatgaaaacatgcaacaaacagtttatgagagtgttgttgattcaagtgaatgggttttgaataaaactcagattattgctgctgaagtatatgattcatgaaatctgaaattttgaattagttcaatatcaattattcgttttcgccatttgctcatcgagagaaacatttggcctgcttgtaacatcacattaaaaatttgaaaaccaacaaaactgaaaagattaagatgtccaagaccaagagcaaaatgaattttggtcaaacatgactacatgagtcaaacatgattttttgtttttactttttagtcgtcatctttaatattgctttttcctaactcttcttctattggcgcatttaatttttctgatatttttcctaattcaattttttttgttcttaaattaattccaatttctaagtcctcttcatctttattgctttttttattccctaactcttgttttattggcatagaaattttcttcggatcctcctcactgtctctttatactccactnnnnnnnnnnnnnnnnnnnntcgccgtcctccctttccttccctctctaacgtaagctccagatttcttctattctctgttttctcattgaaatccctagtaatgattttctctattctctgggcatttcgtgcttcaatgcctttactcacttcttctttaagaaaatattttggatttctctatgttccttatcatgcatgcgacatgcgtgaatctcttagctgaattttgtaaatgctgtatcaatttcgtctcttttgctttctctagtttttttgtttccttaagttcttccctagggtttctcttgctcttaagatttccatactatcgactcagtttgctagaaatggagtctcttttgggctttaaactttactgcatgaactatctgatgtgacagactcattttaactctaaaaagtttttcgatttcttagagattctctttagcttgtttggtgaatgcatcatcctcttggttgctatttttcatttgttatcattctttttctccaggtaaagcaggtaggatgagcatttctgatgaagagtctgagatcagcgagtcagagattgaggagtattctaaaacaccctaccgccttttacgcagtgagacttactacaaggtgaaggtgaatggacagctcacatgccccttttgtgcaggcaagaagaagcaagattacaagtacaaggagttgtatgcacatgctactggggtttccaaaggttctgccaccagaagtgctttacagaaggctaatcatcttgctttagctatgtttttagagaatgagcttgctggttatgcagaacctgttccacgccctccagttgttcctcctcagttagacgagactgaaccaaaccctcataacgtctatgtctggccatggatggggattgttgttaaccctttgaaagaagcggatgacaaggaacttctacttgattcagcatattggctgcagaccctttccaaattcaagcctattgaggtgaatgccttttgggtcgaacaagattcgattgttggggttattgctaagtttaacggagactggagtggctttgctggtgccacagagcttgaaaaagaatttgagacccaagggtccagcaaaaaggagtggactgagaggagcggagattcagagtcaaaggcctatggttggtgtgcacgtgcagacgactttgaatctcaaggtccaataggtgagtacctctccaaggagggacagctaagaacagtttcagatatttcgcaaaaaaatgtgcaggatagaaacactgttctggaagaactttcagatatgattgctatgacaaacgaagatctgaacaaggtccaatacagttacaacaggacggcaatgtcactgcaaagggtcctagatgagaaaaaaaacttgcaccaagcttttgctgacggtatttactgacacactgatatgtttccgactcatatagcatttagggtatctgactattttttatactttatctcctcagaaacaaagaagatgcagcagatgtcacttggccatatccagaaaatcctatatgataaagagaagctaagcaatgaactggatcgtaagatgcgggacttggagtctcgggccaaacaattggaaaaacatgaagcactaactgaactggataggcaaaagcttgatgaagacaagagaaaggtaatatcgttttcagtatgatacataggatacaatcagtctgttcatatgtatgcatttctcttttccgaggaaccaatgatcattttatgtattttttttgctttggcagagtgatgctatgaacaaatccctacagttagcctcacgtgagcagaaaaaggctgacgaaagcgtcttgagacttgtagaagaacatcaggtatattccttcatagcacactacttaaactgactaacaagttaattccaaattaagggaaaccacccgtacctacctttttgtgtctgagtttgaaactctctccttgccagaggcaaaaagaagatgctttgaacaagatccttctgcttgagaagcagctagacaccaaacagacactggaaatggagattcaagagctaaaaggcaaattacaagtgatgaagcatctgggggatgatgatgatgaggcggtccagaagaaaatgaaagagatgaatgatgagctggatgacaagaaagctgagttagaagggctagaaagtatgaactcagtcttgatgacaaaagaacgccaaagcaatgatgagatacaagcagcgcggaaaaaattgattgcggtacagatttctaatgctttagtgttcttgggtactgatacagttgcattttgcaattataacaatatgatcctgagaatcgttttcgtttttcgcatctaaaataattcagacatggtcaaacactctagtttgttggttatctttagttgacaactgaacttgcaagtttaacataaacctgtttgatgggatggattgaatatgagtttcaatttgataagattacggtgtatgacgtctgtaggtctctgataaaaatcacagatatttaccactatatcttgtgagttattaattgatgggagaacttgataaacatcacaagactcaaaaggttgctctttgatccagggtttgacaggattgttgggtgccgagaccgatattggagtaaaaaggatgggagaacttgatgagaaacctttcctggatgtttgcaagctgagatattctgcaaatgaagctgcggtcgaagctgccaccctttgctctacatggcaggagaaccttaagaatccatcatggcaaccattcaagcatgaaggaaccggggatggagcagaggtaggttcattcattttacaagtctttatctcactgaatcattgctttaggttggcgccaatatgactttgaaaagtttcttggccactgttttagttaaatatggagtaacctgtgatttctgtgaacgttgatacttgtatccatacgttggtacaactgtttttgtgagttagcggtaatggtcttagatggttatggttacaggaagtggtagacgaggatgatgagcagctgaagaagcttaaaagagagtggggtaaagaggtgcataacgcagtaaaaacagctcttgtggagatgaatgagtataatgcaagtggtcggtacacaactccagaactgtggaacttcaaagaaggaagaaaagccactctgaaggaagtgattaccttcatttcgaacgacataaaaattctgaaacgcaaaagaacctgaaggtatgctaaatcttctacagttgacacaggtctccttacaaaaaactcagaaacgtgtaagagtctttataaggtttagggtagaaactcgtcaacaaatactgcagaggcatgatctcttttgttgacttcag

SEQ ID NO: 138780 - DNA, 1967 bp, Arabidopsis thaliana landsberg
atgaatccgacgatttcgtggaggttcgcgtcttcgacctctcttctctccattcctcgaacaccaaaaagtgcctttatcttcgccatgaccttctcttcttcttcttcttcttcttcttcttcttcttctgtggaaaaccctaacaaggacgattcctcctcttcgcttgaattggtcctcaagtaccacaaccagacgaagcactccttgaacggttacgcgagaggtcctcgtggtctcgactgggccaatcagcctaatcccttccgccggtacctctctgctcctcttcttcctctccaacaccccaatcacgacatcgacgacgactccgactctcctctctactctactctattcgactcgcttcctccgcccaaacccatctctcttcctacaatctctcaccttttctaccattctctcgctctctccgcctggaagaccaccggatcctccacgtggcccctccgcgtcaaccccagcagcggtaacttgcatcccaccgaggcctatctcattgctcctcccatcccttccctctcccaatccgctttcgtctcccactatgctcccaaagagcattctttggaggttagagctcacatcccctcttcctttttccccaacttcttcccggagaattcttttctcatcggaatttcttcaattttctggcgtgaagcttggaagtacggagaacgagcgtttcgttactgtaaccacgacgtcggccacgccattgccgctctctccattgcagccgcagacctaggctgggacttgaagcttctcgacgctttcggagctgatgatctcaagaggcttatgggtctccccgatttcagttacctgaaggtaaaggtaaagctgagctccctgagattgaattcgagcatcctgactgcttactccttgttttccccaacggaactagtagagaacatctcaacttagactacctcgcaattagctctgcccttagagacttcccaagcctagaatggactggaaaccccaatactctgagcaaagagcatttgtgttgggatatcatctacaggacagccaaggctgtagaaaagcctccattgatctactccacctcttcttcttcaattgatgttgcttccttcacaagcagtcgtgctctgtttagccacagttcatataataagttaacggtgaggcaagttgtaaggacgagaagaagtgctgttgatatggacgctgttacttgtatagacatgtcttcgttttaccagatgctgatgcactgtcttccttccacaggcgagtcccaaaaagagcaacttgcgctgccgtttcgagctcttccttgggatactgctgaggttcatcttgccttgtttgttcacagagtttcgggtttgcctaagggactgtatctcctagtcagaaacgaggatcatctcagtgatctcaagacagctacgaggcctgaatttgagtggactaaaccagatggatgtccggacaatcttcctctgtacaagctcgccgagggtgattgccagaggctggcaaaagggctatcatgtcatcaggtacagagtcggatagagttgtaattaacaatatatttcacttggttactgaatcattgtggttgatggatgcaggacattgcaggggatggatgcttcagcttaggcatgatagctcggtttgaaccagcactgcgggagaagggctcatggatgtaccctcgactgttctgggagacgggtgttgttggacaagttttgtacctggaagcacacgcattggggatctcagcaaccgggattgggtgctatttcgatgatccagtgcacgaggttctggggattaatgactctagctttcagagtctgtaccatttcactgtgggaggtccagttgtagacaagcggatcatgactcttcctgcttatcctggtcccaccaccaccgttgcctag

SEQ ID NO: 138781 - DNA, 2507 bp, Arabidopsis thaliana landsberg
aagaaagaaaagacttcttcaaaattgttaattgaacaagtttcggcgaaaaccattataagctgtgattgtgtgatggcttcttctactagattaactattattcaatcaagcttcgtctccgcaagaacaagactcaattacgtctccaagacaaatcattctgggttcgcttgtcgttctctttcaaaacccagaaacttgagtctctctgtttattctatgggttcttctagttcttctccgaaaccagacaacgtccaaggttctttttaaaaatttaacctttttgaattgattcagtttctctctgattatccgatgattcccataaatcccatttcatgttgtgtactgtaatttgcgtaaaaatggtttctttctttgtgggtttaggttaatgagttttgtctttttccaaatgttatgtttgatgttttggaagagagatttaggtcaccaagtttactcaattggttctcagaagttagtgaaagagatttgagagcttataagttatatcaccaatccatgctttgcatttgtttgtatgtacagtgttactttcaatgccatgttctttagaacaatcctttgcattttgagagatttttatcatggtgcacacgctgagaagaatgagtttgcttctctaagtgaaaatgaatggaagaaacggctaacaccagaacagtactacatcactagacagaagggcacagagagagctttcactgggtatgtaatgaaatgctcatcgaagattatcgcctttttaacatcatcacaatgaccttattgtctgaaatgttggaggtcacactcaaatgagtattttcttgtttttcagggagtattggaactcaaagacccctggagtatataattgtgtatgttgcgacacacctctatttgagtaagtttctattattgtaaatatgaaattgtactgaactaatgaagcaaaaattctcaaatgattcatatgaatgaatggttattaacagatcaaagtaatcatttcttgcagttcatcaacaaagtttgatagtggaacagggtggccatcttactaccaaccaattggaaacaatgtgaagacaaagctagacctctctatcatcttcatgcctagacaagaagttgtctgtgctgtttgtaacgcccatcttggtcatgtctttgatgactgttcacgcccaaccgttataaacgatattgcctcaacaggtttatcattcatcctgatctatttattaaatttgcaaaaagagtatcagaacatcgttacttgtgaataaacaattgaaattagatatcaatttttctgaaaccaagcaagtattttcctttcatttgatcaagaatgtttttgactctgttcgagttttctctaagttcctgtttttgtgctttttgtagtgctgctctgaaacttaacgcattggagaaaacaagagattgagagtttctggtacaaggatttgttcatattacataatatactgtatcattatatccactgtatttcctcgtattaagtcgttgtatgtaagtcaactataatccatcaaaaggtttaaactttgagttgatttcacgatctccttagacagcacattcttaaatttatctactccaatctctttcccacgtcttcaccatatccatttcttaatttcatacatgagtgtgtatatatatggttttggctagtgctttgtgtcagggagctattagaaccaacaatggggaaagaaaatagcaaagttgttgttttggacttctgggcaagtccttacgctatgaggacgaaggttgcgttgagagagaaaggagttgagtttgaggttcaagaagaagatctgtggaacaagagtgagctgttgtgaaatcaaaccctgttcacaagaaagtccctgttcttatccacaacaacacaccaatttctgaatcgctcatccaagttcagtacatcgacgagacgtggactgatgctgcatctttcttgccctctgatcctcaatctagagccactgcaaggttctgggctgattacgctgataaaacggtaattagtgtttataattcatctgtttctgtttcggtttgctttatatgtctacttggttttgatcaaattcaccaaaatgcagatatcatttgaaggaggaagaaagatttggggaaacaagaaaggggaagaacaagagaaaggcaagaaagagtttcttgagagcttgaaggttcttgaagctgagcttggagacaaatcttactttggaggagagacacttggttatgtagacataactcttgtcccgttttacagttggttctacgcactcgagaaatgtggtgacttctctgtcgaagctgagtgtccgaagatcgtggcttggggaaagagatgtgttgaacgaaacagtgttgctgctacattgcctgaatctgagaaagtttatcaacaagtccttaagctcagacagatttttggtgttgaatga

SEQ ID NO: 138782 - DNA, 1044 bp, Arabidopsis thaliana landsberg
tcaaaagttataatattttgctccacgaagaggctttgtgaccatcttgcacgtagtgtcggacgtcattttggcgctgttgtgatccatggagacaagactcaaggtgagagagattgggtgcttaaccagttccgaagcgggaagtcttgtgtactgatagctactgacgttgctgcccggggactcgacataaaagacatacggtttgttgtaataattcctggtatatatctctttgcttgtttgttatcaagattacttacctttgttcgtgtttatactacttctcgagttctgatccaactaggatttcacaactggagttgaagactatgtccaccgtattgggagaaccggtcgagctggtgcaactggagttgcattcactttctttacagagcaagattggaaatacgcacctgatttgatcaaagtcctggaaggagcgaaccagcaagtaccgcctcaagtaagagatattgcaatgcgtggtggtggtggtggtggtcccggttatagccaggatcgaagaggtatggttaaccggtttgactctggcggtggtggtacccgttgggattctggtggtgggtttggtgggcgtggtggtgggtttagtggccgtgagggtgggttttggaggccgtgagggtggatttgggggccgtgagggtggatttggaggccgtgggggaagatttggaatgagagatgactcatttggacgtggcgggaatcgtggtcggggttttactggtcctgatgctggtcatatgaatgtgggtggtagaggcggatttggtcggtttggcaataataatagtatggagacccgaggctttggtcgtggtagtggtagaggctttggtcgtggtgttggacggtttgacaacagaagaggtagaagtcgcagcagaagtcctgatttggttcggccacggcgccgtagctcgagctatagccggagtcgaagccggagcgggagctatagtcgtagccgtagccgtagcaggagctggtcacgttcaaggagtcgcagcc

SEQ ID NO: 138783 - DNA, 4133 bp, Arabidopsis thaliana landsberg
  unsure (1)..(4133): unsure at all n locations
atggagcaacttcggcccttctttctgttgttggctatttttgtagcttcacttgtcaatgcagaagttcactttcatgagtttgttgtgtgtttactacttcgaaatcttttttgttttcttccttgttacttacaaaagatgctcaacttagtttattctttttgtgtttggttagatccaagaaacgccggtgaagaggctgtgcagagtccataactcgatcacggtgaatggacagtttccagggccaaccttggaggtgaggaacggcgattcccttgtcattacagccataaacaaagctcggtacaacatcagccttcactggtaaactcactctttccttgcatcaaatcaatcaatgttttatcgctagatagtctgctaatcagaccatgtgcaggcatgggatacggcagatgaggaatccatgggcggatggaccagaatacataacccagtgcccaatccaaccaggagggagttacacctacaggtttaccatggaagaccaagaaggtacattgtggtggcatgcccacagtagatggctgcgagccaccgtgtatggtgctctcattatccgccctccgctctcttctcctcattacccttttccagttattcccaagagagagattaccctcctcttaggagagtggtgggacagaaatcccatggatgtcctcaacttagcccagttcactggagcagcaccaaacatctcagacgcctttaccatcaatggtcagcctggtgatctctacagatgctccagccaaggtacagatttagtttatgtttcccatgcgccacaagcagctacatcttagttggttaatattatgtgcttgtcatgttgcagaaactttaagatttctagtggggtcaggagagatagtccnnnnnnnnnnnnnnnnnnnnnnnnnnnnncaagaactcttctttggtgtcgcgaatcacaaactcacagtggttgcggcggatgcctcctacaccaaaccattctcgaccaatgtcataatgttaggtcctggtcagacaactgatgtgcttctaactgcagaccaaccgccagcacactactacatggcagcacatgcctacaacagtgccaatgctgcctttgacaacaccacaaccaccgcaatcctcaagtacaaagacgcctcctgtgttactcttcaagctaaatcacaggcacgggcaatacccgcacaactaccaggattcaacgacacagcaacagcagcagccttcacagcgcagatgaagagtccttcgaaagtaaaagtgcccctggagattgatgagaacttgtttttcacagtgggattgggactattcaactgcccaacccccaacacacaaaggtgtcaaggccctaacggaacacgcttcaccgcaagcatcaacaatgtctctttcgtcttccccaaacaaaactccataatgcaagcctattaccaaggcactcccacaggtgttttcaccacagacttccctccaacgcctcctgtcacatttgactatacaggaaacgtgagcagagggctatggcagcctactcgcggaacaaaggcctacaaactaaagttcaattcgcaagtgcagattatattgcaagacacgagcatcgtgaccactgagaatcacccaatgcatctccatggctacgagttctacgtagttgggacaggtgttggtaacttcaacccaaatacagacacatcctcctttaacctcatcgacccaccacgaagaaacacaatcggaacacctccaggtggatgggtagccatcagattcgttgccaataatccaggagcgtggctgatgcactgccacattgactcacatatattctggggtttagcaatggtcttcttagtagagaacggagaaggacatttgcagtctgtacagtctccaccattggacttaccccaatgttaagactgttatctacacacatatacacttgtatattctcaaatttgtttcacaaaacatgtcattcattttcaattacaaaagataaacgtatcaagatattttaagtccaaaagtatttttcaattttgcatgcaaaaaaaaaagcaaaactatgcaccagcaaggaatcgaacccgggtctgtaccgtggcagggtactattctaccactagaccactggtgcttgtatgtcccaagaggaaaatacacttatattaccaaacatataataatgcttgtagtttcgttcagttaaatctcactgagcacaagtagaagagacacaaacatcgttaccttcgccgccatggcctccgcactcgaatgctggacaacacgtaatgccgccggtggttgcgccgacgacgattttgttgaccaagtcctaatgtcctccgaagacaggtctgagtccctcactgctcctccaccttgcgatcaaacctcttccgctatgcaaaagcggtttcagcgtctcggccgcaacgtctccgacgcgatcgcgtcgctcaagaactctctcaacctcgattcgagtcgagacaaccaaaatgcagctaccggaggaggtagaaagctcgtatgggctactgtagtgagaaaccttgctaaaatgtatcctggaagccagttgcctgataaactcgtctccaatctccgaaagcattacgattctttgcctctcaggtaacaccagattctcacagacgcttaagatgttgcgtcatttttactcttcacctaatgtttattcttctcggtttcttaaattattaatttagtgttatgtggaagatacaaagcttagatctagatatgttgttgtattgggaatagatcatggagtaatgtggattaaatatggttttgttttgtaacagttatagtcagactggtttcgatatgaaagatgtatttgtacacataaagttgatagagcaagcttttggagatgataatcctgtgtttgtgattcaagaggtgtgtgatgaggaagctgatgatcagggttctgtgtttaagctcacatttgcttgtacttgttcccttccatggtcaaccatttcagggtctcttgatggtgctttgatttgttgtaagaaagtagaaatctttgagaagaaggggttgactcttggagttgttcttcttctggttgagtctggacaagaaaaaatgttcaaagttaaggttgagaatgcccttagatctgcggtgaggaagcccaagtcaacctctgtgaagctcccatttggtctttgtggctgtgaagaacagaatgctggtgttggagaattcggggatgttgatgtggagtccattgatcaatgttatagacatgagttggatgatctgaatactaggattcagcttcaaatgccacctccaagctcttcgttttctgtatcagtagatgaatggcagactatccaatcaggtggtgatgatatcagaaaatggctactgaattcagatgatctcgagtttagtggtcagttaggaccaaattcatttaaaggagtttacagaggaacaaaggtggccattgagaaactaaaaggctgtgagaaggggaattcctatgagtttgcaatccgaaaagatttcttggagctgatgacctgtggacacaagagcattttgcagttttatggtgtctgcatcgatgaaaatcatggattatgcgttgtcacccaactgatggaaggtgggtcactccatgaactgatgttgaagaataagaagcttcaaaccaagcagatactgcgaattgcaatagacatagccgaagggctgaagttcgtgaatgaccatggtgttgcttatcgggaccttaacacacaaagaatattactagataagcatggcaatgcatgtttgggaaatattgggatagtcaccgcttgtaagagctttggtgaggccgtggaatatgnnnnnnnnnnnnnnnnnnnnnnnnnnnctgaggtcagtattcttttactcttgtctttgttcaacagttcacttgaaaagttagattgtgaaacataatcatgttggccatattctgatcctttgtcacctccacgccaaatgatacacaaaactaggtacctacaagcttgctaagatatttttttggcccatatcat

SEQ ID NO: 138784 - DNA, 613 bp, Arabidopsis thaliana landsberg
atggactcaactactacgatcaaaccggagaccctatccaccgtgagttcctcacctccggagaaaatccatctccggccaatgactctttccgacgtcgacgatttcatggtttgggccactgactcaaacgtcacacgcttttgcacgtgggagccttacactagccgagaagccgcgatcgcgtacttaaacgacgctcttttgccacacccttggcttagagctatatgcttagataacgaccgtccgattggctcgatctccgtaacgccagtcgatgagatcagaggagagattggttatgtcctcggaagcaagtattgggggaaagggatcgccactgaagcggtgaggcttgtggcgggggagatattcaaggagaagccagagatgcagaggcttgaggcacttgttgacgttgacaatgttggatctcaaaaggttcttgaaaaagttgggtttgtgaaagaaggtgtgatgaggaaatttatgtatcttaaaggaaatgttagagatatggtcatgtttagtttcttgccttctgattcgttgcactgatctgatttgaattaacaaatatcaaatatatatattaagtttgtttgatgtc

SEQ ID NO: 138785 - DNA, 1542 bp, Arabidopsis thaliana landsberg
ggacggtgtggacagcaagtgcacacataataacagcagtaattgggtcaggagtgttgtcattggcatgggccgttgctcagattggttggattggtggtccagtggctatgttactcttttctttcgttactttttacacatctacccttctctgttcttgttaccgatctggtgactctgttaccggcaaaagaaactacacttacatggacgctattcactccaacctcggtaaacaaaaaataaatcatttcggtttctttttggtgcatatattgggatatgaaaccgatatggagaaccggagatcgaccgagatcgaaggttgagatgacaagaagatattattgtagaagataaatgttaaacttcctaaacttcaatattaacatttgatcttctagaataatatcttcttgccatatcttggccttatcatttcaaccgtagatctccggttctccatatcgggtccatatcccaatagttattatcatcaaaaacttaattcattgttgattcatttttaggtgggattaaggtgaaagtatgtggagttgtgcaatatgttaatctatttggtacagcaattggatatacaattgcatcagctataagtttggtgtaagttaaaactttgctttcacaaaactctttttatttttaagtgttcacatttgtccaaaaaaagttagatgcgtgttttattttgctattcaatattgtccatacaagtcattaatgtttggctcaataatgcagtgttttagtcaatgtagtcttgttttgtgccattaaagattcgaaagaacggctctattattgtttgacttgttaactaattttcttgaataaaaaatttacagagcaatccaaaggacaagttgccaacagatgaatggaccaaatgatccttgtcatgttaatggaaatgtttacatgattgcgtttggtattgtacaaatcatattctctcagattcctgattttgatcagttatggtggctttccattgtcgctgcggtcatgtcttttgcttattctgccattggacttggccttggtgtctctaaagtggtagagaacaaagaaattaaaggtagtctcactggagtcactgttgggacagtgacactgagtgggacagtgacatcgtcgcagaaaatatggagaacatttcagtctcttggcaacattgcgtttgcgtactcttactcgatgattctcatcgaaattcaggtatttttgttacgcgagttttttttttttttaatctaatgttaagttagattcaaaagaaaaataacgtttttacaactagtgcatcgtttggtttatttgttaagcgagtttgtgtgataagagtttgtttaaaggatgttttaatcaactagacgatttgatgatccaggacacggtgaaatcaccgcctgccgaagtaaacacgatgagaaaagcgacttttgtaagtgtggcagtgactacagtcttctacatgctatgtggctgtgtagggtatgcagcatttggggataacgc

SEQ ID NO: 138786 - DNA, 1408 bp, Arabidopsis thaliana landsberg
tcacagactacacaacacagacctaaaaaaatgtcttctctgcgtttgcgtttatgtcttcttctactcttacctatcacaattagctgcgtcacagtcactctcactgacctccccgcgtttcgtgaagctccggcgtttcgaaacggcagagaatgctccaaaacgacatggataccttcggatcacgaacacaacccatcaatcatccacatcgctatgactctcgacgcaatttacctccgtggctcagtcgccggcgtcttctccgttctccaacacgcttcttgtcctgaaaacatcgttttccacttcatcgccactcaccgtcgcagcgccgatctccgccgcataatctcctcaacattcccatacctaacctaccacatttaccattttgaccctaacctcgtccgcagcaaaatatcttcctctattcgtcgtgctttagaccaaccgttaaactacgctcggatctacctcgccgatctcctcccaatcgccgtccgccgcgtaatctactttgactccgatctcgtagtcgtcgatgacgtggctaaactctggagaatcgatctacgtcggcacgtcggcggagctccggagtactgtcacgcgaatttcactaactacttcacttcaagattctggtcgagtcaaggttacaaatcggcgttgaaagataggaaaccgtgttatttcaacaccggagtgatggtgattgatctcggaaaatggagagaaaggagagtcacggtgaagctagagacatggatgaggattcaaaaacgacatcgtatttacgaattgggatctttgcctccgtttctgctcgttttcgccggagatgtcgagccggtggagcataggtggaatcagcatggtcttggtggtgataacttggaaggactttgccggaatttgcatccaggtccggtgagtttgttgcattggagcgggaaagggaaaccatggctaaggcttgactcgagacgaccgtgtccgttggattcgttatgggctccttatgatctgtttcgttattcaccgttgatctctgatagctgattgtaacatcggacggtggaggaaggcacgaccgtgttttgctgacgtggaataaagctattttgatcggtcgtaataaatacgttggtcaagccacgtgccagatgattgaagaggtggtaggttttgatcggacggtgtataaccattcatgtgataaagaattcccaggccaagtgtaatcgaaaagaagaaagtgaactagaagagttaagattgtgtaacggtaacgttccggagattggttcatatcgattgaaatgtattatgtgtttgaaattgattgtatggatctaattagtgtgacataatttacggaaaagtaaccacgtttttcaac

SEQ ID NO: 138787 - DNA, 555 bp, Arabidopsis thaliana landsberg
gatggattcctctggtggacatcggagtctgcagctaagttcaacattccaagatttgtctcctacggcatgaactcttactccgccgctgtctccatctctgttttcaaacacgaactctttaccgaaccggaaagtaaatctgataccgaaccggtcactgtaccagactttccatggatcaaggtcaagaagtgtgatttcgaccatggcactaccgagccggaagaatcaggtgcagccctcgaactatctatggaccaaatcaagtcgaccaccacaagccatgggtttttagtcaatagcttctacgagctcgagtcagcatttgttgattacaacaacaactctggtgataaaccaaagtcgtggtgtgttgggccactgtgtttgacagatcctcctaaacaggggagtgctaaaccggcttggattcattggttggatcagaagcgagaggaagggcgtccggttttgtacgtggcgtttggaacgcaggcagagatatcgaacaagcagcttatggaactagctttcggcttggaagattcaaag

SEQ ID NO: 138788 - DNA, 503 bp, Arabidopsis thaliana landsberg
atttggtttcagttttatggagatgaatccttttacactagtcgatgggaaccattccctctggatatgagaggagaattagatgacactgctgccttcaagaatttcaacaagtatgtctaacatttctaagttcccggtgagagacccgcaatcaatttttccggtggaaactcattggattgataagttttattaatacaggtggggagacattgaatttcctctgccatttggaagggtcctcagttctacagagaacttcatccatggtttagatgagaaggtttaagcatccagcttttctaaaaacaccacttttgtgactcagacaggaaagacttgaaagtaatgttactgaccatacatgtgtgtgtgtgtgtgtgtgtttgttacttattgcagacaagtgcttctttgaagttcactgttttgaatcctaaaggccgcatttggacgatggtagctggaggtggtgctagcgtcatatatgctgatacagt

SEQ ID NO: 138789 - DNA, 2134 bp, Arabidopsis thaliana landsberg
aagatggatgagggagatgggagagatcagatggatcaatttcatcaaaacgaggcgatatctgccgttgctgacgacgggtttatggcggaggaagaggatgatgattatgaggatctttataacgacgttaatgttggagaagggtttcttcagtctatgaaaaagaacgacgaagcgggatctagaaacgaggaaaaggagaaggttaatatggaggaggaagatagggttgaaccagttttaggtgaagctgaggtttcgatttcgatacctggtttggttggtgagagcgttgagaaagaagcaaaagcagagtcaggaggaggaggaagtggtactgatgtggtggtcgcttctagtggatatggagctcaggaggttaaggtaagcgatgttagccaggagattcctggtggaattggtactggtactggaggtgggctgagagttgagctagggcaagcttctaatcgggctaatgatctcgaggcacctagagggaataatatttcgcagggtctcttgccaccaccgcctgtgttggggaataacgagaatttgatgagacctgtgatgggtaatgttaatggcgggattcctcctggacctggtagtaacatggttgggaacggagctaatatcgctatgcctggtgttgttggcgggggaactggtggtggaggaggcggtggagcttttcttttcgtaggggatctgcattggtggacaactgatgcggagcttgaggcagagttgtgcaagtatggtgcagtgaaggaggttaagttctttgatgagaaagctagtgggaagtcgaaagggtattgtcaagtagagttctatgatcctgtggcagcttcggcttgcaaagatgcgctgaatgggtatccattcaacggtaggccttgtgttgttgagtatgcgtccccatattcggttaagagaatgggagaggcacaggtgaataggacccaacaggctcaatctgtaattgcacaagctaagagaggagggcctgctgatcctccaagtaaaccagtcgtggccaacaacaacaataacaataacaacaacaacgccattgcgcgggaatttccaaggtggggaaaatagaggatttggtagaggtaattggggtagaggcaatgctcaaggaatgggtggtagaggaccaggtggtccaatgaggaataggcctaatgggatgggtggaagaggcttgatgggtaatggtgggtttggtcaaggaatgggtacagggcctcctatgaatatgatgcatcaaccaatgatggggcaagggtttgaacaagcttttggtggaccgatggcgagaatgggagggtatggaggattccctggggctccaggtccacagtttcctgggcttttgtcatcattccctcctgtaggaggagttggtttacctggagtggcacctcatgtgaatccagcattttttggacgagggatgccgatgaatggaatgggaatgatgcctaatgctggtgttgatggagggcataatatgggaatgtgggatcctaacagtggagggtggggtgctggtgaagatctgggtagtggaagagctgcggaatcgagttatggggaggaagctgcatctgatcatcagtatggagaggttaatcacgaaagaggggctcgtccaaatcctgtgaaggaaaaagaaagagcttcagaaagggaatggtctggttcatctgatagaaggaatcgtgaggataaagatgctggttatgaaagggacataccgagggagaaagatgttggtcacggttatgatatgccagagagaaggcatcgtgatgatagagacaccggtcgtgagcgtgagagggaacatcatcataaggatcgtgaacgctccagagaacatgttcgtgacagagaaagggaaagggagagggatcgtcatagagaagaacgagaacgatatggtggtgatcatcgtactagacacagggacgaacctgaacatgatgaggaatggaacagaggccgatcatccagaggacacaacaaatcgcggttgtctcgcgaggataaccatcgctcaaaatcaagggatactgattatgggaaaagaaggcggcttactactgaatga

SEQ ID NO: 138790 - DNA, 3519 bp, Arabidopsis thaliana landsberg
  unsure (1)..(3519): unsure at all n locations
atggctgacacagagtgttatgaaaagtttccggatgggtttattgaggtgccttccctaacgtctgaggagccaacggatcctctggctctttgtgctccaagttccgatgaagtggtttgtagtcataatttagttgatttttttctttttcctctggtatctcagttctgatccttatacccacttttactcacagaatgttctggatgcgattgagaaaggaaaaatagtgagcagtggtgcccctcagacgtccaaggatggccctactggacgaaatccggtcgagttttcacaacctagacggatcaggcctggtaagaattctgtaaaagacatccaggcttctagtcttttgtgtttatgaaataaatggtaaaatttgtgaataccttgctgcagctggaagcagagaagatatgacattcggtcctgagcagtctagaaatgaaagtgaacacacaaggccctatcccgatgatgagtttaggcttacaggtatgtgttcactgattgtggccttcatctagctctgttgactcatgttggtgctgctcggtagagctgatattggtaccnnnnnnnnnnnnnnnnnnnnnnnnnnnnnaattggctcatatcagttaatatctttgagcagtgttgtcaaagctgaaaatgctaagatttgttctgagtgatatgcgagttctttctgtccctatttgcctctcacaatatggtttctgtcattttacagcttctcatgaaggttatgcaccttttaggagaggcaatgaggcacctgtcagagaactgaaagaacccagtatgcagggaaatgctcatgttcaatctgcctctccatggcgtcagtcttctgggggagaaaggtcgaataggaactcacatgattggaatgacccttcagctgatagcaggctgaaatcttctgacagtgtttggtcgcatcctaaagattcaataaatcatttaggtggcaataatatgatgttgccgcagtcgaaaggtgaatcaagatggcaaatcagtgaagatccttcacttagaaggcagccatctctggtgttcgacagggagcaggaagttagaaagcttctcccatcttcgcctgaagaactttcactctattataaagatcctcagggtctaattcaaggccctttttctggatctgatatcattggatggtttgaggctgggtattttggcatagatttgctagttcgtcttgcaagtgcaccaaatgattctcctttttcattacttggtgatgtaatgccacatttacgggctaagtcgggtccaccacctggttttactggtgccaagcaaaacgaatttgttgatgcagctggtacatcagccttccctggtgtggggaaagttcattctgggatgggtgagactgatatgttgcaaaatgatatgaggtataagcatgttgcaggaactgtagcggagaaccggtttattgaatcattgatgtctgggggtctgaccaattcagctcaaggtagtcctagcgttagccatttggtgtgtgtgttgtaagaatatctattgttttcctcactttctctgtttttttgttgtgtctgcaggtgttcaaggatatggagtaaatagttctggtgggttgtctttaccagttactgatggtggggctgatatgtatctcctggccaagaaattggaacttgagcggcagagatcaatacctagtccgtattcatattggcctggtcgggaatctgcaaacctgatgccaggatcagagaatgtgtcagaaaatgctcaacaacctacccgttctccaagttctgatttgttgtccatcctccaaggtgtaacggataggtcttctcctgctgttagtggtcctcttcctgcttggtctcaacccattcaaaaggaaagtgatttgcaccatgctaaaactttccaaacgcaaattccctttggggtccaacagcagagactgccagagcagaatttacctttgtcaggtttacttggtcaacctatggaaaataatccaggtggcatgttatctcctgatatgatgctcgctgctggactctctcaagagcatcaatcgctcaatctgttgcagcagcaacagctcttgttgcagttgaatgctcagacaccactttctgcccaacatcagcgtctattggtggaaaagatgctcttgcttaaacaccaacataaacaagaagagcagcagcaattgttacgacagcaacagcagctgtattctcaggtttttgctgatcaacagcgttctcagcaacggtttggagacccatcttatggtcagttgcaggcgtctcttgatgcgcttaggctgcaaccatcaaaagatatgtcacaagtcaatcagcaggtgcaggttcctgtttcccatgaggagcgaggcatcaacttagctgatttgctcccagtaacccatgccactaatcagactgttgcttctttcgaaaccccctctctgcacctgcaaaaccagctatttggtaatgttgaccctaggatggttctgcctgatcaaattgatgatacccataaaaaagagtcgaaatcagaatatgaaagaacagtttctgcagactatgtgaacagcttgtactcagaaaagcctgtcctttcccctggctatcatgctacacataatgtggaagaacctgtgagctatccaaacaatgaaagctccactgctactatgacagctcccgaaatagttgaaagtaagttgctggaggagcagtctaaggacatgtatgctggaaagggagaggtcagtattgagttatctggggagactcctgcaactgaagttaaaaacaatgacgtttctgtagcacggaagacttctgagaagaagtccaggaagcagcgggctaagcaggctgctgacctggctaagtcaacttctagagctcctctgcaggagacaaagcaacctcaaccaggaagtgctgatgattctgagataaagggtaaaactaaaaagtcggctgacactttgatagacaatgatactcacctcattaaaagctccacagccgcagcttcaaacacttcccaatgagttctgaagtagattcagtcaggggagaagagtcttcactgcaaaacacacgaacacaaccaggacgagcttggaagcctgctcctggctttaagccgaagtcattactggaaattcaaatggaagaacagagggtagcgcaagcagaagctttagctccaaagatttcttctaccgtgaattcagtgggttcggcggctccttgggctgggattgttaccaattcagattctaacatactaagggagactcatggagagtcagctattactcaaaccggtgttgtaaagcctgaaagtgttcctactcttaaggctaagagaagccacttgcatgacttcctggctgatgatgtttttgccaaatccgaagtcaaagagaggaaagtaatggaaatcatctctaacaatactgcgggg

SEQ ID NO: 138791 - DNA, 569 bp, Arabidopsis thaliana landsberg
attccattgaacaccagagtgcacattgtttaccccatcttctgtcactctctgaggtatcgtgttgcgtaaatcatcttctttcaagtcttatcttttctctttaagacatatatatgtacacatattttcatgtcgaccaaacacatgcctgtttcttgtcattccaggttcgaggcgcaaaatctgaggacacgcaaacccatgcttaccgtatgtacttcatgggtccaaacaatttcagggaaccttggcatctgccctactctcctcctggtgcaatcatagagatagtgtaaggacattacttgactgggttgaattctgttgtgattattgtcgttatatgtttgaatgaagtgttgaactaaaaactattggcaagaataaaagagaatctatattgtgactatgtatgtcattaatcccgagtcccgttttcttatactctttgcttatcaatgtgatcgtcctttggctcactttattccaaggcatgtccactcatagttctggacatttctgattcgtaggtacgaagatgcttttaacagctttattaatgaaat

SEQ ID NO: 138792 - DNA, 3321 bp, Arabidopsis thaliana landsberg
tcaacattctccggatcttgctctgtcagcgacggctcctccgtcctcgtcggcgcagtctccttcgttgccggcgcagtctccttcgtcggcgcagtctccttcgttatcgtcggcgcagtctccttcgttgccggcgcagtctccttcgttgccgtcgcagtctcctccgtcgttgatttcacggtcgttccaactcctctcttcctctcctttagaggcggcattgttttcggcggcattagggttaggattagaggagaagaaacgattctgagagaaaagagagagaattagggttcgtgttgttgagaatttgagtgaaagggagaggagttgtttgtgttcacagagaatcgagagagagagagagagcggtttctctcggaactcgtttctttgagtgaggaaaaaacgaaaaaattgtaagtgttgagtctgaattctttttttttttggttttcaaattaaagtgagaggatatcttggtaaaatccttcatttatgtatttaaattaaatcacaaataggttctgttttttgtgggaagatatgagattttcttcaagcaaaaagggagttatgagatgattggtcgtcctcgccggagaaaagatacgagacttctctctcaatcctgaagcagactcgattcatccatcagtcaacaaatcttccttcacaatgggtatatctctttaatgttccttacttcaatttcagtttcgattctagaaatgaaataaactgattaattgtcaaaacccaattcccagatttttcttaatccccagattaaaattgtcaaaaacaaaaaattggggttttcataaaaatgataaatttcttaaaagatgaaaactttatgtgtttttttcttttgggtaacagatgaagaagaagcaatgttactgctaaaggaagaagatgaaggaacaagaagaactagtgttcctacacaactcatgaaactaaaacgaacccattggtggattcttgtctttataagtatcttcttcctcatctctgctcaagccattgctgttcttcttggtcggttttattacaacgaaggtggaaacagtaaatggatctctactcttgtccaaacttgtggttttccgattctctatctccctctttgtttccttcctgcttcacactcttcttcatcttcttgttctttcaagactctggtttggatttatctttctcttggttttgctattggtttagacaatcttttatactcttttggtcttttgtatctctctgcttcaacttattcgattctttgttcttcacagttagctttcaatggtgtcttctcttattacatcaattctcagaaaatcacttgtttgattctcttctctgtgttgtttctctctgtctctgctgtgttggtttctcttgacgatgattccaatagcccatcaggagattctaagtggagttacttgattggttgtttatgtactgtttttgcttctcttatctattctcttcagctctctcttatgcagttttctttcgagaatgttctcaagagtgagacgttctctatggttctcgagatgcaaatctatacgtcgcttgtggcttcttgtgttgcggttatcgggttgtttgcgagcggggaatggatgttgttgagtgtggagatggaagagtttcacgagggtcaagtcatttatgttttgactttggttgggaccgcggtttcgtggcaattgggttctgtaggagccgtggcgcttatatttctggtttcttcgctgttttcgaaccttattggtacgctctcactcattgttacccctctcgcggccattgcggtgttccacgacaagctgactgaggttaagatggtggcgatgcccatagccttcacaggattcacgttttatatctaccagaactatcttgatgacttgaaagtacaaagagcacgagaagctcaggccgaatgatttattaaactctattaaaaaagctctaaagattgacattgagtaatatttctcggttgcatgtctccaaaatatacttaaatttgtcgttacgtaatacagttcaatctttgtgcactgtctaaaggaacctatactgttcaataacttatgaatttataacttacaaattgtggtctaccaactcatttgcttctctgcacattctttacgaagtctttttgttcaatacactgtctggaataaacactattcaattagtcattcttcattttcactaacaaaacaacctcacagcttcacgaaaccctcgcttcgcaaagacagtgtaaactgctactacaccatcattctctgtaagttgaagaagcatcatcagagaatcctcaacactatgatcagttacgctatggtgtcacctaattatgaaactccatcttctttcattttcctaaacaacacataagcttcctgtagtaggcgtttactacacaatcctgagatcattgtagtgtatgttacaacatcaggcttaatgctgaggctacaaaataaatcccacgcttctcccaccttgccagccttgcacatcccttcaatcatagtattatatataacaatattaagttccatttcactcttttgcagatacttgaatatgaccaatgctgtatctagcttcccataactacaaagtccatgcaacaaaatgctgtatgtcataatatctgtaggcacacgattagaacccatctgtttgaataccatttgggcagaatcacagtcgccagcttgaaaaaacccttggataatagtggtgtaagtgactgtgttgccaactaatcccctttgagacatctcgcggaagagttccacaccatcctcaacccttttacacttacaaaatcaatttataagcgtattataagtctgtatatttggaagacagtccttgctaaccatgaacttaaacatctgcttggcctcgtctaggcgattgtgcatgcaaaacccattgatcaataaattgtaagtgatagtatctggatctatagacctttggatcatctcctcgtgcaatttttcagcctctacaagcttcccctctttaaaaaacgcatcgatcaatgcattgaaagtaacaacattggggttgattttcttctcaagcatatcactcagtagtcgagaggcatcactccatcttccgtaattacaaaggcaattaatgagggaattgtaggtgacaacattaggtctaattcccttggtttccatttcagtgaataagtcaacagaaacttccaaatgtctatatttgcagagactatcgatgattgtgttagga

SEQ ID NO: 138793 - DNA, 3146 bp, Arabidopsis thaliana landsberg
  unsure (1)..(3146): unsure at all n locations
gtcaataaaaatctcttacaaccacaacaacttctcagattcttcttcgctttgttgttcgttctcttcttcaagctctctgtctctccaaatgggcgacaccggtagacacaaatggttctccttccaccaccaccgttcagcctccgccacaactatgccacaacacaacagccccggcgaaactccaacagagttcctctgtcccatcaccggctttttgatgtcagaccccgtcgtcgtcgcttctggtcaaacatttgaacgtatctccgtccaagtttgccggaatctcagttttgctccaaagcttcacgacggaactcaaccagatttatccaccgtaatcccaaatctcgccatgaaatcaacaattttaagctggtgcgatcggaacaaaatggaacatcctcgtcctcctgattacgcttacgtcgaaggtgttgttcgtacccgaatggattcacttcctccgggttcgggtcatcggatcgctaaatccgaaatcttaccaccggtggctgagaattcaaattcaaattcagattacgattccgtgatgggagcgattcgatctcgttcaaggacttcattatcgtcaactacttctcttccacttcaccaaacccgacccattaatcactcgacccggatccaaagctcattctctacatcggattattcatcttttcctccgatgtcaccggaagaagaagagatctacaacaaattgacaagtgttgacacaatcgatcacgagcaaggtctgattcagctaaggaagacgacgagatcaaacgagaccacgagaatctctctttgtactgatcggattctctcattactccgatctctgatcgtttcacggtacaacatcgtgcaaacaaacgccgccgcgtcgattgttaatctctcgttagagaaacctaacaaattgaaaatcgtacggtcaggattcgttcctttgttgattgatgttttgaaatcgggatcaacggaggcgcaagagcatgtaatcggagctttgtttagtttagcggttgaagaagagaacaagatggtgatcggagttcttggtgcggtggagccgcttcttcacgcgcttcgttcatcggagagtgagagagctcgtcaagacgcggcgcttgcgctttatcatttgtcgttgattccgaataaccgaagtaggctggttaaagccggtgcagtgccgatgatgctgtctatgatcagatccggtgaatcggcgagcaggattcttttattactgtgtaatctggcggcttgttcggaaggaaaaggtgcgatgcttgacgggaatgcggtgtcgatactggttgggaaattgcgagaaagtggaggagctgagtcagacgcggcggcgcgtgagaattgcgtcggggctttgttgacgttgagtgtagggaatatgaggtttagaggattggcgagtgaggcgggtgcggaggagattttgacggaaattgtggagagcgagagcggaagcgggcggttgaaggagaaagcttcaaagattctacagacattgagaggcggagggagtgaattcggtgaaggagcggaggcgcgtgagtggaaccgtatgttggaagcgagtgggctaagtcgttctcagtttcaacaaggagggcaaaaagggggttttgcttattcctctcagttttagctctattcaatttttttattttcattttcttatctcttttcttgttggtaaatttttttctcaaatatttgtttttttttcactcttttttgtgactaatattttgggagtgaatttgtaatatctgattttaatcttctttaatttgtcatttctaatgaaacgacaaacagtaaaatgttgattatttcgtttgtaaagagttgctcttgtttaatttgtgaaaacgttagacaaacaaaagtcgtctcgtggagagttactctgtttggtgtaccgtcttcagatcttttgattaaagtacgtaatataagatttggaacgaagatttagtcgttggtcaaataattctaaggtcaacgtttcaaagtgtaccaagttggaatattctacaattattttgcctgaagtcatgtaatccaatcgccaatttgccattcgtcatgcaaacacgtcatgggtacatagccacacatactctatggaccctatttatatgttacgagaatagctggacgtgttgaatcttctttctgctagagaattaaccacgagcgaattacactagtgttagacagtgtctggtacaaccgtacaagtgacaacattccactattaattagaaattaaactcttgttgcatggtaagaaacaatttgtttttaggttaacttttcaggagttatggactgagaggcccatacatctctccatggatatgaaacaatttttgatcttttgcttgatgccttaacatgccagaaataaaaatgctaggtgacattttctttcttttttatttttattatgctagatgacattatcattgaggcataaccgttgtattggtttagtattgccgttgttgcttctcctgaactcagggactttaattttattgaaccggcccctggattgaataaaaaaataaaattttgcacccaaaacccaaaacaaaaaaaaaaggaaccggatctaatttataccgagaatttagtcaaccggcccagatttcactaaattttgtgggtaagaaataaatcacttcaaaacaagaagagtaaaccgatctgaatattgcaccggtcagtcgttttcctacgagatgagtaaagcccaaaaacggaaacgcctaaacaaatacgacggcgaatcaaaaactccggccaataaatcaaccgtcgacggcggcaatccttaccctacactacttagacctactgctgaagaatgccgagacgtaagggatgctttgttgtctctccatggattccctcccgaattcgctaattaccgccgtcaaagacttcgatcattctccgncgtcgatgatcacgatacacagtgtaatctgaaatctgagacattgaatgaaacggaagaggagagtgtacttgatgggcttggtaagattcttctctcgcagaatacaactgagagcaattcccaaagggctttt

SEQ ID NO: 138794 - DNA, 1343 bp, Arabidopsis thaliana landsberg
caacaaacacaagagatagtaatggacaaaagaaaataaataaaacgaaaaacagcaaatatccaacggtaacgagaacaataaaaccataaccagtaatcaaaaattatcccgataggtctgctacgcacatgggatatacgataataacgacatcgttctttcttgatagatctgtatttttgtcattaaggttcatcgtatacgggcaaagagatcgttactatttactatatcagaaaaagtatactattattatcggtgggtggatcgattagacagtaagacaaacatgatacaatattcaatactacttcattatacgttttctctctccaattattattgacaatcatgattcgatttagctaaaccaatccggtcttctaaaaccattgatgattttatactcaacggatagaattggttctcaacttcgatttctcatctactatacttaccaaatcattaaaaaatgacaaatttacaactaagagctaaaaattgagttaacctaaaaatcctacaaaattatatatatacatatatgcgactacattatagtgataaaatgatctatcacttaattatgtttagttttgaaaatgtattctcttatttacgataaaacaagttgttaatcactgatatgtgtgttactgatcaaatatttttgctattttctttcacttaaacgtttctgctatttgactactaaaatgttattccttcatttgaatattagctactaatcattatttatactaataataatcgaataattatgatcccctccgcaagatatttaattagatactacttaatttataattattgttatctctctctctcgctttatatagttccatcgtggtcattcctcacctaaacaactctgcttcactctctatctttcttaagtaaacaaatctttagagagagtggaaaaaatgaattcgaagatcatcgaagctttcttcatcgttgctctcttcactacctcatgcctcgctcaagctccagctccttctccaaccaccaccgtcactcctcctcccgttgccactccaccacccgccgcaactcccgctccgaccaccactccaccacctgccgtctcccctgcccccacctcttctcctccgtcttcagctccttctccgtcgtctgatgcccctaccgcttctccacctgcaccggaaggtcccggagttagccccggcgaactagccccgacaccttccgatgcttccgctcctccacctaacgccgctttaaccaacaaagctttcgtcgtcggttcacttgtcgccgcgattatttacgccgtcgtgttggcttag

SEQ ID NO: 138795 - DNA, 467 bp, Arabidopsis thaliana landsberg
tcgtatcgccggcgagacattcaaatcgactccggcaatatcacacactccctctccgatacagatttccggcaattacctggccctgagccataaatggcgtctcgagtgtttccctcgagctcgtgtggccattaccggtacgtgttatagacaaatcctgtaactatcctttaatctctcgagctttgtatatatagcgtttcgttgtttgttctattcctgtttgaatatgcgactgtaacaaaattcatgaaaattgagcttttgtatataaattcctactctatgttctgtcattgatctgtctcatttctcttggaatttgtactcttgttgttgttctgttgcctcttccagtagaataagcttgctggaatctgatgttgaagaagagccgctaagtattgtttgaaaccatcgagcagaagctttaggtatccttgtgagattgttcttgtagtcaa

SEQ ID NO: 138796 - DNA, 4918 bp, Arabidopsis thaliana landsberg
atggagcttgcaaggattgcagcaaagcacttagcagagctcgaacctgagaactcagggaatggtttgcttctgaccagtttatatgccaatgctggtagttgggaaagtgttgtaagaatgaagaagatgataaagaagaagaggtttagaaggtttctaggcagcagctgggtagaaactgtttgatcctaagactcattctggttttgatcatcaaaaccgacttagattttgaaaaaaaaagatgaatcagtcacatgcgcctcgaggtcaagtgtcaccaagcagctaaactgattccaataaggccagtttggtttctgtttggattgttacaagcctgacgctgggtcctggacttatattaaattaagtacataatttgaagcttgttgaggcctgtgaggctatgcaaatgaaatcggacttgtttgatcaagtagtggtttctattttatttggatatggaaatctatgttaaaaaaagaaaaccatattagtattaactaagaatagaaagaaagccaaaagaaaaaaggaaaggatgagaatgagatagacatgattagacaatgacaaaaggaagcctttatatgggcaagtcacggcatttgtcatttcccgaagctaatcttcttcggtttctttgtctaattttgtaacccacgtgtttggtcttttgctgctcctttcacacaatgttgagagctttccccaacctcataattctttccattaagagataatatatatatatatatatatatatatatatatatatatatatatatatatataatgtcgatgagaccaatgaaatagttaacctatctctcacgtgtctatatatcagataagcagccttatgtctctttgagctttttccatttcatatattgagaatgagagagaattaagaaaaagagagagaaaacaatggaggaaaagcaagtgaaggagacaaggatagtgttggttccagttccagctcaaggtcatgtaactccgatgatgcaactaggaaaagctcttcactcaaagggtttctccatcactgttgttctgacacagtctaatcgagttagctcttccaaagacttctctgatttccatttcctcaccatcccaggcagcttaactgagtctgatctccaaaacctaggaccacaaaagtttgtgctcaagctcaatcaaatctgtgaggcaagcttcaagcagtgtataggtcaactattgcatgaacaatgtaataatgatattgcttgtgtcgtctacgatgagtacatgtacttctctcatgctgcagtaaaagagtttcaacttcctagtgtcgtctttagcacgacaagtgctactgcttttgtctgtcgctctgttttgtctagagtcaacgcagagtcgttcttgatcgacatgaaaggtattcaagattctagcttgttttatcttaattcaaaatcctatttatagaaactaatccaaatgatcgatgttatcttttcagatcctgaaacacaagacaaagtatttccagggttgcatcctctgaggtacaaggatctaccaacttcagttttgggccaatagagagtacgcccaaggttgacagtgagtctgtgaacactggaacagcttccgctgttatcatcaactcagcaagctgtttagagagctcatctttggcaaggttgcaacaacaactgcaagttccggtgtatcctataggcccacttcatattacagcttcagcgccttctagtttactagaagaagacaggagttgcgttgagtggttgaacaagcaaaaatcaaattcagttatttacataagcttgggaagcttggctctaatggacaccaaagacatgttggagatggcttggggattaagtaatagcaaccaacctttcttatgggtggtcagaccgggctctattccggggtcagaatggacagagtccttaccagaggaattcattaagatggtctccgaaagagggtatattgtgaaatgggctccgcagatggaagtacttggacatcctgcagtgggaggattctggagccactgtggatggaactcaacgcttgaaagcattgtggaaggagttccaatgatatgcaggccctttcatggcgagcaaaagttaaacgcactgtgtttagagagtatttggagaatagggtttcaggtgcaaggtacggtagagaggggaggggtcgagagagctgtgaagaggttgatagtggatgaagaaggtgcagacatgagagagagagcccttgttttaaaagagaatcttaaagcctctgtaagaaatggaggctcctcatacaacgcattggaggagatcgttaacctcatgtagcagttcttaaaagaacataatgaacttcatgtatcataaaagaacattgatttttattgaccctacaaagtttacaatgttcgaatttataatttatagacccgtttggagcatcatgccaaaggaaaattttaaaaagattagaatttcgaggcttaccactaactcctcccaaagactctttgcctttcatagtgtagaggctttcatagtgtagaggcacaagcttcccagttcttgaatatgtttaaagaaatcccctgtcaacaccgaaatacagttttagcaaaaggattcacaaacacaaatttctcgcgctttatgagagcacgatctaaatagcgaaggaatctatgagtataaagaagatatatccaaaggttgcatgtgctattgctatttgaacataaaaatacggtataaatacagaattaagtctcaaatgttgacaaacatatagcagagaataataacacagcaatacagcagatggtattcattcttacttctcaaatgctcttcctaagcatttgttggaaagattattgaaagattattgctttttaaaaatgagttatactaaatctttgaatataaagaagatagaggtttgcatctactgattgctatttgaacatcccttagaaactcactaacagactaataaattgtgctatgtataattatactgacctgatttacagagtacgtatttggtttatgaaaatcaaaatcaaatacgattatctcttttggcattttactcaggatagaattgatgcagcagaaaaagacaatttttttggtatggaccatcttttgatatgaagccaaagtcggcaaaagaaccaagaagacaaaaccatctttgcttttttttttttggttatcaagatagagagatataccaatgtcaataagtaaagagagccaagaaaaacgaaatacagatgaaacaatgtccacaagtctgagaatctgatatttatctcagaaacatactcattttaatattctcatagatcggtcacagggaagaaaagaaattggaggaccaaattcggaaagcacgaggcagagcagttcttgtaaattttcgaaatggaggaaaagccggcgggcagaagagtagtgttggttgcagttccagctcaaggacatatctctccaataatgcaacttgcaaaaacacttcacttgaagggtttctcaatcacaatcgctcagacaaagttcaattactttagcccttcagatgacttcactgattttcagtttgtcaccattccagaaagcttaccagagtctgattttgaggatctcgggccaatagagtttctgcataagctcaacaaagagtgtcaggtgagcttcaaagactgtttgggccagttgttgctgcaacaaggtaatgagatagcctgtgttgtctacgacgagttcatgtactttgctgaagctgcagccaaagagtttaagcttccaaacgtcattttcagcaccacaagtgccacggcttttgtttgccgctctgcattcgacaaactttatgcaaacagtatcctgactcccttgaaaggtactcttgaattctctgtcttctattcttgctggtttctataatctgtaacagcattgttcttgaccttttttgcagaaactaaaggacaacaagaagagctagttccggagttttatcccttgagatataaagactttccagtttcacggtttgcatcattagagagcataatggaggtgtataggaatacagttgacaaacggacagcttcctcagtgataatcaacactgcgagctgtctagagagctcatctctgtcttttctgcaacaacaacagctacaaattccagtgtatcctataggccctcttcacatggtggcctcagctcctacaagtctgcttgaagagaacaagagctgcatcgaatggttgaacaaacaaaaggtaaactcggtgatatacataagcatgggaagcatagctttaatggaaatcaacgagataatggaagtcgcttcaggattggctgctagcaaccaacacttcttatgggtgatccgaccagggtcaatacctggttccgagtggatagagtccatgcctgaagagtttagaagacgggtttggaccgaggttacattgtgaaatgggcaccacagatagaagttctcagacatcctgcagtgggagggttttggagtcactgcggatggaactcgaccctagagagcatcggggaaggagttccgatgatctgtaggccttttacgggagatcagaaagtcaatgcgaggtacttagagagagtttggagaattggggttcaattggaaggagagctggataaaggaacagtggagagagctgtagagagattgattatggatgaagaaggagcagaaatgaggaagagagttatcaacttgaaagagaagcttcaagcctctgtcaagagtagaggttcctcattcagctcaatagacaactttgtcaattccttaaaaatgatgaatttcatgtag

SEQ ID NO: 138797 - DNA, 4621 bp, Arabidopsis thaliana landsberg
atgacgaatctgtttctagggtttttggtgatttcgttttgcttacttgggaatttgattcacgcagctgacggctcgattcacgactacaacaacagcggaggcttcaccaaaatcgccaatgctcgctacttcgttggtggttctgaaggaatctatggttctgagtttctggatgttcatcatgcttcttctgatacacctctgctcaagggaaactccttcatcaggtacgcatttcgttttctcttgtgactctgttcatttcctactgagttagggttttatgtgcgattttatagtgtgagcttgtagatttgggttttaccgcttcttaggtactggatttagcactttggtgtaaagtttccaaggaaattttaagagatatatgtatatgagcttatagatttgtattactgtttcttattggattttactatttgcatttctatggggatttttggtttcttatggatgttcatcttttatgtttttgtaggtttgatgatatcactttcgtaagaaccaaggaatctgctagcaagcagaattctactctggcagctgcaggcttggtggaagcgatactgtttgaggtgaagcagcgagatagagttggtggatcttttttcaaatctgaggacatgtgctgtacgccaaaagttgcggatgctggttcctgcaatcttggagaggttatgattagtgcagatcctaatgatcctgaatggcctaagcggattcccacttttttcaaaaggggtgaggaagaagtgaagatgtctccggaagctgtcattatcaagaaaactggattgtacactgtttacttcatgacatgtgatccggaattggatggcgcaacaatcagaggaagaacagtttggaagaacagaggtggctatttacagggagagaaagctcctttgaagaagttctacgcctccatgcttttggcttacgtggttcttggcctagtttggtttccacaagttgctcagtattggaaagatggaatccagttgcatagtcatatcaactttgtaattgcatttaccatgggtgaattggccttcctctaccttgacttcgtttatctcgactcagctggtacaagtcctatggaggttacagtatgggcaataaccctttcttccatgaggaaggcactctcccggcttctactgttggtcatatcttcagggtttgggatagtgagacctaccctaggtggcataacattgaagatgcttcttattggtgtcttatgctttgttataagtgaatccctcgggttggctatgcaatttgggaacatctctgaaaatggaatgaattacttaatgctctcttgggctatactggaaacttgctttatccagtggattttcagatccttgtcgaaaacgcttaagaagctcaaggtaagagaaacatacaatcctccttttcttttgattattgatataacaggttaggcacactgattgctacatgtttctaacatatcacttgtaaatatatctttcttgttaattgttgaaagttgcagaatagccatttataaagatccatttcttcttagattattcatccctgctaatcccatatttttcttatgtagctgaataagaggaacattactaagctgcagctctacaagatgtttgcaactgtgcttgtaatcatggttgtgctcagttttgcctggatttatgtggaggtaacatctcaacagtctagtgataactctggggaatcacttgaaaaaagtcatatgattgtgtgactgaaattgttttctgaatcaggtatatctctacagctccttgagtcagttttggaaagtgaagtggattgttccaacactttggtacatcctttcttatgcaatgttggtactgatttgcctcttttggcctccatcggaaaaaccaatgaggtatggtatcaatctttctgtacttgccctttatcaatcgggtgcttatgtggcctgttttaagttccacactaagatcttgtgtgttttgtactaacatgtttgaactttgtatatctgatcttctctgctgctagttacacatttttctgatgtatatatactggtttgaaattgcaggtacctatacgtagctgacatggaggaagagactgaagaagaagatgatctctccactgcagaaaccggtatgaacgcaacaaaggctgaatacgagaggagtgaaaggaagaccctgctggaagcattcatcctattgcttgggaatataccaggggagaagtgaaactccccatcttacaaagttaccgtccttttagcttaagctgcctacttctcatcctttttcagcttaagctactcctaatcatccttttaaacctacggctttaagtttttttttaactcatataatcttctgcagtagacttgacttaatcggattttctgtttcatgaacttgttggtagtgtggaacaaatgggaaaatgaatatttttggaacaaattgattttctgtttcatattaagttaaatcattctgtttccactgaaataaattgttttccaaaaatcactccgtttattatgtttttgtttttaagaaataaaactgagaaaacagaataacgcgaaaatgtcgacatatttggctaagtatagacaagattgggaagctctgtttagttatgcgtcagtctctcatcagtgttcaactgccacggagcgaaccgattcctaattgcaacgtcccgagtccatagaatgtcgacactctttcactctttctccaagttgcctcctttgagtcctttctcatattttatagactcactttctgtttcttgatcccgaggaagaagaagaataaactcttgttcccatgatcttcgtcgatgttagtaccttgagattcgattcgtctctccgattctttataatcggaatttattggtttgtggaatctgattttgggttctcttctattgctcttataggttctttggaaattgtttcctctatactcgtttggatcaggaagagactctctctcaggtatttcatcgaacacttaccctacaatttagtgaaatttctgtgtgatgtagaattctctagattcttctaatcgagttttagctgagaaaattagtgaaatgaaatgagattttccattgattgctagattccaaaactttagcttgttgttctgaattgcacttatttgttgtgttgtatggaccatggaaacatccaaaagagtccattttgcagatcattcccgagacaatggcttcttctaccactaaaatcctctgtgatgctggcgaatcagacctctgtagagacgattctgctgcatttctccttaagtttgtagccattgcctccattctactagctggagctgctggtgtagccatacctctcattggcaggaaccgccggtttcttcaaaccgagggaaatctctttgtagctgctaaagcctttgcagctggtgtcatactcgccaccggctttgtccatatgcttgcaggtggcacagaagctctgagtaatccgtgtttaccggattttccgtggtctaagtttccctttcccgggttctttgcaatggttgctgctttagctactctgcttgttgatttcatggggacacagtactatgagaggaagcaagagaggaatcaggctgctactgaagccgctgctggtagtgaagagattgctgttgttcctgtggttggggaaagagtgaccgataataaagtgtttggtgaagaagacggtggcgggattcacattgtcggcattcgtgcacatgctgctcaccataggcatagtcactctaatagtcatggtacatgtgatggacatgctcatggacattcacacggacatatgcacgggaattcagatgttgaaaatggagctaggcatgttgttgtttctcaggtttaaatctcttatcccttgtcacaaactgtgatacatatatcaaagtagaagctagtgtgtgtgtgttgattacgcctacaaacactttagaacctcaaaagctagcttctttaagtcctttactagtcctcctcctttgcagtgtgggatttatacatcatcttatcgattatctcacccaatttattgattttgcagatattggagctcgggattgtgtcgcactcaatcatcatcggtttatccctgggggtatcacagtctccatgcacgatcaggcctcttattgcagctctgtcatttcaccagttctttgaaggatttgcgctcggaggctgcatctctcaggcacagttcaggaacaaatcagcgaccataatggcttgcttctttgcgctaaccacaccattagggatcgggattggaaccgcagtggcctcatctttcaactcgcatagccctggagctttggtcactgaggggatactggactcgctgtcagctggaatactggtgtacatggctctggtggacctcatcgcagctgattttctgagtaagaggatgagttgtaatttgaggcttcaagttgtgtcttatgtaatgttgttccttggagctggacttatgtctgctctcgccatttgggcttag

SEQ ID NO: 138798 - DNA, 572 bp, Arabidopsis thaliana landsberg
gattggcaaagattctcaaaaagtatgacaaaagaaccggtgctttaatccgtttaccatttatccaaaaggttttgcaagaacctttcttcacaactgacctactcaacacatttgtgaaagagtgcgaggctatgctggaccgcctatttccgtctaacaaaagtcggaatctggatgaagaaggagagccgacaacttctggaatggtcaagacaggaacggacgattctgaacttttagagtaccaaaagaactgtctgagattgagtacatggagagcttgtatatgaagagcactgtgtcggcattaaaagtattaaaggaaatccgcagtggtagctcaacagttagcgtcttctcgttgccaccgttaccggcaagtggattagaagatgattcatggaagaagaaagttggtgtccttgaacaagtagcgaaatgaattatgagtattattatttttaaatctctctttttttttgtactttctttaaatagtacaagtaattgtatacgcttacagctgtaaaagatgaatcaaataaaacatagaagtgtgatcatctttc

SEQ ID NO: 138799 - DNA, 251 bp, Arabidopsis thaliana landsberg
tgaacaagaacgatatagagtcatcgaagctcgctttcgtttcatcagctggtgcatttgagaaatggactactttgacaggtcttttggaacagcttaagggactgtgataggctggctacaaattctttactctttttttgtattttccaacagatttgtcaaagagggtcttttttttctccaaataatcctttgaataatcatcattcactttcttaacttctttggttattatttacctttataca

SEQ ID NO: 138800 - DNA, 1099 bp, Arabidopsis thaliana landsberg
ggtagtcagtgtttttgtttcgaactcttccaacatgcagaaggaaattgctggtgatgctccatcagcaccaaccactcgtgttcggcatcggaagcgaaacagcgatgtatgtttgccattattcaatattttagctgtcaaattaaatcggaattcacattgtttttggcttagttaagttgcttttgttgtataaggatttatttggtccttttctacttatgtgatgtagaagctattctaagagtacataagctacttatttgcttcattttggttgtaaattcaatcaaatttctggctttttaggttggtgcaggggcaggcaaaccaaatggaaaccatttacttgtcaatgacagcaaaaaatacaaatcgtttctcattcgagcatactccactttctggatgataggtggttttgctcttatagtttacctgggtcatctctacattacagccatggtggttgttattcagatatacatggcacgagaactttttaatttgctgagaaaaactcatgaagataaacagctccctggttttagattactgaattggtaattatactgtctcacttctctcaacattctgagttattttttgttttgcttttatgtgaattatgctgaaatggtatcatattcttagtacttttctatttgttgaaacgattttgcatttgactactgattttgtttctgcaggcacttcttttttacagcaatgctctttgtatatggtcgaatacttagtcaacggctagtcaacactgtgactccagacaaagtcctatatcgactggtcacaagcctcatcaaataccacatggcaatctgttactccttgtatatttctggttagttgttatatgaccttttgggtttactgattactgtgaggagagcaatgatttttgttcactagttttacttaacataatctctcctttttttgctgtggaattgtaggctttgtttggtttattctcacgctgaaaaagaagatgtacaaatatcagtttagccaatatgcatggacacatatgatattaattgtggtgtttactcagtcctcattcactgtcgccaac

SEQ ID NO: 138801 - DNA, 373 bp, Arabidopsis thaliana landsberg
caccgcctccgtcggagtcttgtctccgcagcttgagcctcagatcgcggttaagtcaactaagcgagccagcatcgttggcgtgggactacaatgctatttcaaggagatctcacaaatgccggcttggtctaagcttgaattctgtaagttctctgctagttgggctggtcaagactgcgattgcaaggaaaagatcgatgaagacgaagacaaagtcttagcactaactaatggttttggagattcatcctctttcaatggaagcagtggacgtagtcttgagatcgaagaggattttgatagattagcaatcagagagaacgaagaacaacttagctctaatggcggaggagggggagtaggaagaggc

SEQ ID NO: 138802 - DNA, 853 bp, Arabidopsis thaliana landsberg
gatttagagacacttaactatgatgatctcgataatgtttctaagctgcagaagagtcagagatatgctgatattatgcataaagtagaggaggctcttgggaaagattctgatggagctgagaaaggaactgtcttggaagatgatcctgagtataagcttattgtggattgtaatcagctttcggtcgatattgagaatgaaatcgttattgtccacaactttatcaaagacaagtacaagcttaagtttcaagagcttgagtcgttggttcatcaccctattgactatgcatgtgttgtgaagaagattgggaatgagacggatttggctcttgttgatctcgctgaccttcttccttcagctattatcatggttgtttcagttactgctttaactacgaaagggagtgcactgccagaggatgttttgcaaaaggtgttagaggcttgtgatcgggctttagatcttgattccgcaaggaagaaggtccttgagtttgttgaaagtaagatgggatctattgcacctaatctttctgctattgttgggagtgctgttgcagccaaactcatggggactgctggaggtttgtcagcacttgctaaaatgcctgcgtgtaatgttcaagttcttggccacaagaggaagaaccttgctgggttttcttctgcaacgtctcagtcccgtgtgggttatctggagcagacagagatttaccaaagcacgcctcctggacttcaggctcgcgctggcaggctcgtggctgcaaaatcaactttggcagcaagagttgatgctactagaggggatccgttagggataagtggaaaagctttcagggaggagatcc

SEQ ID NO: 138803 - DNA, 149 bp, Arabidopsis thaliana landsberg
gctacacagaatccgatcctgtgaaaattgctgttgagggagttgataggttcaagaaagaaaagtgtgatcttattattgttgacaccagtggtcgccataaacaagcagcttctctctttgaagaaatgcgtcaatcatatgactaa

SEQ ID NO: 138804 - DNA, 1747 bp, Arabidopsis thaliana landsberg
  unsure (1)..(1747): unsure at all n locations
tctcctctgctagtacttgtcgaccttctctcatatgctcttgtctncaaaagcaaatcctcccaagaaactactcaggtgcgtctccttccattgattagggatgaagttttattttttcgctagttttgacggagattctaattccaagtccggtgctttatagattgaacagttggggaatggagaagggttctcagttttggcatcagagattccatgggaggatgataacatatggagcacatttgctctttacatgttctctctgcatattcctctcagttttgggggtttatccattgttgccaacatactccaccggcaggttcttgatcctcagacccaagtgagtctcctttcattttgtctggaaggtttacatttactattaagaggagactgttggatatgtagttgaattgtacacttcagagataagcaaagggcagaagattttacttgcagtttgcaatttagttttcttcctatgtgagatgcaatttcgttacggttcatgagtgatgatctgtatgctttagattctgcaaagttgatttttagtgttgaatttcatggtgtggttacaatatacaggtgctatcacttgtggttctccaaatggtagaacttgcagggacagtcttgctgctgaggaccacagcgaagcctcagtgcaaatcaatcaactttctaaagggtaataacgaaacaagggaaggaagaaactgggtggttggctcagcattgggtttgggatgtcttgtgggctttatcttcgtcacgtcgcttgtagctgatcaactctttggccctaaggtcaccccaatcgatctactacaccattctctgctaagatgattatcattttaacatgttgtttgatctcaggctgtacatgaatcagaattggagaagataatggtgagcggggaagtggcgagaagcggatgttttgctctctactgcgtagtagctcccatccttgaggagatagtgtacagacgctttctcctgacctccttagcgtcgagaatggaatggtggaaggcactagtgatcagctcaggagtatttgctgcaggtcacttctcaggtgaggattttgtgcagctgtttgggataggttgcggtctcgggttatgttacagctggtcagggaacttagcctcatcagtgctcgtccactccttgtacaatgcattgacacttctcttctcttagccacgttcagatgacaaggaaaatttccccaccgaactctctttgttaaagacaagacaacgtataaactataaaccactacacttgttccaagcattgttcaaacgatcaaagaagatgggcaacaaagggcaagcatgatgaagatgatgattaaagatccaattcttaaattttggaagccgtccttcaccttcacatcctctctatggttgatatataagagcttttctcctataactcactaggtccataccaagatatttttgcctgcacatcgagcttttcttacaacaataatcgaagaatttaaaccaaacgacttcgtcagtgctcgtccactccttgtacaatggcttgacacttgtccttacgctactcttttagccacgccgtaacagagaaggaaaatggttccaacgaatctttcgttgtcaagacaagacagcgaataaatagagtgtaaaacatagatgatctgttccttaaagctttagagaaagagtcgtctttatgaaagaaa

SEQ ID NO: 138805 - DNA, 425 bp, Arabidopsis thaliana landsberg
caataattattcttctctttatctctcttttcctcttaaccatccactaatcaaacactaaaacctagaaaaaaaaaggatcaaatcatggagacggaagaagagatgaaggaaagtagtataagcatggtggaggcaaagttgcctccgggattcagatttcacccgaaggacgatgagcttgtctgcgattacttgatgagacgatcgcttcacaataatcatcgaccacctcttgtcctgatccaagtcgatctcaacaagtgtgagccttgggacatcccaagtacgttttcattcattcttgacaacagtatctttattgatccatatatctctgttttactttgatatggttggtccatatagaagattatgtcatgatcttctttcgtgttcatggttttctagaaacaaaactttag

SEQ ID NO: 138806 - DNA, 5731 bp, Arabidopsis thaliana landsberg
ccctactactccgatacaaccaaaacccaaaattaatttattcccattatcaacccatatgtttatggggttttgatgatcaaccattttgcaacacttttagatttgcggaaaaaccaaagagttgaagtgaaagaacaaagatggctagcttgaaactgggttccaaatctgaagtctttcatcttagtggtcacacatggtcagtcttctttttcttcttcaatcgcttaaatcattcactaacaaaacaaaacgtttcatctccttttgtaatctgatcaggctttgcaagactggtcttaagcccgatgttatgatccaagtcgtagacgaaagcttccatctccataaggtaccaattctaatcgactcaaaactcttttgaatttctaaactcatacgttcactttttttaacttgtcctgttttcaacatcagtttcctttgttgtcaagaagtggatatctagaaactctgttcagcaaagcctctgagacaacttgtgttgctcagcttcatgacattcccggtggtcctgaaacattcttgcttgtagctaagttttgttacggtgtaagaattgaggtcaggcctgaaaacgctgtgagtctcagatgtgcagcagagtatctccaaatgagtgaaaactatggagatgcaaatctcatctatctcactgagagtttcctcaacgatcacgtattcgtaaactgggaagattccatcaaggccctggagaaatcatgcgaaccaaaagtgttgcctctcgctgaagagcttcacattgtttctaggtgcattggttctttagccatgaaggcttgtgcagaggacaacacaagttttttcaactggccaatctcactacctgaaggaaccactactactactatatattggaacggaatacaaacaaaggccacgagcgaaaactggtggttcaacgatgtatcatcgttcctagatttaccaatgtacaaaaggttcatcaaaactgttgaatccagaggcgtaaatgcgggtatcatagcagcatctgtcacacattacgccaaacggaatcttcctttacttggttgttctaggaaatctggttctccttcagaggaagggactaactatggagatgacatgtactattcacatgaagaacaacgaagtctccttgaggaaatcgtggaacttctcccgggcaaaaagtgcgttacatcgacaaaattcttgctcaggcttcttaggacatcaatggttctgcacgcgagtcaggtcactcaggagactctggagaagagaattggaatgcagctagacgaagctgctctagaggatttactaataccaaacatgaaatactcaggtgaaacactctatgatactgactctgtccagaggattcttgatcacttcatgttgacgtttgattcaagtattgttgaggagaagcaaatgatgggagattctcatcctcttaagtccatcacaaaggttgctagtctgatagacggctacttagcagaggtggcgtccgatgagaacttgaaactatcgaaatttcaagcacttggtgctctaatcccggaagacgtgagaccaatggatgacggtatctaccgtgcaatagatatatacataaaggtaaactacttaacctaaatcttcaatggtttcaaagttactatgagttgcttgcttcttaagtatcatattagtcttttagataatgcatgtatgatgtatctaatttggagctatatcaggctcatccatggctaacagagtcagagagagaacagttgtgcctgcttatgaattgtcagaaactgtcattggaggcatgcacacacgcagcacaaaacgagcgtctaccattgcgggtcatagtacaagtcctgttctttgaacagttacaactccggcacgcgatcgccgggacgttattagctgctcaatcgccgtctacgtcacagtcaacggagccaagaccgtcagcggcaataaggaatctaacgataacggaagaggacggtgatgaagcggaaggagaaagacaggtggacgctgggaaatggaagaagacggttagagagaatcaggtgcttcgcttggatatggatacgatgaggacacgagtgaaccagctagagaaagaatgcttgtacttgaagaaagtgatcgcgaagatcgacaaagaaagttcatcaccggcgacgacgactgatcggccgagaagttggtcgattaccaaaaaattcggatgtaaattcaagacacaggtctgcgattcacacgaagcaacgatggttgatcatagatcacgacggtcttgaattgttttcgattgattttactctttttagtacagaatcagaaagcatattgttgtgattcttggattttagtttttgttaatccttcgagattcttgctatgcgactgctctacacaaatgtgcatcgttttgagtcttgtactcgaattagtaaaaccagaaatgacatacggcccaaagcccatcgttaaacgtttcgaattgagcccttttctcgacttcctccgaatgggccgtaacaatgggcttcagttgcccttatctatcgtaaactgggcactgttttggagagaaattgtttcatatttgtggaatgtgcgccgttttaacgtaggaaaagagggacgaactactcgctgttcagaatcggtagtaggacttcatgtcgttttataaaggagagttcctaaaaacctaaaccctacttagttctgctatataaatcaaccggctttggctgagaagaagccattagcacaatcgagtaccgaatcaaacctaagtctctgtaaatttcctcgttttccgtagatttagttctttgtcatcccatcttattagggttattcgtttaatttcgtttgaatcagttgatactctctgattttctaatatgtgtttgaatcggcatattaatctttgatcgactcgattttgtgtttttagaaaataatttagatttttttagagaaggaaaaatattctcagtgatgaatacacagatgacgagtccgatgaaatccattcattaaatcatggggacaaacgaggcatttgtctgagaggattatttttcttcggttttaggcatttctaaaaatttcttaggtttataggaagcgtggtataaaggggaattttctcagttgatgaaggaccaatagatgacgagtccgatgaatcccattcattaaatcatggggacaaacgaggcatttgtctgagaggaatcctttttgttcaattagttttgttttaattagacttagcaggaagaagaaaggcatgatgaggattgttttattgtcatctgattcttattgatgaatctatacctcctactcattctgagtgccttctcttgctcttaattttcagtcacagatatcattgcattagtagtcactaaattcggattcaattatttgactctagggaacactacatttcaagtgaatctacagatactctaataatataacacaatctgctaagaccaagtgataaaccaattgaactaacaaaaaaaataagtttatgaaatcataactatttcttgatataaaaaaataacagcaaagatgccaagttcatataacataaggcctaaggagaaaccataacttgtaatttcaaactgtatactggaaagcagactgtgctcaatggttttggatgattccctgcatcctagtcctgaacttgaagcaaaacctctagtattggcattcttacatatgatgagttaatttctgagagggacgtacattctgattcaggctctaaaggatcgattaagatttttaatttatcaggaccaattcagaaaaaatttatatgatttctatctgtatacttagaacagaatccataaaagaaaaatgttgttgaagatcaattggacattggacaaaaacctagtgggccgggccttctttgcatctactacttgaaagcctttaaaaagaaaattaattgaaagttaaattttacattaagtgttagcatccaaggcccattagctcagttggttagaaagtcgtgctaataacgcgaaggtcgcaggttcgaaacctgcatgggccatttttcataatatctttttttttcttctgagtttcgtcgtaaataaacaatccgacgccgacggttttggggaccccccactaatcaatatcgtgtcccgctcacttaatccaaaatatgatcccctacatacctctttactctcttccggtgctcccaacaaccatacttcgtctcgatttccaccaggtgtttctacacttctctttattccacgtgtcatgatattggctcatagttactctcaattaccaaagactctcacacactagatcatacaataacacaacaatttaaatcaagcagtcaataatcagccaactagctttttaattttctctgcaattcctctgtcgttctcaccagttaacagctacagcacaaaactgtaaccacgcttccgatctctaaaacctgagagagagagagagacagagagacagagagacagagagaagtgtttcaatagtttggcgtgaagatggccggaggaggcggatacggcggcgcatcggggaaagttgattacgtcttcaaagttgttctaatcggagatgcagctagggggaaatagcaactacttgctcgattcgctagagacgaattcagtttggattctaaggccaccatcggcgttgagtttcagactcggacgcttgttatcgatcacaagagtgttaaggctcagatctgggataccgccggccaagaacggtaatctccgacctctcccggaacttttagctacttcaattgcttgaacttagatctcgtaagattttactgtttctctagatctggaagatgataggtctgcttaggatttcgaattctagtaaagcttactgatctgtatacgaaattcggaggatctgaagtaaaatggtagaatcattgagaatttgggattgggatttcaaaattatgtatagactagaattatgtatattactattccaatgttattaagcttctatagttttatgattggtacaaatttggaagcttttgttatacatttcccagtgatggttcatcatctttatacattcactgatctttaatgagtaagctaaccaccacttttcatgcttatcatatgcttacattgtatatctttctatatgtgtggttttggttgaaacagatacagagcagtatcaagtgcatattaccgaggagcggttggggcgatgttggtgtatgacataaccagacgccaaacctttgaccatatcccaagatggttagaagaactacgtgctcatgcagataagaacattgtgataatccttattgggaacaagtcagatcttgtggatcaacgagctataccgacagaagatgcgaaagaatttgcggagaaagaaggtttgttcttcttggagacatctgcatttaacgcaaccaatgttgagagcgctttctccacggttttgactgagatcttcaacattgtgaacaagaaaagtctggctgcgagtgaagatcaagagaatggtaatcccgggtcgcttgctggtaagaagattgatattgttccaggtcctggtcaagtgataccaaaaaagagtaacatgttgttgtaactct

SEQ ID NO: 138807 - DNA, 4883 bp, Arabidopsis thaliana landsberg
  unsure (1)..(4883): unsure at all n locations
atggcagacatcgtcaagcaaatcctagcgaagccgattcaactgtctgaccaggtggtcaaagccgccgatgaggctagttccttcaagcaagagtgcggcgaactcaaggctaagaccgagaagctcgccggtcttctccgtcaggctgcccgcgccagcaacgacctttacgagcgacccactcgccgtatcatcgacgacacggagcagatgcttgagaaggctctctcccttgtcttaaagtgccgagccaatggcctcatgaagcgagttttcaccatcatccccgccgccgcgttccggaagatgtctggtcagttggagaactctatcggagacgtttcctggctcctccgtgtctccgctccggcggaagaccgtggtgacgctggctaccttggtcttccaccaatcgccgccaacgaacccatcctttgcctgatctgggagcagattgccattctctacaccggatcgcttgaagaccgctccgatgccgccgcctcgctggtatctctggcccgtgacaacgatcgctacacgaagcttatcatagaggaaggaggtgtggtgcctctccttaaactgctcaaggaagggaagcccgaggggcaagagaacgcagcgcgtgcgttagggttactgggacgtgatcctgagagcgtggagcacatgattcacggcggcgcttgttccgtcttcggcaaagtcctcaaagaagggcctnnnnnnnnnnnnnnnnnnnnnnnnnnnnnnnnnnnngagcttgtgtccaatcaccccaagtgccaagacgtcttcgctcagcacaacgccattcggctactcgttggccacttggccttcgaaaccgtgcaagagcacagcaaatacgccattgccaccaacaacaaagctacttccattcaccacgccgtcgctctcgccaaggaaaatcctaattccacctccgccaccgccttgcccaagggtcttgatgaggatcagagctctattcctcatcctacagggaagcaaatgcccaatcagatgcacaatgtggtcgtcaacaccatggcggttagggcaaaccctccgaggaagtcgactagcaacggtgtgagccagagtaatggtgtgaagcaacctagcagtctacagcagcaccagaattcgacttcgagcgcatccaagactcgagagctggaagactcagccaccaagtgtcagattaaggcgatggccgcgagagcgctgtggaagctggcgaaaggcaattccaccatctgcaaaagcatcacagagtccagagctcttctctgcttcgctgttctgattgagaaaggcgacgaggaggtcagatacaactcagctatggcgttgatggagatcaccgccgttgcagagcaggacgctgacctgagacgttccgcgttcaagcccaattccccggcctgcaaggctgtggttgatcaagtgcttagaatcattgagatagcggattctgagctactcatcccctgcatcagaaccattgggaaccttgctagaacgttcagagcaaccgagacacggatgatcgggcctctggtgaagcttctggacgaacgagagcccgaagtgacaggggaagctgcggctgccctcacgaagttcgcctgcacggcgaattacttgcacaaagatcactcgaggggcattatagaagctggagggggcaaacatctggttcagttggcctactttggagagggtggcgtacagattccggcattagagctcctctgttacatagcactcaatgtcccagacagcgaacagctggccaaggacgaggttctggcagtgttggaatgggcttcgaagcagtcatgggtaacgcagctggagagcttagaagctttgttgcaggaggcaaagagaggactggacctttaccagcaaagaggatcaaggggttacaatttcaattgattcattatttcgattttgatttcgtgaccagcgaacgcagaataccttgttgtgtaatactttacccgtgtaaatcaaaaacaaaaaggcttttgagctttttgtagttgaatttctctggctgatcttttctgtacagattcatatatctgcagagacgatatcattgattatttgagcttcttttgaactatttcgtgtaatttgggatgagagctctatgtatgtgtgtaaactttgaagacaacaagaaaggtaacaagtgagggagggatgactccatgtcaaaatagatgtcataagaggcccatcaataagtgcttgagcccattagctagcccagtaactaccagattgtgagatggatgtgtgaacagttttttttttgatgtaggactgaaatgtgaacaacaggcgcatgaaaggctaaattaggacaatgataagcagaaataacttatcctctctaacacttggcctcacattgcccttcacacaatccacacacatccaatcgcaacctcatcatatatctcccgctaatctttttttctttgatctttttttttttgcttattatttttttgactttgatctcccatcagttcatcttcttcttcttcttctgatcaaccatggctgctgctataagtgctgcagtctctttaccttcctccaagtcatcctctctccccaccaaaatctcctctgtatcccctcaaaggattttcctcaagaaggtatcatttccatttccatttccatttcgtttatcatgttttaattaatcactaattgtaaagctggatcttgacatgcataattgctatttatctcgtgcacctgcatacagagcacagtgtgttacagaagagttgtgtcagtgaaggctcaggtgacaacagatactaccgaggcaccaccagttaaagtagtcaaggagtctaagaaacaggaagaagggattgttgtcaacaaattcaaacctaagaacccttacactggtcgctgccttttgaacaccaagatcaccggtgatgacgctcccggtgagacttggcacattgtcttcaccaccgaaggtaaatccttaattagggggcttttgattgtattttttagaggcatttttcgagtgagagatttgattaggttggttgatgacttaggtgaggttccgtatagagaaggacaatcgataggagtgattccagagggaatagacaagaacgggaagccgcacaagctcaggctttactctatcgccagtagtgccattggtgactttggagactccaagaccgtaagcaaataatccctctaacaactaactaaataatgatttacaaaatgatcttctcttatctggaaatggatccttttgcaggtttctctctgtgtcaagagactagtttacacaaatgatggcggagagattgttaagggggtctgctccaacttcttgtgtaagaaagaagaacaatgtgtctgtgatggatcgtttacggtttaaactgttcttagtgtttgtgatgttcgggtttttcaggtgacttgaagccgggtgatgaagctaagatcactggacctgttggcaaggaaatgcttatgccaaaagaccccaatgccaccatcatcatggtatggtcatatattggcgtgctcacttagattagagagcagaatttagtggtatatagtcaacacttgtagtgattacttctgcttttctgtttccttagcttggaacaggaactggaatagctccattcagatcatttttgtggaaaatgttctttgaggagcacgaggactacaaggtcaaaccaaaagcaaactctctagacactgttgttgccaattataccactgactaacttactcaccaattgaatttgccaatcatatgtgcagttcaatggtttggcgtggcttttcttgggtgtacccacaagcagctcactgctatacaaggaggtacacaagctgaaatcctacccacctttactaatgttgtcttgtacaaaaaagctgttgttgaattgtgtggataatggcaggagtttgagaagatgaaggagaagaacccagacaacttcaggctggactttgcggtgagcagagagcagacgaacgagaagggagagaaaatgtacattcagacaagaatggcagagtatgcagaagagctgtgggagttgctgaagaaagacaacacctttgtttacatgtgtggtcttaagggtatggagaagggtatcgatgacattatggtctcgcttgctgctaaagatggtaaggacattgatttcattatcatttgattttcagaagtctgtgccagatgtgtttattaaactgttttgtttggggtgggaacagggatcgattggttggagtacaagaagcaattgaagaggagtgaacagtggaatgttgaagtctactaaggaagcttctgagggagtaattatataatgtagataaaaagcttctgatgcattgtgaaatcttcatatctgcttcttttttctttctcaaggattttcaatcaaaacattcaaaagagagcatcaataccaccaaactactctttctcacttgttgttcatgttatatttcttgcaacaatatagtgagttttgtgaaatatgtttttctcatctccctttttgaagggctaaatcacttttcagtaaagtcatcaaccgaacgacccttttgagcgaggtatcacaacacattcttctttgcttcgttgggtggcaatttcctgatttttgcaacgaaaaggccgctggttgctgaggtggaaggatcaaaccgcagtgtcttaggcgtgcgaccacttctacacggccaatccttggccatttcaatctcttgtagctctgcatcgtcataacccagttttctgttagtcttcc

SEQ ID NO: 138808 - DNA, 586 bp, Arabidopsis thaliana landsberg
gatttttggttctcgagaaaaaagtgaagatttttgagattctctttcgatggattacgaacgaatcggaaagacccaggtgagaaaatgcttcggtttcacgtttaccgaaactgggttttgcgtaaaattagggatatcaaaagccagatttgtcaattttctgatttcttacttaaaagtacaaactttccttttgcaaatcacttcatcatcatctctgtttttgatttgataaactctgtttcctccgatgaataggttactagtagcggcggcggattttctccggggaagttaaggagtatgcttcttctaggtgttgatagaaagaagaatgaagaagaagaatcaactcctacaatgagatctgggtctaatcaaattgatgaccctagggtttatggtggagccccttaatcatttcttaatactctttttaataacgccttttgtctctatttgaatctaaagtttgcatctttttttctttgcttttgttgttttcaaatgttgtagttgctagtggattagatgattgcaaagatgttgatgttgtgagtgagattactgattgttctacttc

SEQ ID NO: 138809 - DNA, 3199 bp, Arabidopsis thaliana landsberg
atgaaatacacttcaaaagaggagccatttgagactggtaaaattgatggcggcaccagaaacaatattccgggggtgggaagtgatgcaaatgatttagatccacgtattcagtcaaggatgccccataatgcattcattagatcaaatttccctcaaacatcctggaatgttaatcctggccagcagattgaaaaagagccgaaaaaagaagaacaatttagtcgtaggatatcggctcaaagtcctcgtttgtcggcaggtggtccaccgcagtccccactttcatcgaagtctggtgagttttctggtggttcaatggggacccactatggagcagttgcagcagctcagaaggacaaggctgttacttctattcctgctattggtgctactcagtcagtgggttctagtgctaatgaagctatgcagcaaaggcaacaccaagcccaaatggctgcaaaacggagaacaaattctcttcctaagacgcaagttattagcactgttggttctcctgttagtgtcaatactattagtgtcccagttaatgcaaggagcccttcagtgggaccccaaactttgggcgatcacgcaatcttggacagattttcaaagattgaacgagttgctgctaggtatgaatgttatgaaacctggtttgttgattttattcccttcaaattcttttttatgatctttactttcacttatgtgatacttctcctgttttgattctggctttacgctagagcattgctggcattgtcttattctccttatatcattgcatttatataaataaataatgtttgttggtgcatgaacaagttctatatttcatagattttattttttggttgatccagtttcttgttccatttttaggtaccaactaaactgcaaaaagcataaggtggatgagtactctcgaagacctcgcgtgtatgctaaacagccccttactgtttgtttatcaaacctgtctaacgaagaggtcttcaaagacgaggacgaagcattatcaaaatctatatttggtggcagtatgaatacatacaagaccagagtcattcactttggtcagatggaacgtgtaatgcaaggtctgtttttcttttaactagatatctggctattggtatatttctttatgtgattgaccagactccagtatcttttcaggttcggtcccttccttcatccctagaaaccgaacaagactggtgatgtcagagaaggccgtcgatgggacagtagcatggtatcaaggggacgtagatgaaggggatgtttttcaggctgaagattttctcttagcgttgcccaatacagtaagttcacaggaaatttgatagttatcatactcccctgcattcttttttgatcagcaatatatcttcaacttgcatgcactaccattcaatgtaatgttgattttacatttagtgatgtttataggttgtcgggtcatgttcttggggtttatgtctctgttgtgaatgttttgtgtaattatgaatatggttggttggtctatggatacttctctcttgttagttgcttatgctcgtttatccttcttgtccaatgcgatcaaaagggaatggacaatggattattaatttttctcttatgtacgccacttattttctggaagctatgctgacttgcttattcctcactttgtcacagcacatcgccgatctacttgctactcaatttaaatcactggtatttctcgagttctgaatcaattatttcatgttcctggttctatggtaaagctacttaaagattgatttatatgcttatgcagatggcccgtgaaggatacatgattgaagaacatattatggcaaagccaaaccgtggggatactggcccaatcagcagccatccaaattctgcgggtggttatccaagaggttattctgcaaacgatatgcaacagtatggagatgcagttgcagggcaagcgtctggtgaggcatcaaaacatgggaatactggaaatacgccgaataactcaacccagaatattcttgcaaatgcaaggatggttcctccaacaaattctcaagccttgcaaatgtctcaaggactgctgtctggtgtctccatgcctatgcaaccacaacagcttgacccacaacagtcagcgctactgtcatcacattcacagcagaaaaatcaacagtcaatgtttacacagcaacagcatccacaaatgcagagaccttccatgatactgcctacaaatccactatcagccatcaactcgatgagccagagctctggtatgcagccgggtggtcagatggccaacaagtattcgcctctccaactgcagatgttacagcagcagcagcaggcggcagtgcagaagaagataatgatggggctaggatcaggtgtaggcatgggtatgggtatgggcatgggtatgggtatgggaagcatgggaaatagtattgctgggcttggagctttaggcaaccatttgaatatggcaggaagaggtatggggggaaccggaatctcatcgtcaatgtctgttcctggcatcggtaatatgggccaaaacccaatgaatctgaatccagcatcaaatttgaatgctataagccagcaactccgatctggtgcattaacaccacaacaaaacgctctgtttacacagattaggatgggcatggcaaaccgaggaggtgtaatgggtgctcctcaaacggggataagtggcgtgtcaggtactaggcagatgcaccccagctcagctggtctttccatgttggatcagaacagagctaacctgcagcgagctgctgctatgggtaacatgggcccacccaagctgatgcctggaatgatgaatctttacatgaatcaacaacaacagcagcagcaactccagcagcaaccccaacaacaacagttgcagcatcagcaacagttacagcagcctatgtctcagccatctcagcagctagctcagtctccgcagcagcagcagcagctacaacaacatgaacagcctcaacaagcacagcagcagcagcaggcaacagcatcccctcttcagtctgtactatcaccaccccaagtagggtcaccatcagctggaattacccaacagcagctacaacagtccagtccccagcaaatgagtcagagaactccaatgagtccccagcaa

SEQ ID NO: 138810 - DNA, 1728 bp, Arabidopsis thaliana landsberg
cacattaattcacacctctctcccttctctctcctatctctcagtcaaaccctaattccgatgacggtacctaattccgacgatggtgaccggagtttaacggaggttatcacctctcttatcgactctatccccaaccttcttagcttcaagtgtaaatggtcatcaattcgcgccaaactcgccgatctcaaaactcagctctccgatttctccgatttcgccggctcttcttcaaacaaactcgccgtagatcttctagtttcagttcgcgagacgctaaacgacgccgttgccgttgcggcgaggtgtgaaggaccagatttagctgaaggtaagcttaaaacgcagagtgaggttgattcagtcatggcgagactcgatcgtcatgtgaaagatgctgaggttttgattaagagtggtcttctgattgataacggaatcgtcgtttctggattttcgatttcgtcgaagaaggaagctgttagattagaagcgaggaatctagtgattagattacagatcggtggtgttgaatcgaagaattcagcgattgattcgttgattgaattacttcaggaagatgataagaacgtgatgatttgtgtagctcaaggagttgttcctgttttagttaggttacttgattcgtgttctttagtgatgaaggagaagactgttgctgtgatttctagaatctctatggttgagagtagtaaacacgtgttaatagctgaaggattgtctctattgaatcatctccttcgtgtattggagtcaggaagtggttttgctaaagagaaagcttgtgttgctttgcaagctttgagtttatctaaggagaacgcgagagctattggttgtagaggtggaatctcgtctttgttggagatatgtcaaggtgggagtcctggttctcaggcttttgctgctggtgtgttgaggaacttagctttgtttggagagactaaagagaatttcgttgaggaaaacgcgattttcgtgcttattagtatggtttcttcaggtacttctttggctcaagagaatgctgttggttgtttggctaatttaacgagtggggatgaggatttgatgatatctgttgttagagaaggagggattcagtgtttgaagagtttttgggattctgtttctagtgttaagagtcttgaggttggagttgtgcttctgaagaacttagcgttgtgtcctattgtgagagaagttgttatatccgaagggtttatccctcgcttggttctggttttgagttgtggggttctcggtgtgagaattgcagctgcggaagctgtttcctcgctaggtttcagctcgaaaagccgaaaagaaatgggtgaaagcggatgtatcgttccattgattgatatgttagatggtaaagccattgaagagaaagaagcagcttctaaagctctatcgacgcttttggtgtgcacgagtaacagaaagattttcaagaagagtgacaagggtgtagtcagtctagttcagctcttggacccgaagattaagaaattggataagcggtacacagtctcggcgttggaactgcttgtaacttcaaagaaatgcaggaaacaagtcgtagctgctggtgcttgcttgcatttgcaaaagcttgtggatatggataccgaaggagctaagaaactggcggagaatctttcccggagtaagatttggggcgtctttacaaggccataa

SEQ ID NO: 138811 - DNA, 2825 bp, Arabidopsis thaliana landsberg
atggagggatattcgaagtgtgttggaacaaagaaggtaacaaaatcgcagcttgcttcgctgataactcagtttgcgttcgtgatttcagaatgtagttttcttaattgtagtcctaataacactctctcagtccaaggtgtttctttttgttgttgcacatatctataagttataacactaaattcgaaagatgaaactgtacttgagattatttttgttattttatctatcattgcaacttttgggttgactgacgagtaacaatgaattgaaagaaaacaaactgcataagattacaagggttactacatccatatctttgaatttagaccacaaagctagatttgaattgaaagtgatgtaatgcaattgagatatgaggacatcaactatgaaggtgtctttatgtagtagtagtaaaccgttgggtgaaacagtgaaagtggatgatggcgcgtggcgagagctgacggattcgtgtaacccccaggccaaacacgtttctacttctacttaacccattccctttatttatttttgtttctgttcaccacgtcgcattttttaatctgtaatcatcaccattaatatggtcgaccaaactagtaatttccttgagcaccatacttttgtgtgaggataatgagactcccaagaagaagactcgataatccccaagtttcacacgttctctcgacttattgacaaatctatccctgcgcttatttaccattcacatatactgccacttcttattctgacgtggcgtaatagtattggataaaacggtattatctacccctaagtcgattatagtatatatataaagcaacaaagcagttgcaaatttcaagatagtcgtcactttagtcgcagcaccaccaccaatttcgaatttagcatttctgaattccgactctgagaatcggcggttaccgggaaatatgtcggagactgatagagagcgtccgttattagcatcggaggagagagcttatgaagaaaccgagaaagttctcatagtcggaatcgacgaagaagaagacgctgattacgacgatgaccccggaaactctcctaaattctcatggaagaagctttggctattcactggacctggttttctgatgagtatcgctttcctcgatccaggtaatctcgagagcgatcttcaagctggagccatcgctggttactctttgatttggctattgatgtgggctacggcgattgggcttctgattcaacttctatctgcccgtctcggtgtggcgacgggtagacatctggcggagttgtgtcgagaagagtatccgacttgggcaaggatggtgctttggattatggcggagattgctttgatcggagctgatattcaggaagttattggtagtgctatagctatcaagatcttgtctaatggattggttcctctttgggctggtgttgttatcactgctcttgattggtaagtgtttttttttttctcaatttggttattgatttaggaaaagccctaatttttggaatttagggttctttattattgtttgtttggtatctttagttttgatcctaacattgtgtgtgatgggttaattgcagtttcatctttctatttttggagaattatggaataaggaaactagaagctgtgtttgctattttgattgcaacaatggctcttgcatttgcttggatgtttggtcagacgaaacccagtggaactgagctccttgttggtgagactctaaatattcctttcttttgtctagtgtgtggagatgggagtacaaaaatggtaactgttcatgttttttaacaggagcattggtccctaagcttagctccaggactatcaaacaagctgttggtattgtgggatgtattatcatgcctcacaatgtgttcttgcattcagcacttgtgcaatccagagaagtcgatccgaaaaagagattccgggtcaaagaagctctcaagtactactccattgaatccactggtgctcttgcggtttccttcattatcaacgtctttgtgaccacggtgtttgccaagtcgttttacgggacagagatagcggacaccatcggtcttgcaaatgctggacagtacttacaggacaaatacgggggtgggtttttcccgatactgtatatatgggcgattggagtcttagctgctggtcagagtagtaccatcacaggtacgtacgccggacagtttataatgggagggttcttagatcttcaaatggaacaatggctatcagcttttataacgagaagctttgctattgtacctactatgtttgttgctattatgtttaacacatccgagggctcgctcgatgttttaaacgaatggcttaacattcttcagtcgatgcagattcctttcgcggttattcctcttttgactatggtttctaatgaacatatcatgggtgtcttcaagatcggaccttcgcttgaggtaaagcaattttttgtcatctctctttattgttatgtgcttttgattgtaacgagttagttgggatctttgcagaagctagcttggactgtggcggtgtttgtgatgatgataaatgggtatcttcttctagatttcttcatggctgaagtggaagggtttcttgttgggtttctggtttttggtggagtagttggatacatcagtttcatcatctatcttgtttcttatagaagctcacaatcttcttcctggtcgagtttagaaatgtcagagagagttgtttccacagagacgtagaaacccatcactttagtattcttcaacccttacaacttatctga

SEQ ID NO: 138812 - DNA, 585 bp, Arabidopsis thaliana landsberg
aatgtcttcttcgaagcggaagcgcggcgccgaaaccgccgcggaagattgtgacgacggtactgataagagcaataccggaaacagtttcttcgatatatatggacccgaagtaaaacaccttctttacgatttgattgattagtgctcaatattgtgatatgtgaattgagtcttattcttcttattattggtaggcgaaagcagaactcgatttcaaaagccctgaaacaacattgaacttacaagtaggtcttgtaatgcaaatgagacttttttctaataactttttctgttttggaagtttatgaatgataaatgtaagattttgcatttatgggtttgattaggatgttcaaggacttgtgacatgggttcttgcagaaggttttatgccttcatgggtatttattaaggtatgaacaagattgattgtgttgtgtctttacgttttctttgttattaccaagtttaagtgacattttaagggtatggtttttgtagaacaagcctctcattccaaaggttgtactgctctaccttcctggattggatgcagctttatacttatcacattctaaaact

SEQ ID NO: 138813 - DNA, 809 bp, Arabidopsis thaliana landsberg
ctcttcatcatcaacctttcttcttcttcttctcaatcttttctcaagaaaatcacaaatttcccaagaaaacactcacatatatgatgctatatatagaaagatagtctcatctaattctctctctccctcggattcgttagatgtgatcattttttcttgatttttgatcagattcttgcgtatagctgtatatatacaccaagatacactcatcatcgtcatatatagattatgtgcagcgtctctgagcttcttgacatggaaaacttccaaggagacttaaccgacgtcgtacgaggaatcggaggccacgtgttatcaccggagactcctccctcgaacatctggcctcttcctctgtcacatccaacaccatcaccgtcagatcttaacataaaccccttcggagatccctttgtgagcatggacgatccactcctccaagaactaaactccatcacaaactccggctatttctccaccgtaggagataacaacaacaacattcacaacaacaatggtttcttggttccaaaggtatttgaggaggatcatataaagagtcaatgtagtatcttcccaagaatccggatctcgcatagtaacatcatccacgattcttctccgtgtaattctccggccatgtcggctcacgttgtcgcagccgcagcagccgcctcgccgagaggcatcatcaacgtagacacaaacagtcctagaaactgtctattggttgatggtaccacgttctcctcgcagattcagatatcttcccctcggaatctaggccttaaaagaaggtacaa

SEQ ID NO: 138814 - DNA, 432 bp, Arabidopsis thaliana landsberg
gttcaacatattttctgctgacgcttctttaatgaagtagcacgaagaagtaaacaggacgacttttggccaccggaaaatttctctgttataaaaacgaaagtctgtgtcctcttaaacatttttgggatcatcaatcggtttttggtcaaccatgaatatgaatcaagttgcagagtatgtggaaactgatccaactggtcgctatggacgtgtaagtaaggagacagattctatgttcatggatcaaaaccttgttgtaacacttggttttttatgttggaacagtttgcagaaattcttggaaggggagcgatgaagacagtgtacaaagcaatcgacgagaagctgggaatagaagtagcatggagccaggtgaagcttaaggaggttctgcgttcctctgttgatctacagaggctttactccgag

SEQ ID NO: 138815 - DNA, 1047 bp, Arabidopsis thaliana landsberg
aggatcaatagtgctactgttgctgctgctgaaaaagccaatcaagagcctcagatgtttcctgttactgtaggtgatcgtaatcaaaccactcctgttactcctgttgaagcggcatttagcactgagacaactcctgttacagctgagaaaaccccagaaccaactcagaccaagataacaactgaagcttcagctggtgttgagacaacaccagccccggtgttttcagaaccagaggttaacgctgtgccattcgctagtggtgaagatgagaaagagaaagttgatgatgttagagacatagctggtcttgatagttcagtggttgcacgtgatgcagcagttgtgcaagtggcgtctagtgagcacaaatctgagaataatgaaccatttagtgggttggatggtggggattctaaggctcaaccatcagaggcagtgcttgaaaaatctgctatgtacaaccaggtatctgaggtcatccccgttacagggtttgaggtaaaatctgattgtatttctactgattctgtgtcaaataatgaaaaaatagaactaaaggataacaaaattgctgataatgtcaaattagaacaaaatgttaataagttccaagagccatcaacagtcgttggcgaatcgcatccaatggatgtcgaggagccacttgagcagaagacatctgttggaggtggggatgacagcaatgctgcaaacgcagatatgatcaaagaaaataatattatcgatgcaggcgactcagaaaagttgaatttagatagaagttctggtgatgagtctatggaggatgagccggagacaaagcaatccgagtcaattacatctgatgataagagtgcaaaaattgaaatgctttctaaggaggaaagccgtgctgatatggatgcggggaaagggaaatcccctgaaaataaaagtcacccactggtggcttctgacaaaagaaagcttcctgctaatggtaattcctctcatattcatttgttttattaatcaaatcttttactgtgtttaatctgtaat

SEQ ID NO: 138816 - DNA, 2502 bp, Arabidopsis thaliana landsberg
  unsure (1)..(2502): unsure at all n locations
atggtgtcaaagctttctcttttccgagccaattcacttccttttccagtcatctcttcctactctgctcgttttatccttaaaccctatcccaaacctaaaacccttatcttctgtgtcttctccagtaatctctcctccaccacctttccgtatggcccgtctcttctgaaaggaaagaagcctgtgctagatgatattagattagcttcaattggtcgagacagagatgcccatcgaggcaaaattggagagtttgatgaatcaattgagaaagatgttcttttgaatgaagatgaatttactagggtttttgagatttcggcgattcgagtcccggcgaaggattgtttcgcgctcgagaatcgtctccgtggtcatcttcttaattggcctaggattcggaacattgctagggttcctggagatgagattgaagaagatgtggtgaagctgttgggccgtgagactgatgaagaagaagaagatgaagatagtgttgtggattcggttaaccggagaataagagggaaagcagaaggggatggggagagattgagttcagtgttgcatagagataaactcgccaggacatttaattcaactgggtatctcaaattcagaaacttggccaagatttctcggccaaagaggaagaggaagacagagagaacaagggaggggaaggaaaagtaaatagcaagcagacgcaccgaaatggcggtggtggaagtggtggaaactcgaggaggagaaaaggattttgaggggttattgggagaaggctatggtagtagaggaagatggagaggttcaacaagattgttgcttttggatgagaaatattccggtgaggaagttcaagacttgcctgaggctatcaaggttagaaatcttctctgaatccactcatctggtttgatccagtagtttatgttgtgttgttggagaatctttatggtttctgtttggtaggttctgtttgcagaagctaaannnnnnnnnnnnnnnnnnngtttcgagctagtgaaatgcagactgactttgttctatgactattggccaatgattgaggtaaatgatgagactttcaagctgactttattttctcttgaagatcagatcgagttggtttgcttcaaagtgtgttgttgttgtagatattggaggctgtactacctaagggtatgattgtgccttcggcatttgagatggtggggcatattgcgcatctgaacctaagagatgagcatctaccatacaaaaggctcatagctaaggtaatgtgacagtggacaactggacattgctcaagtctgtaaccaaattttcccagcttcagaaattgaagtctagtgagctgagttgttattttctgtttcttttcaggtagtcctggacaagaatcagccaaagatacaaaccgttgtgaataagattgatcctatccacaatgacttcagaactatgcagctagaggttttagctggaaaccattcgctggtgactctagttgttgaaaatggactgcgctttcatgttgatttagctagagtgtatgtaaattctttctcattgaaatgccaattatagtatgcatgcttttattgagtgctttgatgatgacccaaataccatttaccatttgaaattagcccttaccctacttaattcggtgatgaaagtagctttgtgtaagatgtctgatatcagttttgagttttcagtcagaggagaaatgttgtctacttttgacttagaaaacatgttcttaccaaatctcgtatcatgtgatttagcgatatatctgcttataagttgacgtttttggcattttttgcgtgtgctagatattggaattcgaaacttgggacagaaagacagaggctgctactcgggttcgaccaaaatgacgttgtctgtatgtttgctacttagaactgatacatcatgaaaattattgctatgccctctattgaactccccatttataaattagcaccactgatctcctcattaaaaagtgcattgtccctcctattggtgttgaaatttgctgttctccgttgtataagaagcatatgtagcggccagatagataatacattgattgtattattgttattgctagtctggagttctcttttctgtcttgtttcaagttttgtctatgtcttgttctgtttagttacctacgctgtcgttttgacaggtgatgtttttgctggagttggtcctatcgcacttgctgcagcaagaattgtaaaacgtctatatgccaatgacctgaatcctcatgcagtagaatttatggtacagcatagcgttgtcaataagctcgagaagagaattgaggtaagtacgaattctacacaccttgtttcatacttcaatcgatttgtagaattataaatcttctcatctatgtctagatctttaacatggacggactacgattcataaagcctatgttttcaagcgaataaggtctcgggtacaacc

SEQ ID NO: 138817 - DNA, 435 bp, Arabidopsis thaliana landsberg
agagcggatttgcgctggaaccgtaaacttgaggacatgttagagctcactaaactgcaggatgagcttcttgattctgcctccaagtatgcactctgtacatacattttgatgagtcatttgattaattctgaaacactaatatgcgacttatctgatacttttatctgtgacactcttgattgaatctcaaagactggtgaagcacggtggggtgttggtatacagtacttgctccatagaccccgaggaaaatgaaggaagggtcgaagcatttctcttaagacatcctgtaagaatctttataatccatttgctttccttcagatgttgatattaacaaatagtctctctgctttcacaggaattcaccatagatccagtaaccagttttgtaccgtcgagttttgtaacctcacaaggcttctttttatc

SEQ ID NO: 138818 - DNA, 1050 bp, Arabidopsis thaliana landsberg
tgagagagagacactcttgtttcatcttcaacttccactacctttgcaagattctacctgagatagatggcgaagttccgacaaatgggttcatcaatcttcttcctctttcttatcataatctcattatgttccgcccacaaagaagcgttttcttcaactgatcttgttcaaatggagtgcttgagagtcccaccgttagagtttgctgaagcggccaaaaccgtcgtcgacgctataacaaaagcagtagctatagtgtccaagttcgacaagaaagccgggaagtcgcgagtctccaatgcgattgttgattgtgttgatcttcttgattctgccgccgaagagctttcttggatcatctctgcttctcaatcccccaacggtaaattttaactactagtctttttccttttttgcatgcaaaatatgagtctttaaattaatataaaagactaagaatgtaatttattaccaacttaaatacaaagttacaaaactcaccgaggaaatttcagttcacgtggtgatgcacattatatagtttgttcgttgaatttccaccaaatttataaataccaaaacgtttgtccccaaaaaaaaaaaaataacaaaagataaaaattacgataattagcatttgttattttaattatttggtggaagactagctttactaataagcccattttttccattgactcgaactagtatagtactgtataatttagtaaccgatggaaagacacaatagagatgtccatttattaagcttcacttgacacgacgacagacctatttttttctttttctctttaactcttaactcttaagtattcgctagcactagcatgtgttcttttgttttgctaatataaatatttgatagctttcagacttttcttctgctgaatcagattctcagaacttttttgctttaaagaagaaagtgatttggtatcttatcgtcggcgattaatcttcgacgtgggaataaaatatcttgctcgaaagaaaaccttgaaatgctgcccttttaagggaagatga

SEQ ID NO: 138819 - DNA, 732 bp, Arabidopsis thaliana landsberg
gctttaagacgtcgattcatagactttgaaaaggccaagaatataggaactggaagcttggtcgtggatgattctggatttgacagaacgacaacagtagcctcatcagaagaaactttatcttcaggcggtggttgccatgtaactactccaattgtatctccagaaggcaaagaagctaccacctccatggaaatgtctgaagaacaatgcgtagagaaaacaaacggagaaggtatttctaggcaagatgataaggatcctccaacgcttttccgcccagtgcctcggctcagttcttttaatgcttgcaatcacatggaaggatcaccctctccacatatacaagaccaaaatcagctccaatcatctaaacaagacgcagcaatgctaagattgcttgaaggagcttacagcgaacggtttgtgcctcaaacatgtggaggtggttgttgcagcaacaatcccgatggcagttttcagcaagaatcattgttgggtccagagtttgtggattacttagactcaccaacgtttccgagttccgaactagctgctatagcaacggaaataggcagcctcgcttggctgagaagcggtttagagagtagcagcgtgagggtgatggaagacgcagttggtcggttaaggcctcaaggctccaggggtcatcgagatcattatcttgtatctgaacaggggacgaacataaccaatgtcctgtccacataa

SEQ ID NO: 138820 - DNA, 1931 bp, Arabidopsis thaliana landsberg
aaatcagagatagagactatagttttgggaatttgaggagaagattaatgaaaaaacccaaaagagctgattctcttgatgttgaagctatggaaattgcaggttctcatggtcacaatctcaaggttaatcacccatgattaaagttttgatttttataagtgcacatgttgtgtttgtgttattgacattgaaaaatgaaaacttttttaggatttgtcacttttgactacacttggaatagcgtttcagacgttaggtgttgtgtatggtgatatgggaacaagtcctttgtatgtgttcagtgatgtgtttagtaaagttcctataagatcagaagttgatgttcttggagctttgtctctcgttatctacactattgctgtgattcctttggcaaagtatgtattcgtagtccttaaagctaacgacaatggcgaaggtaatgcttccgcaccgatgtgcttagtaaagcgagatatttaagtggttgctcaggatatgtttgttatgtgtgcaggagggacatttgcgttgtattcacttatttgtaggtatgcaaaggtgaataagctgccaaatcaacaacctgcggatgagcagatctcgagttttaggcttaaactcccaactcctgagctggaaagagctctggggattaaagaagctttggagacaaaagggtatttgaaaactcttcttttgcttttagtcctaatgggaacttccatgattattggcgatggaattctaacaccagctatgtcaggtgagtcttatttgtattaatacagtgtaacttgagctgcatttacagttggaatttgatcttccttttgattcttctgcagtgatgtctgcaatgagtggtctacaaggtgaagttaaaggatttggaacaagtgggtatcattatcacatgatttctctctctatgtcttgatgtcaatttgatctttgattttcaatcttgatgtgttgttcttgtcagatgcattggttatgtcttcgattgtgattctcgtggctttgttcagcatacaacggtttgggacgggtaaagttggttttctatttgctccagttctggcgctctggttcttctctcttggtgctattggaatctataatctgttgaagtatgacttcactgtcataagagcactaaacccgttttatatcgttttgttcttcaacaagaatagcaaacaggcttggtctgctcttggtggatgtgtcttatgcataacaggtaagtcaacacgcttaacaacttctaaaataaatcaaacctttcttacaaagtgtttaaaactacgcaggagctgaagcaatgtttgcagatttaggacatttctcagtttcgtctatacagatggcatttacttgcgtggtgttcccatgccttctcttagcttacatgggtcaagctgcttatctaacagagcatcccgaggcctcagctcgcatattctatgattcagttccaagtaatagttcaatatatccttaatctctcagctttgattatattagatgtcaaaaattctgaaagttgtgataaaatgcaatgttgagcagagagtttgttctggccggtgtttgtgattgcaacattagctgctatgatagctagccaagccatgatctccgcgactttctcatgcgtcaaacaagccatggctctcggttgctttccaaggctgaagataatccacacttctaagaaacggataggtcaaatctatataccagttatcaactggttcttgatgatcatgtgcattcttgtcgtctccatcttcagaagcacaacccacattgccaatgcttacggtcagtctttcggtttgatttctacgcagagtcctgaaaaggctttctcgttttgatattttttcttcttttttcgtgtttcaggcatagcagag

SEQ ID NO: 138821 - DNA, 739 bp, Arabidopsis thaliana landsberg
atgtacgtgattctgattgttggtttcataaaatggaaggtgcaaaaagctacattccaagcagtggaggagatgataggctccagtgagtcgtctgaagatgatgttacagatataacgcagtgtacaatcaagacgaggcatttcgagcaagccttgtccttagtctcaccatctgtgaacaaacaggtattctcttctctctgtttgcatcactgagagaaattgaaatttctatcgcctctcgtttagttggaaattaaacctcattttgatgggtttgcagcaaagaagacactatgacgcactatcaacaaagcttcaagaaagcgttgggaggaacactgaacaagtcaccatagggccatcttttaccctcgagtaaaaacactctttacttatagaatgtctgcaaaatctcattttccaagggtagatacggtctttagttaaatataaagactcgtctgtttttctacttcagacacataatagaatcaagttatgtttccaactgttcttatcggatccgtaacgctacaaaaattctgatactgtaagttgtatgtacagagatgagatagagaaagcgagaacaaaaagctaaagacaactagagggactgataagtggtaagtagaggtcctttatttatcagccagattctcgtttgcagttcccaggtaataagtacttgtagctatcagcattctgaatcaagtatccagggagatgaaca

SEQ ID NO: 138822 - DNA, 836 bp, Arabidopsis thaliana landsberg
tttgtagtggactatccatatgaatatattacatcaatagaagtgacctgtgacaaagtctctggcaatacaaaccgagttaggtcgttgagtttcaagacatcaaaagacagaacatctcctacatatggacgtaagagcgagcgaactttcgtgtttgagagcaaaggtagggctcttgttgggctccatggaaggtgttgttgggctattgatgctctaggtgcacattttggtgcgcctcctattcctccacctcctcccacggagaaactacaaggatcaggtggtgacggaggagaatcatgggacgatggagctttcgacggtgtgagaaagatatacgtgggacaaggtgagaatggtatcgcatctgtcaagtttgtgtatgacaagaacaaccagttggtactaggagaagagcatggaaagcatactttgcttggatacgaagaggtgattaattatactatacttcgttgctattttcttaaactataactataaagttgtgttattgttattctgatgaaccgctttcacagttcgagttggactatccgagtgaatacatcacagcggtagagggttattatgataaagtgtttggtagtgaatcttcagtaatagtcacgcttaagttcaagaccaataaacgaacctccccaccttatggaatggatgctggcgttagcttcatactcgggaaggaaggtcacaaagtggtagggttccatggaaaagctagtcccgagctctatcagattggggtcactgttgccccaatcaccaagtgacgacgtccttgaactttattctcaaatcaagtttgatca

SEQ ID NO: 138823 - DNA, 3775 bp, Arabidopsis thaliana landsberg
atggacctaacccaaggcatcagagaaattttactcacagaagccttttcagggcctgtgtcatctttgcatacattcgaaaaacctgctgaacaacagcaaaccactggatctgcagttgaagttgtatgcaactggtacatggacaatatcatcaaggatgtgtctggcgcaggaatcctcttcgctccgaggcacaaatacttcaaaagcactagaccagttggagggtattttgcagagtcagtcaccgacctcaaggaattacaggcgtttgttcgtatcttcggcggctatggagttgaccggctggataggatgatgaaagtacatacagctgccctggtaaactgcatagaaacttctctgagatcaaaccgggaattgattgaagcagctgctgcaagtatgcattctggtgacagagtggagagagacgcatctgttaggcagatagttgatttggataccgtaataggattttgtattgaagctggtcaagcgttggcttttgatgacctcctcgctgaagcctctggtgctgttcttgaagacaatgcatccttgatacactcgatgatctctggcatcgttgagcacatacctgaagaaatacctgaaaagaaagaaatcagaaggatcaaaggcgtggcaaatggtgttggcgtagcaggtgatcacgactctgaatgggttagattaatcctagaagaggtaggaggtgcaaatgacaactcatggagtttgttaccttacttttttgcctctttcatgacctcaaacgcctggaacactactggcttcaacatcgagactggcggattcagcaacaatattcattgcttggctcggtgtattagtgctgtcatcgctggaagtgagtacgtaaggttacaacgtgaataccagcagcagcatcagtccctctcgaatggtcatcactctagtgaaaatctcgactcagagtttccaccccgtgtaactgctgaagcaagcattaaatcctcaatgttactctttgtaaaattcgctgcatcgatcgtgctagattcatggagcgaagccaacaggtaagagaaacctggaattattttactctctctctcgcatttttatccgcatcatcatcatatcatcctttttgttcttcagatcgcatctcgtggctaagcttatcttcctggaccaactctgtgagatctcaccatacctccctagaagctccctcgaatcacatgtcccgtacaccatcctcaggtcaatctacacccaatactactccaacacaccttccacaccgctctcaacagcatccccgtaccactccccatccgtatcgctcatccacgcttctccctccatgaaaaactccaccactccccagcgtggtagtggtagcggcagtagctctacagctgcccctgattcaggctacttcaaaggctcatcatcttcactatacggtcaggaacactacaccgaatccgaaactggaaactcaagaaacaatgagaacaacaacaacaacaaacaaaggggaagttctcgtcgttccggaccattggattacagctcgagccataaaggagggtcaggatcaaacagcacaggtcctagtcctcttcctaggtttgctgtctcaagatctggtcccatctcatataaacagcataactaagtaacaacactcccacattctacaaaagagacaaatttgtttctttttccccaaaagaaaaagacaattatgtagagagattagatttgtacaaatccctcgcaacagtcttcttgttatgtattggattgtaattcagaaaacctattatgcatgtctttatcttgggtaatcgactaatttcataattcattaacataaatcaatcatttataatcttaagattgaacaaattcttaagataattaattactttataaatttattaaaaagaaaaaaagaatatctgttgggggcacgaaatgtaacgaacccaaaattagaaccaacagtcatcttcgtcattagtgagctaagttgttcaatctctcacctgaaaaccctaaccttcttcttcaatctccaatggcgcgtaaatcttccctcctcaaacgagcagcaatcgccgtcgtctccgtcatcgccatctatgtaattctcaacgcctccgttagtcgctctctcccttcctcatccgatctccctcgccagctaatccgtgaagatgatgatgatgaaggacgtgctccgattcagcctagggttagggtttacatgtacaatctccccaagagattcacttacggtttaatcgagcagcactcaatcgctcgcggcggaatcaagaagcccgtcggtgacgtcaccacgcttaagtatccgggtcatcaacatatgcacgagtggtatcttttctcggatcttaatcaacccgaagttgatcgatccgggtctccgattgtccgtgtctcggatcctgccgacgctgatctcttctacgtccctgtgttctcttcactcagcttaattgtaaatgcgggtcgacccgttgaagctggatccggttacagcgatgagaagatgcaggaagggttggtggagtggcttgaaggtcaagagtggtggaggaggaatgctgggagagatcacgtgatacccgcaggcgatccgaatgcgttgtatcggatcttggatcgggtcaaaaacgcagttctgctggtttcggatatcgggcggttgaggcctgatcaaggatcgttcgtcaaggatgttgtaataccttactcccatagagtcaatctcttcaatggagaaattggagttgaggatcgcaacacattactcttcttcatgggaaatcgatatcgcaaagatgtaagtgctttaaaatgttccaattctgtagctttctattattaatggcaaatgtacagaaatgtgtatataatccattgtggtaatgctattattattagtattggcaaatatacatacagttttggttttgtatgtgttcagggtggaaaagttcgtgatttgctgttccaagtacttgaaaaggaagatgatgtaacaataaaacatggaactcagtccagagagaatcgacgagctgctacgaaaggaatgcatacttcgaagttttgtttaaatcctgcgggtgacactccatccgcctgcagactctttgactccattgtcagtttgtgtgtgcccctgattgttagcgatagtatcgagttacctttcgaagatgttatagattatagaaagttttccatttttgttgaggccaatgcagctctgcagcctggatttctggttcagatgctgaggaaaataaaaaccaagaagatcctcgagtatcagagagaaatgaaatcggtaccttctccttcttatcataacttgatcctctttatcataacttgggacgattctcgtacctgaatgatgccatgtatacaggtaagacggtattttgactatgacaacccaaatggagcagtgaaggaaatctggcgtcaagtctcccacaagttaccactcatcaaactaatgagtaaccgtgacaggcgcctcgtcctaagaaatttgaccgaaccaaactgctcatgtctatgcacaaaccaaaccggtcttatcacttccatttaaacaatctctttgtcttttgggagagaccttttggactgtggaggagcttgagaaggagagagttcaccgagacttacacaagcagatattcccccctcccgtggcataactacttctccg

SEQ ID NO: 138824 - DNA, 555 bp, Arabidopsis thaliana landsberg
gagaaacgcgaggaaattctgattaaagaacttaaggagttactcgccaaagaagggttgtctgcaaatccttcagagaaaggtaatgctttacatttaagaagtctcctctacctgcaggaaagcgtagacgccttcaagatattctagagcgaaaaatatgcggatgataaaattgttgatggttttacctggtgacagagatcaaggaagtcaagaaaagaaaagaaagaacaaaggagcttgagggtattgatacaagcaacattgtgtcgagttcaaggagaagatccagcgcaagttttgtacctcctccaaagccgataaaagcagaagaaagcgagagcgatgattcagaagattctgagaatgaagaggatgaggatgaagaagtagtagtagaagaagacgaggaggaagaagacgagggaggtagtgaagatggcggagagggaagtcaaaacgaaggagaactaaaaactggtatgaatctaactcgtcttctgtcaattgtttacatcgaatttcagcagaaggtgtttttaaacactgatg

SEQ ID NO: 138825 - DNA, 486 bp, Arabidopsis thaliana landsberg
cccaccacattcctccgccgtcctctctcctcctcttcctccgtcacctccgttgccgacgaaggaatacggatccgtcaccatggatactcctcctacgaagcatacatcaaacaccagctcaacaaaactcagaacccgaagctacgtaaggtatggacaacgcgcgactgggacaggaaagttcgtgtgttctccactttcttccgacgtctcagcgatcgcggtcttctctcaaatcaatcaaaagctctctcgatcggtgctcgggttggacaagaggttgcggcgttgagattgatcggcgtggaagactccgtcggaatagatctggttccgcgaccacctctcgtggtgaaaggtgacttccacgcgcacgcgttcgacgaagagacattcgatttcgaattctcaaacgtgttcgatcacgcgctttacccggagaagttcgttggggagatcgaacggactttaaagcccggaggg

SEQ ID NO: 138826 - DNA, 3974 bp, Arabidopsis thaliana landsberg
atatgttcgtattcttggtgcgttctatctgcgtctcactgggactgatgttgatgtctatcgctacctcgaacctctctacaatgactaccggaaagtgagacaaaagttatctgatgggagtaagtttcattttctttcgatggatccgttgtgtttaacttttgattgatttgttcactaactagatttatttctttggtttggaatagagttttcgctgacacatgtggacgaagtcattgaggaacttctaaccaaggattattcttgtgatattgcaatgccacgtttgaagaaaaggtttcttcttttgcatttgtctgaagctgaataattagtttttggtctctgcagtattttaagatggttaatttttcactctgatgataggtggacgcttgaacagaatggtttattagagccaaggaaaagtgttttggaagacgactttgaagaagaggaagaaaaggaggagaatgaagggattgctgatggatctgaagatgagatggtcagtgctttcattctgcaatagtttttatgtgatctgttttctgtttctatctagcagctctaagatgataccatcttcctcctcttttacaggatcagcgccgtaagagtcctgaaagagaaagagaaagagacagagacaggagacgcgacagtcatagacacaggtatctgaatccgtgacctttactagatacatttctatgctagttaacatttttcaaaaaaaaattctttgtgattgtggaagctgtttgatctagctaatgctcttgcatcatgtctagtactctgtcttttgagtgtctgtttccactatggcatctcaagccatcagcggttggatacagcttccgaaattaaatttgtagagatccttccaggtttctctgtactgacagtgttcagagagaagtattatggatcagacattattacaatccttaccctgatacagtatatggtagttgtcattgtgttactttgaaaaagatcagttaatcatgagagcacttcccatctagtttttagctcaatcaatgttttctttttgttacagattttcattatgattgatgttgagacttgagctcattgtttcatgaattataatttgaccatggttctgtgattggcagggatcgtgattatgacagagactatgatatggatcgagatcatgacagagactatgaaagagaacgtgggcatggtcgagaccgggatagggagagagacagggatcactatagagagcgagatagggacagggaaagaggcagagatagagaacgagacagaagagacagggcaaggcgcagaagtagaagcaggagtagggatcgtaagagacatgaaactgatgatgtgcgggatcgggaagaacctaagaaaaagaaagaaaagaaggagaagatgaaggaagatggaaccgatcatccaaatcctgaaattgcagagatgaatagactgagagcatcactgggaatgaaacccctcagggactgaactgtgaaatgaggacatctttatcaaaccgaaacttggttcatttgcccagctaaaccggttactacactgtgatcctactcactatagttttggtttttttgagtttacctgatccctctttaatgtagaacaaaatggagaatctgtaatggcattgtactgtatgttctctaaaccgtaaacgaattgtggtcgagaaattctgaatgtaacccggttcttgatattagttgtttttaaggtaattcagataaatataaaaacctatatgttatgcctacgtggcgatatcactttatgagtccatgtaaatcggacccaccaaaagcttataggtaaatgatacggtttcataatcattaaccatcacgacgcgcgtgctactcatgtcccacttacgacgacgtcgttttaaactctctctctgtgctcttccagtctctatcgatcgccttctgaattttccggcggaaaagcaaatgtccgttaacgacagtatcgatcctcggttcgtattccacgttgaagatgaatctttgcgtttccgtgtgggagattcaggtactaagatccgggagctcgaaaccgtcggcgatcgccatttcagaacccagcaaggtttctgcggaaatagaattgagaaagatgaaaccatgtattccgatggagatgatgaagagtacgacgtttctatccgaagacgaactgctctgattcagcctggtattgattccggtaacaattatgattctgctgcagctgaagaaaccaacagagaaagtaaaaatccaggtataataatactctacattacttctttcacgactaccggagattccaagattgttgaagctaacgaaaaattctttggttttacttaagctcagttggttgggaactggttgtgagagaagatggggaaggtaattcaacgattgatcgacatgaaatggagtttaaggtgaggatcactaaaccagatggtaacgtatctaattcccaccgtaacacgcaacaaaagcgagattttgcttctgtggagaaggagagagtcactactactagtgtcagctcttgggagtctctcaaggccatcctctctgatcctgtcacgtaagtttgttaagtctgcttgtcaatggtcagggaatttgataactaagatcagtttaatttttgaatctgagtcaatgtcaatgtaactttgatgattattgttgtgtgatggaaagtgtatcgtctagaaggctaattcttgttaacattcatagagatgatttttcttttctgttactttggtttggatagcggagccttgatgaatgatgctaccatactgccttgtggacattcttttggcgccgggggattaaaagaagttaaaaaaatggtatatgactgactcttaaccagtccatttaataagggtcttcttgcttttgtctcatgtgaatcttaataatctgagttttggtaatttttgttgttagaaagcatgtttcacatgttcccaacctactttagaaggatcagaaaagccaaatctctgtgagtttcacggcattactagtttcagagaaagacttctattcttcttcctgatcaagtttattggcttgttcagctctcagaattgtagttcatgctttccgccaagaagaagattcagatcatattcacacgctgaaaagaaggaaagaaaggtcggatcaggtttgtttttccaatacacagtaatcatgtgagattacattaacagtgagaaatcagataagcagagtttctttcttatgaatcttgctgcagaagagaagtttctgtatcccaaacatcactgaaactcctaagagtagccgaggcatacagtttcctttctccattggagatcatattatcatagaggtctgagatattcatgcataccaatgttacttcatacattctagggaatactactttcatgttttaacagacaaaaagttccttatggcttagggaaacaaaaggacgcctccaaggtttgtcggacgcatagctgttataatgacacaatgcttaaatggatggttaagtctcgttgcctcatttcatccatagatgctaaagctcttataacaaaattggatatatgttcccaggtacgttgtgaagacagtggacaattcagagtctatcaagttacaacattgctcacttgccaagatttcagacaattcatctgcgaaggtaacagtagctgaaatgccaccgtcttggctctaactcgtagaaagcaaatatctgtggctgcagaaatcagcatctgtaattttttcattcagagaaagtagttactacgtttcattatgtaatataggaacgagacaacaattttctgtactaaatccagtgttttcattcatacaaggaaactttgctcatctaaaaggacatgcgtattgaaacaa

SEQ ID NO: 138827 - DNA, 2967 bp, Arabidopsis thaliana landsberg
ctatctttaatgagaaacaggaacttattgacgaagaaggtcgatgatgatagctcaagaattgggaatatatgttgtggagagcaaaagaggagcaatattatgtctattgctttctctgctctgtttaggcacttggcctgctcttatggctcttcttgaacggcgtggtcgtctcccacaacatacttatcttgattattccatcactaactttttggctgcaatctttatagcctttgtgtttggtgggataggtgaaagtacacatgaggcaccaagtttcattacacaactcactcaggttagaacttgaaggattttgatctctataatggagattgcattgatgaatctcttgctgctgctgctacagattcaagataattggccctctgtgttgtttgcaatggcgggtggggttggtttaagtattggaaaccttgctactcagtattctttagcttttgttggtctgtctgttacagaagtgacagctgcgagcatcaccgttgttgtaggcactactgtcaattactttttggacaacggattgaacagagctgatattcttttctctggtgttggttgcttcttggtagctgtttgtcttggttctgctgttcactcttccaattctgctgatatcaaggcgaaactcggaaaactctcaggggattgtgaaactgtgacccctgaagagtgccagagactatttggaggtgaaagtttgacatacataattgtctgatagtgttaacaagatcactcatcatcacttctttagttttatagtagaagaagaagaagaagaaaaagagatggagaatgtaaaggaagggtctgcagcttttcttatagcactcgaaaacaaaagagcaatcaaagtaggatctttctctttagttcttctaagttggtcttgagtttcgaggcaacaacgtaaatcaatctctatgaacttcttttggattcaggtgttaggaaagagcatggttgttggtctgggaataactttttttgcaggactttctttctcattgttctcaccactattcaaccttgcaacaaacgatcaatggcacactctaaaacaaggcgttcccaagctgattgtctacactgcgttcttctacttctcactatcttgctttgtaatcgcggtcgctctcaacattagtttcctgtacaaacctgtgctagactcaccaagatcttcctttagagaatacctgagtgactggaacggaagaggttgggcacttgcagctggattgttatgtgggtttggtaacggtcttcagttcatgggtggacaagctgcaggatatgcagcctcagatgctgttcaggtcacacaaacacttataatcctaaactagaacgtttctttgatctttgcttgcgttttagtgattcttgattggtattcttgtacaggcacttcctttagtatcgactttttgggggatatatctgtttggggagtataggagatcatctacgcgaacatatgctttgcttgttggaatgctggtgatgtttactgttgctgtggggcttctaatggcctcggctggggaaagagagacgcgatttacttagagagctgatcgatatgaccaaaacagatggtgtcgctcttaatatgttgtacattgtggttacttcaattgaaagaaaatgtaaatgattgctgtttgatattcgtttttataagaaatgaaatgaatacagataatatattagtagtgctacaatctccaaagtttgcaaaaatttgagtttcttctattcggtaagaaactctaatatcaaaaactctaaatcgctagaaggaggggtcgaacctccgaccttgtggttaacagccacacgctctaaccaactgagctattccagcttttgttaactatttcaaaaacaataaatatattcgtaaacagatgttttaatttcaatttgacttgacaagattaccctttggcacatcgattaacatatcatcgactttggaacctcacaacataatcgcatgtagtcacacttagtcaaatccaaacccaaaaaatctcaaagaaaataagaaaaaataaaaataaaaatgaagagaataagaataatggcaacgcttgtaatagcaaacatgttaatggcgactccaacgtctcgagcctctctcaatcttcttcgtcgttcgccaaaacccaaatatttctcatcttcttcttgtcattttcgtccctcaacttttcgtaaatcatatccttgccccatctggtcttcttctttctctttttgtctccctcctcctagatccaccacttccacctctctctcctcctcctctttccgccccttctcctctcctccgtccatgtcttccgccgccgctgccgccgtggaatccgtcgtctccgacgagactctttcctcgaatcctctcttgcaggacttcgatttccctccgtttgattccgttgatgccagtcatgttcgtcctgggattcgtgctctattgcagcatctcgtatgttcacaccttcttcttcgtttttcttcacagattcatgtatttttgattcgattgttatagcctctttgattgattttcaggaagctgaattggaggagctagagaaatctgtggagccaacatggccaaaactggtggaaccattagagaaaatcgttgatcggttaactgttgtttggggaatgatcaatcaccttaaggctgtcaaggacacacctgagctacgtgctgccatcgaagacgttcaggttgaataactaatcatgcttgttttttgtgtgttagttcagtgacttgggggatttatatcttgttttacttaactacattggtcttatgcagccagagaaagtgaagttccagctcaggttggggcaaagcaagcctatttacaatgcctttaaagctattcgtgaatctcctgattggtc

SEQ ID NO: 138828 - DNA, 678 bp, Arabidopsis thaliana landsberg
atggctgaggatagagacgaggtttcacggtcagtgactagctcaagtaacggaagcagtcataatttcagggaaagaatcagtggcgtgcttcaccggaaaatagattggagttctctgatgaatatggggaaagaatggattaggaatcctattaacatggctttattcgtttggatacttgttgttgcagtctctggtgctattctcttcatggttatgactggtatgttgaatcatgctttgcctaagaagtcacagagagatgcttggtttgaagttaacaatcagattcttaatggcttgtttactttgatgtgtctttatcaacatcccaaacggttttatcacttagtgcttctttgtagatggaagcatgatgatattactaagcttaggaaagcttattgcaaggatgggacttataagcctaatgaatggatgcacattatggttgttgtcattttgcttcacttgaattgttttgctcagtacgcgctttgtggtcttaatgttggatacaggagatcagagagacctcccattggagttgctatatgtatctctgctgccattggagctcctgcggttgcgggtttgtacactatactaagtccacttgggaaagattataatgattctaatgaagacgaggagaatcaactgaagcaacgtgaa

SEQ ID NO: 138829 - DNA, 222 bp, Arabidopsis thaliana landsberg
ctctgcttaaaaactagggttaggctacgattctgtttacaccaaaaaagcttttcgtcatcgccgtttggctttctgaaacaaatcacaccgtttaagattttctctggttctgagattatggagatggagcgtgtgcatgaattccctcatactcacatggatcgtcgtcccagaaagagagcgcgtctcggttgggatgtgttgcctcaggcaaccaag

SEQ ID NO: 138830 - DNA, 597 bp, Arabidopsis thaliana landsberg; identical to SEQ ID NO: 51234

SEQ ID NO: 138831 - DNA, 2108 bp, Arabidopsis thaliana landsberg
tcaaatgtggtttctactacttacacttctgactcatgcttaggctccgaacacaaaacttcgaatcttaaaattaatagccttagatgtggctattcattcagtaaaacttttatttttaaatataacaatgtccctccaactataagatccaacggctgatatcattctaaacctttacagctaaatctgaatctccaccgtgcgaatcatcaactaccttcttcttcgtcttcacctcactcagacctcaatccccaccgaaaaagattaaaactcacactatctctctctctctctagaaaaagaaagaaagaagaaaaacttattgttattcccatttcgcccctatccgaaaaatggttgaagctcaatcatggacaacgcggcggatgagcaatcctagattcgacgccgccgcaaccgccgcaccaaccatcgtagacatccccggaacaccaccacactcctccgcttcttcaccactcaaacccttcttcctctcttcccccaccgtatcaccaacaatcctcacggcggctataatcgccgcctggtttggctcaaatataggagtcctcctcttaaacaaataccttctcttctactacggtttccgttacccaatcttcctcaccatgacacacatgttatcatgcgccgcctatagctccgccgtaatcaatatcgccggaatcgtgccacgtcagcacatcttatctcgccgtcagtttctaaagatcctctctttgtcagcgatcttttgtctctccgtcgtctgtggcaacacttcgctacgttatatccctgtttcttttaatcaagctattggagctacgacgccgtttttcaccgccgtgttctcttttctcattacttgtaaaacagagtccactgaagtttatttagctcttcttccggttgtctccggcatcgttcttgcttctaactctgaaccttcttttcatctttttggtttccttatctgtgttgcttccaccgccggtagagctctcaaatccgtcgtccaggtattaatcggtttggtgtattgaattttccgttttagtactaagagaatcagaaattgcgttcgaatttcgattttattacaaaacatcactcttaaatttttccgaatccaggtttattataacaaatctggaagaaatttagttccagttcgaatccggtttttattcttagaactgaaatgagtccggtttagttcagtctctgtctgaatttcaatctatagcatttaaacagataattcagattctaatcgatcggtatgatcgaattgcgtctattggatctcactattggtttggttgaaccggattttgtgtattttgtaggggattattctgacgtcggaatcggagaagctacattctatgaatcttttgctatacatggctccaatggcggcttgtatcttactaccatttacgctatacattgaaggaaacgttttaagagttctaatcgagaaagcgaggacggatccattgatcatcttcttgttagccgggaatgcgacagtggcatatttagtgaatttgacgaatttcttggtgacaaagcatacaagtgctctcacattgcaggttttggggaacggaaaagctgcggtggctgccggagtctcggttttgatatttaggaatccggtgacggtgatgggaatagccggatttggtgtgacgattatgggtgtggttctctatagcgaagctaggaagagatccaaattgctaaaccagaagtgaaaagtgtgaagagaaagattattggatttaaaccggtgaagtaatttttactttttaatttttacttcttttttttcggtttagtttcttgattctttggaattctgctattgtttggaaccggtttggttcgttttgagagggggaaaatcaatttaattgtaaatggttgagattggagaaaaactatgaaaagaaaagtggagatatatttatgtaacaaaagtgaaacaagtagggagcacaattaaaggaaataagattgtatctttataattattttactttcttttagttttttcttttcttgtactattatgttttatagttctg

SEQ ID NO: 138832 - DNA, 1606 bp, Arabidopsis thaliana landsberg
taacaacgacgaaccaagcacaaaaggctttagagttattgagagagaacaagaacaagtttgatctggttattagtgatgttgacatgcctgacatggatggtttcaaactccttgagcttgttggtcttgaaatggacctacctgtcataagtaagtcttattattattattattttctaattaaacttttgtcatttatttccttaatgactcactacaggaataaagttttgatctctagacttggttttgtgatgatgattttcttgttgttgcagtgttgtctgcgcatagtgatccaaagtatgtgatgaagggagttactcatggtgcttgtgattatctactgaagccggttcgtattgaggagttgaagaacatatggcaacatgtcgtgagaagtagatttgataagaaccgtgggagtaataataatggtgataagagagatggatcaggtaatgaaggtgttgggaattctgatcagaacaatgggaaaggtaatagaaaacgtaaagatcagtataatgaagatgaggatgaggatagagatgataatgatgattcgtgtgctcaaaagaagcaacgtgttgtttggactgttgagctgcataagaaatttgttgcagctgttaaccaattgggatatgagagtaagcttattaatatgtcacttgatatgagagtaagcttatcagtatgtcacttaagttctgttttgtgtgtgttgttttgattgcagaggctatgcctaaaaagattttggatctgatgaatgttgagaagctcactagagaaaatgtggccagtcatcttcaggttacaaagaatctttcatgtttttaacttgcgtaacccgaagatttgttttttaacacctcggaagcttatgactttgttcgctgtggtttgcagaaattccgcctttacttgaagaggatcagtggtgtggctaatcagcaagctattatggcaaactctgagttacattttatgcaaatgaatggacttgatggtttccatcaccgcccaatccctgttggatctggtcagtaccatggtggggctcctgcaatgagatctttccctccaaacgggattcttggcagactcaatactccttcggggatcggtgtccgcagcctttcttctcctcctgcaggaatgttcttgcaaaaccagaccgatatcggaaagtttcaccatgtctcatcacttcctcttaaccacagtgatggaggaaacatacttcaagggttgccaatgcctttagagttcgaccagcttcagacaaacaacaacaaaagtagaaacatgaacagtaacaagagcattgctgggacctccatggcttttcctagcttctctacgcaacaaaactcgctcatcagtgctcctaataacaatgtcgtggttctagaaggtcacccacaagcaactcctccaggcttcccaggacaccagatcaataaacgtttggagcattggtcaaatgctgtatcctcttcgactcaccctcctccccgggcacataacaagaatagtatcaatcatcagttcgatgtctctccattacagcattctagacccgaccccttggaat

SEQ ID NO: 138833 - DNA, 984 bp, Arabidopsis thaliana landsberg
atgctgtcatctcacttgtctcaaatttgtttctcttgcagggatccattgggaaatttgcctgcagatctcatcagaaaatgtacagatttgatggacttgaactttgccgaaggtcagagactaagaaccctcaacaagaattggaagctagcgttaccttctttccgtaagggagcttacagagaggaaaggccttggttgctttaccgtgaaaggggttccggagagacccgtttctttgaccctgtgagagagagggtacatcgtgggaacgacccacgtcttgcagatgcaagattcttgggatcaacattgggttggcttgttatgtccgagtccttggacttaaacccacgcaaaacccaccaaactttcctgtacaacccgttcatttcagaactgcagcaactacccgaactcacccttgatagcccatatcccacgggtgtactccgttacggtgtactcaccggaaatccaagtgacaacaacacttatgcttgcctcataacagattacttgcacgaaattggtaatcggagggatacttatacgctactaatttactatgtagccaagacgagcggacgatgggagcagaattggtccgtggcttctatgctagtcgttggcattttcgatacttggtatatagagtccatctccccatctccggacaaaatatcaattgaaatatggcccaaacgttatgacttcaccttccaaacccaagagtggaatgtctcaaactttattccagtggatcctatccaatgggatcctttccacgaccaatctttatatcatgtgaaacatcgacttcagttaccagaaaatccctctactctagccataattatcggcacttcaactgatcgcacgagagtgcgcaacaagattataggtgatcaatctgatgatgatgatcctagggcttctgatcacattattgacggagtttgggttgaggttcgcccttag

SEQ ID NO: 138834 - DNA, 369 bp, Arabidopsis thaliana landsberg
gatcagccttgccgaacggaacagttgtttcagctaataaaagcaagttcgatgataagattgaggctgcttcagcccaaatgtatttccattattatggacaacttttacatcagcaaaatatgctacaggattatgtgaggacgggtaagatctggcctttgtgcattgattacctcagaggaaggataaactttttttttgttgttgcgaacagcaatttgacccaagatagctctttttcggcatattactctcttcaggtacactatcatgctgcagtcatggagaaccgctcagatttttctggccgtgttgttgtcgatgtaggcgctggtagtgccattatgtcaactctttgctgccctg

SEQ ID NO: 138835 - DNA, 1067 bp, Arabidopsis thaliana landsberg
atgctgacccttcgacaatttaaatccgttaaaccgaaccaaccaggagagaatcgggatcgcgacgtcgaaacaaggaagaagacgcgacgcgacgagtgagagcgagctgttttccgatgaaaacgccgacgctcctcctccttccattcttggtcttcgtatccataattcttccctcaagctgccatggcgaatgggaaatcctcacggagcaaaacttctcttctcagatccgtctccaccctcacgtcctcctctttgtcaccactccatgtactctcactctcctcctcagatcagtttgcttgttaagctgaatttctcacttgctgaggtttacctttatggagatatgtatcactattttatttgttttctgattggtttcattactgatttcatagggtgtggtgagtccagatctcttaagtatgaaattactcagatggttcagagaagagaagagtttggcttgttgaagttaatggttgtatacagaaactcagaaaaggtgttagcacaagccattggtgctgctgtcaatgggataacaattttgtactatcacaatagtgtgccttacaactatctagggaaactccgagcctcgaatatattgtcatctattcatccttatctgacatctacgcctgaagaactccctctcaaacatttgaagtctccaaagagtttgaaagatttccttcaatcatctgataaggctttacttctgttcgaattttgcggatggacaactacactgatgtctgagctgaagaaaaatgttactcaagataacctttggcagggtgagagatagtcctcctgatcttgtgagattaattatgttcctatcatgtttgtttcttttatggttgatttctatatagtttcttcatctcctaatagatgaagctagtaatagatctttagagtttagagaaattggaatgtgtgcctaatccttagacattctgatcattacttcgcaggaaacttctccaaaaaagtagaaactgatcgagtgctgaagctaataggaaaaaataaccagaaggtgcctg

SEQ ID NO: 138836 - DNA, 272 bp, Arabidopsis thaliana landsberg
cccatttacgacgaaaaactaactaacaagcccattagtattagtattccttttaacaatggacccaggcgccgaataaaaactaaatccggtccggatcttaatcctctagcaacagtgaaccgggtccgcttcgtcggaactcatggccaattcgaaaatggcgatagcttctctagcagctcaaatccgtcccttcacatgtttggccgcgtctctgccgtcacggttggcgcctcatccaccagacctcatccggtggatcaagcgag

SEQ ID NO: 138837 - DNA, 1051 bp, Arabidopsis thaliana landsberg
atttataagtgaaccctacaaagtacaagtcgtaaactcaaccacaagagaaaccttatcttcttcttcttcttcatcatcaatctctcaagacatgctctcttttttctctaaccagatcgaccggcaaaaagatgtgtctaatgaggaaaaaaccctaaccaatctcgaaaaatctgacggttcacaattccctggcgatgactaccgtccgtccgatcggaaaaactggatggctggtcttacgttggagaaactaactctaaacaagatcgtgtggccaggaacgcatgattcagccaccaacgatatcggaatacctctgatctctcgtcctttagctgaatgccaatcgctctctatctacgagcagctcgtcctcgggacacgtgtcctcgatatccgtgtgcaagaggatcgccaaatctgccacgggattctgacgtcatacgaaattgatgttgtcattgatgacgttatcagattcttgtcggagactcactcggagattgtaatcctggagataaggactgagtttggacacaaagatcctccggggttcgagacttacttggcagacaagttaggtcaattcttgatacatcaagatgatagcttgttcaacaagccggtatcagagattttgccgaaaagggttatatgcatctggaaacctagagagtctccaaagccgagccgtggtggaattctctggaactcagattatctaaaagataattggatcgatacggatcttccatggacgaaatttcagagcaatttgaagcatctgagtgagcagcagccgacatcttctagaaaattcttttaccgggttgagaacacggtcacgccgcaagcagataatccggttgtgtgggttaaaccggtgactgatcggatccgaaaacacgccagactatttatttctcagtgtgtttccaagggatgtggagataagttgcagattttgtccactgatttcattgaaggagatttcgttgatgcctgtgtcggccttactcacgcaagaatcgaaggaaaggtttga

SEQ ID NO: 138838 - DNA, 904 bp, Arabidopsis thaliana landsberg
gataacgaggacaggaagactgtagtttcagtgggtgtgacttctagtgtcgacgaaggagaacccgatacagatcagagtaaggaacttcattttttgttggtctgaactatgattagtagctgcgtagtttttaacagtggtttaactttacaggatatgagttatcactttgcaaggatgagcttcgtcagggtatgggacttagcgcagctgctgaagtctttgatgcgcatatgatctccaaggaagaatatataaattcggccacatcaattcttgaaagtgaaaatctggttgttaggattagagaaacgtatatgccatggacgaaagctgctcgaattgtgcttgggaaagctgtgtttgatctagacttagatatccagccagatgatgtgatttctgtggaggaaaatgaatcgcctaagcccaaggatgatgaaactacaataactccttcttcatctggaacaagatggagactctggccgattccttttagaagggttaaaactgttgagcatacgggaagtaactcctcaagcgaagaagatctgtttgttgattccgaacctggcttacagaactcaccggaaacacaatcaaccacagagagtcgccatgagtctccgcgtagacaacttgtgagaactaatgtccctaccaatgaacagatcgcatctctgaatctgaaagatggtcagaatatgataacatttagtttctcaacaagagttcttggaacacaacaggtttgttgatggttacattagttgaaaatttgaaagcacaccgaggaaaactcttctaactttagtttctaattactttttcgttgttattacttattaggtcgatgctcacatttaccggtggagatgggacaccaagatagtgattt

SEQ ID NO: 138839 - DNA, 690 bp, Arabidopsis thaliana landsberg
ggtaaaagcaacataagcgtgaagtaccagctaccaaacgaagatcttgacgcgttgatttccgtatcaacggacgaagatgtagagaacatgatggacgaatacgaccgcgtcgcacagaatcaaaacccacgcgcctctcgtcttcgtctttttctcttcaccaaaaacgtcgccggagaagaagataacgatagtcgagctagcagtatcagctctctcctcgatagctctgttaatcgggagcaatggttcctcgacgctcttaacctcggttcttccgccgccgcaaccgcggtatctaacggtgggtccggtagagtctttgagcgagttagatctgaagtctcgtcgattgtttctgaagttcctgattatctctttggattggataatttcgatgaaactgctccgccgcatgagcttcgtgatcgtgatccgagagctaagatacaacgagaagtctcgacgctttcggatcctggttcgcctcgtcgcgatgttccttcgccgtatggttcgacgtcttcggctcctgtgatgcgaatatctacaccggaactttcaccaccagtttttactaaaccggaaagtccagaaccggtttcgactccgaaatccaatcctcaaccggaacaagtaatgcaacagagtaatctcccggttaactcgcaatggcaatatgcccct

SEQ ID NO: 138840 - DNA, 746 bp, Arabidopsis thaliana landsberg
cttgtagtttaaacggactaacagtaggagactcactgtcctgtcaacatgttagagtctccagcacggtctgagagctttctttatcacaggtttgttgttgcatatggttgtgaagcatttgttgttgcatatggttgtcaagtttcaaaatgactatctgatgagctttattcatgtgtcgtacttaacacagggatgatttatcattacaatactctcccatgtcagaagactcggacgaagcgagattctgtgaggacccaacagcaacagcaagcactagctcatcgcaacccgagagccgcccaactagtccagtttcaccataccgataccaaagacctcttacttcaacaaactcaccacaaccgtcaccaacaatcttacaccattcacatacatgtcctgcctccatgatctccaatgcagcaactactactacaccacagtctcgccaaagaggatcagacacagaaggaaggtttccatcatcgcccagtgatatctgccattcgggtgacttgaggagaaccgctctactcaggtcggttcaaatgagaacacaaccatgtggttatagttcaagttcgggaccaagcaatattgacggtgaagagaggatgtgttctaagtctatggaagaagatagaggctataacaaaggggaagatatcccttacgctgaagtctctagtaagagcaagtcttgtaaagcattggacatgagactttgtgaaaagtga

SEQ ID NO: 138841 - DNA, 1467 bp, Arabidopsis thaliana landsberg
ggttgctgatcagattcttaaacttgttccaaattccgaggtaaagtcgttgagtgccagttgtttatgttataaactaaggaatcatgtaagccatctctgatgtgatgtgcaaatgtagcacttccggacaacattaagatgcctgaagtactgggctaagaagcgtggggtctattcaaatgtaaggtggtgtctttctgaatattacatctgttgacaatattcttaggttaaagctcttgtaatctctgttatattgagcaggttactggatttcttggtggtgtaaactgggcacttctggttgcacgcctttgccagttttatccaaatgctattcctagtatgttggtttctcgattttttagagtatatacacaatggcgctggccgaatccagtcatgctttgtgcaatagaagaagatgaccttagctttcctgtttgggacccacgaaaaaatcatcgtgaccgctatcatcttatgccaataataactcctgcatacccatgcatgaattctagttacaatgtctctcaaagcactcttcgtgttatgacagagcaattccagtttggcaacacgatctgtcaggttaggaagcataacacccgattttgtttatgaaaagtttacccaggatcctgttgctaactaattttttatatgcaggagattgagttaaataaacaacactggagttccttatttcagcaatatatgttcttcgaggcatataaaaactaccttcaggttgatgtactagctgcagatgccgaagatttattggcatggaaaggttgggtggagtcacggttcaggcaactgaccttgaaggtagatagccttatgttcgtttaatgttgtggagtacaccttccgtgtcctcagtgtgttctcgaattttttactgggagaataaacaatgatttaaggattcttcgtcttctctttttatatccaataatgcagatagaacgagacacaaatgggatgttaatgtgccaccctcaaccaaacgagtatgtagacacttcgaagcagtttcgacattgtgcctttttcatgggcttgcagagggcagatggatttggtggccaagaatgtcaacagtttgatatacgtggaacagtggacgaattcaggcaagaggtaaacatgtatatgttttggagacctgggatggatgtgcatgtttctcatgttcgaagacggcagcttccatcttttgtttttccaaatggatataaaaggtctcggcaatcaaggcaccagagtcaacaatgcagagaacctggtgatgagggcgttggatctttatccgactctgctgagagatatgcgaagagaaagaacgatgatgaaattatgaattccaggccagagaaacgtgagaagcgcgcatcttgtagtctacatactctggatgcagcttctcctgacagcagtggtatcacgtactag

SEQ ID NO: 138842 - DNA, 3681 bp, Arabidopsis thaliana landsberg
atggagagatctgattcaagggatttgtataactttgttcgcgcttcttccttaggtcagtcttcttcttaaaggatgtttctttctttctcttttatgattttgctgcttatagctgattttggattcggttttgtgtattgcttggtttgtttaagcacataaatgttggagatttatgctatgtatgatttaggtcactgagctatatagcatctttaatgttctaatgggatctgatgggtttgcttagttttcgatgttgtgttccaatgcacaaatgatagaccagtttggatactaaaaaacttgtctttagagatgttgtgttaatcccttgaattgttaaagtctagatttttatggtcatgtgtttgtaatgttggattctgaaacagctgtttttgtatctgcagataaaaacagtacactctttgatgcatcacaatatgagttttttggacaaaatctggatgatatggaacttgggggtcttgatgatgatggagtaatcgctcctgttcttggacatgctgatgatgatgagtatcacttgtttgataaaggagaggtaacatgctttctctgttgaaagctaacatcttgataatgatgcatgtagtaagtaatggttgcagatgttttactaatagatatgcatgttggttccagggtgcaggtttaggatcactatctgacatggatgatcttgcgacaactttcgcaaaggttagcataatttttatttacaaacactatgatgacaatcttaatatcttacctaccaccatgtcatggttgcatgtgataaactgataatcaatcatcttctttttgtttcatgcaaatgcttgttgctttttttttcagcttcttcgttttgctttgacttgttgtcagtgattttaaatctacctattctcttttgtgtagttaaacagagttgttaccggacccaaacaccctggagttattggtgatagaggatcaggatccttttcaagagagagtgagttaaattcctatcttggttactactttataactttagggttattttttagcctggtgtagttcttgttcttcagttttccttttctgtttccgttttcggcaaagccagcagctgagcgtgagtactcagtagctttttttactcggtgtagctactaataaatcctttctgagtccacatattgtgacctggtccgttttattgaggtgaagggttggattgtagatataagttgtgttagttgaagaaatcatgtggtcattctaatttgcaaattcagtacttaaaatatggaattacctgttttgagctattatttacacgattacttttttctgactgaactctatcttataggttcttctgctaccgattggacacaagatgcagagctcacaagctggttggacgaacaagatcatgattctaagagatggtcctcacagccacaatcatttgctcattcaaaacctttgtacaggacatcctcttatcctcagcagcaaccgcagctgcagcactacaatagtgaaccgataattttaccagaatcaaattttacctcatttcccccgcctggtaacagatctccgcaggcttcacccggaaatctccatcgcgctccttctcttcctggtggttctcagttgacctattctgcaccttccccgctgtcaaattctggttttcatctttcaggattgtcgcaagggccccactatggtggtaatttgactagatatgcctcgtgcggtcctacgcttggtaacatggtgcaacctcattgggtcactgatcctggtcatctacacggagatcattctggtttattacataatctggtgcaacaacagcatcaacaattgcctcctcgaaatgctattatgtcgcaacatttgcttgccctccagcagagacaatcatatgctcaacttgcagcgctacagtctcaactgtatagttcctatccttcgccatcacgtaaagtcccttttggagttggtgaagttagggaacacaaacataagtcatctcatagaagtcgaaagaatagaggactctctcaacagacatcagacgcagctagtcagaaaagtgaaactggactgcagtttagatcaaagcacatgacttcagaagaaatagagagtatactcaagatgcagcattccaattcacacagcaatgatccctatgtcaatgattattaccaccaagcgaagcttgccaagaagtctgccggatctaaagcaatctctcacttctatcctgctcagttgaaggaccaccagcctcggtcccgtaatagttctgaacagcatccacaagttcatgtagatgctcttggtaaaattacacttccatctgtccgcaggccacatgccttgcttgaggttgactcttctcctggttttaacgatggaagcggggatcataagggctcaggaaaacatttggaacaggaacctctcgttgcagctagggttacaattgaagatgctcttggagttcttattgacatagttgacattgacaggactctccaaaacacaagaccccaggacggaggtgcccaactcaagagaaagcggcagatcctgctagaaggattagcgacagcacttcaacttgctgatccgttcagcaaaaccggtcagaaatctgggatgactgctaaggatgatattgtctttctacgtatagcgactctccccaagggtcggaaattgcttacaaagtatctacaacttctagttccaggtactgagaatgctcgagttgtctgtatggctatattccgccacttgagatttctgttcggcggcctaccttcagatactctagcagcagagacaatatctaatcttgccaaagcagtcacggtttgcgttcaggccatggaccttcgagcactgagtgcttgccttgcagctgtagtatgttcttcagagcagccacctctccgtcctatcggaagttctgctggagatggtgcttcagttgtcttgatatctcttcttgagagagctgcggaagtagtggtggttcctcgagtcatgcatgggaattctaatgatggtctctggagagcgtcatttgatgaattcttcaaccttcttaccaaatactgcagaagcaagtatgacacaatccgtggacagaaccaagggagtgcagcggatgttttggagctggcgataaagagggaaatgcccgctgagcttttacgtgcgagtctgcgtcacaccaatgacgaccagaggaactatttattaaactttggtcgtaaaccatcagcaattagtgagtcggcatctcatgcaaggggtggacagatcaactctgaatctgtgaggggttaataaaaaagaaagagaaaccatgtgcttggaagattccaattcttggttttcatggctgtggtgtggactcaggagacaaacttgtaagtaacctggtggtgtaggaatcttttcacaagggtttcaggtgaaaagtgcttttagattctgctcttcgtcttcgttttttaactttgaactcttttatatttcgtattatcttttatggtggacaaatgcatattctgcttggtttgtgtattggatgatgggaaagaatgtgaaacatggagtagtagggttatctgaagaagtaatgtcttc

SEQ ID NO: 138843 - DNA, 822 bp, Arabidopsis thaliana landsberg
ttacagagaaagataatggcactctaggattagatatcaactcagactcggctcttcagaagaaaaacgtcaatcatatttcagaaagtagtggtaaagatagtggatctatagatagtcctcaagaacagggtttaacggtgaggccgagagaaactaaaggagttgaagcaagtcatgcaatcaaatgcgcaaatactactgtcaaaagaaagatggatcatcagaaagagacaatgttgggaaagaaacgccacaggcagaccatgtttctcaacctggacgatgtcaggcaagctggtcctattaagacaacaacacctagaagacagaatttcccacaacctgtcgtcacacgcacagttagagaatctcgtgcaggccctccaactgctgagcaagcaggcggggttccagggcatgttgtataccgggatcagaaaccaattgacattcctaatggtggtatacatccagaaacatctgaacctaagttagaatctaatggtgaatcacaatccggctccgctggtaaaactaggaggatgaatggggaggcaggaccttctgctgaggcgacatcgacatctgtgtcaaggcagggttcatggaagcagccaataaattcacggcagctgaagagtggtcattcgtcaaatagacaagttcccttgtgcagtcaaacctctgccgactccaagtttggtaacaagaaatttacttcgttcaagaagcaagcaacaaatagtacccaataccaagatacgtctgtggagcgtcttctacgagaagtgaccaacgaaaagttctggcatcatccag

SEQ ID NO: 138844 - DNA, 1003 bp, Arabidopsis thaliana landsberg
caaatggagggacaaatggccgagcaaaacaacgttctagtgatgtcaaaaaccctgagcgatacctcttgaatcctgaaaacccttactttgtgcaagcggtgacaaaaaggaacgacgttctggtaataatacaagtgtttacattgtcagctttttattccatttgtggcctagaaagctaaagcttgtctttgtttcctgctgtatgtgcaagtatgtgagccgaccggtggttcagagctatcgcttgaagtttggtcccgttaagtccaccattacctatcttcttcctggggagaaaaaagaggaaggcgagaatagaatctataacgggaaaccttgtttcagtggctggtcggttctatgtcggaggcacaatctgaatatcggagattccgtggtttgtgaacttgaacgctccggtggtgtggttaccgctgttagagtgcatttcgtcaagaaagactagaccaatcctctctagtaacagaatatgttattaataactttctgtaacaatgctaaatgtgacaattatgtgttagtttaaaaaacttgtcaattcacttgcaatcgaatcgattctagagtatgatgggccagtttctaatatgggcccaataatattgtttgaccattttattatttccatacacagtacacatttgacacttgtcacagtgctgttgactgttgagtctcctctctttctgaaagcagagagattcgatttggagaacaagggctgagaagagcagacacagcagcgagaggaagcttcttcgactgcgacggtgcgtgaatttcatgctccggcgacgttacttttgacgcaattacttgccttttacgcatttactttgttctgacttctgacctaagtttttttcccctttgaccgtacaaattttgcttctttcttcgtttttctctgtgtctctcattagtcaccattttcgtgttctctgctttgtaacactttcgggtttagctactgaaa

SEQ ID NO: 138845 - DNA, 504 bp, Arabidopsis thaliana landsberg
caagaaaaaagggaagggggattctgatggagatgagtctagtgaatcaagtgaatctagtgaatctgaatcggccagcgatgattctgcttcatctttggaagatcaaggtaaaagacactctcgtacaagtaaaaactcacgccgatcaaagaaaaaccggaagaagtcatctaaaactgttatcatccgtaatattaactatataaccccggagggaagaaatggagacatggagggaaatgagtttacggacaacggttccatcaaagagactgtagatgctgctgttggaatgctcaacgaaaaaagagctcatgagggagaagtttctggtgaagaaaaacgaagcaacgagaattgggattcatttcagaatattttgatgaggcacgatgatggctcagatgtgcattcaatggatgtcatcggtcaggagcatttcacacatagaaaaatagtgtgggtgcaaattcaaggctgcaacaaagaacaggcctgggt

SEQ ID NO: 138846 - DNA, 836 bp, Arabidopsis thaliana landsberg
atggcttggaacaagctaggtcaaggctggaggagtcccattctaaagttgagcaaagtcggctggattatggggcattagaactggaactggagattgaaaggtaaatcaattgctccctccatcttctctatcctaattaatagtcataaacaagtgttagtgatgaaggtatcgttcttttctgcgtatatcaggttcaataggagaaggatagaggaggaaatggaaatagccaaaaagaaagtttctcgtcttcggtctctcatagaaggatcatcggccattcaaaagctccgacaagaactcagtgaatttaaagaaattctgaagtgtaaggcctgcaacgatcgcccaaaagaggtaaagagtcactgctctccattatttagatctcagcaagatgctcaaatcatgatcccttgaatcttttagtcaactgcgtgcgtgattgctgattggttttggtctttggcttaacaaactaggtggtgattacgaagtgctaccatttgttctgcaacccatgtgtgcaaaagctcacaggaactcgacaaaagaagtgtccaacatgctcagcaagttttggaccaaatgatattaaacctatctacatatgaccgcaccaaaacactctgagcatgatgatgtatgatgaaactgtgaaacacacacaggtactttttctcatataggataaacattagatctctctgtaattattactctcttttattgggaaaggtcatgaagaataattggatatggcaaatcagagtttttgaggaaccattttgggattttgataatgtgatagagaataggtaacactgtta

SEQ ID NO: 138847 - DNA, 364 bp, Arabidopsis thaliana landsberg
  unsure (1)..(364): unsure at all n locations
atgttgactagatttaagaaacaaaataataagatggttagggcaaatatagtgagcatggttctgttgatgcatgccatcgttgggtttccttttcatgcgaggggattaagtatgacttactacatgatgagctgtcctttcgctgaacagattgtgaagaacagtgttaacaatgctcttcaagccgatcccactttagccgctggtcttatccgtatgttgttccacgactgtttcatcgaggtacttaacgttttctgtttaataattgtgttnttttcgtagaacaacccttaanattaatgtgtaatttttggttcataataagggatgtgatgcgtcaattctgctagattcaacg

SEQ ID NO: 138848 - DNA, 120 bp, Arabidopsis thaliana landsberg
atgcatagtttgaatgaaacagtaattcctgatgttgattacatgcagtctgatagagggcatatgcatgctgctgcctctgattccagtgatcgatcaaaggataagttggatcaaaag

SEQ ID NO: 138849 - DNA, 509 bp, Arabidopsis thaliana landsberg
gagaaaagataaagaaaatgggtttgagaagaacatggttggttttgttcattctcttcatctttcatcttcagcacaatcttccttccgtgagctcacgaccttcctcagtcgatacaaaccacgagactctcccttttagtgtttcaaagccagacgttgttgtgtttgaaggaaaggctcgggaattagctgtcgttatcaaaaaaggaggaggtggaggaggtggaggacgcggaggcggtggagcacgaagcggcggtaggagcaggggaggaggaggtggcagcagtagtagccgcagccgtgactggaaacgcggcggaggggtggttccgattcatacgggtggtggtaatggcagtctgggtggtggatcggcaggatcacatagatcaagcggcagcatgaatcttcgaggaacaatgtgtgcggtctgttggttggctttgtcggttttagccggtttagtcttggttcagtagggttcagagtaattattggccatt

SEQ ID NO: 138850 - DNA, 933 bp, Arabidopsis thaliana landsberg
ttttactgaaagaattatttctatacttcatcagccaatctcagtctcatcatctccgatgggaaaacccggcggcgcaaagaccagaaccgccgtatgtttatcagacggtgttttctttctcgccggagctttcatgtctctcactctcgtctggtcttacttctcaatcttttcaccttctttcaccagtttacgtcacgacggcaaaccggttcaatgctccggtttagacatgcaattcgacccatccgagcccggtttttacgacgacccggatctaagctactcgatcgagaaaccaatcacaaaatgggacgagaaacgaaaccaatggtttgaatcacacccatctttcaaacccggttcagaaaaccggatcttaatggtaaccggttcacaatcctcgccgtgtaaaaacccaatcggagaccatttattactcctccgatgtttcaaaaacaaagtcgattacgctagaatccatggtcacgacatcttctacagcaattctcttcttcatccgaagatgaattcgtattgggcgaaacttccggtggttaaagctgcgatgcttgctcacccatttatggattgaagctttaggtaattttctcaaacacatttatggattgaagctttaggtaatgaatgagctgaatttgcatataaaaaatcgatactttcattttccagaacaaaccaagatttagcataaatgttcaaaattgaaactttgattcctaacttcttggaatgattcatattgagctagatttagatctgtatgattgatatgatgggtttggtttgtttatgagtagagagaaaatgggtgatgaggcagagatcaaggaacatttaaagccacaagcttcatctgaaacaatagacaagaaacataatgtgaaagggaagaggttatggcagaaa

SEQ ID NO: 138851 - DNA, 970 bp, Arabidopsis thaliana landsberg
cgaatcctctcgtcgtcttcttcgtttctctctacctcactcatcgaagtgttagggtttcttcgatttggcagaatattatttcaactatctctgctgaactcgctttcctaacttctctctctgtcactctaactctttgtcggtaccaaattcttcttcactcgaagaactgtttaggtcaagtatgacttaattctgccaaatttctggtatatttatcaaatttctgctttttaagctggatttgtttttttaataagcttatttgatttcgtttcttaggatttttagcttcacgttgatgtaagcttctaagcttaatttgatttcgttactttgcattttgagattttattggtgttatttttggttttgtatagtttagatttccgtccatctagtaaattagggattctctgtgtacatttagagctcttctttttgtatagaaagggagtctcagattttatctgatagtattgctgccgtgctagttatgagtttctctccattcctggatttgtatcttcactgatatatctattttaggtttttagctgatttctttagtttaatttacatgagtgtctcattttctgacctttttatatataaaaatttcaggtgtttattcaaagttcaaagtcaattgaacaaaactttttatcagataaactgaagcaatgtataccgagggagcctctgattttgtcattgaccagagcatgtattatcccgcttattactcttcaggttgataggctggttcatgaaatttacttttcactcttgcttttgtggttgcaaattgcctaaaattctggaaccttttttcaggttatgattcatctgtgggtcttcagggtgggcaaaatgaaaatgctccctatatctgctatacaccaagttatggatatgcacagtctccctacaatccctacaatccttacataccaggagcttcaat

SEQ ID NO: 138852 - DNA, 419 bp, Arabidopsis thaliana landsberg
atatttgctggtgggtttcttggaccagcagggcatttctttcatacatatttagataagttttttaaagggaagaaggatacacagactgttgcaaagaaggtaacaatgttcgatacctttcgatgatttgtatgttcgagattgatccgggggttttcttaaacagtgtgtttgagtggtaggtaattctggagcaattgacattgtcaccattgaaccatttgcttttcatgatctattatggagtagtcatagaaagtaagttcctccctttttcacactccatttgtaaaacacgaaccgtcgtggatggtattaagagttctgcaatgttgagtgaaacaggaactccctggacccttgttagagaaaggatcaagaagacttatccaacggtccagcttactgcatggacg

SEQ ID NO: 138853 - DNA, 711 bp, Arabidopsis thaliana landsberg
agaagagactgagatgcccaaagtttgggcacagatttgtctccagagaatggttgacctggctaaagaaagcacaactctgcggcaaatcttggatcctatgttcagctattttaattctagacgccaatggactcccccaaatggcctggccatgatagttctgtctgatgcagtatacttgatggaaacctctggtatgtcttgtcttttttgttagagtattgctttttgtctgtacgtttactcatagttatgtttctttatatattagggagtcagcagttggtgttgtcgactgttgtacgccatctggacaataagcatgttgccaatgaccctgagctcaaggcttatatcatacaagttgctggttgtctagcaaagctgatcaggaccagctcgtatcttagggacataagttttgttaatgacttgtgtcgccacctgaggaaaagctttcaggcgacagctagatcaattggagatgaggaactcaacttgaacgtgatgattcaaaactctattgaagattgtctgcgggagatagccaaaggaattgttaatacacagcccctgttcgatatgatggctgtttcagtcgagggtcttccttcttcaggaattgtttcacgcgcagccgttggatcactgttgatacttgcacatgcaatgtcttcagcattatcgccatctatgcgttcacaacag

SEQ ID NO: 138854 - DNA, 1661 bp, Arabidopsis thaliana landsberg
  unsure (1)..(1661): unsure at all n locations
acccaaaaatccaaacctaaccctaatcgacattttctccgatttctaaatcctcctccggtgaaaatgtctcaccttgatgatcttccttctactcccggaaagtacaaaaccgataaagttccaccgtacgggattctccaccaccaccgttatctccgtctctcaaaactcaccctttgggcttctctcttcctcgctctcttcctcttctacctcgttttatctnnnnnnnnnnnnnnnnnnnnnnnnnnnnnnnnnnnnnnntcctccatttccgccgcgaaatacggcggctctcactgggagaaacaagtccgtaaatccgctcgtcctaggtctcacggcggtttaacggtattagtcaccggagcttccggattcgtcggtactcacgtctcgatcgcgttacgaagacgcggcgatggtgttctaggtctcgacaatttcaatcgatactacgatccaaagcttaaacgagcaagacaaggccttttagaaagatcaggtgttttcgtagtcgaaggcgatataaacgacgccgttttactcagaaagctctttgatgttgtcctcttcacacatgttatgcatctcgctgctcaagctggtgtgcgttacgcaatgcaaaaccctggctcatatgttaacagtaacattgctgggtttgtgaatctattagaagtatcgaaatcagcgaatccgcaacctgctatagtctgggcttcctctagctctgtttatggtctgaattcgaaagtacccttttcggagaaagaccgtaccgatcaaccagcgagtttgtacgcagctacgaagaaagcaggtgaaggaattgcgcatacttacaatcacatctacggattatcgttaacgggtttgcggtttttcactgtctatggaccttggggtagaccagatatggcgtatttcttctttactaaagatattcttaaagggaagacgattactgtgtttgaatctcctgataaaggtagtgttgctagggacttcacttacattgatgatattgtaaaaggttgtttaggtgcgttagatactgctgagaagagtactggtagtggtggtaagaagaaaggtcctgctatgtttaggatttataatttggggaatacttctcctgttcctgttactaagcttgtgactatattagagaagcttttgaagatgaaagctaagaaaaagatcatgcctctaccgaggaatggggatgttgagtttactcatgccaatatcacgttagcgcaagcagagctcggttataaacctgcggttgatcttgagacgggtttgaaaaagtttgtgaaatggtatatgggtttttacactggctcgaagaagaagagttcttggtgagctctgtctctctgcttaagtcatggtctctgtttccccttgttgagcttggagttcgctctaggttaagcttttgaaaccgagcacttgcattgccaggaaaaatcacttacgtatctgcattgtttctgtgttgctagattttgcttcatttatttgttagtagattttgagcaatgtacagcttcatcacttagatgtttcaattgtcgaaactcaattgtcttttccatcatgtcggaggaataaagtagcttggattttgatgcatatactctgtagta

SEQ ID NO: 138855 - DNA, 155 bp, Arabidopsis thaliana landsberg
catcaaagaaaaaaagaatcagtgaagaagaaaaaaaaatggatcaatcgcagcgaacagtcgctgcaacgccatcgtcttctcgatcgtaccaattccacccagctcgtgctgcaattatcgatcttttcaatctctacttaggggttggttaa

SEQ ID NO: 138856 - DNA, 850 bp, Arabidopsis thaliana landsberg
cgatagaccatgatcgtcctctaagtaaaaccggagaagcagatgctgccaaagtagctcaaatcctctcctcactcggttggcttccccaacttattctctcaaggtaagttccttcttcaaattatcagttttgtttttcatttcgtgattgagaattgttgaaatcattcacttcacagcgacgccactcggactagagagacactgaagtcgatgcaggctcaagtagatgggtttatggaggcaaatgtacatttcattcctagcttttactccattgctgctatggatggccaaacagccgagcatcttcaaaacattatctccaaatattcaacccctgatatctccactatcatgttagtttctcatcaatcttttttgcttcatcttacttgtgctgtgttatcatttcttatttgattgatacatataggtgtatggggcataataagggttgggaagaagcagcttccatgctctctggagcttctattaagttgaaaacatgcaatgctgctttgcttcaggcttttggcaactcctgggaagaagtttgttgattcaatccttttttcagatatgcatgagctcgctttttctttgatttggagctaattctttcttttggccatcacaggcttttgcgctgtccgggcctggtggatggaaacttgagggtctagtggctccagatagtagcatctttgtgtaagagaatggaacattacaaagcttcaatttttagctttttccatggttgcaacttttgctcctacagtatgtcattcttcaacttcatgtctgttgcataatatatataaaaaggttgcaacgtctcatcctt

SEQ ID NO: 138857 - DNA, 1464 bp, Arabidopsis thaliana landsberg
ccgattgttcaccgtgacatcaaaccagagaacatactcatggactcagatttggagcctcacattggggatttcggtttggctcgccttcttgatgactcaacggtttcaactgcaactgttacaggcaccaccggctacattgcaccaggtaatgcatcttctcattatacatagtggacttggtataatctggtttagtgttcaaaccgagttagttaccggttaaaaaagtctgttaggaagatactctgtttcttattagctaatttcacaattaaactgcagaaaacgctttcaaaaccgtgaggggaagagaatcagacgtttacagttatggagtcgtgttacttgagctggttacgaggaagagagcggtggacaaatctttcccggaaagtacagatatagtaagctgggtgagatctgccttgagcagcagcaacaacaatgtggaggatatggtaacaacaatcgtcgatccgattctcgtggacgagcttctggattccagtcttagggagcaggtgatgcaagtgacggaactggcactgagttgtacacagcaagatccggcaatgagaccaacgatgagagatgcggtgaaactgttggaagatgtgaaacatctggcaagaagctgctcctctgattcagttcggtaatctcgttactttgtgcagagcagaaggaggaaactaaaggactgttatcagtggtaacgtaactgggcttaccggtaatgtaactgggccaataatgtaaaatatggcttattgaaggcccaaatatgacggccctttaattgtaaccgtgtttgtttgtgaaataaaatctcgtttatcaaatttctgtttcctattttatttttaaaaaaagtgttgggaaaattttcgtttggccggagatgaagataggggcggttcaggagagttggcttatacggactccggtactaaggccggcggttcaaggctcaattcgccggaatggaaagccgcagcttgagtttcctctctcgaacagtgagcttaagctcttctttcttccattgaattttttttttgggaacgcattatcttgtgcacacttgtagtaacttggtctatatcaaattgaggttgaagatgaaagttcagttatttcctgtgatttgcaatttccttgttgattgtatgttgtatttgagtcttgttggatatgtaaagagaacaaaaagagagtgagagagtgagatttgtgtgataaattttggattttacagggttgtctcgttgtgtggttatggctgttcaaggagggagaggatatgaatctccatgggatgaaaaaccctatgaaactcttcctactggtaaaagggtttatgttgatgaatctgatgttgtgacgtttcttgatccccccaaggagttgattccattggaccctgcttcatataacccggctgcttatctctggtta

SEQ ID NO: 138858 - DNA, 2549 bp, Arabidopsis thaliana landsberg
atgatcaaaagtgttaaaattagacaagcggtcacggatttcatcatcatcatcttcggtgaggaacaagacttcatcatattcttcagagaaaatatataataacctacaaaaacaggaaaccgatcttgagtttaatctctatatataccgagaaaacttgaagaaaatattaacttaattagggtttcacataaacaagtctcacctaatatactcggattccaagtgatgagacaaggaaaaagaagattcactgcaatgtctaaagtcctttaataagctcgagtctttccttttttggaccaagaaaacgagctaatggaaataaatatatgttaaaacctctattaattcgatatgaagcacgcggagtatcattaattacgattatgtttaaccactaataatgccaacattattttttccttttctctacttctccttcttcatagtttagagtttagactttctttatgtgaaatctaaatgttcatcattcatatttattgttttctattggatctaatatcttttgagtgtcatagggaaataaatgcacaaaatcatattgtggaggtaaatttcgtatagttgtttgcctgttttatatcatgaatgttcttttagtattctagtaaaaaattaatattttgttgcattttacatttaaaaccatttcccaaaaattttattagacctttattgtatgttctaatattattttgttacaagatttttttttcagatattattatctttatttatgcaaattcagaatttaaattaaaactgataaatttagttgggttcttctgctgctgctgctctcgtcttcttctacctactcattcctcagactaataaaaagccaatctttgaccttttcccccttattcaatggcattgatccaacatggttcggtttctgggacctctgcggttcgattgagcttctcatcctctgtatcaccaccgtcgtcttctcctccactgtcaagggtttctctcaattttcagtcggagaagaagagttgttaccggagaatgatatgcagagctatggttcaagactcggttcaagggattccttcagtttacgccagagaaatggagcgtctctctgctaaggaatcgcttattctcgccgtaagtcttcgaaaaattcttaaaaattgaaactttcaactgtgattggttagaaattaggttgaatttagtatctggttttggaaatcatcattagattgcttagtgaataatttgattgctctctgttggagttctgaaaccatttgagattacagttcaatgatgctggaggatttgaggctctagttacagggaagatcactgatatgcaaaagattgatgtcaatgaaaggataacgaatcttgagcggcttaatccaactcctagaccaaccacgtatgttgctcgattttgagcttcaaagttttaagctttaaggtgttatttgatgcttcctaatagctagctttgtcaggtctccttatcttgaaggtagatggagttttgagtggtttggagtcaacactcctggttctcttgctgttcgggttatgttcgagtcagtgttcttgctcatcgataatcaaataaacattcgttttatatctagagagtttttaagcattcctacatctgtttggtattgtggcaggaggttcccttcgacattggtgagtctatccaatatggaaatattcattaaagataataacacaaaggcaacagcaaacatcaaactcctaaactcggtaaatttactttttccaaggatgagaattatggatttataagcagactcaaattagagtttctttgttgtttctgttgaaaatgatgcagatagaaaacaaaatcaccctgtcatcgaaattgacaatagaagggcctttaaggatgaaagaagagtatttagagggattgctcgagtcgccaacggttattgaagaagcagtacctgaccaactaagaggtttattgggtcaagctactaccacgttgcaacagcttcctgaacctatcaaagatactctagccaatggtctaagaatcccccttggtaaagccataaccatcattttaacattttccactcctcacatgtaacattgtaaccaagtagtgttgttgttattgactttcaggtggaacttaccaaagattcttcatgatatcttatctagacgacgagattcttgtaagttcctgaaatgttatgatgatacaagttggagcttacagaaaattataaaacgagtcttttggttgttgttatgtagattgtaagagataccgcaggagtgcctgaagttctaacgagggtggaaacatcgtctccgatgtcttcatcgagtgttgtagagaatcttgaatacaacagttaaaaacaggttctcttgttactctgattctctctgtaaatgtaagaacaaaaagtgtatacaacttaccgacctcactatagtatatctccggacacactgagacctcttttcttaaatatacttcgtcttttgtc

SEQ ID NO: 138859 - DNA, 4102 bp, Arabidopsis thaliana landsberg
atggctttttcattaaccagagtaaaccgagttcttattcaagcatgtgaaacgaccccatcagtagtgttggatctgtccttaatcgataatattccggttctacgatgtttcgctagaacaatacatgtgtttactcatggacctgatgcagctagagccatacaagaggcattggctaaagcacttgtctcttactatcccttgtccggtagattgaaagagttaaaccaaggtaaacttcagatcgattgtaccgggaaaactggaatttggttcgttgatgcggttactgatgttaagctagagagtgttggttatttcgacaatctaatggaaataccttacgatgatctccttcctgatcaaatccctaaagatgatgatgcagaaccgcttgtccaaatgcaggtaagtatttaatctacaatccgctagaaccggtttgtttgacaattagtaccgatcttgaattatgaacggtagttttcaaaatccggttcaacggttaataaaaagcagttataaatcacctatatccaataactcaaacaagagagagtcttgatcaaacatgcaacaacttaaacagaaacaaactacttgcattcacacaatctctcatacccatcacattagatctacaactacatacactagtcatactcttaagaaaattaagctcagtttgaagcaagtagtacctctttgaccagaggctggagcttcagggagaccaagaacctgtaaccttgttttgatcacatctaatggacaaacaaaagtcgccgcgatagcccctgaaaaaaaatccccaaatcaaccaaacaaaacaaaaattcagctacccgaatcaaaagacgaacttgaaaacagataattgaaactaacctgcggtggctccggcgccggcgtttgcagcgacttctctaatactccggtaatcaaaggtagagttcccatgttcaatcatcttaaaaccctagaatctctcaattggggggaatctgactcaaaattgaaaacgagatccagcagtaaatgataaacccggccacgtgaatcgacgattatatacaattctcgtcgttcttgacattgacccgacccggagaaaaaattcgaacgtgtagacgggtaaaggaagagactttgtttgcgtatgatttaggcggtccctagtcgaaaggatcgattttttttcttacagattccgaagaagcacagttggtttgagatgacgtcacacatttaacaacaacaacacacaacccaagaagaaagaaagttgaacactttttgcctctatctgattatcaaattataatctgactgaatccggtataattcgatcaaaccaagctaaaccgtaacccaacggtttaaccgatttggtttgggtccgcttaaactttgaaaaacaaggaaaactttcatcggcgagcttcttcacacttgtgaattccgattctgcagaaatgggaaatctgaaacttgctttgatcatcaagagccctagagacgacgttgagttcctactcgagaagcaaaaacagccggcgaaatttggagatgaagcttacgattcctttgtcgattccgatctctgggacttaccgtcaacagatttacaggctctggaagacggagtgaggtccggatttagtatttctatacttgactcatgctcggaggaggttgatttgatgaatttcgacttcgaatccacactgattctggtaatttatgagtttagcactgtcctctttttctcattgtttccgcgaattaatgtttccgagtaaatgcagctgctggagaatttagggattgatattagcgatgtaggagagtggagattcgtcaggtctgtagaagagcctgagtttggacctgactcttgtgtccgtacttgttttatctccgggaagctcttaaatacagatcaaagtttacaaggtcgtccttaattcgatagtatacagtattaatctctcttgatttccacattttcagagcttatggaaatagcttcactcgattcgaaagaaacgttgagaattggaaactgaaacaaaaagttttgtttttgtgcagacaactgtaagtggatgtcaatggaatcatgcttcgactctcttatagatgtaaaattgggcagtgatcgcgttggaccattagtactacttggacttggggatggttcccgtcagtctatgaagcataagttgtcatcttctctggctatccaggtctcttgttgccatactatctaagtatctatacttgtcttcttcatcttacttcatcaaagcggttccatcttatgatgttgttctttactagaatcctactttttaatgtctttattatctcaggaatatccacctggtgttatgattgtgccgatgcatagcaaaacattgaaacctttcaggacaacaaatttggttgtgtttgctccagaaaatggtttgggggaccatcaaggggctgattttgtagctcatggggatgcgttgatagtggatcctggatgtctctctaaactccacgttgaggtttgtccctagctagtagctacgtgttgttttcgctcttcatactatattctttacttctttttcgaatggtacagaagatctggtctttacattttgcattttaaattattcacaactgcatttttttttgtcttaaccagctcaagaaaatcgttgatgctttacctagaaagctaattgtctttgttacacatcaccatcgtgatcacattgatggtaaagatttgttttttttttctcgttctgctttggtgtggcttcttttgtttttatttttactctcttgaaattctaaaacatttttatgccattgccaatgttattcatcttcatctctgcttcaggtctttctgctatacaagagagcaatcctgatgctattctagtggcacatgctaaaactaggcatcgcattggtatcattcttctatattgttttccattcataaaatccaccttctaatgttcggatactctctgagtccaggtggttggtctggtaactataccccagtttctggaggagaaaacatctatgtcaacggtcaaaaactgaccgtcatttttgctccggtaccatccagctctttaaatccttgatagctctcagattggctgcactgctgaaagtatacattttgataaactcttaactaagtaaaatactccagggacacacagatggtcatatgtcactacttcatacctccactcaatctctgattgttggtgatcattgtgttgggtaagacaagcaactaaaatttatgttgctataggctaattcaaatcagtcaaatttgattaactcaagaaatgttaactcaccattttgggttgtttcagtcaaggaagtgctttcttggacatcagggcaggtggtaacatgacagtaagtataagcatgctcagtctgttttctgttttgaatacttcaatgcaaacgtagtgtgagggtttacctgtggtagattgcgatgttttctagtagcgttttgtttccaaatttgttgtttcaatgttaggtgttgggtaagatagtaaatgcattttttattggagagttccttaatttccaattttccgttgcaggattactttcagtcgacatataaattcctggagctttctccaaatgtggtgattcccatgcatggaagggtcaatttgtggccgaaacacatgctttgtggatatctcaagtatgaataagaatatgctgtagtggataatctgatgtttaaaaccctgttactgttttgtctatcagtttgatcagataaaagtagagtgaacttattaagatatttgatacattaatatataaaggaattttgatgggaggggtgatcttgttttccagaaaccgcagaagcagagaaaaatcaatcctaaaggccactgtggatggagctcagacgttatatgacattgttgctaaggtgtactcaagtgtggatcgcaaattctggtgggctgcatcatcaaacgtaaggctgcatatcgagaagctggcagtagaaaacaaattaccagag

SEQ ID NO: 138860 - DNA, 747 bp, Arabidopsis thaliana landsberg
tctcgacaactgagaagcaacggaacaccggtgaatcccggaaagaaggtgaatcaaaaaagcaggtaccaagctgcgaatcttcgtttttttaaggaattctcgatctttatggtgtataggctctgggttttctgttttttgtatctcttaggattttgtaaattccagatctttctatggccacttagtagtatatttcaaaaattctccaatcgagttcttcattcgcattttcagtcattttctcttcgacgtagtttttaagcctgggtattactcctatttagttgaactctgcagcaatcttagaaaattagggttttgaggtttcgatttctctaggtaaccgatctattgcattcatctgaatttctgcatatatgtcttagatttctgataagcttacgatacgttaggtgtaattgaagtttatttttcaagagtgttattttttgtttctgaatttttcaggctgataggtttatatagcaatgtctggtaacaacaacaatccacaaaagcctcaaggctctgcgcctttgccttttgggaatcctgggatggcctctgcatctgttcctggaaaccaaggttttgctcagtctcatatggcagctaactttcaagctcagtttcagttctctcaagctcaggccctagcccatgctcaagcacagtctaaagttcaagcacaactgcaagctcagttacaagctcaaggcatgacgatgaaccaagcacaag

SEQ ID NO: 138861 - DNA, 266 bp, Arabidopsis thaliana landsberg
agcaagctttgactctagtttttgtggagacaaagaagggagctgactctttggagaattggttgtgcatcaatggtttcccagcaacgaccattcatggtgataggtcacaacaggttagtgagttgttgatatcaaaattaggatattgtagagtattcttcagtgcaaccaaagctaaaaccttattgtattttttatgcatacaaggaaagagaagtggcactgagatcattcaagactgggcggacacctattttggttgc

SEQ ID NO: 138862 - DNA, 351 bp, Arabidopsis thaliana landsberg
atggttcctctgctgaggaagagctagatttcgaggaattcgaccaatatgctgaagataacttcgcagatgattattcggatgacgaagacgactccatcgatatctccgttcttgagaaagaagcgagagatatcgtgagagattatgctaccactctgtctcgcgagctcaaaatcggtaatttcttccctgtttttattgtgcatatgtgtggaatacactgtcagtgtgtactcggtgaatgatgatcatagtttgatgtttccagaggatgagaccattgaggggaaggaaactcgtagaaaagggaaaaggctagccaaaaatgttagtcaattgaatttttga

SEQ ID NO: 138863 - DNA, 442 bp, Arabidopsis thaliana landsberg
aaatagagtacccggtgacgatgatgaccacgttaacggcgacagtgccggaatttctacccccgtcgctaaaatccaccagaggatatttcaattctcatagtgaatttggcgtttcaatctctaaatttagtcggagaagatttcacaatccgaccagagtcttcgccgtttcagatatcagtaagctcgtgacggagtttgatccgaagattccattggagagagcatctactccgccgagctcgtggtacactgatcctcaattctacagtttcgagctcgatcgtgtcttctatggaggatggcaagccgtaggttaggacaattcacactcactgagtgttaaaactgtttctctaaagtttttaactttagccattacatatgtttcaggctactctgatcagattaaggagagtcgtgactttttcactgggag

SEQ ID NO: 138864 - DNA, 386 bp, Arabidopsis thaliana landsberg
caagagaggtctccatcttcgttttatataaggctggctatgaaggtatctagagctagatggttcatcttcttgagaagagtgtttcactaccagaacggttcaagatctgaccttgggtctaatcctttcaattctagcacttggatgatgtctgagctcattgctctacttgttcagctcactgtgataacattcactctagctatctccaaagaagagagaccaatttggccagtgaggctatggatcacaggatacgatgtgggatgtcttttgaatctcatgctgttatatggtcggtatcgtcaactagacattaaccaaggaaatgggtttgtccttggcgatgttgagcagcaacagagaggcagagaagaaactag

SEQ ID NO: 138865 - DNA, 303 bp, Arabidopsis thaliana landsberg
gagatccaaagagataagaataacattaaagttactctctcggtgtgggtatgacgacgaattgacttaaaattttcgttagtcatcgtttgtcaatttcgtttcaatcatttttgacacaaaaagtatggaacttcaagtccttgttcttcgtccaatcttcttcttcttcttcttcgtcttcttgacaattctacaacaatcctcttctgctcgggttcttacaatcaccaagcctgatagacatgactacgccgcaagtgctcgttggcttgtctctcagaattcttggggtgttcttag

SEQ ID NO: 138866 - DNA, 448 bp, Arabidopsis thaliana landsberg
tccaatctcaaatctgaatggaggaagtgatgatttctccggtggagcacgaccctcagggccaggttaagcagcagcaagcggccggcgttggtatactgcttcagattatgatgctcgtgctttccttcgttctcggccatgtcctccgccgtcatcgattccactatcttcctgaagccagcggttcgcttctcattggtataatcctttctctcttcctttggcttttgctctctctctctttgatttctcttatccctagcttcttcttccgtcgtaattttcaggtttaatcgtcggtatacttgctaatatctccgatactgagactagcattaggttttgccctcctccaagtatccctgagttttcccttttatcgtttcctcgctcactggtttgttctttctactctgtatcaggacgtggtttaatttccacgaag

SEQ ID NO: 138867 - DNA, 3841 bp, Arabidopsis thaliana landsberg
  unsure (1)..(3841): unsure at all n locations
ttttttctcggcattaaagagcaagaaaatggaatctcatgttgttcataacgcacaaaagccacacgtagtttgcgtgccttacccggctcaaggccacatcaatccgatgctgaaagtggctaaactcctctacgctaaaggctttcacgtcaccttcgttaacactctctacaaccataaccgtctcctccggtcccgtggtcccaacgcgctcgacgggtttccttcattccggttcgagtccatccctgacggtctaccggagactgatggcgataggacgcagcatactcctaccgtttgcatgtccattgagaaaaactgtctcgctccattcaaagagattctgcgccggatcaacgataaagatgatgttcctccagtgagttgtattgtatcggacggtgtgatgagttttactcttgacgcagccgaggaactaggtgtcccagaggttattttttggaccaatagtgcttgtggtttcatgactattctacacttttatcttttcatcgagaagggtctatctccttttaaaggtactaattgtttttctattactactgattttaattcatatagtgtaaagaaaaatcgcccgtaactaatgcatctagcatatttatctgtctttagcccaaagttgtaatatgttgtatactttaatttagattactaattataacggtgtgtattgtacagaccaaagttacatgtctaaggagcatctagacacggttatagattggataccatcaatgaagaatcttaggctaaaagacatccctagcttcatacgtaccactaatcctgacgacataatgctcaatttcatcattcaagaggtggagcaatccaaacgcgccagtgatcattctcaatacgttcgatgatcttgatcatgatcttatacaatctatgcaatctattttattacctccggtttatacgattggaccgctccatctcctagcaaaccaggaaattgacgaggttagtgaaataggacggatgggattaaatttgtggaaagaagatacagaatgtttggattggttggacagtaaaacgactccaaacagcgtcgtttttgttaattttggatgcataacggtgatgagtgcaaaacagcttgaagaatttgcttggggtttggcggcaagtaggaaagagtttttatgggtgatccgtcctaatttagtggtgggagaggcgatggtggttcttccacaagagnnnnnnnnnnnnnnnnnnnnnnnnnnnnnnnnnnnnnnnnnnnnnnnnnnngagaaagttctttctcatcccgcgataggagggttcttgacgcattgcgggtggaactcaacattggagagtctcgctggtggtgttccgatgatatgttggccatgtttttcggagcaaccgacgaattgtaagttttgttgtgacgagtccccagtgggcatagagattggtaaagatgtgaaaaaagaggaagtcgagacggtggttagagaacttatggatggagagaagggaaagaatatgagagagaaggcggaagagtggcggcgcttggcgaatgaagcgacggagcataagcatggttcttctaaattgaactttgagatgctcgttaataaggttcttttaggggagtagagactagtaaatatggatttcaagaaaaaagggatttaagcacacaagagtagaccattgctcacaaagaacctctttatttcccaaattaattactcatttactcataatcaaataaacatcttcttattcatcacaaaccaataaaacttactttcctcagttcaaatatttcatactattagactttgttttgataaaaaattgttctactaatggtttaaaatttcatgttcagattttttttttttttttttttttgtcggtcatgttcagaatataatacttggtttccttaattgtctttataataaatgatttttttgtaatgattaatacatatagagttatgagtagatattttgtaacgctaattaatttgtcttcaaatgaaaatagcggaagtactttgataagaaagaaaagatacacctctaacgagttacaatgttgtgacacctctcgagtcatttctttagcatcttgtacatatataaacgcctaccgacaatggagtcgtgttaacttccatcattatttttctcttgtggatacgttttttttttaaaatggcatctcctgctgtccatagcaaacaaaaaccacatgttgtttgcgtgcctcacccggctcaaggccacatcaacccgatgctaaaagtggctaaactcctccacgcgagaggcttccatgtcaccttcgtcaacaccgtctataaccacaaccgtctcctccggtcccgtgggccttacgcactggacggacttccttctttccggttcgagtcgatagctgacggtcttccggataccgatggggataagacccaagatatccccgccctttgtgtgtccaccatgaagaactgcctcgctccgttcaaggagcttctccgacggatcaacgatgttgatgatgttcctccggtgagctgtattgtatcggacggtgtgatgagctttactcttgacgcagcagaggaactcaatctcccagaggttattttctggacgaacagtgcttgtggtttcatgacttttctacacttttatctcttcatcgaaaaaggcttatctccgtttaaaggtacaaattattttcatttttatatattattgatttttattcacatacattaaaagagaaaataacccttaataatgcatttgccaatttacactagcaaagtcgtgtaactcgtgttgtatccaatagattactaattaatattgatggtggatttgatagatgaaagttacatgtctaaggagcatctagacacggttatagattggataccatcaatgaagaatcttaggctaaaagacatccctagcttcatacgtaccactaatcctgacgacataatgctcaatttcatcattcaagaggtggagcaatccaaacgcgccagtgatcattctcaatacgttcgatgatcttgatcatgatcttatacaatctatgcaatctattttattacctccggtttatacgattggaccgctccatctcctagcaaaccaggaaattgacgaggttagtgaaataggacggatgggattaaatttgtggaaagaagatacagaatgtttggattggttggacagtaaaacgactccaaacagcgtcgtttttgttaattttggatgcataacggtgatgagtgcaaaacaacttcttgagtttgcttggggtttggcggcaagtggggaaaaagtttttatgggtgatccggccggatttagttgccggagagacgacggcgattctctcagagtttttaacggagacggcagaccgcggaatgctggtgagttggtgttctcaagaaaaagttatttcccaccctatggttggagggttcttgacgcattgcgggtggaactcgacactcgaaagtatctctggtggtgttccgataatatgctggccgttttttgccgagcagcaaacgaattgtaagttttgttgtgatgagtggggagttggtgtcgagattggtggagatgttaagagggaggaggtcgagacagtggttagagagctaatggatagagagaagggaaagaaaatgcgagagaaggccgtagagtggcggcgcttggcgaatgaagctacggagcataagcatggttcctcggttgtgaattttgagacggttgtgagaaaggttcttttaagggag

SEQ ID NO: 138868 - DNA, 3378 bp, Arabidopsis thaliana landsberg
atttatcaaaatcgagcgaacgaagatctccggattcctgcactctgctacatgcctttcgaatccgtttactgcatcgccggagaagtaggaatctgtttacttacctttggaatccgtcctcgtccctctccgtctagtgtgatgcagcagttaggcactagtgcagtgacatctaagtttaagcagacttttttcttcaaaatgcgacattttcttgatgtctgcaggtacgcttggttcctacttgtacttggtgagaaaatctgtatacagttttacgtgttctgaatgttgcatttgactaatgtatgccatgtgtgttacattgtgtgtgctctatgtcctgaatttgttacgtgtgattagactaccggaaggaacagaagattgcattagtcgaaagagagaattttgctcttcttattttatcgcttagtagtatatttcactttgtggatatcaaacttctgacttttattgaagctagctatcactacttttaataaactggttaatctcatttaaacaattattggtgacggttgcagtttcttggaagctactactctcaataaactaatagaaattgtggtcttgacttttaatttcttgatacagtacggttgtattcctctttctctcccccattcaccctcttcgatcgtgttgtttcttgcattacttggcagtaatcccgggggggttctttcttaaagtttgtgcaaaatgctgggctggcttgtaataccctggaatcaaatcttcactgctgcatgtggctgctttctaagcgatagaaactacattcacttgatggagtcaaatctcgatgctctgcagaaaagtatggaagaacttaagaatggacgagatgacctgttaggaagagtttccatagaagaagataaaggtttgaaccggcttgctcaagtcaatggatggctttccagggttcaaattgttgaatccgaattcaagcatctgcttgaggctatgtcaatcgaaaccggaagattgtgtttgtttggatattgctctgaggattgcatatcaagctacaattatggtgaaaaggtatcgaagatgttggaagaagttaaagaacttctatctaaaaaagattttagaatggtcgcgcaggaaattatacataaggtggagaagaagcatatacaaaccacagttggtttggatacaatggttggaatagcatgggaaagcctcatagacgatgaaataagaaccttgggtctttatggtatggggggaataggaaaaaccaccctcttagaaagtctcaacaacaaatttgttgaactggagagtgaatttgatgtagtgatatgggttgtggtatctaaagactttcagttggagggcattcaagatcagattctgggaagattacgtcctgacaaggaatgggaaagagaaacagaaagtaagaaagcctctctcatatacaataaccttgagagaaagaaatttgtgttgttgttggatgatctctggagtgaagtagatctaattaagataggagttccacctccaactcgagaaaatggatcgaagattgttttcaccaaacgttcaaaggaagtttgcaagcacatgaaagctgacatgcagataaaagttgactgtttgtcaccagatgaagcgtgggaattgtttcgaattactgttggagatatcatattaagcagccatgaagatattcccgcacttgcaagaatagttgctgcaaaatgtcatggcttgccacttgcactcaatgtcattggggaagccatggcatgtaaagagactgtacaagaatggcatcatgcgattaatgttctgaattcgcctggccacaagtttccaggtatggaagaaagaattcttcccattttgaagttcagttatgatagcttaaagaatggtgaaatcaaattgggcttcctatattgctctctgtttcctgaagattatcgtatggaaaaagagaggttgatagactattggatatgtgagggattcatagatgaaaatgaaagtagagaaagagcattaagccaaggttatgagatcattggtatccttgtccgagcatgtttgttgttggaggaagctatcaataaagaacaagttaaaatgcatgatgtggttcgggagatggctctatggattgcatctgatcttggggaacataaagaaagatgtattgtgcaagtcggtgttggattacgtgaggtaccgaaagtcaagaactggagttctgtgagaaggatgtcgctgatggaaaatgagattgaaattttatctggcagtcccgaatgcctggaacttacaactctgttccttcagaaaaatgattcattgctacatatctcggatgaattctttcggtgtatcccaatgctagttgttttggatctatcagggaattcaagtctccggaaattgccaaaccaaatatgaaagttagtctccttgcgttatcttgacttgtcgtggacatacatgaagcggctacctgtcggtctacaagagttgaaaaagctcagatatttgagattggattacatgaagagacttaagagtatttcagggatatcaaatatatcaagtttgaggaaattgcaacttttacagtctaaaatgtcgctagacatgagcttagtggaggagttgcagctattagaacatttagaagttctaaacataagtatcaagtcaagcttggtagtggagaagttgttaaatgctcccaggttggtgaaatgtcttcaaatcttagtacttagaggagttcaggaagaatcatccggagtattgactttgccagatatggataatctcaataaagtcatcataaggaagtgtggaatgtgtgagataaagatagagaggacaactttatcattatcgtcgaacagaagtcccaaaactcaattcctccataacctctccactgtgcatataagtagctgtgatggtctgaaggatttgacgtggttgttgttcgctcctaacctcactagtctcgaggttctggactcggaactagtagaaggaataataaaccaagagaaagctatgactatgagtggtatcattcctttccagaaactagagagtctacgcctacacaatctagcgatgttgaggagcatctactggcaacctctgtcttttccatgtctgaagacaattcacataacgaagtgtcctgagctgagaaagcttccattggattctgaaattgccataagggatgaagaacttgtcattaagtaccaagaggaagaatggcttgaaagggttgaatgggacaacgaagccacaagactccgtttcttaccttttttcaagttctttggacctgaatgg

SEQ ID NO: 138869 - DNA, 9446 bp, Arabidopsis thaliana landsberg
tgccagcttctcagattcctttttctctacgagtttgatgaaattgcgaacaattgtcttgccttcggttgttataatactctccggatgaaattgaactccctgtgaatttttttttacaagacttcaagagctctgttttgaatggaggaggcaagaagctacattaaacacttgagtgggttttacctgtatatgcttgtactttctgtgacgggcagccataaccagaccatcttctgtccatgctgtaacctcgaaaaaatcactaggaaatgaatctttttcgatcacgagactgtgatatctacctacaatgaaagggctgaaaccaaccagatttgttttattacacatttttacagacttatgattaactatattagacaacacacaaaaaaaattgattttgattcatactttgataatccagagaacaagccttcttctcctttctcatcatagtgaaccattgagcttttcccatgcataacaccaaatggtgaccgcacaatctttcctaatcaatgttcaaacaaaattgcatttaagctgtggatgcatagaataaagaacaaaaccatgtttgaacactgatacgggaaaataagatgtcttgtttatatgcaactaacctccaaatgcttctcctatacactgcaaacccatacatactccaaataaaggaacaagtggtccgagttccaaaacagtttgcaaggaaatcccagagtcttgaggggtacctatcaaattcaagaaaagtgttatccacttctccagcatataattataggagaaatttcagaggccaaaatatttaccaggtccaggagaaatcaacactcctcttggattttttctgcaagagggagagaatgataaaggaatgaacatcagtcgattagccagattacgttttaaacagaatgcatatagtttcttcttaccttttcagctcttctactgtaagttcatcattgcggtaaacttcaaaatggcattgtagctctcccatatactgtagaaatagatagcaattctcaaaattttgtttatactaaagcagaagaaaccatatcaagagaacgatcacaataaatagtatgcacctgacactattctgcgtggagaactagaagtaagacatgatcaaattgtatatttggtatctatgtgcgttaagtcagatattcagagcagccaaaatctcatgagaaagcgagatatttcaactaggaataacaaatctaaagtcaaaaatagcaactcaggaaatcgccaattcaaactttgaacatgattaaagattctacttaaaagaccagactttaggcagcaaagaagtgatgtgttagcttttgctggatcaacaattactccttacaacgacaaacaagcaacgaggagctttcgacaataagattcgatggcacgacatagcaacgactctgatcacattaacaacagatggtcaacattacatagtcttatctattagcaagtcgaaagtagattggattgtgaactaatgagattctaacattcaatcacaatgcatatacttgaatacatttctaacaaaatgcaaattcagctgctttcacatcaaaaatctaacgagcctagtaagatttgagattgtgttagaaatgaaacctggcagagattgtaagtgaagctgtcgtaattatcaatcacgatgataggaccattctgtttagaggaattgataacaacggaaggtatcgaattcgattctgccatttcaatagaagcttcagcaaatgtacatctctacgactcttccccaaaactgaaaactcctatatcacagaagtatatttgggatctaagtgagatattcagagcagccaacaaggaataacccaatctaacaatagcaactcagaaaatcaccaattttcaaactttaaacaagataaaagacttaaaagaccagactgtaggcagctaagaagtaatgtattagctattgctgaatcaaaaattactcctggcaaggacaaagaagcaaggaggagctttttcaaatatatacaaaaccaaaaaaaattactcatctagagaactagtcttacgtgaataagattcgatggtgccgcataacgactcagtctgatcacataacaagagagaaattacattacatagtcttgtatataagcaagccgagactagattgattgtgaaataaagagattctaacaatcaatcgagatgcatacttgaatacaattcatatgaatcaaggacttgcaattagccaggaccctaattgattaagacatggttgaccaaaaaaacaaaactattagaaattatggtcaaagtagtagctacagagattagaaatctattccaatggtcttagctctaacgtcaacaaaggtttaatcatcccctaaacttcaagtttcaacttagtccgaatcaggagaaagactatgagggaagttatttggacaaatggtttaatgctctactaaaggggaatcgatcagattctaattgtaacattttgggtacctggaggttgaagatccttcgaagaacgaagtgagccgcctcgcgaacattctgttcaggtgatgttgacccgactcgctgattcgacccggagctggttttgaaacggtcaaggatataagtggcgctggattgatgaggaaatcgctatcaattgagatagactgcgaatagtacgagaacaccatcattttggatgctttgacgcagattcattcatggcttctaggtcttttattacttcattagttgttgacttaaagaaatatatctaagtaacgtttaatgatgtgggggatattaagcagccaggttttacactcagctatagtcatcttttcgtataagcatctaattcgacaaatgtatagtatagtcatcttttcgtataagcatatatagtatagtcatcgtataagcatatataccgttttcaatttaatggtcacacgatcctttctgaaaaaaaaaaaaaaattatcattaaacaagcttctgatcaacaaaataatatcccaaaaaggtggattaaatttttgttttcttcatagacataaggaaattaactttacagtctgaccattgattaactttcagcaatgtgcacaactgccattttgataacaccatagtttaagatgccaaaaaaacaaaggaagatggagcgagaaagatgaattacgctataggaattgattttcctcttaagtgctcaagtctcactttaaattcaactatcacggatgagccaaatgcccagccctaaacaaaaagattaacttagtaattgataccttgtagaaagacaaaccgtgagatcagtgaaagtggtaagttgcctggatatcacgaaagtgtcaagactcttctcttcaccatctttaatcatatcttccatcatatgaatcttcagcatcttgaattgacgatcgaagacaggcttgtagagatgactcaaacgtgtaccacaatggcctcataatatagatgcaagattattatgattgaatgacgattcttcggatgcatatgtaggaataaacactgcgtcatacgagttctcataaccatcaattcactttcgaatagaaatggtaaattttcattacaaactgatccaagcacttcaagacctaatgagaacaaagtaaatcaacacaaagacagtgtccggacttttgataggatttattttttaaaaggtatttcgcatataaacttcttaacatagatctctacatatatagacaaaatgaaataaatacaaagatgtgcttcataagttctcaacaaagcccaagtaatctccacaataaggcttatttataagtcctctaatctgagtgacttcaatgattcttccagcccaaaacaaggcttctctcctccagaaaaataattaggattattatattattatttgttttgtttcctcgaataaaaaagagaatccgagaactttttaagacaaaagccaagtcttcgaaaccttatgagatgtgatagggttacaagggtaaaacaggaactcagaataaaaataagttaatcgagaaagctccaaataaacaccactcgtccgcctctctgtctctcaccaaaataaaaaactcaatctctctctctctctctctccatcgagaaacactaaactgctataatcattacctctcttcgatttctcaaacccgatctggctctctacccatatgcttcagatccgcattaaaaaagataagttttttgatatgtccttctttcttatttgatcagtttgttcttgtttcacgattgtaacctgagattttttatatattttctccagatctgctatccgcagtcatctgttcataggaaaaggcaagttttttttccatctctacttcagatctgaaaaagatggattgttcttcttgtgttgtccggtttcatcaatttaatctgttctttgttattatattttacagatctggctttacttttagagattatctcagatccagccttttacccaattgaaggcaagttcacatactctgttttttttgtcttggttttaatttctcggttttttacatgtaacagatgttttaagcatgattttttgtttaaacagtttgtttttcctacccttaaaacttctctgaattaatatcccatttatatgaccactctaatgtcttcttatacgactacgcaagtgttgcatattcttgaccttttcacacttcatttgcattttagtctaacaatataaatccgcaaatatcttgtgtttatacttattgaaattagtcttccgacatatataatctaggatctatttggattatttgggccatcagtctcattcgtttcattaacatctgagtctttgaactttgtttatctttcctagcttgatattttaatattagtttttttgcgcctctttgtttttggtcctttattctctcaattggatagtatagtgaagtaaataatgtagctatgactttacctgtagcatttacctgtagcatcttaaaaatatgaattaaaaatgatttagctaatttgggcttatgtttataagcatagaagtttatactacaagttcgtttagatttttccagtatcaactcaaacatagtttttactcaagcatagtttttactcaagcatagtttttactcacactaaaacccacatgtagtgtgcaaaagtaagtacccccccacctctgttcctcacggtttttctgcaaaggacccaccctccttgaacttcagcgtccatcacaatgtccccatcatcatcaaacctgtacaagccagtggcgatcctaacattgtagaagttgatagcatttttgcaagtggagggagcacttgtgtttctccacgtattgctgtcttgattaaagcggttgtcaactctgtaaagtccctctacttcaataggtatggtaaatgagtttgattctgggaataggttgtggttgttataaagaatgctccactcagcagcgttgagccagcgctgtgttgatgtttgaagcacagctgctacatctgtcaaaaatagcaaccaaacatatgagatttatatatatattataagcaactgttttattctgaaatttttaaatcttgccttaattgtacaaattccatagatctaggagactattctaagattccatagatctgtaacactgtgctacgatttctacactggtctaagattccatagatctgtaacactgtatacgattttctacactgttctaagattccatagatcataacttttctaagatttctactctgttaccaattccatagattgtagcctggatttcccaaattcacagatctactctaattttaaatacacctcgatatctcaaattcacagatctactctaattttaaatacattcctccaattcccaaactcaccaatgtttcttgatactttcaatttcaatttctttattaccccaaattcgctacccctatatcttgcttctgagaatataatcgttttttattaccttcatttccttcaggtaggtccatatgctgaagatttatcgcaggagcgaccactacgggagccgccattggagattctctgtgagagagagagagagaaatagtttgagaatcaatcttctgtattttattgtgtagatcaagttatttagtatatgctagtacttatggttaaaatagactattattaaaattcaaaactaataaagccaacgagtacactaaactcagattatattttccaaaactattgctaaagaatatcaatacgtacactagatatagaaatcggaattaggtacgttgtgatccatttcagctactgttaggggtaagatttgggcttgcttggcccaaggcccaaatccaagtcaaaggcctaagcagaatgttaagtcaagagggtaggctcgtcaaaatcctggaggagtgtcctacacgcagaagggctataaatacggaatagcatgtcttgtcaaagggggattccgccggacacgcagagacacagagcagctcgtcagctcacccgtccgaagtacctcgtttgcccatccatcttgagtagctcgtttactcgtccgtccgaagtgtctcgccaacttgcccgcccaaagtgtctcgccaacttgcccgtccactcgacctcgtcattacctactcgcacgtctcgagaagccattcaactcgtcacttatccgccggatcatccctaaaactgcctaactcgacatacgaccttcctccagtaatggcctagctcgtttatcataatatgaactacgtgtggcttgatccctttctaagggtacgtaggcaaccttttacaaggttcagctataagacgaataaactctattcttcctcggacatcaagatcgtctcccggcctcaagctcgtctttcatctacaatcggctcgtcttaacatatatctaagaaaaattgtcccttcctcgccttggagagtttctgctttatcttccttaatcacaagacgttgttcagatctcacaaaaacatgtcgtgtaatgaaaattcaaaggaaagagaagtaaagaagaaagatcaccagaagtcagccaaagagtaagcatcactggatactgcctcctatattcactaaggatcgtatgttgctaccggagcaaccgaaaccaaaaaacaaatatagcaaaggaagaaaaattcactttgtcacagcaacttcataagacggtagaagcctcaggcaatatccgatctgactaaaattcggacaagatcttcgtgggactatcagctaaagattcaacggtgggatcaatagtttaacggttcaaacggaagttatcagttcttctataaatcagcaaaaggaagtacattacaccaacaagtgacaatggatcatcactagcaatcgctcaagatttccactcattcatcaatgatgcgatctccaattctgtctcgacgacctccctcataaaagataagttcaattactttcttacatattaattaagcttgattgacattttcacttatatcacaagcattcatccttgcttctctctttctacgcaaagatgagatctcctctaacgaacaacatcttaaatgtagattttcatacaacgacgtttacaatctcagagattcagatcgtccatgccgtagatatcatcatctctatgtccaaaccaataagataagtgttatctattataatctaacaagtacagcttaatcatatatatgcattctctgctatattttttgcgtaaacttgcaaaaacactcgtctaccgagcaaaaaggggggggagtggggtccgtatatccatactcccacttcaattttaaactctcgtttcggtttaaatttgaacttcgatttttctacttcaaattttcttggaatttgatttctaaatctttttactttgaaatattttaacgggcgacggcctattatttccaaaatttcatttacaccgtttcggttacagcgcgctatatttttttttttttttggtaagggatagggaaaattcccctatcaatttattaaaataaaacaacaattacaacaaaacatttcgtgaagtcccaaccccattgacatcatcaccaaacaccgctaaaacactctccggacaagcaccaagcccatgaaaccccggaggtaacgagaatgcatagttcgctaacccatccgctagacggttagcttccctatacttatgcgaaatacggactatccagtccctcaatatgaagccatagcacaagcgtgctaggaatgacaaaggatgagtatcactaatccccgtcttgagaaaaccaacaacaatctcggagtccacctctaactccaaccgggtaaccttatactttcaggcaatatataacccgtagtacacccccgaaagctccgctaaaggtgctgaacatatcccaatgtttagtgcaaacccgctacaccattcaccatcattgttccgcagcaccccacccgctgtagctaaacccggattccctctagaagcgccatccgtgttcagtttaaaccatccctcttgtggcctagtccacgagatccgtctctctacccgtgtaccagctttcgttttagcagccatcaacgagtgcgctatgatgactttcttcgccaagtccttaataaacttgacccgatccctacatttgccaaccaccctaaacacatttccacacctccattttcaaccccaccaaaccgccatagcaaacacagtagaccaaggacactcccactcggttctactatctcccaaattctcatagacccactcaatcaaagacatagtaaagaacgagttccgcttacgtcttggaatgagccgctgccataatccattcatcgcgggacagaagaacgtgaatgatcgtctcctccccactcttacaaacttgacatatgccattctcactaagatgtctcctgtacctctccatatttgtcataatcacctggttcactcctaaccagagaaaaatcttgactcgctccggtacaatcactttccagacacgttcgaacagactggaaagattctgtcttggtgtggcatctctagtcaagaattgataagctgagctaatcgtgaacttcccatccggactctctccccatgaaattctatcgcgggcgcatgtccactcatccacaaccactgccgtaagcctcaaccttgtaaccattgacacataaggcaatattctgtccaaattccagccagtgcctctccgccacagctcacaaactctcgtatcctcttcccctgcctgtataaaaccccgacaaacgatcttttaggggaactcccagca

SEQ ID NO: 138870 - DNA, 411 bp, Arabidopsis thaliana landsberg
catccatcccggtcttcacctttctcttggctgtcatgatggggtgagtatgattctttataagggttctcttcttagatatggcttcagttttggttttttgatgtctcctacttggtatgcagtacagaaagagtgaatttgttgagaatcgaaggtcaaactaaggttggaggcacacttgtgtgtgttatgggtgctgtcttcatggttgtatttcgaggtccggccttgttaggagataaagatgcagactttgcgatgaacaatgaaatcagtgctaaaggtcaacctgagcctactggttggttagtctctggttttctcgatcttggatttgagcaatggcacattggagttttatgcttgattggaaactgcatgtgtatggctacttttcttgccattcag

SEQ ID NO: 138871 - DNA, 1109 bp, Arabidopsis thaliana landsberg
gctctctaaaaaagctctttgttcgtctctatatcatacgaataatggattcttattttttccttggcactgttgttgttgttgctcttgcaatctacacgcttttgggaacaatatcttttatggtttatagaaaattcaggttacaccaagagaagaacaacatatcatcttgtttttctttttcatcttgcttttctttttcatcttcttcatcgacttcgtcgcccggtcgtaaacaccaagtctttccaagtttccacggggcagatgtacgcaaatcctttctcagccacatcatgaaggagttcaaaagcaagggaatcgacatattcattgataaagatatcaagaggggtaagtccatcggtcctgagctcacagaagctatcagaggatcgagggttgcgattgtcttcctctcgaggaaatatgcttcttcgtcgtggtgcctgaatgagttggcactgatcatgaagtgcaaaaaagagttgggtctaacagtgatgacccttttctatgacttggacccaaactgacgtaaaaaaacagacatgcgattttgggagggctttcacaaaatcttgtaaaggtaaaacaaaggatggtattaggagatggaaaaaagctttggaggaagtcgccaaaatcgccggttaccattcaagcatatggtaaaattcattaccttttgaatgtgtatatatatgtgcaagcaatttttcatgagtgtgtatgttgataccaaaaaaaaaacattatgaatatttttaatttgacatacatgtgttatagacttatagtattaatattttgtatttttttgccacttgtcttttagggataatgaagcggacatgatcggaatagtcaccactgatatttcaaatacgttgaacatctcaacgccgtcaagtgatttcagcgacttagttgggatggaggatcatatgaaaaaattggaacgaatgttacaacttgatctggaagaagtgagaatgatagggatttggggtcctgctggtattggcaagacgaccatctccagagttctatataacaaactctttcatcagttccaactgggcgcaatcattgacaacatcaaa

SEQ ID NO: 138872 - DNA, 393 bp, Arabidopsis thaliana landsberg
aagctacatcggtgcctcctgtcgcaccgtttgggctctgcttcactagtgacgtagattttccggcggtagatctagcgttgcagagtgagatggtgcggtggaggattcatgggaagaatctgatggtgaatgttggtggtggagtccgatgctcggggattgttgacggcgggtcaagtcgagtcaacccgattgtaatgggtgggctacaattagaaggctttatattggactttgatttgggtaactcaatgatgggctttggacaaagaacacgctctgattcaacttcgttgtaatacagaaacctttgtaattgtaaccttctaattatctggtagatatcctcaattttgatctcttttgagtgtactcttttcttacaatacc

SEQ ID NO: 138873 - DNA, 534 bp, Arabidopsis thaliana landsberg
aatgtcgagagcaggattgtgtgtataaacataccaatgaagatatcaaagaatgcaatatgtatgttacataaattcggttttcagtttcatgttttgtcagtttagattgaacttgatgattgagtttgtgttgattctaagactggttagatttattacttatcttgtgattatattttgtaggtacaagctggggttttgtcccaatggtcctgattgtcggtacaggcatgcaaagcttcctggacctccaccaccagttgaggaagttcttcagaagatacaacaattgacaacatacaattatgggacaaataggctctatcaagcaaggaatgttgctccacagctacaagatagacctcaggggcaagttccaatgcaaggccagccacaagaatcaggtaacttgcagcagcaacaacaacaacaacctcagcaatcacaacaccaggtcagccagactctgataccaaatcctgctgatcaaacgaacagaacatctcatcctttgcctcaaggggtaaatag

SEQ ID NO: 138874 - DNA, 432 bp, Arabidopsis thaliana landsberg
acatatctgaagaattttagccagaaagagcactggcactgaagggacaatctcagaagtcagcaaggagtttaaggatcagctcctcctagctttgcttcaggcagagcctgcagttcttaaagtcttacttgaactggtaggtgtattcaacaagcttaacttcatctggactagttgttgcaaatcttattataacccctccgtcctgtagattttagtttgaatttgttcacatcttcattttacttcacttgtgggcagctgcacattgttgttgtgtcagaatttgttaggaaaaatgcatggcctaaacttgtaccggagctgcgctctgctatcgagaagagcagtttaattagcagttcaaactctagctggagtactgtgaacgctctgatggtattgcttacagttgtaaagccttttcag

SEQ ID NO: 138875 - DNA, 318 bp, Arabidopsis thaliana landsberg; identical to SEQ ID NO: 101982

SEQ ID NO: 138876 - DNA, 111 bp, Arabidopsis thaliana landsberg
ttggcgtctccgttgaagctttccacaaatctcaaatttgtttggagactctcaaatgtatccttctctcgacgatgatttcgtctctgatttgttttgcttcgatcaaag

SEQ ID NO: 138877 - DNA, 552 bp, Arabidopsis thaliana landsberg
tagcatagaagatagccaaataggtttaaaaagaacaccaaattgatgtttgttttcacaaaaaggaaaaatttagacataacataacacattgagaaaagtacacaagttctattgaaaaagaatagacatgaagagctatacaaaccaaaaggcgaagaagaagaatgagaagaaaaaacaattagctcatcttaggaaaatgaaaccacaccctccaagcatcaccatcctaaccgtaataactcggagaacccaaaagaaaaattttaatgagaattaaaaggaaagaaaataacactacaaccaccaccaaacgaacccaccagcaagatcacattttttccagattcatgaaaaatatttaatgaacccaaactaggatgttggtgatgatgatgatgatgactcaaaccggtatggcatcaacattggatgagtcttcacatctcaatactattccttcaagacttgttgggaatgtgcatctcctccattgccaaccagctgctagtggctctgatgatggaactatcatcaacacattatcgt

SEQ ID NO: 138878 - DNA, 1168 bp, Arabidopsis thaliana landsberg
caaacatacaaaaaaaaaacagttctttttataactcttctctagtcttctccaaatggaatggactagaggaagaatcctaggccgaggctctacagccaccgtatacgccgccgcaggtcacaattcagatgaaatcctcgccgttaaatcatctgaggttcaccgctcagagttcttgcaaagagaagccaagattctctcttcgttaagttctccttacgtgatcggatacagaggatcagaaaccaagagagagtcaaacggtgtcgttatgtataatcttttgatggagtacgcaccgtatggaacgttgaccgatgcggcggcgaaagacgggggaagagtcgacgagactcgggtagtgaagtacacgcgcgatatactaaaaggattggagtatatacactcgaaaggaatcgtgcattgtgatgtaaagggtagtaacgtgttggtcggagagaacggagaagccaagatcgctgatttcgggtgtgcgaaatgggttgaaccggaaataaccgaaccggttagaggaacgccggcgttcatggctccagaagcggcgcgtggagagagacaagggaaagagagtgatatatgggcggtgggttgtacggtgatagagatggttaccgggtctcagccgtggattggggcggattttaccgacccggttttggttctttatcgggtcgggtattcgagtgaaactccggagcttccttgtttgcttgcggaagaagcaaaagattttttggaaaagtgtttgaagagggaagcaaatgaaagatggacagcgacacaactcctaaaccatccttttttgacaactaaaccagacattgaaccagttctggttcccggtttgatttcaaactcaccgacaagtgtgacagatcaaacgttttggagatcagtagaggaagaggaagaagaagaaacagaggaaatacagaaggattcgagagatcttgatcgtttaagcttgtggggttgttactcggagaggatcggacggctgaagtgtgttggtggtttggatgggaccagatgtgatatggagggtggggattggattatggtgagagcgaggtgtgaaggaacaatgattagtgggtcacaaaaggaattgattattagtgaaaatgtattggtgggggaattg

SEQ ID NO: 138879 - DNA, 248 bp, Arabidopsis thaliana landsberg
tgcgacgatcacatctggaactgagtctctctgctttccttctaatgtgtaagtaacagacttgtttattagatgagaggaagaatcaacgggaatgcataatctgacgatttcataagaatgaatgaaacaaaacaagagagagctaagaagaagaaaaaggattgtatatgtatgtacaaaaggtctatatatgtacaccattattcttttctatctgtaaccttgcgacttaaatgacattacag

SEQ ID NO: 138880 - DNA, 174 bp, Arabidopsis thaliana landsberg
gcgttaacgaatcttcatcgatcaagctcatcaaagtctaatatcacaaagaaagagtttttttaactagcttagctcaaagtgtttgcttaagacaagaagaacatggcgtcttaccagaaccgtccaggaggtcaggccactgacgagtacggaaacccgatccagcagcag

SEQ ID NO: 138881 - DNA, 370 bp, Arabidopsis thaliana landsberg; identical to SEQ ID NO: 103392

SEQ ID NO: 138882 - DNA, 343 bp, Arabidopsis thaliana landsberg
attccaatacggaatgaaaagaaaaggacaacatgcaggatggggtagaagaagcggggatacttggttcaagccctgacacgaaagaatataacactcctaagaattaagaatccatgtttcgtataggatttcttgtggacacaacactacaataacaaaattgtagttgtgtttaatcttcttttttttattgaagagttttttttctatctaaatttaagtatgtatctatcaaaaaaaatagtatatacaacagataacctcggctcaatcttttttagtaaaaaaaagattgagccgagtgcaattaaactaataaaacaaacgtgaattactaaat

SEQ ID NO: 138883 - DNA, 86 bp, Arabidopsis thaliana landsberg
aaaaaaaaaaaaaaaaaaaaaaaaaaaaaaaaaaaaaaaaaaaaaaaaaaaaaaaaaaaaaaaaaaaaaaaaaaaaaaaaaaaaaa

SEQ ID NO: 138884 - DNA, 104 bp, Arabidopsis thaliana landsberg; identical to SEQ ID NO: 52087

SEQ ID NO: 138885 - DNA, 116 bp, Arabidopsis thaliana landsberg
tcccgcttccctccacatttaatcgagtggtcatgctagaaacataaacagtcagagataattattatatataatccatccgaatgggataataaaattactactctttatttttt

SEQ ID NO: 138886 - DNA, 431 bp, Arabidopsis thaliana landsberg
tttgaaaacaaggtacaatacaaagcatctgtatataaatgatacaccaaataaaaaatgtcgaaaagggtaggaaaactaatgtaacctatagtttctcccagctgctcttattcccattaagcttaagaccaagagcagcccaattctaatgatacaacaaacacttcataacaaacgtatgaaacaagttcaactacacctgatggttgatacggttaggagagattcagcagtagtaccatcctgctcaatatcgatgtctaggattcccgccttgatcatgatgatgacttcctcttcctcttcctctgcggtcatggtcaccaccttgttgatgatgatgctgaccattataccctcgtgggttattttgctcggacccaccttgaccatgccattgttgttgttgatgttgattctgatgatta

SEQ ID NO: 138887 - DNA, 143 bp, Arabidopsis thaliana landsberg
agaaaaacagagaagagagtagtagcttatgggagttggagaaaagaacctattgtccaagaaaacgagattcatcgtcagatgtcaaaaaccgattccttacactaacacttgcacctgaagatgtcaaggatggtaatttg

SEQ ID NO: 138888 - DNA, 685 bp, Arabidopsis thaliana landsberg
caaaatcccaaatttttcctcgacaaaaaatctacctgctttgatccaaatctctatgggtttttatcattaatcgaatttcaaaattgatgaatccataatttttttctctattcgatttatgagaaattgatttttttttttatttttctcccttgtgaaataggttaaagattattgttttgttgctgtttgtagttatgccggtaatgaatccatcattgtgtattggtacacaaacatcggtgtacctcgctcctcgtgagaaatcttttacgagtaatggtatgtctcttctaaatctcaacacttgttggctcttaagtttacaattgcttctttggaaaattctttgaaattgagtttggattgctcttgacaaattgaagaaactagacttgttgttgttattgatatctcagagctttagtgagtgttgttgtagcattgattcttgctttagtcccatcgttcgagcttgcttttattgaatgaacaatggaattctaaagctcttcttctacttgctgtctgtaataggaaactctcaaaggcgttatcctacaagcgtttctatgcaacgccagccttggagccaaagtaaattcccttctctccaggatgcagtgcaaccagttgtcgtctctaagaataaaagaccagtctttgcatgtaactctgcgct

SEQ ID NO: 138889 - DNA, 222 bp, Arabidopsis thaliana landsberg
aatcgatgtacagtaaaaacaaaaattcacctgtatattgtatatatgtatgtaccggtattaataataagtaaaccgatcgagactggtcaagaatccaacgcgaacggcgtttgaagaagatcatacggagcccaaagcgcgtctaaaggacaaggccgaccagcatcaagcctagcccatggcttacctttcccactccaatgcaacagactcaccgga

SEQ ID NO: 138890 - DNA, 212 bp, Arabidopsis thaliana landsberg
ctgtctgcgactcggtcgttcctggtgtggtttcgtgtcgtagtcattaaaatctcatctctctcactctcagttccaataataccccttcctatcagagccaacacgcatccagcatccttcatcagcctttgcgtatgaaaatgatgaaacttgaatagagatcattcgtatttcatcgacgtttctaattcgcaatcacaattgttttc

SEQ ID NO: 138891 - DNA, 194 bp, Arabidopsis thaliana landsberg
gaaagataataaatgcgaggacgtaactggtaaaatcacgaaactgcctgattcaccttcactattcagagtgtttccttataaatatctatcacacggcgcaaaacgaaacgctcaagccctcaagtttatcttcctcagccgtgtagttcaaatcccggcacaaaactctgtcgtcgcttccccgagaaaag

SEQ ID NO: 138892 - DNA, 61 bp, Arabidopsis thaliana landsberg
acttaacgtctctctctattcctctgcttctctctttctccctgtgaaaaaaatggactcg

SEQ ID NO: 138893 - DNA, 61 bp, Arabidopsis thaliana landsberg
tgctcctcttctcctccaccgcacagatccaagacattttgattacactccatcgccggcg

SEQ ID NO: 138894 - DNA, 491 bp, Arabidopsis thaliana landsberg
ttcttctccgtcgcggaaaagatggggaccaccaccaatctgagatcttggctgtatctcattcttctcttcatcgtcgtcgtcggcgtcaacgctcagaatcggagacctaagaatgttcaggtggctgttaaggctaagtggcagggtactcctcttctccttgaggctgggtaatgcttcttcttacttttttgtcgagcaccattgttactgatcttaagctgaagctgagtgatttttgttgttgtgatagtgagttgatttccaaagaatcgaagcagttgttctgggagtttactgatgcttggcttggttccgatggagatgattccgattgtaaatcagctagagattgtcttcttaagatatctaaacaggcttcgactctgttagctcaaccagtggcttctctcttccatttctcacttactctgagatctgcttcgcctaggcttgtgctttaccgtcaattggctgatgagtctcta

SEQ ID NO: 138895 - DNA, 596 bp, Arabidopsis thaliana landsberg
ctctgtccgcttcttgccgtaacacttgtccttaacggaatccaacctgtcctctctggtaaacccttctgatcgatacaccgcaatttcgcaaaccgaataagcgaagattttttttttttttttgaacaattgggaaaattttattataggtgtggcggttggatgcggttggcaaacgtttgtggcgaaggttaacgttggatgttactacattattggaattcctcttggggctctctttgggttttactttaacttcggtgccaaggcaagatagttttcttaactttcattttaattagttaccattattcttgtattgaatattagaataacaaatttaaggctaatgatgctatagggtatatggacggggatgatcggtggtacggttatacaaacgtttattttggcgtgggtcacgtttagaacagattggacaaaagaagtaagtttgctaaactttaagctgccctgtaggcgctaagtgtttacgtaaatattttcattgatttgatagttaagataatttgtttcaggtggaagaagcttccaaaaggttggacaaatggagcaacaagaaacaagaagtt

SEQ ID NO: 138896 - DNA, 181 bp, Arabidopsis thaliana landsberg
tcgtatttcagattaagtggcttacttgtcacaaaggttcattgttgagttttaagtctgatctgagattcatttgcttttcttgtgttaaatgatgtcttattcttgcttgtgatcttcactattgaccaggagaaagcaattagtcaacgttgttggaaggagcttcagaatgagaagc

SEQ ID NO: 138897 - DNA, 200 bp, Arabidopsis thaliana landsberg
atattgaaaccatcactatttgccaagcacatgtacgaacatacaacttaagaaatgtgaaattattatatgctaatttctacgatctaaagcttatatggcaaacaactattaattgataactagtggggtagcctcaccagtatcattgattattgagcttatcgatactttcctcttcagtagtagtatcgcattcc

SEQ ID NO: 138898 - DNA, 172 bp, Arabidopsis thaliana landsberg
gataaacccccaaaaggatcagatatctccgtaaagaaccttgcgtggatcaagctgtccgctgcagtaacttgatgagacgatggatagttcttgtctgcctttccactcttcacgaggctttaacaataccagaggttcgattactccagaatctacacaaagcattgtt

SEQ ID NO: 138899 - DNA, 151 bp, Arabidopsis thaliana landsberg
ggattgctcaaagcttttagctttcattcactcgaaagcgggggagagcaagctacgtggtgtgttgaagaagtattcgaaacttggaagaggtgctgttgctctgatttcaccagccaagtctcttatgtcatctgctccatgaacaagg

SEQ ID NO: 138900 - DNA, 244 bp, Arabidopsis thaliana landsberg
cccttttctctctctctcgaagatatcgcctttaattccttcttcttcttctgatttcttcaaagattcatttcttagagatctcagcttctgtaagagtaggctagctaccaaaaaaaaagaaatagaaaaaaacattgatgcttaatcagcagttcttggtgtttgagacacatgtctccaataatactcagtgagatctttctctctgggtttatgttaaattccacaatcaggcgcagga

SEQ ID NO: 138901 - DNA, 79 bp, Arabidopsis thaliana landsberg
tgatctttgtgataacaatcttccaccatgggaacaaagtttttagctctgggtttgtctctgtgtcttgttctctcaa

SEQ ID NO: 138902 - DNA, 131 bp, Arabidopsis thaliana landsberg
aatgagaaacgtctttaatggtgagagaggtgtacggtggaagttgatgtagaggataaaaactcttaagttcaatgtatacacgcgaaaaagtcggatttcttctccaccttctttgttcccacaccgaa

SEQ ID NO: 138903 - DNA, 239 bp, Arabidopsis thaliana landsberg
tttgggaaaaagtttcagcatttggttcttgtcaattcttatcaatgctatcttaactcttctttgtgcatttctgtttgagttctgtggctaaggttgtttttggagataatttaatctcgagaaatttctcagttttgtttttgggattttgtagaatattaagtcaaagtttgctcttttgcagctgatttaggaagttggtgatcaaattacatctagtgtttgtttccgccagc

SEQ ID NO: 138904 - DNA, 62 bp, Arabidopsis thaliana landsberg
caacgagaatatgatcataacacccaatcatagaacctatgaacatataattctacgagcca

SEQ ID NO: 138905 - DNA, 348 bp, Arabidopsis thaliana landsberg; identical to SEQ ID NO: 132365

SEQ ID NO: 138906 - DNA, 1056 bp, Arabidopsis thaliana landsberg
agttgctggtgctgatgttagtggtattagagctgtaactaagcgtcagccaagacagtacatgaaccgtcgcggtggatttaaccgtcctctaccggccgagcgtaatcgctagtcttctcaaggttaggctttccactaagcttcccaagtttttgttctatcaattggaagataggtttagctcctatgtgtagtatgattaaattagataggacttagttcttagacttgttggctgcattagaaaatgaactcatcagcatcttttcagataatggattctaagtactcatcaggttcagcattttgctttctctatattactcacttgttttgcttctcaatctagttcactggtggttgtttagttagatctataccagagatctttgtttcaggtgatatcctcacaagctctatatacagatagttcactcggttagttttgttatctgcatgaagaactattttagttaatccagaggaaatggaaccagtcttgtgttttttagttttcttgccttggcacatttgaatctgcatcttacaagatcaagttgtgcgagttactgcgtaaaaccgatcattccacctatgtgctggtatttaccaataggtctcaactctcaacagctgaatttagaatttacttgcccttggatcatttactctgatgagattaagcagtttcggtttttctgattattaactagaatctttcgtgtctctgcatccagtttttgttttcgcattgatcgatttctgctcaccaacctttgaatatatcttgcaggtccctctaacgctgtcttgaacactagtcaaaaagatgagggctagagctgcatttcccagatagtagttactagttactccaattcttccccagactctgttctgatgtcttatagagaacaaacttgtactctctgaatttggttggaaacaactcgtgagttatttctttttcgagatttaaaaatgttaatgtttgtgtgtaatctcccggctctaactgtcagactatggttcatttgaaatcaggcttattca

SEQ ID NO: 138907 - DNA, 51 bp, Arabidopsis thaliana landsberg
atgagaggctcttgcgtacaatgatcttactgcattggaagctgcatcttt

SEQ ID NO: 138908 - DNA, 215 bp, Arabidopsis thaliana landsberg
acagaagatgagaggcttcaacgtcatatgtaggagttatgggaaaacaacttaaacccgaccgacatgaagatgaaggatcacaaggcagagtaatggtttagaacttagcttaaagaattcatatgtctgctgataaattaaatattgtacaaagggaaattacgctctttcttttgagagcggagtatatgtaaccgaacttggtttttctc

SEQ ID NO: 138909 - DNA, 263 bp, Arabidopsis thaliana landsberg
ctcaactaacttagttagggatatctccggtcatggatctcaggcggagacagtggttcttgtcggctattttgctgtcggcggcgttgctgattgacccgcaattctcgacggcggcgacggcttcggagaatttggtatttgaagttcgaagcaagttcgccggaaaaagagtaaaagatcttggagctctcagagctcacgacgtccaccgtcactcaagactcctctccgccatcgatattcctctcggcggcgatagc

SEQ ID NO: 138910 - DNA, 967 bp, Arabidopsis thaliana landsberg
ttgtgtgtttctcgcgtggcttgcgtgttacttcattcatcactgctttagcttctcctcatatgaatctcgaggcaatccagtcactgacttttctcactccccatctctagggtttctctctttcccttattttataatttatttcattgaatctctgaatttcattctcttttgtggagtacatttgtgtaaagcttagatttttatttgggtttcaagcaaaccgagaaaagaaacgattagatctcctttttctgggtttgttctcaaagatttgttctgtttcagttcttccaatttggggggattttatgttggatccagtctctaaaggttcgattttgatgtgtttccttgatatgtaatcagatttgaatcttaaagtttctatctttatgactcctttcaggttaaaactgtgagcatttggagtagcaaaagtaacaaagcatggcaacacttaaagacattggtgtatcagcagggataaacatcctcactgcattcattttcttcataatctttgcgtttttaaggcttcagccattcaacgacagagtttacttctccaaatggtacctcagggggttaagaagcagccctgcaagtggcggcggattcgcggggcggtttgtgaatttggagttgagatcatacctcaagttcttgcattggatgcctgaagctcttaagatgcctgagcgtgagctgattgatcatgctggtttagactctgttgtctatctccggatttactggctcgggtatgaaaaaacttgagtcttattgagtcaaccaattagtttaatgtctcataaagctgaaccattttttgatgtagattatagagtagagtttgttggtcaagattagataaaaaaattatattttgaggctaattttgtcatcaagaagaggaaattacgttgactaagtctttagagagaagaagcaattctcatgt

SEQ ID NO: 138911 - DNA, 219 bp, Arabidopsis thaliana landsberg
ccatttgttctgagttagttactttaacaatgatgaaactgaatgaaacttagggagaggttttatatgtacagaaaacctcagcagcagaatcagcaatttttaaatctgaacaacaacaacataaaatgcttttgatgaattctcaatgtttttgtcttcctcttcttacgcaatgtgctttctgctctttgcccagaacggtattgcgggtgtacg

SEQ ID NO: 138912 - DNA, 2552 bp, Arabidopsis thaliana landsberg
tcttccaacgaaaccctaattttgcttcctcatcttgttcagaaaattactcaaattcctattagattactctctcttcgacctccgatagctcacatggcgtctcgaaactatcggtgggagctcttcgcagcttcgttaatcctaaccttagctttgattcacctggtcgaagcaaactccgaaggagatgctctttacgctcttcgccggagtttaacagatccggaccatgttctccagagctgggatccaactcttgttaatccttgtacctggttccatgtcacctgtaaccaagacaaccgcgtcactcgtgtgtaagatcctcttttctctttctcttatctcctgttttgaacaagttgattcgccaagaatctgtggagattctattgatacagtctctcataatttactgtctcatttttgctctatttataggatagatattctgggtttgtttctattattagatagcatcgtttgatgtttcagtcgatttatgactgagctttaacaatgatggtattagagtcatatctagacccttttggtcgttgtggaagatcttagataaacttgaccataacttcctagagattgagatggataagtctaatggggattttgtctgtgtgttgaattgtttctagctttccttttcccttgtaaacacttcattttggggtaactttaaggttcatgaaactatttatgatatggtccttttcgaagcttcaaatgttgagtacaacaagtcaaaggaaaaaagaaacactttctagtatgaaaaggggaaatctaaactctaaagctcctatgttttgcactgtgtagacttttctagtcattggattccttgaaagaatccctaatagttattccatctattaagcagttcaatttttacttgtaccttatgattttctcaatgctttgttactgatctagcttactttttggtccctactttgtgagttcttacttttttagaagaattgtggattctttgtacttgatttcatctgattatctctaataactgtttgatgtatcaagagaacagctaatggagtataaaaagttaatgcttatctcttgttcatttgtgctttattgtcttcttcttctacaatatcaatactggtaatattgattgcatatctaattctacatattttggcagggatttggggaattcaaacctctctggacatcttgcgcctgagcttgggaagcttgaacatttacagtatctgtatgccatcactcttttgacttttacttatccgaaatttataatggaattaacattgtataccatataatgcactgaaactgtttaactttgagattggttatgttatagacaatgtaagactaactcttaaattgtcttatgatttatgcagagagctctacaaaaacaacatccaaggaactataccttccgaacttggaaatctgaagaatctcatcagcttggatctgtacaacaacaatcttacagggatagttcccacttctttgggaaaattgaagtctctggtctttttgtaagtttctctcaaactctgacatagacacattgaacaatatactcaacacttctttaaaaattgcaaaatggtttatcaaatgttgagtaagagaacaagattatttatgtgggttgttctccaatacctaattctttttttgtgatgcctcttcatacattgtctctctaagaaactgtttaatgtgacagacggcttaatgacaaccgattgacggggccaatccctagagcactcactgcaatcccaagccttaaagttgtgtaagttcagctttttcattgtttgtctgttaacgctctgctacttttctctaaaatcgccagacttcacccttttgcttaaaaaaacatattatctttgtcttccttttgctcagtgatgtctcaagcaatgatttgtgtggaacaatcccaacaaacggaccttttgctcacattcctttacagaagtaagtttcttcttcacttagccaacaaagcttcttcataatgtttcctcttcaatttacatattttgcctcttttaagtagtctttgatacagacatcaattgagtcatatgtttcgtataataaactgataaagttgcatatgagcatttgttcctaataacgcaaaataattgtgcagctttgagaacaacccgaggttggagggaccggaattactcggtcttgcaagctacgacactaactgcacctgaaaaaattggcaaaacctgaaaatgaagaattggggggtgaccttgtaagaacacttcaccactttatcaaatatcacatctactatgtaataagtatatatatgtagtccaaaaaaaaaatgaagaatcgaatcagtaatatcatctggtctcaattgagaactttgaggtctgtgtatgtaaaatttctaaatgcgactttcgcgtactgtaatgttcggttgtgggattctgagaagtaacatttgtattggtatggtatcaagttgttctgccttgtctgca

SEQ ID NO: 138913 - DNA, 183 bp, Arabidopsis thaliana landsberg
attccccatctgaccaccagaagaagagccacacactcacaaattaaaaagagagagagagagacagagagagagagagattctgcggaggagcttcttcttcgtagggtgttcatcgttattaacgttatcgcccctacgtcagctccatctccaggtccgtcgcttctcttccatttcttc

SEQ ID NO: 138914 - DNA, 358 bp, Arabidopsis thaliana landsberg
ggatccagttgagtacaagaaaagggtgaagctgcagtccaagcagtatcctgctcttgtctaaaacctcaaaaaagagaacgcaccaaaactgatgacaagctctgaatattttctcgtcttgtgtcattatgtttagatgtcattgggtgattgaaaactcctcattttggcaccttaagacactggaatctatttattttcgaaaaaaaactcttctttctctatttaactgttaatattcttggtactgattcagttggtgttgcttctatataatacataattatgttctctggtcgttcatgagtgttgtccaaattctactaagtgaaatatgaagtcttcattccataga

SEQ ID NO: 138915 - DNA, 95 bp, Arabidopsis thaliana landsberg
cctcaacaagcatcctcgtcgtgtttgtcattccaaaaagagcaccaatggtgattactggacttcattgggtgtattccataagggcatccgtt

SEQ ID NO: 138916 - DNA, 270 bp, Arabidopsis thaliana landsberg
cccttaatgagagcagcaagtaaggttaagagtgaaaaaacttctctggaggactttgaatcttatctcttactctctaaactcacaatcaagaaaatagagatatatatttcttaattttcgattggtaatacttttagtggcacgaatatatcttgttttggtagatattctgcatttatctcttttttaggtcacccttaagagacactatcttattatcctgatagtaaatccaacaatcctctaaaaatatcgtcttgtctttct

SEQ ID NO: 138917 - DNA, 65 bp, Arabidopsis thaliana landsberg
ctctccttcagaacgaaaagtcgaaaaccattataatgtgactaaatctcacatctgtatcctct

SEQ ID NO: 138918 - DNA, 349 bp, Arabidopsis thaliana landsberg; identical to SEQ ID NO: 104436

SEQ ID NO: 138919 - DNA, 303 bp, Arabidopsis thaliana landsberg
ttcagagaaacagttctctagaagtgaaacctccaagcattttccttatggaacttatacgtagatgtcttgtcttgggagccttaggatatgagctggttttgaaatcagcatttctactcgcagagattgtgggaggccgtgtcttaaaggagaagctcataaaacttcctcttatgcataaaagctctgcaattgttccattgaaacagagttctactcttgtaacagctagtacaacgctccttgagcaagagaagaatctcggtaatgcaggcaagagacttgagttcgtcaaacttc

SEQ ID NO: 138920 - DNA, 115 bp, Arabidopsis thaliana landsberg
attttctcttacatcacttaatttataatttccttttcccattttttttcaaaaaaggaactatgatttctgtttctgaatttgttctctgcatagatgacaatgttagtggtac

SEQ ID NO: 138921 - DNA, 487 bp, Arabidopsis thaliana landsberg
ttatccatttattcttatttttgataatgttattggtttcatgaacctagcttctagtagggcataggtgggatactctgctcgtgcctgaagaagttctctggatcaaccttggttttaatcttcaccaatctgtcaaaattgcctttgaagtacttaggtccccagattttagcttcaatgaagttaacctttgcgttgttcttgttctgtccgaagtctagatctctgtagttcacatatgcttgtcttggattgcttgagacataaggcgccatgtaattgtatatctctttgatccagttgatttttctactcgatgtcttgtcattctctagccagttcgcgtaatagagaatcttgaagagggttccgtttctatgcggaaatgggatcgcagattcagggattttcgacatcataccaccgtaaggagtccagttcagaaatgttgtgtttccttcaatcaatcttttgaatattcctt

SEQ ID NO: 138922 - DNA, 83 bp, Arabidopsis thaliana landsberg
cgccttgggaggaagaatgaatgttcgatcattcccactcggctgtgcaaagagctaatacttatttcatctttaagatcatc

SEQ ID NO: 138923 - DNA, 359 bp, Arabidopsis thaliana landsberg
ggaatcaagagaaacatattattcatttattaccattggcctccttcaaaccaaaagacataaacaaaagaaaccttgacaatgtctcgaaaagggagcctcacaaatcaaagacaatccaaggaggcttttatgttaaatgctatagacatacaagcaacctatcctttggctatgcagcttcttcctcttgtctctaccaaaagtaaagctgctttacgcagttcagactccaacaacaaaatattacatccacagatttaacttacacatttgccagatgactactaggcattaggcaacagtatctgacagagagactcaatatgtgcgatgtgatcagaaaggagtttaggctt

SEQ ID NO: 138924 - DNA, 205 bp, Arabidopsis thaliana landsberg
acttatttaataaggtcgattggtttatgcgaattgattttctgttacgataaattgacgagactatagctaatccaatagctgcttcagcggctgcaattgctataacaaaaatgcagaaaatttccccttttagttgggaattatcaaaaaaatcagaaaatgttacgaaattcatattaactgcattgagtataagttcaag

SEQ ID NO: 138925 - DNA, 130 bp, Arabidopsis thaliana landsberg; identical to SEQ ID NO: 128044

SEQ ID NO: 138926 - DNA, 357 bp, Arabidopsis thaliana landsberg; identical to SEQ ID NO: 104084

SEQ ID NO: 138927 - DNA, 182 bp, Arabidopsis thaliana landsberg
caaaccaaacataacactcacaatttaactctctctgtctctctctcatatctctcacttcttctctttctttttaagtccccaaaataacctcgagatcgatggactcaaatctgttcataactcccacttcttctctcaaatcccaagccttggtctcttcatcatcctaactatataag

SEQ ID NO: 138928 - DNA, 873 bp, Arabidopsis thaliana landsberg
agaaaaagaaaaaacaacgtaaagtttctgccataaatcatgagaccaatattagacctcgaaattgaagcttcatcgggcagtagtagcagccaagtggcctcaaacttgtctccggttggggaagattacaaaccaatctcgctgaatcttagcctcagtttcaacaacaacaacaacaataatctggatcttgaatcatcgtctttgacgctgccactttcgagcacgagtgagagtagtaacccggagcagcagcagcaacaacaaccatctgtatcaaagagagtcttctcttgcaactactgcagacgcaagttctatagctctcaagctcttggaggtcaccagaacgcacacaagcgagaaagaacaatggccaaacgagcaatgcacatgggaagaatgtttggtcaccatcacaggccttacacatacacttcttcttcccttgggatgcaagctcactccggtttacttcatcacaccttatctcagcctcagcctcttgtttataggtttcatcatcaagggtattttggtaacaccgtgccgttgttctttgactatgacgatggtggtagcgacttcttctggcccggcagcttccgtcaggtggttgaggaagctgaggctccggtggttgtggtggctagtactgagtcaggccttgatttgaactcggttgcggcaaatggaggtgtagataataatagctcaaagcctgatcttaccttaagactctaaaaggattaaggagattatatctttattgttatttttctattgttagacatacagaagataagttggagacagttgatagaaattgatgaaaaactttgttgttatattaaatgaggttgttcatta

SEQ ID NO: 138929 - DNA, 1696 bp, Arabidopsis thaliana landsberg
gtatccatattactagaaaatcacagttgtttacaattggttgactctgttttctcttgaccttttctccaggcaagaagacctcaggaggccatttgagcagtttggtcccgtcaaggacatctaccttcctagggattactatactgggtgaggatgctctgtagataagacattgaatgtttatacatccagggcataattttacattacttcaattagactatgtctctttcttattgttttcttttgcttcgtaaaccaccttttgtgaatcctacattccatcgtatgcagctcatgaatttgttagatttataagaattttctgaaaggtctatgtcaaacatgtccggttttatatccaatcttcccaaaatcacatttggagccttgaaacgtttgttttatctacacttaggttttcagcttaagtctagtacacctaaaacttgcgcctcttcgagtcgcttaaggaaaaggatacatgatgatatgttccatgtctgaacacactatgagtgagttaattgaagttgttgaggtttagcagtgaatctaaagaattgaagacatcaaagaagtaattagagttcttatgaagatgttctatatggtagtgaagaattgaagtgaagttgagtttgtattctatgtgaagatgaatcaagtcttcaagaagtcatctttgtactgacacttgcaaggctagcaggcaagtgcttgcttttttcatgtttactgatatcttcggttgcaggggatcatatcgccagttgtccttcaacaggattgttataaagtggtacatcttcctcgccattttgtatgtttggtttctagtctgagatctttttgttctacattttgaatgcagagatccgcgagggtttgggttcgttcaatttatggaccctgctgatgctgctgatgcaaaacatcacatggatggttatcttcttcttggccgtgagttgactgtcgtgtttgcagaagagaacagaaagaaaccgactgaaatgagagcaagggagcgtggtggaggaaggtgcatgaatctttctctttttgaactattttggttattgtcaaatatcaaaaactcaatatttaacatctttttttggttcgttggagcagcagatttcgggatagaagacgtactccacctcgttactactctcgctctcgttctcctccccctcgacgtggtagatctcggtcacggagcggtgactattattctcctccccctagaagacatcacccaaggtttctatatgtttctgtctaagctcaattacaaacttctccacgcttgtatgctcactgtctattgtcacagatctatctcgcccagggaagagcgatatgatgggaggaggtcatactcgcgctcacctgcctctgatggctcaaggggtcgcagtttaactccagtcagaggtaagagccgcagcttaagccccagccctagaagaagcataagccgtagcccaagaagaagcaggagcccaagcccaaaaagaaataggagcgttagcccaagaagaagcataagccgtagccctagaagaagcaggagtccgaggagaagcagaagctacactcctgaacccgccagaagcaggagccaaagcccgcatgggggccagtatgacgaagaccgttcaccaagccagtgattgattcgtca

SEQ ID NO: 138930 - DNA, 391 bp, Arabidopsis thaliana landsberg; identical to SEQ ID NO: 103127

SEQ ID NO: 138931 - DNA, 334 bp, Arabidopsis thaliana landsberg
gggaaagtaatctatcctcgccggagtcgttgtctcgccgataaggaacgaaggacgaagctgtcttcgatttccgggattgaagattcggttttgagctcaaatcgtcgactgagtaatgggggtaagttccgatttgctgattttgccaaattttcggattttttaagttgttttgcgcttgaggaacttgattatgtgtacaagcagtaattgtattgtttatgatataggttgatccattcaaaactacggaaacgttagaagccgacaaggaaaccaatggtggtgtccctgtgaaggataaattgacttttaaagctcctgagagaaa

SEQ ID NO: 138932 - DNA, 296 bp, Arabidopsis thaliana landsberg
aggatgagaggtttgaagcagacaaaagtcaggttttgagagaaatcgcagcccttgaacctcgagatcttgcttgaaccaactaatgcaattcatccttccttcccttttaaaacactcgaaaagacatttttgaagcatcttgttgtttttttacattaggtaaccaatcttcctctcactttctcaccacacacacacacacacacacacacacatacacatacgagatatctattcgatatatgtattcatatgtacactacttcactgtcgatgaaataaaatggtttgtc

SEQ ID NO: 138933 - DNA, 311 bp, Arabidopsis thaliana landsberg
ttttacataactgatgtagatcattcatcatctaatacaacttacaaggacgtgaaataagcttggtggtgggagtctctaaggacttcttaacttaccctttgtgtttgtgagaaacagggttctacggatagctagaatgagaatccatgtcgttgctgtgattttctccttgatcatcaatagcaatgctgagctcaagacagtcttcaagatttgagcctgcaagcccttaaagaaccctaacattccttcttttctccatatggcatacacaacccctggaattgttttccttgttcttcttctcg

SEQ ID NO: 138934 - DNA, 405 bp, Arabidopsis thaliana landsberg
tacctttttggaattcaatactcaaggcgattcagagttcgattaccaggattttggatcgccgacggcatggccgacaccgtctgattctatttccatcgctgacgttgccgatcgtggtgaaggaggagctgccgcggatcatcattctgaggcttcgtcaccttcgtccctctctgccggtgccgggaatggtgcgaaagtgggacgcggtggagttggtggaagtggtggtgttagtagtagtagtcaggttgatgcattggccgctggtgtgggaaatttgaactttgaagagactggtgatgatgatggttttgattatggtaaaaatgatttcacggagcacgcttgtaagtattgtggtatctcgaacccagcttgcgtcgttaggtgtaatgtggc

SEQ ID NO: 138935 - DNA, 323 bp, Arabidopsis thaliana landsberg
aggaattgaagaattgtgtcaaacttgttgatctgaatctcgctaagaacttcttgaccggagaaatccctaacagtttatctcagattgcttctttaaactcgttggatttctcagggaataggctaacaggtgaaatcccggcgagtcttgtgaagttgaagctgagtttcattgacttgtctggaaatcaactttcaggaagaataccaccggatcttttagcggtgggaggatccaccgcgttctcacgtaacgagaagctctgtgttgataaagagaacgctaaaacaaatcagaacttggggttgagtatttgcagt

SEQ ID NO: 138936 - DNA, 652 bp, Arabidopsis thaliana landsberg
cttgttatcctacgcggcggcgctcaaaagtgttggtcccggcgagccagctctgaatattagccttaggtcgtgcgagcgaatccaagtttcaggctattcgagaaccaaattagggaaattcgctaactctctcagagtaaacttagtaccaatcccagaaaagctacacctcaaaatccaagtttgtgttcaccgaaatgctacacttggaatgtgccactgtgagaaatctaattggaaaaatctccagagcagctctgttatatcaccatatgataaacaatacattgatgtgagattcactggtagtgaatatcagtcgtctcgttcaatgattacggtcaatgttacagaagagtttcatcaatggcggattttttgtcttgtagcgggattgattgtgattttgttagcacctgttgttagcagttggctaccgttttactatacgagttctatggcggttggtgtttttctcgttgttttgattattatcttccaggttatgaggttattacctactgggaggaagaatgttatgtatcttgcgttttatggatctgttgttggtgctggatctttcattctacatcaattctcaatgatggtgaatatgattcttgttaattttgggttgagtgaggatatg

SEQ ID NO: 138937 - DNA, 55 bp, Arabidopsis thaliana landsberg
cgatatttgttctcccagatcttcgtttcgtctcttcgttctcaaactcatggcg

SEQ ID NO: 138938 - DNA, 313 bp, Arabidopsis thaliana landsberg; identical to SEQ ID NO: 109513

SEQ ID NO: 138939 - DNA, 97 bp, Arabidopsis thaliana landsberg
atgcatcattctctcgtctataaataccattcacgtcgttcgttactcttcatctaaaaacattcatacacatacaaacacacgaaaatacatccca

SEQ ID NO: 138940 - DNA, 460 bp, Arabidopsis thaliana landsberg; identical to SEQ ID NO: 89336

SEQ ID NO: 138941 - DNA, 369 bp, Arabidopsis thaliana landsberg; identical to SEQ ID NO: 112886

SEQ ID NO: 138942 - DNA, 326 bp, Arabidopsis thaliana landsberg
acttcttagttcttacagtataaatacgttattttctttaataaaagagagatacgttgatgagttcactatggttaagaaataaagagttggttccactaaattccatcaattaaatatgatcgtcactttctttgtccccaagttgcgtatacctataaatacatctctttaccttctcctctgtttcctactcatctttcctttttccacatcaagttagaaaaacaaaagtagaagaaattatctccaaaacacacaagtccagagagaaacaaaaagagattacacacaacaacaacaaaaatgagaccattgagcgtaca

SEQ ID NO: 138943 - DNA, 552 bp, Arabidopsis thaliana landsberg
aaactctgtagagaaaagaaaaaatctcgacttcgcaaattgcgagagacattgagtccaagaccgagttaactcgccagattcaatgtaaagttttacttttgtcgcctaatttgtgttatttaggttattctgttgaaaaccctatatatagattcgtgtattctgttttccacatcttgcatcttcgttgattcgtggtttaacaatttggatgcagaaccatggctggggttatgcagaagttccttattgcatcaatgtttatgtggattcttcctattgcaatattatatggattcaacaatgatttgcttcctggtaaggctaaaatttccaggtttgacttatgtatgaggacatctgagtcattgctctaattgtattgatggttctaactttgagttttgcttaatcgtgtaaactctgtaggtgaagtgttagtggaacttggtttagtagaatagcttggttgttgggatctgagggcagattagagaaattctgatggatgctgtttagaaactgcaaacttgttagattagtacttag

SEQ ID NO: 138944 - DNA, 615 bp, Arabidopsis thaliana landsberg
aaagatcatatccttacactggtaaacgaggccattgcaagtttgatcctgagaaggttgcggtaagagtactgaacttcacgactataccactggatgagaaccaaatcgcagcaaacttagttcggcatggtcccttagcaggtgatatatattagctaatgtatatgtgcaaccacaaaacagatttgaagtccgagtctttagatagttttcttaacacgctttgttgttgtgttccacagtgggattaaacgccgtgttcatgcaaacatatataggaggagtgtcatgtccgcttatatgcagcaagcgaaacgttaaccacggggtacttcttgttgggtacggatcaaaagggttttcgatcttgcggcttagtaataaaccttattggattatcaaaaactcgtgggggaaaaagtggggagagaatggatactacaagctgtgtcgtgggcacgatatatgtgggattaactcaatggtatctgcagtagccacccaagtttcctcgtagatgggtcttgtctttcctctgctctcttgttttctaatctagggtttgatcatgctttacgagcggagtttggggtttgaatattgggttgtatc

SEQ ID NO: 138945 - DNA, 1387 bp, Arabidopsis thaliana landsberg
gagaaaataaagaagacgaagacgaaacctgaaaccaaagccaaattctctcgattaacagaaattcctttggatctatcgtcaatggacctaatacctcagcagctcaaggccgtaactcttacacacgtccggtaccgtcccggagatcagctcggacatttcctcgcctggatctctctcgtcccagtcttcattagcctcggtggattcgtctctcatttccttttccggcgtgagcttcaagggatcttcttcggtataggtctcgtgatctcacaattcatcaacgagtttatcaaaacatctgtagagcaagcgcgtcccgagacatgtacgttgctcgaagcttgcgattcacatggatggccatcaagccactcgcaattcatgttcttcttcgctacgtatttcagtttgatgggatgtaaaggaattggattctggtttggtttaagaagcagatggattatgaatcttcttcattggtctttagctgttgttaccatgtattctagggtttatttaggttaccacacggtggcgcaggtttttgctggtgcggctcttgggggtattgttggtgcgagttggttctgggtggtgaattctgtgttgtatccattttttccggtgattgaggagagtgtattggggagatggctatatgttaaggatacttcgcatattcctgatgtgttgaagtttgaatatgacaatgccagagctgctaggaaggatatggattctgctaaatctgcttaatttggctaatttgatttggtaagtcgaaattttcttcactgtttcattgattttgatctgattaggtcttagaataagcatttttgggaatcagctttagcttttgatacttgtaggtcaagaatgtttgttttgctatatgagtaggtagtcacatttgtgtataatgtaccactgtagcattagaaaatacaggaagaacaatgtttgtgtaaaagcagtttaagtcattcttcttggagtccattagttgttctgctcatccctcatgacattgaatctgttttctcattgcttaatgccgacaacaaatcagttctgtttgagttttttcttgtcttcttctttgttccgcaagcacatctcatttgcttcatccatctgcaggtcgagaactcgggtattagcggtcttgttatcctttttctttgttacattatatcaggaatggcaaggagatgggagattccatttatgctaccgttctatgattagctgctcacctgaacatttcacaaaatgaaacttcttcacacttatgttatgaagtgatctttgtatcttttttccttttctttctttgcatattcacttatctattgaaagaaacagtttcgtaaat

SEQ ID NO: 138946 - DNA, 547 bp, Arabidopsis thaliana landsberg
gtgggtcctaagaaggagagactggacattaaagcagccttgtcaaattcattcgggtttggtggtcataactccagcatcatttttgctccttacaagtgaaagcgaaagcagttgcttgtactccaaacctgattgtataacttgctgtaaggtaaaaagttacatccattgtacatttgtgtatcatcagattcttagaggaattgaaggacagttaactcttttgacctttctatatttattactttggctgagatggatcattggcaataatgaattggaagtttgtgcaagttccctttgaagtattgtcggtccagaaatgctctaaaatgatttgggatggactaagaatttgttatgaagctgagtgtttaaattatgtgcagtgttttacaagaagtttcccatgttatgctagtgttacgtcgagggaatcaacagagtttgttcaactaccaagagctaagctaagtttcttaggatcaagatctgatgagccaaagacttggacaggagctaaaacgtgctagagatatcagag

SEQ ID NO: 138947 - DNA, 76 bp, Arabidopsis thaliana landsberg
ttagagtcttcactcttcaccgaaccctctgattctcgtatagacacacacatacctatacatacacactttaaca

SEQ ID NO: 138948 - DNA, 117 bp, Arabidopsis thaliana landsberg
caccgtcaatctttggagctaccggttcttcaccgtcaatctttggttcgtcttcttcagccggttcaactccgtctctctttgcatcttcctcgtcaggcgcaacaacttcttcac

SEQ ID NO: 138949 - DNA, 1064 bp, Arabidopsis thaliana landsberg
ttatcagctatacatacattttcacaaaaaaattgtccaagactaattattgtggacgtttcctcacaataattatgatgataattttgatgaagaaaataccaattcaatttgaatggattcaaaacaacgttactatatgggtcgagatttaaaattattccgttttcatcgattaaataagagttaattttttgaaaaatatattttaagttatcaagttgaaaatatttaattaaagagatctgattataagttagtaaaggcaaaaacgaataaaaatttgaaattggggtagctgttcctaaggggcccgacgaatttttaattgtaattagagtatttttttttattgattggtttatcacattgtgatgttttacatgattaaatggacccattctaaaacaattagatgatgataaaattaacaaagattgggactccttatttcgatttaagaacatgcgaatagttccgtgattttgtctaagtgattgttgaagaatgccagacttgggcgaaatcgaataaaacggattcatgtgatctgcagagatcaatcccgaatctggcgaattattcctttttcttatatatgaaatatgggatttcactaagccaattcttatgaaatcttgaatcaaaccctttgtacttacttcaacaaagaaagcacggacctcctcgagagaagaatttttgtcccaattcaagactaaacaagttcgaactaattgaatacttgtgtcagaaattcctcgagttggtttgccatttccataaaggatatagttgaaaactcgaagttgaatattatccttttcccgaaagagatcttgtgggaagagtgttgccaaatttatactgtccgctatctcataggtggctacgggccgcaccaaaacaaaaaactttttcttggttggtgtaatccgttggacataaatccaatttttaaattttttggattccttcgagtttgtttttcctcttcctggcggtatcaagatgccactgtgtcgggatattttatctgtcttgtccggaaaatggatatcccc

SEQ ID NO: 138950 - DNA, 230 bp, Arabidopsis thaliana landsberg
gagtaattttaacattatgatttctaggtgatcaaagttatcatcactttcaaacataaatggagtttttacactgttaagccggggtcaaaatggatggcgctccttgaatgaagcaattcctcccaaactgtgtttgcgaaagtatttccaagagcttggaacaaacttataacagatggctcccatactttcacgtcgagagtgagtgacctaacctgtagcaacag

SEQ ID NO: 138951 - DNA, 594 bp, Arabidopsis thaliana landsberg
tggggaagctgacctctgcctttcctcctccattaatcaaggaatataaatcagctttaaactcagtcctcttatggaagacaaaaaagcaaatatttattcgtaaatataacttcagaaccctttcaacaaaactctctctgttctttctccgtggagaagttaaagatgacgatgtcggagaactcaagaaacttggaagctggtttgctactgaggaagaaccaaaacgacatcaacgaatgtcgtatcactgctgttgtacttttcagtactttcgtttctgtttgtggctctttctgcttcggttgtgcggttagtcatcaaatcactcatcttttttttaaaacaatttctctgtttgttttgctctgtgatttgaaagtttggggttggattttacaggcaggttattcatcagttgctcaaacagggatcataaatgatttaggtctctctgttgcacaagtaagaagcaaccctctctcttttcttgaatctttactcaaaaagtgctagttttgcttaaattactctgtttttttgtttttgtttactacttcagtactccatgtttggttcaatcatgacttt

SEQ ID NO: 138952 - DNA, 287 bp, Arabidopsis thaliana landsberg; identical to SEQ ID NO: 102004

SEQ ID NO: 138953 - DNA, 62 bp, Arabidopsis thaliana landsberg
gaaaaaagctttttcgaatctcgcttgctttttgtcgccatgagtctctttgggttaggaag

SEQ ID NO: 138954 - DNA, 825 bp, Arabidopsis thaliana landsberg
atggagggggcgacaaaatgggatcctgtctgcttggatacaatggaggaagtacaccaaatatatagcaacatgaagcgtattgatcagcaagtgaatgctgtgtcattggtttcttcccttgaagcagaactggaggaagcacatgctcgcatagaagatctcgagagcgagaagcgatctcataaaaagaagctcgagcagttcttgaggaaagttagcgaggagagggctgcttggcggagcagggagcatgagaaggtccgagcaattattgacgatatgaaaactgatatgaacagggagaagaaaacccgtcagagattagaaatcgtaaatcataaactagtcaacgagcttgcagattcaaagttagccgtgaagcgttacatgcaggactacgaaaaggaaaggaaagcaagagaattgattgaggaagtttgcgacgaacttgcaaaggaaataggagaagataaagctgagattgaagcattgaagagagaatccatgagcctcagagaagaagtggacgatgaaagaagaatgctacagatggctgaggtctggcgtgaggaacgtgtccagatgaagcttattgatgccaaagtagcactcgaggaaaggtactcacaaatgaacaagcttgtaggagatttggaatctttccttaggtcacgagatatcgtgacagatgtcaaagaggtgagagaagctgagttattaagagaaaccgcagcatcagttaatatccaagaaatcaaggaatttacgtatgtgcctgcaaacccggatgatatctacgcggtgtttgaagaaatgaatctc

SEQ ID NO: 138955 - DNA, 375 bp, Arabidopsis thaliana landsberg; identical to SEQ ID NO: 114627

SEQ ID NO: 138956 - DNA, 3011 bp, Arabidopsis thaliana landsberg
ccaaaagcaactatctctatctccttcatcgggcgacttcgtcttcttcttcgttcgctgtcagatttttttttaccaaattaacaatttttgagtctccgttgcctctctcagttgaagcgtcttccttctctctatcggttagatcttcagctcgattatcttgttttttttttccttagattgtgaccatttcaatgcgttaaggatcacgcttcatgatcatatcactttctattttaaccctaagagtttccttcttcattttgtatatggaactttgatctgacgaaatgcagaaattctcatttcgagatagtttttttttttttaagattcgttgattttggatcctatttcctgtcattgttgattttgttagattagggttaccaatctgggataattcttcgcattaattttctttacgatattttccattttgttgctcaggtttctgattctatgttcctgtaaaattttcctttaatggcaatcgaaatcttcaattttttacgatacgattgattctatactgcagatgatttttccagttttggctcattccttgtcataaatctcgtcaaaattctttaccttgtcgtcttatttttttccattgataatgcttttctctcagaatgatggaggccaaaccaaaaaggaggattgttacagagaatggagatacaggtgaagatttagttcttgcaacattgattggaaacggtgatgatgtaggtcctctcgttaggcatgctttcgaaatggggaggcctgagcctctcgttcatcagctcaaccaatgtgcgaggaagaaggaagctgaaattgaggatctatgcaagactcactatgaagaatttattgttgcagttgatgagcttcgtggtgtgttagttgacgctgaagagcttaagagtgatcttgcaagtgacaatttccgtttgcaagaggttggtagtgccttattggttaaactggaagagcttctcgagtcttatgcagtcaagaagaatgtaaccgaagctattaaaatgtcgaagatctgcgttcaagcactggagttgtgtgttaaatgtaatagttacatatctgaaggacagttttaccatgccctgaaaaccatggatttgattgagaagagttacctgaagcttatcccacttaaagttctaaagttggttatagagagaagaattccagtgatcaagactcacattgagaaaaaagtgtgtagccaatttaatgaatggcttgttcacattaggagttcctctaaaaatattggacagactgctattggcctcaccgcttcagctcgccagagggaagaagaaatgctggaacgtcagaggagagcagaggaacagaatacaggtggtttgggagaattggcatacactttagatgttgaagactcggaacaagactctgtattgaagtttgatctgacacctctgtatcgagcttatcacatccacactattcttggagtcccagaacggttccgtgactattactatgagaataggctactacagctccaatcagatctgcagatcacttatacacagccatttgtggaatcataccaaacatttctagcccaggttgcaggatatttcattgtggaggatcgggtgattaggacagctggagatttcttgttggctgatcaagttgagacaatgtgggaaacagccatttccaaaattgtagccatattggagaaccaatttgccagaatggattcgcctactcatctgcttttggtgaaagattatgtaactctccttggcacaacccttagacagtacggttatgaagtgggtccagttcttgatgcccttgacaagagccgagataaataccacgagcttcttcttgaagagtgtcgaaagcaaattgtgactgctattacagaggacacttatcagcagatggtaatcaagaaggaagctgactatgaaaacaatgtcttgtcgtttaatcttcagacctcagacattatgccggctttcacttacattgcgcccttctcttctatggtgccagatgtttgccgcatcatcaggtcatacataaaaggatctgttgattacttgtcctatggagtgaacactaattttttcagtgttctgaggaagtacctcgacaaaatcttgattgatgtattgaacgaagttatcctcgagacgattagcaacaattcaattggtgtatctcaagctatgcagattgcagcaaacatatctttcctcgaaaaggccagtgattattttctccgacatgcagctcaactttgtggcatcccaagccgatcagttgagaggcctcaagctagtttagctgcaaaggttgtcctcaaaacatcaagagacgcagcctatcttgctttgttgaatgtggttaacaccaagttggacgagttcatgaagctcacagaaaatgttaactggactacagaggaaatgccacaagggccgcacgagtacataaacgaggttgttatatacctcgagactgttatgtcaacggcacaacagatcctcccaatggatgccttatacaaagttggagttggggctatcgaacatatctcaaactccatcgtctctacattcctcagcgatagcatcaagagattcaatgctaatgcagtctcggccattaaccacgatctgagagtgatagaaaactttgctgatgagagatatcactcaagcgggttaaatgagatctacaaagaaggaagctttagaagctatctggttgaagctaggcagttgataaacctgttgtcgagtagccaacccgagaacttcatgaacccggtgattagagagaggaactacaacactttggattacaagaaagtggctacgatctgcgagaagtttaaggattctgcagacgggatattcggaagcctggctaatagaaacacaaagctgacagccaagaagaaatcgatggacatgctcaagaagagactcaaggaatttaac

SEQ ID NO: 138957 - DNA, 769 bp, Arabidopsis thaliana landsberg
agagtttttatcataattttgcatataatagaagtagtaattataaaaatattatatattaattatcaattgggtttttgctaaacggagcctggatacttcattttattagtccgatcacgtaaaccataaaaaaattttgataatctaatatcaatctaaatactccctgcatttaattccactttattttttgcgcttcgcgttacaaatttttgataattcaatcaatctttttgagcgaaacagaggatatctcgatcgagggagaaaatggggaaatcccatatagcccgatatatctgacaagtcgcactatatgtcaacccaagatgtatctccttctccaggacttcgaaaaggtacttttggaacgccaataggcatgaaatgaaaaaaaaagagaatgaagttctctatttcactttgatgtggaaacgtaaaattggggtttcgttttttaatactattatccttttttcctactttattaatcatatttaaattaatgatatttaatacataagttgaataagctaaaataaaatataaaataaaagtaaagtaagagagaatgaataaaactaaaggaaattttttacgaacgggcttctgaatgatcaacaacaatagctatcttggttcatagaaaataggattaacccccattgcatattggtacttatcggatatagaatagatccgcttccctttttttctatgaattgaattgttccattattactaacagaatagaacaaatattaat

SEQ ID NO: 138958 - DNA, 257 bp, Arabidopsis thaliana landsberg
atctgatccacattcattgtatataatcttatggcatttctggtcatttagtctcaagcaaaatggataagagatggagtctacaaggtatgactgctcttgtaaccggtgcagccagtggaatcgggttcgtcttaattctctgttctctatatcatctttttggctcattgttcttcttgtatttctaaattgtcaagacttaaaaggaatttatgtgtagtgtaggtatgccactagtagaggagttagcaagt

SEQ ID NO: 138959 - DNA, 58 bp, Arabidopsis thaliana landsberg
tgtgcaaaaagatactcgcaccttatttatatatagtaaaagaagctgaaacatcata

SEQ ID NO: 138960 - DNA, 115 bp, Arabidopsis thaliana landsberg
tggccggagaagaagactggagaaaaacagcagatacgacgaagatgagctcggagggagtaaaagctgccggcgttgagtcatcaaagaggccgccaggaagtaatccaggtgg

SEQ ID NO: 138961 - DNA, 105 bp, Arabidopsis thaliana landsberg
gaagtaagtcacagagaaagagaagatgtctgagaaaaagggaaggaaagaggaagtgattaccagagagtacaccattaacctccacagacgccttcacaaatg

SEQ ID NO: 138962 - DNA, 199 bp, Arabidopsis thaliana landsberg
ctgggaaaaatcaaaatctgctattacggatctttaatcggaaaatgggtttgacgaatttcatattgacggtggccggagtaggcgccgtggtgatgctactgaggagcgacgtgaagcaatctgtgaccgtcctcaggcgtaacgtcaagcacatccgccactggctcgaagaagaatcctccgccgcctcttccaa

SEQ ID NO: 138963 - DNA, 977 bp, Arabidopsis thaliana landsberg
aaccagttcgtgttcttgttaccggagctgcaggtaatttcagattttaccgatcttgtttcttctatctctcgttatcgattcgtatcgccagatctttatatagcaccaatttttcataatcagaaaatttaatcgatccttgaaccatattttggattcctatactgtgatctgaagagacaaatgtattcgatcaaaatttcgctttagaaaagtagagttttggtttttcttttacttttgagtgaatcatgctataatgtgagatctaattgtttaattttttttttaaatcattgtttcataatagaatcattgttttatttttaaaaggaattttggttaaatatatttaatatattaattaattagattttaaaatgttaacttatgagtggttactctgtattagttgtgtaaaattctataaattttggtttaatattacataattataattacttatcttccttttttataagtttaatattacataattataattatttagctttttatttttataagtttaaatttaatatttgttatttttcttttaacaagaaaatagaaaataattactctttatgttcttttttgtttgattttctaggaaaaaaaattgttttaaaaagattgattttttttaagttttttatacaatatttattaggtttttaataaaaaaataattgaatattatacttttaaaattatagaaaattataaaatacagaaaataatacacttaaaattaactttaatatatttactttaatatttatgttttttctaaacaataaaagaacaaaaagtactattttcaaaaatattaattaaataaatattaattatcgatgtggcaggataataaatcggattggataaccggccaaacatgtttcacatctcatgggtcgaatctccggtcccctccggtttaaaaatgatgggctaataacaaaagtcaaaga

SEQ ID NO: 138964 - DNA, 301 bp, Arabidopsis thaliana landsberg; identical to SEQ ID NO: 127638

SEQ ID NO: 138965 - DNA, 179 bp, Arabidopsis thaliana landsberg
gtgtacgtcttctccgcccttcttattcatttctactctgctgcgttatttctccgtcgtcctcaactcatcgccggcgtttaccatccgctagatccgtcgcctctccggtcgactatttatatggaatcgtaaatttacagacactaataagaatagtttgacaaaatctgtagctg

SEQ ID NO: 138966 - DNA, 366 bp, Arabidopsis thaliana landsberg; identical to SEQ ID NO: 114138

SEQ ID NO: 138967 - DNA, 394 bp, Arabidopsis thaliana landsberg
caatcatcaagtgtgtttgcaagggtgacccaactgctgtcaaaaccatatctggacgattcctcacgactgtttttcctggcgaaactctgataaccgaaatgtggcttgaaggcttgaggtagaactctgtctctctctctaccttgtattgttctttggcgatatattacatagattatccatatcactggtatattcaaaacttgaacttagcttttgatgtattcacagggttatatatcagacgaaagtgaaggaaaggaacaaaactgtgttagctggttatgttgatattcgtgggttatcttcgtcactttagaatgttaggtccttagatatattgggctgtcataatattgcaaaggtaataaacatgtcagaagactcttga

SEQ ID NO: 138968 - DNA, 282 bp, Arabidopsis thaliana landsberg
gatcgaagaacgataattcgaaacacacaaatttgcttgaatcaaagactcttcttcttcgttcgttcgtttcagtgattccaaagattccaaatttgtcggtgtaatcttcgttgtattcagaggtgtatgtatatgtattgaaatcgagaatggatctgttccgagtttggtcagggatggatttcttagcttggagaggaatggcttacacacttcttcttctcaacttcgtctttgcttgccaacttcttcttctccaacctctcgtttccgctctag

SEQ ID NO: 138969 - DNA, 105 bp, Arabidopsis thaliana landsberg
aaaaaaaaaaaaaaaaaaaaaaaaaaaaaaaaaaaaaaaaaagaaaaaaaaaaaaaaaaaaaaaaaaaaaaaaaaaaaaaaaaaaaaaaaaaaaaaaaaaaaaaa

SEQ ID NO: 138970 - DNA, 194 bp, Arabidopsis thaliana landsberg
tcctcgagcttctattcattgtgatttaggcgtatcttttcgttgcaagtctaggcgtattttgtctattcattgtgatttaggcttttcacaatctcgattttaataagaaattttgatgttggtttgagattctcgttgatttctgcacgtggtagcctgtttgatgttcaaatacttggatcaacactgag

SEQ ID NO: 138971 - DNA, 447 bp, Arabidopsis thaliana landsberg
gaaaggcgggaccgatccgccattaatgctaccacccaactacaaggcttttctcacacactctcttctctcaatctcttggctcagaacaaagaagataaaaaaaaaaggtgagtaagaatttgtctttaattatttcttcatgtgttagttgttaggttacttaaatcggcaaaagagatttgatgaacttggtcatatgctttaaagtgtgcatacatttttggggttgttactagttgtcaaatcttttcctttaaaccaatttgatttccttctcatcttttccagcttccattgattaaaagtttctacctttttcttatcttcaagtgtgatatattgtgagaagattgcagaagcgtgtccaacttggttccctctctctctgaaattactcaatcatggggatttgcttgagtgctcaggtcaaagctgagagctcag

SEQ ID NO: 138972 - DNA, 474 bp, Arabidopsis thaliana landsberg; identical to SEQ ID NO: 127806

SEQ ID NO: 138973 - DNA, 218 bp, Arabidopsis thaliana landsberg
gaatcacactaattgtctatcaaacaaatgtagctagtttagtaaaatatgatttggagaagtagaatcactagtggcgccattatgtcatcttaatttgcattgcacactcagatgagctcattgctattattttttggtttggcatatcaagacaaaagcagcatatatccttagaagggtgctacatctgcttcggcgatagaatattttgcttc

SEQ ID NO: 138974 - DNA, 79 bp, Arabidopsis thaliana landsberg
attttacgtagtttttattgacacaattatgaatgatctcgccagttcatcggcaaaagctatggcaaaatcagtttgt

SEQ ID NO: 138975 - DNA, 142 bp, Arabidopsis thaliana landsberg
ataagatgcattcttttctcttgtgattaatattgcttgtgaagttgagtcgttctgttgcatgtactggaaaaaaactaagatccagaataaccctatagaatgtgtgagaaatgaaatatttattcttctgtatcgtttc

SEQ ID NO: 138976 - DNA, 2838 bp, Arabidopsis thaliana landsberg
  unsure (1)..(2838): unsure at all n locations
aataataatgcttcagattcatctccaagtatcaaaaactctcctttctattcaccttctcttgtgtccccaccatcttctgcttttgtttccgctttgcaatctccttatatatccccaagagctacaacaccctccattaccactcacaagccatcaccgcctctttcttacaaaggctcacaatctgatgatgtaccaagcagctcctacactcctccttctgaccagtacgagttttctgatgaacaaccatcagatcggaagctcaagttatcagcatcttgtactccagatcctgctcctccaaggatctctttctctttccctgttcctagggtttctttggctaaagtctctgtttcttcacctgcaactaacaccaagctcaggagctctgatgtcttcatagggtttcatggacaaaacccaaacttggtgagattctgcaaatggttaaagtcagagcttgagcttcagggaatcgcttgtttcgttgctgacagagctaagtattcggacacacagagtcatgagatcgccgacagagttatctgttctgttacttatgggattgtggttgtctcttgttccagcttgctcaactaccttagcttggaggaagttaggttctttgctcaaaagaagaacttgattcctattttctatggaactggtccttctgagattatgggtcttctcaactgcaatgccatagataaagagtgtaaagaagccattgatgggttgattaagtctcatgagtttaaactagaagctaatgagagtaactggagaagctgtgtgggaaagactgcgacgattctcagggcaaagcttgggaggaagagtgtggctgataaagagattgtggaagggattgatgagcttccatttccgaggaacagatcttttcttggaagagaaaaggagatcattgaaatggagatggctttatttggtaatggagagtatcttgagtctacaacaccaagtaccagaggagaagcaagtggacaatctgaaggacttgcagatgaggaatcagatgttgtaccaactcgaaatgggaagtttattagcttggagcttggaagatgctcctattcaagaagtgaggcttggagtgatccaaatggtgggaaaaactctcttaaaagattgttgaagactaagaagtgtagaaacaatagtaactgcaaaagtagcacaagtgttgtttgtgtaaatggagttccagggattgggaagacagagttagctcttgaattcgcttacaggtattctcagaggtataagatggttttgtgggtcggaggggaagctcgatactttagacagaacctgttaaatctgtcattcagcttggggcttgatgttagtgcagatgctgagaaggatagaggtagactaaggagctttgatgaacaagagtttgaagctttcaagagaataaagcgtgagttattcagagacatgccttatctgttgatcattgataatcttgagatagagaaggattggtgggaagggaaagatctaaatgatttgattccgaggaacaccggaggaacacatgttttgatcactactagacttcctaaagtcatgacctttgacactgtgcagctttctatattgccctcgtctgatgcaatggtgttactgagaggaaaaagaaagaaagattacccggtggaggaggtggaggtcctcaagctnttcgatgagaaattgggaaggttgagctatggtctttgggtggttggatcattgctttcagagcttgcaattctgccttctgctctctttgaagctgtaaacaaagttcaaatcgaagaacgttcggcctcgccttttctgaacttaaatgatgagcaatactgcaagtccaatccatttgttgcaaaggttttagctttcagtttggctgttttggagcaagctgagggaaacagaaaccttctctcattgaaaatgctactcgtgggagcttggtttgctcctgtccctataccggttaacttattagctgcagctgctaagaacatgcccacaggtggaaaccggttcagcaaatggaacaagtgtctgagtcacacatttgcttggtgtggtggttgtggtttaggacgcagaagcgaagaggatgctgcttttttactagtcagattaggactagcgaggttaacaaatagacaacctggatgttggattcagttccatccgataactcaaactttcgcgaggagacgagactacatccttgcaccaaaggcaacagttcaaggcgtgaggaaaatcgataacccgttgttgaatcttgatcacctatgggcttcagctttcttagtattcggattcaaatcagaacctcctttggttcaactacaagccatggatatggtactttacatcaagagaacagctcttcctttagcaatcacagctttcacaaccttctcaaggtgcaactccgcgctggagctcctaaaagtatgcaccaacgtgttagaggaagtggagaaatcatttgtgtctcagatacaagattggcgccaaggctcgctctgttggaagaagaagactaacaagaaagtcgatgaatacgtgtggcaggatgttacattgttgaaagctttattgctggagaccagagcaaagctgctgctacgaggcggacatttcgatagtggagaggaactttgcaggacttgtatcagtatcaggacagtgatgcttggccataaccatgatctcactttggctgctcaagaaacactagcaaagttagtcagaatgagaagcaagatatgatgaaaccacacacaaaaacat

SEQ ID NO: 138977 - DNA, 63 bp, Arabidopsis thaliana landsberg
ggattctgcgttgatagcttctagttctacagacaaaaatcatcttacagctggttacataca

SEQ ID NO: 138978 - DNA, 250 bp, Arabidopsis thaliana landsberg
ttgaatgggatggatgcttttcgcctgaagctcttgttccctaagcctcgtgtacctcaaataccttctcaagttcaaacccaacaagagtatgagacctttcctaggcctcgtgtaccttaaggccatgaacgaagatgtgtgtttcttcaatgtattctaaatcctgaacatgctaagactatgttctctttcgtatgaagaaatattatgtgttggtacaattctagtcccatgtttatgaagtatt

SEQ ID NO: 138979 - DNA, 96 bp, Arabidopsis thaliana landsberg
aagaatccaaactaggaccaaactcattataatatttttgtgaagacattacagttttttttaactaaaaccaaaagaaatcgaataccaacacct

SEQ ID NO: 138980 - DNA, 644 bp, Arabidopsis thaliana landsberg
ctggttattctctctccgtagccaaccactatggattctagagctattctcgattccgctttgtttcaactcactcctactcgcactaggtctcacttttgatttgattgattgatcttcatttgttgttgaattttgattttcttttgttgaattctggttttggttttgtggtttttgtgttgaagattcgatctggttctattctgtgggagtaagaaggagaagctagcttcagggatttttgaaccattcgtctctcatcttaagttcgctagagatcagatctctaaaggcggttactccatttctctgactcctccttcttctcactcttcttggttcaccaaatccacttttgatcggtaatttcaattttgataatccggcttcgattttgttgacaatttccaaattcagattcgaattatgctaattcgagttgaaatctggtgtttatgtcaagtttgtgataatgactttgtgatgataaatggtgtgtggaagatttttgttactgtgtagagacaatgttgacttgttattgattaagtttctttaattgtaggtttgtgagatttgtaaacacgcctgcgattatcgaaagatttgcgactctggagaaagagattttgcagattgag

SEQ ID NO: 138981 - DNA, 52 bp, Arabidopsis thaliana landsberg
acattcatctagatgatgcttgtctattttgataatttatatcatcttatgt

SEQ ID NO: 138982 - DNA, 606 bp, Arabidopsis thaliana landsberg
gcaaaaccccaaaatctgggtaaacaacaattcggttatggattctcgagattcgttatcatccgacgccgttagagatgcgtcgtcactctccgacgacgcagctgttctctctgtaacctctacactcgctaaaaccgctctttcctatttccaatctggaaaattcgaagagtgtatcgacgttttgattcagcttgatcagatgaaacataacgatcccaaggttcagttttttggattcaatagttttgattttgcctttctacaagtttttgtttgattcttacatgtttagatcgatactatgaataaagaagttaagtttgacttgatatagatttttactaagtttagatctgacttacccaaagttattgattttgtttctgctcaagtagtttcgaagtagagctagggtttattgagcaaagccttcatttttcagtgattggatttagaactataacaagtcatgcttagatttagagctactttccaatgaatgttgagatatttttatttttctaggtttgaaagcaatggcttatgaattgtgtttgtaattgatcaaagcaggttctacacaatatggcaattgcagag

SEQ ID NO: 138983 - DNA, 75 bp, Arabidopsis thaliana landsberg
gtgttatgggtttatgtccggaaatggtaataataatcaaaatgaaatcaagatggcttctacattggggatgtc

SEQ ID NO: 138984 - DNA, 309 bp, Arabidopsis thaliana landsberg
tcagcagagaatcaaacaatcatccaagtcaagtgtctgtatccagcccattttgcagcaagtcggacgccaatggctaatgctgcagccaacaacggcattggtggtgccctccttaagatctgactctcttcttctgaggaggtcttcgttgaattgtgatacatggctagagccagataccctgtgatagccaccactctcacccatggctcccctactcctgccagaacagctgcagaaggaagagccgaggtcacatcgtctctcttctttatcaaccgcgagtacccatacaaacctaacaag

SEQ ID NO: 138985 - DNA, 201 bp, Arabidopsis thaliana landsberg
ataaaatgcacataacacaagctgcaatacattttaataccacatacttaacaaaacagagaaactagtcctcggtttcttggtatagcttcatgatatccgcacaacccggcatagctgcatcccttagaaatcccatgttgttagcaaaacggtcgtcagaagcaataccgttgaagcgagtgagagtcacacgggcac

SEQ ID NO: 138986 - DNA, 106 bp, Arabidopsis thaliana landsberg
cccacacggctctctctagccaaattacttggccacgaccataaacacaaaacaccgcttagcttctaaaatctgaacatcgagaaaaaatgagttggtggtgggc

SEQ ID NO: 138987 - DNA, 745 bp, Arabidopsis thaliana landsberg
ataaagattacaattctcacaaaacatgaaaactcccatgagttcttctatcacgtttgcactcgtcttctttctcctttctctcaacccaacttcatcattaccgtccaaacgcgaaagctacgttcaaaacgcgtgtagtgttacacgctaccaagacctctgcgctaaaacgctattgccgtttgcatcagtcgccaagaacagtcccagcaaatgggcacgtgccggcgtttccgttgccataaccgacaacaaagacgtccttagacaccttctcaaaacgaggctttcaacgattgggaaacgagaccgaatcgctttgtcggattgtcgcgaacttctccaagactctcttgatagtctccacaagtccttggccgtcctccggacactcagagccagcgagtttcagcagcagatgagtgatcttgctacgtggcttagctcttccctcactgacaaggacacgtgtcttgatgggtttgaaaagacatcgacgaggtcatcatcaacggtcaggatgattcggaagagagtcacgacgtctatgtacttgtccagcaattctctcgcactcctcaacaagctagcggctaatggtttgtaatctcttaaatcataaacttttacaaaagctttaattttccatgaaagtgtaagatcatattattaataaggtggttcatggctgatcactacgataactgtatctctctcattataatggaattatttacaggcg

SEQ ID NO: 138988 - DNA, 191 bp, Arabidopsis thaliana landsberg
gagggaaccttcatggccagagttttgtagagtctagagtagcgagctcttgtgccatcagctgttctagctaaagccagcaaacttagagcttcgggtaattgcacaaacatttgtttcatttcctctaagctcatgtttactagcacagaaggtcttgggacaactctgacaatttcacctcctttggg

SEQ ID NO: 138989 - DNA, 493 bp, Arabidopsis thaliana landsberg
gcatcttcttcaagctgcgccgctttctcactcttttttatctctcaaatttgaccttctccgttgttctttcgcatcgctcaggttcgtttcgatctcgaattacatctcctacggattcaatatttgttcaacctaattgttcccatttctatcgcacgaagattagttcggggaatctaatcgtaatcataatgtttttttagattgcgacgaaattattgtgatatttaggtaacggagctcaggtatagaatctgtgtgtcgacttgattagggcagatgtagaaaaacctgagaagtagtctttttcagattaactagggttagggttctgatttgattctcggttttaagcaggagcagaagcttcaatctttgataatgtcgaggaacaagggtttggctgagcaagatcttaaaaaattggatgtaactgtgctacatcctctgtctcctgaggtcatttctcgccaggccactattaatatag

SEQ ID NO: 138990 - DNA, 224 bp, Arabidopsis thaliana landsberg
gactatgttgctacaagatggtaccgtgcgccagaactttgtggctctttcttctccaaagtaaaatgcaattctctattttcttttttgcaaaagttgtctgattcacatattatgacaccacaacctgaggttaaaacggattattgctttctttgctgcagtatactcctgccattgatatatggagcataggatgcatatttgcagaaatgctcactggg

SEQ ID NO: 138991 - DNA, 277 bp, Arabidopsis thaliana landsberg
tatcacttttgttgattagaataatcaagctgtaactgcgtcgttttctactgatggagcatttccattagcattgttcttcatcatattaccacatcctccaccgcaattaccgcagccagtggaaccgccagtgcaggatccgccgccgcagccttctatctttgtcatcccaccgcacctaccaccaccaccacatccacctccacctccacatccaccacaacctccacaaccaccacagtgaccaccttcttcttcaatcatgttcccactt

SEQ ID NO: 138992 - DNA, 777 bp, Arabidopsis thaliana landsberg
  unsure (1)..(777): unsure at all n locations
tgaccgttctcattcagccactctttttctctcagaaatctaagaaacggtccgggatcgtcactgaagccataaggatttgttgtgctttgttgaacgttgccgagcttctctcctctagattcatggtcttccatgtagagctgagggtgaaacgttgagttttgagaagaatcgtttggtgtcccgtacctagctaagagactgaacttggaagagccatgagccataaagtttctcaaattgtttgttccctgagcttgataggaataggctggtccaagattcctactttctctgtaccgacgnnnnnnnnnnnnnnnnnnnnnnnnnnnnaagggtgggtttgtgtatggcttcatgataccggggagttccatatatcgtgtctgatcatagaagctctctgctttgttagtactagcgtcattatgaaaccaagaagcgtcttcaggcagtagtggagcagacggagtaggaggcgaataggaagacgcaggatgctcggtgctgctattgatggagagactatcaaaggctgagacaggacctgtttcatcaatagggcccaatccgtttggtttacttaaaccgagtcgtcctttctctttgttcttgtcaaccacccacgcgctcagcgatggaggtcttcctgagacagtgccttcttcgagatgcaaatgttgtggatccgtgtccttaagaccttgcgtaaagctgaaactttcagacccaatgagtgataaggtacgtcttaggctgtcattggatgtagtt

SEQ ID NO: 138993 - DNA, 178 bp, Arabidopsis thaliana landsberg
aaaggttataattttattggattttgaaggagatgacttcaaacaaacaaaaatgaatcccagtaggtcgtggcattacaaggcatctctactcaatgcaaacaatgtctaatagtcttatctaaagcctgcaactgcaagattctctatatgttgtataaatatatatatcatgaca

SEQ ID NO: 138994 - DNA, 275 bp, Arabidopsis thaliana landsberg
agctcccaacggagctccttggaccgaccaagtggttatggagtttctgcaacatgtagagaatcgtgaaaccattaacggggagagatctttcgaggatgtccatgatcagattcaagtctaattctgtttgtccattcttcacttggagtggtatgtttcacttgtacactgttgttgcgcacaagaataataaacatgtaaagaatcatagtatataagacttcttgcatttcctcctaatatagatgatactatcttcaagttccttagtt

SEQ ID NO: 138995 - DNA, 413 bp, Arabidopsis thaliana landsberg
caggggataaatatgcgagacattgttccttgtatggtgacattatgctgtggtcactggaaaatcctccaccatcaaatattattgtcatcgcaaaaataatcgatgacgacttggctgatcgtattggatgtttgactaccgtctggtcatatgggcttctcatatcccaagttaagccagaatggctagaacggctttttcctgttggaagctatccctcgtttttggcagccatatttgatggaggattgccgaaatcatcgaaagcgaacaaggatcgctttcctctcgatgagtccgacgactaacttttgtgtctatgttattgttttgtgcctatagttgatatcaagtttggattgaaatgtttttagtattgtctatctataatatttatgtgattttggaca

SEQ ID NO: 138996 - DNA, 128 bp, Arabidopsis thaliana landsberg
gttatgtttagtgtttcttacctttagctgtattggctacgcgatgcccttcatcctctgtacaacaatatgttgctgcttgccttgcataatctcaattctcggatatagagaagatttaacgcaac

SEQ ID NO: 138997 - DNA, 406 bp, Arabidopsis thaliana landsberg
tagtaaaaactggcgaagaccacaatcatataatcagtgtagtcatctatctaagttggggctcatagctttccggttttggaatttaagacagttcattgttttgcatctttatctaacaaatcttaatcttcaaccaaaccgcataaacctacttcgacttgaatttctcgccgagtttaccgactctgtccttaaactcttccacagtctccttagccttcactatagagatatttctgatctcatcagccctcaagctcgtttgtctccacacttcctctgctttagacttagttttgattttgaggtctttggctttgttctccatgccatgaacttgttgttttaaggctgatatcagaaggcttatcttctctatgatcaagtaaattacttctctgga

SEQ ID NO: 138998 - DNA, 344 bp, Arabidopsis thaliana landsberg
  unsure (1)..(344): unsure at all n locations
cagaaatgcgtacaacatggtcctgcacaagtttggtgagaagctatatactgggtttattgctactatgacttctcatctcaaagaaaaatccaagcttatcgaggcagctcagggagggtcgtttctagaagagcttaataagaaatggaatgagcacaacaaaaaaatagagatgattcgagacattctcatgtatatggataggacttatattgagagcaccaaaaagactcatgttcatccgatggggcttaacttgtggagggataatgttgtgcatttcactaagatacagtctaggcttctcnacacacttcttgatctagtgcagaaggaacgga

SEQ ID NO: 138999 - DNA, 91 bp, Arabidopsis thaliana landsberg
ctctctctcactttcgaatatatcttaagataacagagacacatactcttaagtttggtgaagaataagaagacaatgacgaaggaagtgg

SEQ ID NO: 139000 - DNA, 1175 bp, Arabidopsis thaliana landsberg
gaccacatttcttctctctgtctctctctttctcttgcacgaagaaagagagagagataacaaaacccccaaaaaaaaaacaacaaaacaaaaaaacaaaaagaagaagaagaagaagacaaccttgtctgtttttttttcgaaaggcaaaatgtttgatgggctgttcaaacccaagttttatacgaaatggtaagtctctgcttattttccgttttcctggtttcattcgttgattgtttttaattatatttctcagcaagtcgttggtcaagataacgaagacaagagtagacacggtgaagaggaagaaaaactcggtttgcaaatatctcaagaacgacattgtcgatcttctcaagaacagcctcgattacaatgcatatggcagggtaatatcattttcttttacccccatttattacatgcatatggcagcctctattgcgtcttttttgtttgtttggagttatagacacgttattcatgtcctctatcgacttaatgaatcacgggatcttattggttttccgaacgtgaaagcaattacatttccatcagaatgattattttttcttttgtttttcttttctgaaagagggtcaacgtacgatggtttcggtaaatctttgttaattggttctattttgggtatagatggaagcaatgcaaaaaaaaagaaatagatatatttcattctgatgctgtcaccagctggttataacagagtgaattgttgcttaagaaattcttggcccctgttttaagttataagtcacatgagtaagtacatagagagatggttctgatggcatgtgtttgtgtgacaggcagaagggcttatagaggagaaaaggaggctggcttgttatgagtttttggagcaattctgcaactgtgttgcatccaatgtctctctattacagaaatccatgtaaaaactaaccctaaacttgtttaatttacttgcatggattccattcatctaaataaatattgggttttgcttgagcagccggtgccctgatgagtgccgcgaggccatctcctcccttgtatatgcagccgctagagtctctgaagtccctgagctacgcgacctcagatctttatttgctgagagatacggaaacacacttgatcagtttgtgaaccctgaggtatttattctttgt

SEQ ID NO: 139001 - DNA, 55 bp, Arabidopsis thaliana landsberg
gataaaagccattttgatttgtcgttttaatgccttccatttttaaaaagaaaga

SEQ ID NO: 139002 - DNA, 64 bp, Arabidopsis thaliana landsberg
gcacactgttgaatttgatgttctgattcgtttaccgcattttgcttctggcgcgtgctatctt

SEQ ID NO: 139003 - DNA, 703 bp, Arabidopsis thaliana landsberg
gggttcttcttcgagacgaactctttttctttctcgtgacgaatgtttctgtctagaagcttttaaggattaagactctccaaaattttgacgccgtgttattctcttcccgtctctcatggatccttcaagacgaccaccgaaggactctccttacgcgaatctattcgatctcgaggtctgttaggtctcaatttttttgtgatttccttgaaattgatggtttgtacttgttggatgatgatcatgtgactgtgatgaatgtagttttggtgattggaaatcttgcaattgtatagcttctccttgtttctacagtgtgtttttgttttactgttgaaattcagtgtgggttttgtggctaaattcttcactcttgcagccgttgatgaagtttagaattccgaaacctgaagatgaagttgattattatgggagtagtagccaggatgaaagtagaagcactcaaggtacagtttttaattggttttatggaattacttttgccacctactgtgatagttttaagtgacgtttatctgtgttctgtctatatggttggtaatggttaaaggtggggtagtggcaaactacagcaatgggtctaaatcgagaatgaatgcgagctccaagaagagaaagcggtggacagaagctgaggatgcagaggacgatgatgatctctacaatcaacatgttactg

SEQ ID NO: 139004 - DNA, 136 bp, Arabidopsis thaliana landsberg
acctggattaacaaggttttttatctgatttgttttacattttgagcttgttgttgcttgtaaaaaccaatggggatttttttgtatgcttgataagcttaaattacaatcccatgttgattaataaagacacagc

SEQ ID NO: 139005 - DNA, 630 bp, Arabidopsis thaliana landsberg
cctcacttgtctcactccgatccgatcatggctttcgctgtctcggttcagtcacatttcgcaatcagagcgttaaaacgagaccacttcaagaacccttctcctcgtactttctgctcgtgttttaaatcgaggcctgactcgtcttaccttagtttaaaggaacgtacttgcttcgtttccaaaccgggtttagtcactactagatacagacatatattccaggtgaaaagcaattttctctgattttgatttcttctaaaaaaaattcaaaagttttgatttttccggttttggttcatggttaggtcggagctgagacgggaggagagttcgccgacagtggagaagtagctgattcgcttgcttctgatgcaccagagtcattttcttggtcttctgtgatactcccgtgcgtattgatccttctcgttaatttgaatttaactgttcctgagtaatggatttggattgcctgtgtaatgatcttgcctaatgacttaatctcttagcaatgccttatgtatcatcaattatagaagatagaaaattagttatttgcctagattgcactgatttaatagtaatttacttgaatcgtaggtttatcttcccggctttgggaggatt

SEQ ID NO: 139006 - DNA, 186 bp, Arabidopsis thaliana landsberg
  unsure (1)..(186): unsure at all n locations
cccaaattctcttctctctatctctctcgctnnnnnnnnnnnnnnnnnnnnnnnnaatccacgaggaaatctcagtaaatactatggcgaccaacgaacccgagcacgagcacagagacgaggaagaggccggagctaacgaggatgaggacaccggagctcaggtcgctccgatcgttaggcttg

SEQ ID NO: 139007 - DNA, 678 bp, Arabidopsis thaliana landsberg
taaaggtatctaatcttatgcttttgttgtttcttcgtcttgctcttcttcttatcttccgaccgaatctccacactctctgttcgttccgattctctgagaccgtctcttcgtgttcctactctctccgttttatcatcatccatggattcgtttcaccgtggtagattccctccgttgagtgttgaagacagagttcaattccctgaccatttattgctgattctttcgcacggaattgggaaaggtgaaaaaaacctagtttgtgtttatcgtggagtaaaggaagagactttggtgttgccctcgatttctagtgatgaattcgatgagtttaggtcgattgttcgatgtcctaatgctcctttgaactattcttcatctgttgatttgcaattccgtggagatttggtgaagaagaagatgaagaaacagagccgtcgtgttcataattgggaaaaggttggttatgaggcggtgattgacggcgacacggtggttgtgtttgttaaaggattgactcgaagacctcacaaggaatcagatccttcttactataagtgtcaatttgagattgagaattcggaggagaaagaggtgactcaagctattgctgctgcgcaagaagttgtgaggtgtggtttgcctgagagtttgaagctaaatccagagatgatg

SEQ ID NO: 139008 - DNA, 102 bp, Arabidopsis thaliana landsberg
aataaacagagctaaaatgtttcctctaatctccttttctccaacttctcttgatttcaccttcttcgccattatcatctcaggtttcgttttcatcatcac

SEQ ID NO: 139009 - DNA, 95 bp, Arabidopsis thaliana landsberg
tgatgtcaccacattttctggtttcttttaatttccccactataaatttgcttctttgcgcgaacctcacacgtaagaaacaatcaaaggctctt

SEQ ID NO: 139010 - DNA, 150 bp, Arabidopsis thaliana landsberg; identical to SEQ ID NO: 114294

SEQ ID NO: 139011 - DNA, 74 bp, Arabidopsis thaliana landsberg
tcttctccgatacctctctatctatatctcttcgacgctgcaaattagccttaagcttctttctcctttaaact

SEQ ID NO: 139012 - DNA, 143 bp, Arabidopsis thaliana landsberg
cataatctctgccaattgaaccgatgcagcaaaatcttggagtcctcagtaaccattgccagtaaatccttctccgggttccactcagctatcttaatctaatgaaattgaacatatataaacatctaaatccttaaaagcat

SEQ ID NO: 139013 - DNA, 313 bp, Arabidopsis thaliana landsberg
acacaatatacgaattactcacctaccccatgactctcaagcaaatagaaatttctaaaccaaaccgttgatacataatttcactcagatgctggcttactttacctctactccattagagaagatatagaaactttcagaatcataagcaattagagaggcaggaagctttgcggaaaaccggtttataaaccaagatcatctaattcgagtcactatgtaccgacctttctcaaggtcgtaaatcgttttcagctgcggttttctccacttagttaccaaatataccaaaactgtcataaggatcggtatc

SEQ ID NO: 139014 - DNA, 158 bp, Arabidopsis thaliana landsberg
attcacacacttggatacgtccggatattagaggggaaggaccaagggttagagaggctcatagtgcagcgcttgttgacaaacgtcttttcatatttggcggctgtgggaaatcttctgattcggatgatgaagtattctataatgacctttacata

SEQ ID NO: 139015 - DNA, 111 bp, Arabidopsis thaliana landsberg
attcagacatttgtttgcattatgtgcttaataagtttatcgttgactctacttgaagagagactttgtatgtgatgtaaatttcttctatctatggaacattgcattcgt

SEQ ID NO: 139016 - DNA, 67 bp, Arabidopsis thaliana landsberg
cacaaacacagagagattcatcatcgaatcataaagctctgttttcaagaagaaaatatgcatctga

SEQ ID NO: 139017 - DNA, 377 bp, Arabidopsis thaliana landsberg
ccataagatagtgtgtttgtagattgtaaatataaaataatgtgattaataaatgataagaaaataacaaaactcttctatcattcattccaaatttccaaaatataaatgtattattgcgtctattatacagagatggggtcatcctaaaaaacaaaagggatacatcatacatctatccaaatgttcaactaaagtccgtgataacttaaaagctctatatggattattatttcttttccgtttgtgatcatttacaccagagattaaactgatcacaaaatcactaccaccaaattgggattttgaggttaattattacataactacaccaataaacccaactaaaactaatacggtttgattattattataaa

SEQ ID NO: 139018 - DNA, 68 bp, Arabidopsis thaliana landsberg
ctttagttttcggaaacccttccccaaatcccccggccggttgctcctttttgattgcatgttttagt

SEQ ID NO: 139019 - DNA, 159 bp, Arabidopsis thaliana landsberg
cacaaattctcatttcttcaagaatttttgataaataagacagagaacttgagagatgaaaagaaaaaaacacaaaacctggtgttttttctctcgtcgtcgtttggtcgtgtcctaagacaagaaccggcgaacgaagaacaaactttttgaatctaa

SEQ ID NO: 139020 - DNA, 788 bp, Arabidopsis thaliana landsberg
attttctcaaaccaaccaaaaagcttcttctccttttctaaaatttcatcaaaccctatagggttttctcaatacaattgattttttttttcttcttcttctctatggatacgaccctttctcccgccgtggaggcggaacaaatcgccgactcaacgatcgacactgtttctcgtttgatcgccggcgttttctccggcgcacttactggaatcttcgctatgggtattaatatgttttgccgttttgatcatcttttgtttgtgcatttgagtagaggaaagttttcccttttgtgagaattgtgacgattttgttccctctaagttgttcgtttctatccttttggtcaactcttgatctcttgcaacaaatatttcttgtgggcctgcaaattttgtgaaaaaggttacatttttctgtcttgagagatttggttgaacatcgttcagatcattagtcagattatcatacgtgttcaacatcttacagctaatgattttgaacttaattctcactttttagaccaatcctgggtttaagattaggaaagtgtgatgttgttgtctctaggttatttgaataaatcatcgtctctgcatgatccctataaaccattttgttttttaatgttattgtagctggagcttttactggagctgtaactggtgcggtggcaggaagagctgcacagtatggagttctccgtggggctgcacttggcgctgttgctggagctatcctctctgttgaagtgttggaggcttctcgtgcgtattggtatttag

SEQ ID NO: 139021 - DNA, 151 bp, Arabidopsis thaliana landsberg
ttcacctctctctctctttcttctccactgtaacctcccaattcaaaaacaattataaaccaaacttgattaatatatatttctttatcatcatctcttcgaaatgcaagatattcatgatttctccatgaacggagttggtggtggggga

SEQ ID NO: 139022 - DNA, 224 bp, Arabidopsis thaliana landsberg
tttcgttgaagagtatgacttgcgtgattgtgtagaggtgtttcatggttcgagttggcgtcaaggggtggtgaagggagttcacattgagaaacagtacacggttactttagaggctaccaaggataagttggtcgtgaaacactcggatcttaggccttttaaggtgtgggaagatggggtttggcataacggaccacagcagaaacccgtaaaggaaagtc

SEQ ID NO: 139023 - DNA, 82 bp, Arabidopsis thaliana landsberg
aaaaaaaaaaaaaaaaaaaaaaaaaaaaaaaaaaaaaaaaaaaaaaaaaaaaaaaaaaaaaaaaaaaaaaaaaaaaaaaaaa

SEQ ID NO: 139024 - DNA, 401 bp, Arabidopsis thaliana landsberg; identical to SEQ ID NO: 113927

SEQ ID NO: 139025 - DNA, 1383 bp, Arabidopsis thaliana landsberg
ccttcctcgccaatcttcatcttcctcatgttttctctaattctccatggaagaaagtctgtggaattacagaaatggcgtaatttaagagttacagtgagcattgtgcaaaatgcatttccttttaccaccaaatcgttctcttctacaatagctaaagattcgagtccaaagggaagtactttcacagtctcttatctcgttgaatcattgggtttgactaaaaaacttgcagaaacaatctcaaagaaagtcaccttcgaagacaaggtaaatccagattctgttctgaatcttcttagaagtaatgggtttaaagattctcagatatctaggatcataagggcttacccacgattgcttgtaacagatgctgagaaatctcttcgtccaaagcttcagtttttaaagtctagaggagcttcaagctctgaggtcatagagattgtttcgaatgttccaacaatcttggataagaaaggtgaagaaactgttagtttatactatgatttcgttaaggacattatgcaagatggtaaaagtttgtgtatttcttgtccagagggaaagaaaggtaacagaattcgaaatatatcggttttgagagaattgggagtacctcagaagttgttgttttcattgcttatatctagatatcaacctgtttgtggtaaagagaagtttgaagaaagtttaaagaaagttgttgatatgggttttgatccggctaaatccaagtttgtggaagctttgcatgtagtttacgaaatgagcgagaaaacgatagaagagaaagtgaatgtgtataacaggctaggctttagtgaagccgagatatgggcgattttcaagaagtggccttactttttaaaattctctgagaagaagataatcctgatgtttgaaacactgaacaagtgtggtttggcagaggaagagatcatttcggcgttgaagagtcgtccacaatgcatacgatcttctgagcagaagatattagactctattgaaatgttcttaggcttaggattcagcagagatgtgtttatgatgatggttaagcggccccctccgtgtattggatattctacagaggcggtgaagaagaagactgagtttttggtcaaggagatgaattggccagtaaaggctgtggtcatgatccctcaggtacttggatacagcctagagaagaggactgtcccaaggtgtcatgttatcaaagttctcatgtcaaaaggattgcttgaaagtgaactccctccaatgtcttctgttttgacaagtactagtgagtcgtttttaaatttgtctgttagcaaacatgatgacaagcagcttgtggctgagctgatggcaatcttcaccggaaatcgtgtttca

SEQ ID NO: 139026 - DNA, 277 bp, Arabidopsis thaliana landsberg
ctccttatgaaactgctgcataccatctaagtagccaaatcttaccttaaattagtttctccaatgcaggagctgcatatagaaaaaattcaatctgtcattagtaataatacgattcctaaatcagaaaacgaagatacgagctacttcaacaacacagaacattatcatcatcaacataagagctaaaatacagatcctggatccctaaaaaccaaattaagataacaaaccctatctatctatatggataagttgagaaatgttgttaaactga

SEQ ID NO: 139027 - DNA, 491 bp, Arabidopsis thaliana landsberg
tacaacaaaatcaatcattcatattgctcatgagctgtcgcagctgattacagccgcaaacacagcgttttaggtcttacatcaacaaattacaaccaccaagatcaaaccctattctagtatactgtaaattacatattagtcacaattactagtagagtagagatcaaaaccctccgattcaacaagagacttcatcttccattaaaccgtcttgatcacaaagaggtttgtcttctttcagcacatctcatctccttcccagttatctttctcctttggccctgtgggaccttcttctccataaagagcaatgggaaacaaatcaacaatgttctcaatagagaacctaacaaccaaaggaagaagattcatgatcttattgatctcagaccctgaatcatatgcaatggtcggaccccattctctcatatactgaaaccagcacggctctatcacagctcctttacctaaatactcagctgctacta

SEQ ID NO: 139028 - DNA, 375 bp, Arabidopsis thaliana landsberg
aagacaaaactccattgtattgataacgttgtataaagcttttggaacaacataacaattctaggtttcccaagaattaagtcaaccagatctactcatatatatgaaacctttaatgtaaaaactatatacacctgagaagtgtgaccttgagtgtctatatcgcaactctacttccactatgagcatgtgactaaacagtctgttgttacaaacatatcctctgtctccaatgtccctctcaccgcttgataaaacttaacccatgaagatgaataagagtccacaggactgaaaaagaacgtaggattaggactgcttgcaggggaagcagtcaccaaatccaaaaccgaagctgcaggtttgagctgttga

SEQ ID NO: 139029 - DNA, 95 bp, Arabidopsis thaliana landsberg
tctttgaaggcgacgaacaccacggcggttgctgatacttccgaggcggcgtctaacggcggcgcggaggaagtctacgaatgggctaaatcaac

SEQ ID NO: 139030 - DNA, 263 bp, Arabidopsis thaliana landsberg; identical to SEQ ID NO: 104889

SEQ ID NO: 139031 - DNA, 369 bp, Arabidopsis thaliana landsberg
ctctccgtctcttcctttctatcctgcacaccatccctctagtggtagtcgagacaagaagagaagtggatgaggtcaaggaattaatcgttatcgttaaagaatatgtccttggtcttcaaatggagctcaagaggagagagatgaaagatgatccggtgaggcagcaagagctcgctgcttacttcactcactgcaacctccaaacacctcacttacggcttgcgctgcttagtgcaatgggtgtctgctacaaggcaaagaacctcgccactgcttctaatttcgccagaagactgttggaaacaagcccagttgatagccaagccaagatggctagacaagttgtgcaagccgctgaacgtaaca

SEQ ID NO: 139032 - DNA, 97 bp, Arabidopsis thaliana landsberg
tctttccacaacattcatacgcaactcccttaaatcttgaaacgaccaatttcttcaaaacaatagtttgtttgcgatggcgacagaacaagaagct

SEQ ID NO: 139033 - DNA, 127 bp, Arabidopsis thaliana landsberg
aaaagaacatccttcccataaattagaatatataatattgtattacttagcttattaatagttttttttttttacatatcagttaatatgtttttgtcatataaattgctatatgaaataacatgga

SEQ ID NO: 139034 - DNA, 59 bp, Arabidopsis thaliana landsberg
tcaccacaacctctctcattgtcggccgctgatctgagtatggattcaaacactgccta

SEQ ID NO: 139035 - DNA, 228 bp, Arabidopsis thaliana landsberg; identical to SEQ ID NO: 89791

SEQ ID NO: 139036 - DNA, 362 bp, Arabidopsis thaliana landsberg; identical to SEQ ID NO: 113592

SEQ ID NO: 139037 - DNA, 1428 bp, Arabidopsis thaliana landsberg
ggttcaacgaagcaacaaaaagaagtatttcgtcgtctttactcccatcaatatgtgactataaataaaaccatatagttaagtcacacttccatgtcaacgtgcttcaacctatgtaaagctaaaaaaaaaacacatcacacaaaagattctctacactatggatactaagaaatggttagtgatcctattgactaacgtcgtcgtcttcttgcttctctccacgactgtccattcttgcttaccgtccgaccgagcggcgcttctagagttccgagcaaagctcaacgagccctacattggagttttcaacacatggaaaggtctagactgttgcaaaggctggtatggtgtgagctgcgatcccaacacccgtcgagtcgccggcattacactccgaggtgaatccgaagacccgcttttccaaaaggcgaaacggagcggactaatgaccggctccatttcgccctctatatgtaagctcactcgtctctccggtatcatcatcgctgattggaagggaatctccggcgaaatccctaaatgtatcactcgtcttccttttctccgtacactcgacttaatcggaaaccaaatctccggtgggattccatacgacatcggaagattaaaccggttagctgttttaaacgtagccgataaccgaatctccggttcaattccaaaatcattaaccaatctctctagcttaatgcatttagatctccgtaacaacttaatctccggtgtaatcccgtcggacgtcggaagattaaaaatgctcagccgtgcgttattatccggtaaccgaataaccggtcggatcccagaatcattaaccaatatctaccggttagctgacgtggatctctccggtaaccaactctacggtacaatcccaccgtctctaggacgtatgtcggtactagccacacttaacctcgacggaaacaaaatctccggcgagatacctcaaactctgatgacgtcgtcggtgatgaatctgaatttgagccggaacttgctacaagggaagatacctgaagggtttggaccaaggtcttacttcacagttcttgatttgtcgtataataatctgaaaggaccaataccgagatcgatctcaggtgcgtcgtttattggtcatttggatcttagccataaccatctctgtgggaggattccggtaggttcaccgtttgatcatcttgaagcggcgtcgtttatgtttaacgactgtctttgtggtaaacctttaagagcttgcttgaaaaattgatttttatatgtaatttgagttttttcattagagacattattatatttatggttatgcattttataaaaaaaagatttaaaattgtatgctacgtttagttgaattatgggatgattaacaaaatatataaacttccagtttcattcgtc

SEQ ID NO: 139038 - DNA, 264 bp, Arabidopsis thaliana landsberg
ttcctcacacgatcaaaaagatagttcaaatttttctttaaagcttaagaaaccactcagtggaaaccaagactaattaaggctaatggtttctcgacaagaaggaaccctctactctagaaagagggatttcacagtctgtggagaagagtttcacaattcattcaagaagagcaaacaagaagatcaatcacagagcactctgttcaatgaacgaccaaaatcggagagtatgagatcaattacctttgattttgaacttca

SEQ ID NO: 139039 - DNA, 201 bp, Arabidopsis thaliana landsberg
ttacagagagaaaggtaggcttttgtgtccatcactcattttcgctcgtttggttaagcttcatctgccatgtggttcactgttttgatacttttgggctcttatacctaatgttgatgtaacacaacgatacataatctaatttgttttcgagtggaaaatagttgaacccagttgagtatttagccaatacgattagag

SEQ ID NO: 139040 - DNA, 56 bp, Arabidopsis thaliana landsberg
gcaaggtgcttacctagctaaatgctttgaccgtatggaagagtgtgagaagagtc

SEQ ID NO: 139041 - DNA, 57 bp, Arabidopsis thaliana landsberg
ctcacctcaagtgatccaatcttgatagagcaagaatgttttttctgagtaggcact

SEQ ID NO: 139042 - DNA, 282 bp, Arabidopsis thaliana landsberg
caagattttttaaccaaaaaaatggcgaattgtatcagaagaaatgctcttttcttcttgactcttctctttttattgtcagtctccaacctcgttcaggtaaaccactcaaaacagattcagtttattaaagtctgatattgaagttttatatattacaggctgctcgtggaggtaaaaatgaccaaaggctatacattccttaaaaatttaatggctattagttttctgatattgaagttttatatatatatatgacaggctgctcgtggtggtggcaaa

SEQ ID NO: 139043 - DNA, 277 bp, Arabidopsis thaliana landsberg
gttacaatttatttcttagctttttaagttttatagcttatcctgtgaaagttttatagtaagttgctgaaattggtaattagttgagaggcaataacattgttggttaggcgtactgactaatttctagttttgccagaaatgaatgtcttctggtttctggtattcatcatgtgaattctgtaatcaattcgagtctctggacattttgttaaacaaaatcaaaacaagacattaattttgacctttggagacattaatctttgggtttgttttc

SEQ ID NO: 139044 - DNA, 82 bp, Arabidopsis thaliana landsberg
gcttgtagcttttgtactttcttttgtaaaagtaaggatgatcagttgataaaaaaatcttatactagaaagttatttggtt

SEQ ID NO: 139045 - DNA, 220 bp, Arabidopsis thaliana landsberg
tgataaatctatgggcctacacttttgggcccaaatttatataactcttctcgcgttaatcagaaactgatgctacttctcaaggttcttacaaaatgtgtaacaactaacaagtaagaactaaagaacacaaatctcaaatttgcttttccagtttctcaggtctagaaggaagagattcctgccagcagtctaaacttctcataggagacccaaaaca

SEQ ID NO: 139046 - DNA, 329 bp, Arabidopsis thaliana landsberg
aaatcgccagaagtgacgaaattgaaaatctcagatttctcttaatcggcgacggagtaacgaaacaaggagaagaagaagaagaagaaaaatgacgactcgaatcgctcctggtgttggagctaatcttctcggccaacactccgctgagaggaaccaagacgccactgtttacgtcggtggtctcgatgctcaggttttttaacttttaggtttcgtgaaatgattctgaattttctcatcttcctctgtgagttggtgaaattgatttaaatttcctgtttgaatctcagctttctgaagaattgctttgggaattgttcgttcaa

SEQ ID NO: 139047 - DNA, 155 bp, Arabidopsis thaliana landsberg
acaactctaaccacactctctcggcttcaactcttgcacttattcgcgactcatcatgatcttctcctttacacgacgtcgttctctcctcctcctcctcctccttcgttaaactcccatctctctctaccacaaaccggtgatcatcataatct

SEQ ID NO: 139048 - DNA, 741 bp, Arabidopsis thaliana landsberg
ggacaaccttatccttaaaatctcaccggtactccaactcccgttcaccggagctctgactctctgtaagcgaagattctctgctctttagctaatttagtcgaatctctattatgggtctgatccagtttcttacgagaatctgatttctgattttataacttgatttctcgatttcaaatttgtgttcttgcaatcgatttttttgcaggtaaagaagaagggagaaatagataatgagcagtagaaacggcaatgagagattaagaacagtgtggacacctgaaatggatcagtatttcatcgagcttatggtggaacaagttagaaaaggcaacagatttgaagatcatttgtttagtaaacgagcttggaagttcatgtcttgttccttcactgccaagttcaagtttctttatggcaaagatgttttgaaaaacaggcataagacattgaggaacttgtttaaatctgtgaataatcttttgatagaagatggttttagttgggatgatactagacagatggttgttgctgataactgcgtttgggatgagtatcttaaggtgcgttttgcgttttgtttacttgtgattttgtgtcttcttctcagggattgatttgtttttgcttttgggttattgaagattcatcctgattcgagatcttttcggataaagtctataccttgttacaaagatctgtgcttggtttactcagatggaatgtctgagcacaaag

SEQ ID NO: 139049 - DNA, 344 bp, Arabidopsis thaliana landsberg
ctgtaaggtattttgattccgcatctcctaggaatcccagcagcacggtcagcgttgagaccagggccgacgtttctagcggcatttttaatgcaacgacatgcttgccgacggtctagggttgtaaggaccatgccgttaagctttctaacaccattgcagcactgtgggcctgggctagtgataccaccattggtcaagtagccagtgcacggtttcaaattgctgttaacttcgccacagctcagagccgcctttgctgtgattggaccggccgcaatcacgaagacaaagaccaagcatcctaacttcataagaccagccatatatatcctttagttcca

SEQ ID NO: 139050 - DNA, 72 bp, Arabidopsis thaliana landsberg
tttttttttttttttttttttttttttttttttttttttttttttttttttttttttttttttttttttttt

SEQ ID NO: 139051 - DNA, 190 bp, Arabidopsis thaliana landsberg
tgatttctcagggaatgagaactcggaaacagttagtgggattaagaaagtgtatccggatcttggaaaatgcttgtattttgatctcggtgaacagactcatagcgtgttttacgagctttttaacaagaaactcaactggatttggtatgtcaatcaaccagagcctgacctgaaagtaagaagacta

SEQ ID NO: 139052 - DNA, 92 bp, Arabidopsis thaliana landsberg
tgttagtactagaactacctctaccatataattccatccatatgtcaattataagcgaagcacgtatcttttggtcctgaagaaatgaaccc

SEQ ID NO: 139053 - DNA, 132 bp, Arabidopsis thaliana landsberg
gttagttttgtcttcaaattctggagctttgaagctagatcatcaagttatcgaaatctttgttaggattttaggtagagaatctcagtactctgttgcagctaagttgctcgataaaattcctctacaaga

SEQ ID NO: 139054 - DNA, 261 bp, Arabidopsis thaliana landsberg
aggagcagttgttttgcctagtactctgttcggctcgaaacctgagattccaaacgcagtcctgaccagagcgtttaggactgatgatacaactgtgcagaatctcaagtccaagtttgctgtttgaatctttttatttatgttttctaaaataatctttcacaataagctttatagcaatattggtatacacttgtctctgtaataatcggtatgaatattcgaaacaaaacaataataagattgatctctttctctctc

SEQ ID NO: 139055 - DNA, 373 bp, Arabidopsis thaliana landsberg; identical to SEQ ID NO: 113628

SEQ ID NO: 139056 - DNA, 588 bp, Arabidopsis thaliana landsberg
gtttacaaaattttgctgtttaaattgatagaagaagattcgacctttaaaggctatctgaagaacatctccatcatcgcctggtgttgtaagtttcttttggattttgattcttgttgatactgactagtgagctcatttttaacatttgttcgtaccaattctgggatttgtaattagctgagtattgagctctaaatcttgaaaaattagtgagtttagtattttgcaaaagacccattaacagattatgatttgtgcgttgtttcttgccaaatacttttgagaggtttatgaaacagagtaaaaccctagaattcaattcctttgctctgttatgcagtcttcatttcatcaaattcaacacagaagattcgatgagtagcttcaacggagactccatggatgatttcaaaggcctccgaataactcagcttgatgatgatgacgatgatgaaactgcggtggaacctataaatatggatgaatttgatgatgatgatgaggaagatgatgaagattatgaacctgtgatgttaggtttcgttgagagtcctaaattcgcatggtcaaatcttcgtcaactgt

SEQ ID NO: 139057 - DNA, 213 bp, Arabidopsis thaliana landsberg
ctctctctctcactcttttcttttccgagaacccaacaaaaaaaaagctactattaatccttcccctcgtgaggaaatcatttcttcttgtttctcgagatttattctctttctctctctctttctctgtgtgtttcgtgtcttcagattagttcgatgtttcgttcagacaaggcggaaaaaatggataaacgacgacggagacagagcaaa

SEQ ID NO: 139058 - DNA, 238 bp, Arabidopsis thaliana landsberg
ggtaaaaaaggttgtggaggagagacaagtggcgatgacaacgacgtctccggcaaatgacgtggtggacgtacttctaagagacggtggtgattcagagaagcaatctcaaccgtcagatttcgtcagcggaaagatcgtagagatgatgatacccggagaggaaacaatgccaacggcgatgaccttggctgtcaaattcttaagtgacaaccccgtcgctctagccaaactcgtg

SEQ ID NO: 139059 - DNA, 86 bp, Arabidopsis thaliana landsberg
tttttttttttttttttttttttttttttttttttttttttttttttttttttttttttttttttttttttttttttttttttttt

SEQ ID NO: 139060 - DNA, 316 bp, Arabidopsis thaliana landsberg
aattaacaatttttaaaaaatctagaaattcacactagttaaattaaatatcgtcgatgagaattaatcagtcaacaaaaaactaatcattttatttggataactaaatcgtatcaaatgggaacatatgtttacaaccttttagaaagaaaaatgaagatatgttgatacaaaagatgtttctcttttccaaataatctaacaaacgaatcagaagaaaaaaaaacaatattgtgacaacaatcatcaaacctctgcaactgcattcttcacacaatcaacattacacaaccgaactgatctcaccatttcaccc

SEQ ID NO: 139061 - DNA, 82 bp, Arabidopsis thaliana landsberg
tttttttttttttttttttttttttttttttttttttttttttttttttttttttttttttttttttttttttttttttttt

SEQ ID NO: 139062 - DNA, 50 bp, Arabidopsis thaliana landsberg
atgatgtcatgtggtgggaagaagccagtgtctaagaaaacaacgccgtg

SEQ ID NO: 139063 - DNA, 99 bp, Arabidopsis thaliana landsberg
caaaagtcactctctttaaaaaatctcgagaatctccctgtttttctatttctcatcctcattaaataatttctgtgattgtggacaagaaaagcttta

SEQ ID NO: 139064 - DNA, 56 bp, Arabidopsis thaliana landsberg
atatcagagcagaaatctttgatcacagagtcagttctgtttgacgaatcagagca

SEQ ID NO: 139065 - DNA, 218 bp, Arabidopsis thaliana landsberg
ctctgagttgactcgaccgagaaaaggcgatagagctggggtttaattcggcgataacaatggacgaagattccgtccatggcgattctcacctcaagacatgtgtcgtcctcggcggacgagggttcattggtcgatcgcttgtctccagattgcttcgtctcggaaactggacagtccgagtcgcagattccggtcacactctccatcttgatgaa

SEQ ID NO: 139066 - DNA, 168 bp, Arabidopsis thaliana landsberg
atttctcttccacaaagagtcctaacttcgagttgaaacaaacaccatttctcatctctatctcagaaagaacaaaccatttcgtgttctttctttctctattctcataaggaaatataattcctgaaactgttgagttcttgtgaaaggaaataaaaaacatgatga

SEQ ID NO: 139067 - DNA, 86 bp, Arabidopsis thaliana landsberg
atccaggttcaccggatttttctgggaatccgggtcctccgagtttcccgagaaatccaggctcgccggagtttccaggaaaccca

SEQ ID NO: 139068 - DNA, 1048 bp, Arabidopsis thaliana landsberg
gggggcttttgctgtttatgtgattactgggttatttctgatcttcggatttcacgtggtccgtaacaaatactctgtcgatctcatttctgatccaactctcactctgcgtctcctatgggtactaaaactttctttcataacctggttgctagtggatatttttcagttaattttagcctttttgttttgatgttgatattcagattattgagttcccgatcgtggtaatcatctacagcttgttccgacgaaacccagagaaatgctcggtgagtatagttcatctccgaggttctctgtgagaattaaagaaactgaatttctcgttttaactcgattgctttgtgcttgtctcatttcccttttatgaaattgacaaaacaagctagtatcctcactttacactcttaatgctcgaaaaaatcgtttcttttcatatagtattattttggtcttgtgtgttttgactctgtattcatgattttctcattgatttccagtactttagagctgttggccgaagcttagtcggactaattgccggttagtatttctgtttttcagcttattatagctcactaatttttcaaagaagttgattgctcaatgagttcacctggaaattctagatgttaagctaaacctgaagatgtgagtgagtctgagcttcttatgctttcatcttgtgcttttgctgattcagtatcccttgattgtgtctactatatctatacctgtgttttgatttgtttaataggtgctcttataaatgctttgggagctgtttctttgggtgcacctattggaatgcagtatgtttcactaagatcttctttctctatatctttttatttctttctaattgtggaaatgttgattgtaaatctggacttttcagttgtccagattaaaaatgaggctccttaatgctggttgtggtctcacttctgcatggagattgtgtgattttcaaaggctgacatgagtattaccttctcatcttatgcagatctctatcaaaaacaattcactggtcctttctaat

SEQ ID NO: 139069 - DNA, 84 bp, Arabidopsis thaliana landsberg
tacaaaagagatttgattcgggatgcagagccactgattcaagaggagcctcttaagccatggattacacttaagaggaacatc

SEQ ID NO: 139070 - DNA, 1022 bp, Arabidopsis thaliana landsberg
tgattttccagaagacgagtttcggcgagagttccgtatgagcaaatcgacgtttaacctaatatgcgaggagctagatacgacggtgacgaagaaaaacacgatgttaagagacgcgattccagctccaaaacgcgtaggcgtttgcgtttggcgtttggcgacaggagctccgcttcgccacgtgtcggagcgtttcggtctgggaatctcaacttgccacaaactagtcatcgaagtctgccgcgcgatctacgacgttctcatgcccaagtatctcctctggccgtcggattcagagatcaactcaacgaaagccaaattcgaatcggtccacaaaataccaaacgtcgtcggatcaatctacaccacacatattccgatcatcgctccgaaagtccacgtggcggcgtattttaacaagagacacacggagaggaatcagaagacgtcgtactcgataacagtacaaggagtggtcaacgccgacgggatcttcaccgacgtttgtatcggaaacccaggatctctcaccgacgatcagatcctggagaaatcttcgctttcacggcaaagagcggcgcgtgggatgttacgtgacagctggatagttggaaactctgggtttccgttgactgattatcttcttgtaccgtacacgagacagaatctgacgtggacgcagcacgcgtttaacgagagtatcggagagattcaggggattgcgacggctgcgtttgagaggctcaaaggacggtgggcttgtttgcagaaacggacggaggtgaagcttcaggatctgccgtacgtgcttggagcttgttgtgtgttgcataacatttgtgagatgaggaaggaggagatgttgccggagttgaagtttgaggtttttgatgatgtggcggtgccggagaataatatccgatctgctagtgcggttaatacgagggatcatatctctcacaatctcttgcatcgtggacttgccgggacaagaactctataggctctgtttttcacct

SEQ ID NO: 139071 - DNA, 576 bp, Arabidopsis thaliana landsberg
aggatttttcgtgttcgccggcggtgacatttacgcgcagaaacgttgatactctctctctctcgacggaaaattcttcctcggagatatggtgacggagctggaagagcttgtcgaatttttgtcatctccttcaccgcctgtaagctttttggtttcatctgtttctgagctatggggatgcattgataattttagattctagggtttttgtaaccgatgagtctgattgaatgaagaaacaaacttgtaggtgaagaaagctgcggtggaaattgttagtggtttaactggttccgaggaaggtttacaatctctatcaaagtattccgagattcttcttccatcattgtctcagcttctaaatgaaagcaaggtcattgaatcaactcttaagaagcactaattgtttcctgaatttggattgagagatattgaaatgttgttttgaattcaattttgcaggaggtatcagagccagcagctcaagctcttgttaatctttctcagaagtgtgaattggcaaagaagatgattcaaatgggtttgattaaagtggccatggacatgttgtat

SEQ ID NO: 139072 - DNA, 2323 bp, Arabidopsis thaliana landsberg
caatcttcttactcttcagcgaacattcgcgccataagctcctaagttcctctcatccaatggatcacaaatgacaaagaaaaacaaaagacagagaaaacagagacaaagcgagaaacaagacaaggaatacagaaaaattagtaaatcgaatcaccaaaaaaaaaaaaaaaactactttgattaatcaaaaaaaaaaaagagttgcttgaaactcccggcggcctagctccggttaagtaaatggccgtggcttggctaatctggccaatcgtgctatctctaacagcactttctgcgaattcgataaccgaatcagaatctttattgaaattcaagaagtccttaaacaacaccaagtctcttgattcttggacaccagagtcagaaccttgtggagcaagccaacgatggatcggattactctgcaacaaaaactctgtctttggcctccagatcgaacaaatgggtctatcaggaaaagttgatgtcgctccgttaaaagacctaccatctttacgcaccataagcataatgaacaactctttctctggtgacatacccgagtttaacagattaaccgctctgaaatcgctttacatatcaggaaatcgattctctggtaacattccttctgattatttcgaaacaatggtgtcgctaaagaaagcttggctgtcaaacaaccatttctctggtctcattcctatctcattggcaactacattgccaaatctcattgagttacgcctcgaaaataatcaattcatcgggagtatacctaatttcacacaaacgactttagctattgttgatctatcaaacaaccaactaaccggagaaatacctcccggtttgttgaaattcgacgcgaagacttttgcggggaattctggcctttgcggtgccaagctatccactccatgcccacaaccaaaaaattcgactgcatccataacgatagaaggaacaatgaaagatgcaaataagagcaaatactttctagcattcagcacattaggagtgcttcttatcgtcgtccttgtctccttagctttcagaaaaaagaaaaagaagagacggaggaagaaggcacgtcgtacctctgaacaagacaatagtgacgaccaacaaattcaggttacttccactacacgtaattttcacattttcaaatgagagtttttaaacctataaaatcacacaaaattttgatatgattgagacaggtaactgttgagggatcaaatagctcaaggcagagtaggagcagtcggtccggcgaattgaataaaggagtggcggggacatcagacctagttatggtgaacaaggaaaaaggtgttttccgtttatcagacttgatgaaagcggcggctcacgtgcttggtaatcccggcggtggaagcaaccgtccaagaagtagcggaggcgtgggatctgcctacaaagcggttctttcaaacggtgtcacggtagtggtgaaacgtgtgacggtaatgaatcaagtgagtgttgacgtattcgacaaggagattaggaaactaggaagcttgcaacacaagaacgtattaacgcccctagcttaccatttccgacaagacgagaaattgctagtgttcgaatttgttcctaatttgagtttgcttcaccgattacacggagaccacgaagaatttcaattagattggccttctcgactcaaaatcattcaaggaatcgctaggggaatgtggtatctccatagagaattagggtttctaaacctaccacatggaaacctaaaatcaagcaatatatttcttgcggaagacggcgagccactcatctccgaatttggacttcaaaaactaatcaatcccgacgctcaatctcaatctctcgtcgcgtttaaatctccagaagcggatcgtgatggaaccgtctctgcgaaatctgatgtatttagtttcggagtcgtggtacttgagatcttgaccggaaaattcccgtctcaatacgctggtttgaacagagccggtggggcaaatttggttgagtggttaggctccgcactggaacaaggtggttggatggatctgcttcatccgatggtggtaaccgccgccgctgaagataaaattatggaggaggaaattgagaacgttttaaggatcggtgtgagatgtaccagagaagatccagatcagagaccgaatatgactgaagtcgttgatgaactgactattgaggattctaacgacgactttatcaccatagaaacttagcttcaccgtcgatcaattccaaccgttagattcatgcagattcaccaattttggat

SEQ ID NO: 139073 - DNA, 51 bp, Arabidopsis thaliana landsberg
gaaaagataaaataaaataaaaaacaaaacccccaaatttgtgtctcctcc

SEQ ID NO: 139074 - DNA, 358 bp, Arabidopsis thaliana landsberg; identical to SEQ ID NO: 115554

SEQ ID NO: 139075 - DNA, 79 bp, Arabidopsis thaliana landsberg
aaaaaaaaaaaaaaaaaaaaaaaaaaaaaaaaaaaaaaaaaaaaaaaaaaaaaaaaaaaaaaaaaaaaaaaaaaaaaaa

SEQ ID NO: 139076 - DNA, 1500 bp, Arabidopsis thaliana landsberg
atggctttgcaaaacattggtgcttccaaccgcgatgatgccttttataggtacaagatgcctaagatgatgaccaaaaccgaaggcaaaggtaatggcattaagaccaacattatcaccaatgttgagattgccaaagccttggctagaccgccttcttatacgaccaagtactttggttgtgagcttggagcgcagtctaagtttgatgagaagactgggccgtcgcttgtgaatggagctcacaacacgtctaagcttgctgggcttttggagaattttattaagaagtttgttcagtgttatggatgtggtaacccggagactgagattattattacgaagacgcagatggtgaatctcaagtgtgctgcttgtgggtttatctctgaggtcgacatgagggataagttgactaatttcattctcaagaacccacctgagcagaagaaggtgtcaaaggataagaaagcaatgaggaaagctgagaaggagaggcttaaagaaggcgagctagctgatgaggagcagagaaagctgaaagctaagaagaaagcattgtctaacggcaaggattctaagacgtctaagaaccattcttctgatgaggatataagcccgaagcatgatgagaatgctctagaggtggatgaggatgaagatgatgatgatggtgtcgagtggcaaactgatacttcccgagaagctgctgagaaaagaatgatggaacagttgagtgctaaaactgccgaaatggtgatgctctctgcaatggaagtagaagagaaaaaggcgcccaaaagcaaatctaacgggaacgttgtgaaaactgagaatcctcctccgcaagagaagaatctcgtgcaggatatgaaagagtatctgaagaaagggtcaccaataagcgcgctcaaaagtttcatctcgtctctctctgaacctcctcaagacatcatggacgcactcttcaatgctctctttgatggtgtgggaaagggattcgccaaagaagtgactaagaagaagaattacttagcggctgctgcaacaatgcaagaggatggatcacacatgcatctgctcaattcgatcgggacattctgtggaattaatgtaaacgaagaagctttgaaagaggtggctctggttcttaaagcattgtacgaccaagacatcattgaggaagaggtagtgttggattggtacgaaaagggtctcaccggagctgacaaaagctcgccggtttggaagaatgttaagccttttgtggagtggcttcagagcgctgagtctgagtccgaagaggaggattgagtcacttttttcttccctcctaacttttctttgcggcatttcttataatacttcgtcagttttcagaattcttaaatctttttgctgtgttcttataaagaaacatcatctattaaagttgtcttcgtttggatttggttttgacgactttgggaaatatttatgtttaagaaggtttcattggtc

SEQ ID NO: 139077 - DNA, 226 bp, Arabidopsis thaliana landsberg
cagaccatctttcttttatatctccaggtgtgccaatccgttgctcatcgggcgagtgaccatcctccattactccagctgcacggatcctggcggtctcagccaacaagtcatggataagcatctctgtcgtcttagccgtgattcctctgagataccaagaaatgggcggaggtggaacaatcgctggctgtattagctggtccagcgttaccttagatccgat

SEQ ID NO: 139078 - DNA, 399 bp, Arabidopsis thaliana landsberg
gggctcatgaacctcctcaacaccggtcctgaccacctccgtcctggtattcaaacttcccatgcatgttatgttttttgtttgttatggttaattgcgaagttctgcacggaatctttcatacatctttttaggaaacgtaggatcctgtttatttttctaacatgcatctaataatttggtaattttgtttgtttttgcagcgatatttagatcattgttgtacgaagcatgcgggaggattgtgaatccgatatacggatccgtggggttattgtggtcaggaaactggcatctttgtcaagcggccgttgaggcagtaatgagaggctcacccgtgactccgatcgcatgcgacgcagcggttactggtcaagcacctccttttaacaacaagct

SEQ ID NO: 139079 - DNA, 316 bp, Arabidopsis thaliana landsberg
taaatttgtagcataattaagtagagtggtcaatataataatacgatacatgataaaagtcttgaaaacattccacacacaataagcctaagcactactgatcacacaatccatatttctttaggctttaaaatacataactaagaaacatgacagtttaaggttttagcaacaccatgccttatgttttaagtagttactaaataattagatagacaatgatggcaccagcaaaccttttagccctttaattattcaagaagatggaaggtaatgatgtcagaggcagagggtgcatgaaggcccatggttgggg

SEQ ID NO: 139080 - DNA, 130 bp, Arabidopsis thaliana landsberg
gccgctaagaattgatccggcgagaatggcgagcagcaatgagtatgaggaaggtccgggggagagggagagtgggtacgacccaaatatggtgccggattcggtgaagtcgttcgtgtcacacatgtac

SEQ ID NO: 139081 - DNA, 317 bp, Arabidopsis thaliana landsberg
catttcctgaaatacatttgcatgcatggctagaaaagttagtagcagtataaatatcatgaaaatatatctgagtgtcgaaagtcacacctcgagcatggataaagtaagaggagcagcaattctagcgtccaatacatacctaaaaaacaggttttgcaaaacggttgtgccataagcttgtcaacagttataaaggaagaatgattaaaaatcttaattaacatactacataagataagataacatattataaaacaaagagcttacatgtcgataacaagcttaattaggacgctcacagccacatccatcga

SEQ ID NO: 139082 - DNA, 923 bp, Arabidopsis thaliana landsberg
ctctcattcactaactttctctgcttctctctatctttctctgtgcataccaactctaaagtctctcatcaatggcggctcgaaaactagggtcgttgttacgtcaatactttttctctctatgcttcctcttcctcggttgcttcttcttccctaaagacgcagactataaacaaaagagaagaaagaagaagcttagaagagtttcttcttcttctggttcatctctatcctcttcttggacgtatttaaaacgagttttcttatccacgacaaggatatccaaatcccgtaaccaaacacatcctaacgttactttaacatccgcaagatcatctcaaaactccctcgtcactctcgtccaacccgataccacaaaccaacccgacccggaaacacgtattcatcagcaaaccgaattcgagatctcctcttccgacgagattttcccttgtaactcgtgtggcgagattttcccaaaaatcaatctcctcgagaatcacatcgcgatcaaacacgccgtgtcggagctaatcgccggagaatcaagcacgaacatcgtcaagatcatattcaaatctggttggccggagcaaggtaattacaaatctccggtgatcaatcgaatcttaaaaatccacaacagttcaaagattctcaccagattcgaagagtatcgtgagttcgtgaaagctaaagccgctcgtagcaacggcggtggaagacggtgggacgatgaacgttgcgtcgccgacggaaacgaacttttacgattttactgctcgacgtttatgtgtgatttagggcaaaacggtaaatcaaatctctgtggtcatcagtattgtagtatctgtggtatcatcggatctggattctcgccgaagctcgacgggatcgcgacgttggcgacggggtggagagga

SEQ ID NO: 139083 - DNA, 390 bp, Arabidopsis thaliana landsberg
atacactcaacaagagcaacaatacagcagttcaccacatattcctccaatggagagtatactagtaaacaaaagcaacttatgctataaccagcaaaaggatcagaagaatcagacattcatagctcgaaaacaagacaaaagaagatcacattcatgattttgaagaaagaaagccagttcctttaaacttctcttccatcaaaccatcaatacgagccaccatctccggagtcagataattctgccaatccccaactttccctttcctgaaatacgcactgttggcataaacagcaggacgatcttctctatctttctcacctttgttagcttcaagattcttcaaagtctcaaagctacaaagcttcactactttctcaacaacat

SEQ ID NO: 139084 - DNA, 1904 bp, Arabidopsis thaliana landsberg
gtcgccccgacttcaaccggtggtggcggagtctgctggccagacgcttcctgggaattttggacgctcggactgacggtgccctggaagttgagtcgcgttcgagctccagtaatccgcgcagttcctgcagaaagtgaatcgactcgttctgcgtatgcgttgtgagccgatctgatttcggaatgattagccgctagtgctgcgagttggccgttgcattgctcttgaaaggtcacgaacttgtcggagagagacgtcacggcaagctgctgtcggtcagtcttctcggatagctgctgaagcagctgcttaatgccgtcgagggtgggggctcggtcgccggagctctgatcgtcgttgctactcatggtgactttgatcgttgttctgaagtaaaagactttatttcccctccttctagcgccaaattgtggattccgacatccacaacactatgcatgctttcagctacagatgatattacaacatcaggttcacttcaattcgaactcaaatctattgaagctgcaacaagtaattttcagaagaggaacaagcttggtcatggtggatttggtgaagtttacaaggcataatgttcttaaactttctcacctactagtttgtgttataaactaatattcaaaaatgagaaaagacattctgaaagttagtgaaagatcatacgaattgacagggaacattcccgaatggaactgaagttgctgtgaagaggttgtctaagacgtcagggcaaggtgaacaagagttcaagaacgaggtgcttcttgtagcaaagctccaacatagaaatctcgttagacttctcgggttctctgttgaaggagaagaaaagatacttgtctacgagtttgtgcacaataaaagtcttgactacttcctctttggtaatagatttatattctctatatcttagtatcttataggcatagtctaataatggctctatacattggatgtgcagaccctgtaaagaggggtcaactggattggagaaaacgttataacatcatcgggggaattactcgagggattctatatcttcatcaagattcacggctcacaatcatacatcgtgacctcaaagcgagtaacattctcttagatgctgatatgaatccgaaaatcgcggattttggaatggcaaggaatttcagagtggaccagactgaagacaatacaggaagagtagttggaacattgtaaataatcttccatttcacttacattctgtctgtcctttttcctttattttgatttctgatcaaactaaaagtgatatgtgctgtgttttgcagcggttacatgcctccagagtatgtggcgaatgggcagttctcgatgaaatctgatgtttatagtttcggagtaatgactctggagattattgttggcaaaaagagtagtagctttcaccagacagatagttcaataggcaacctggtcacatatgttagttccaaaaatccagtttattctccaacttctttttactcttttaaactgtgaccatgacctggacatttgtttcttgacaaatgacttaacaggtttggaggctttggaacaacgaatcattcttggaactcgtagacccggccatgggggagagttatgataaagatgaagtcatcagatgcatccatataagcttattgtgcgttcaagtaaatcctgcagatcggccaaccatgtccacagtatttcaaatgctcactaatacttttcttactctgcccgtgcctcagtcacctggatttgttttcagggtcagatccgagtcaaacccactagccgagagattggagcctggtccgtctactaccatgtcgtttgcttgttccattaatgatgcatcgatcacgagtgttaatcttcgt

SEQ ID NO: 139085 - DNA, 1672 bp, Arabidopsis thaliana landsberg
gcaaatttctccgttcgagatcaattccgtcgagatctcaagctctctcactcgtagtaaaaaaatggcggcggtagcggcaccaatggcttcgaagccccgtggatctaaagctgaatcgttcgtagacaacaagcggagagaagatatccgattcgcgaacatcaactctgctcgagccgtctctgacgccgtccgtactagtttgggaccgaaagggatggacaagatgatttccacggcgaacggtgaggtaatcattactaacgatggagctacgatccttaacaagatggaggttttgcagccagcggcgaagatgttggtcgaactttccaaatcacaagattcagccgccggagatggtactacaaccgtcgtagtaatcgccggtgcgcttctcaaggagtgtcaatcgcttctcacaaacgggatccaccctactgtcatttcagattcgcttcacaaagcgtgtggtaaggcgatcgatattttgactgccatggctgttccagtggagctcactgatagagattcacttgtgaaatctgcgagcacatcgcttaacagtaaggttgttagtcagtactctacattgcttgctcctttagctgtagatgcggttctctctgttatagatccggaaaagcctgagattgtggatttgcgtgatattaagattgttaagaagcttggtgggactgtggatgatacacatactgtgaaaggtttggtttttgataagaaggttagccgtgctgctggtggaccgactcgtgtggagaatgctaagattgctgtgattcagttccagatctcacctcctaagactgatatcgagcagagtattgttgtctctgattatactcagatggataggatcttgaaagaagagaggaattacatattggggatgattaagaagatcaaagcaactggttgcaatgtgttgttgattcagaagagtattttgagggatgcagtgactgatctatctcttcactatttggccaaagctaagattatggttattaaggatgttgagagagatgagattgaatttgtcaccaagacattgaactgcttgcctatcgccaatattgagcatttcagagctgagaagcttggccatgctgatcttgttgaggaggcctcccttggagatggaaagattttgaagatcactggtatcaaggacatggggagaactacatctgttctagttcgtggctccaaccagcttgttctagatgaagctgaaaggagtttacatgatgccttgtgtgtggttaggtgtctagtgagcaaaaggttcttgattgcaggaggtggtgcaccagagattgagctctcaaggcagctcggtgcttgggctaaggtgctacatgggatggaaggttactgtgtgaagtcttttgctgaagctctcgaagttattccttacacactagccgagaatgcagggttaaaccctatcgccattgtgactgaactcaggaacaagcatgctcaaggggaaatcaacgcagggatcaatgtgaggaaaggacagatcactaacatcttggaggaaaatgttgttcagcccctgcttgtgagtaccagtgcgatcactttagcaactgaatgcgttaggatgattttgaagattgatgacatcgtaactgtgagg

SEQ ID NO: 139086 - DNA, 2185 bp, Arabidopsis thaliana landsberg
gaaaaaaattatactcttcttcttcaattcaatctctctcaagttttgatctctaaatctcacaacacgatccatgtcttcatctttctgattcacctacctctctattttgatttttcccttttcgaatttctccatagatggccgcaacaacaaccacggcggcgagtatcaacgccgaagccggaggtggtggtgggggagctgaagaccgtgttctcgctacggcgcaacagatcatgaaaagcctcaacacaccaaaagaggttcgtgaagatatgttacttatcttctcaagcttcgataaccgtttatcaaatatcaaaaccgcgatgacgaaccaggaagagaatcaaaacgacgctcttgtggcgcgtttagaggctgcagaatcggttattcatcggtgggatggtggtaatgattcttctcgtcactcgtcttcgtcttctggtaactatcgttcctcttcgttttctctttcgtttgatgaatctccggaggaagctaccgagtttctttcagctgttgatgagattatctctttgcttgaggatctttcgtctgagaataagcctgatatggtggatagagctgatagtgctttgcagatggctatgtctcagcttgaagatgaatttagacggattttgattcgtaacactgttcctttagacgctgagcgactctatggctcgatgcggcgtgtttcgttgtcctttgctgatggtgatgttgttgaggattttgagaattttggtttggttgctgatggagatggtagtgggagtaggaggaggttgtttcatgagagaggagggagtatagggtgtgatctttgggttgatttgattaatccaactgctgttgaagatttgaaggagattgcagagcggatgattcgcgctggttatgagaaggagtgtgttcaggtttatagttcggttaggcgtgatgctttggatgattgtttgatgattcttggtgttgagaagctgagtatagaagaagttcagaagattgattggaagtctatggatgagaagatgaagaagtggattcaagctgtgaagattactgttagggttcttcttgttggtgagaaaaagatatgtgatgagatctttagcagttcggagtcgagtaaagaggtttgctttaacgagacaactaaaagctgtgtgatgcagttgttgaatttcggagaggctgtggcgattggtagaagatcatcagagaagttgtttaggattctggacatgtatgatgcgttggctaatgtgttgcagactttagaggtgatggtcactgactgttttgtgtgtaatgagaccaagggggtgttggaagcactgggtgatgctgcgagggggacttttgttgagtttgagaataatgttcggaatgagacatcaaagagaccgacgacaaatggtgaggttcatccaatgatacgttatgtgatgaattacatgaaattgattgtggattatgcggtgaccttaaattcgcttctggagagtaatgagtcaagtggcgtatctggtgatgatagtacagaagagatgtctcctcttgcgaaaagaatattggggttgattacgtcgttggaatcaaatcttgaagataaatcaaagttgtatgaagatggtgggctgcaacatgtgttcatgatgaacaacatttactacatagttcagaaggtgaaggattctgagcttggtaaactcttgggtgatgattgggttagaaaacgaagagggcagatacgtcaatatgctaccggttacctcagggcttcctggagcagggtgctatctgctttgagggacgaaagtatgggtggaagttcaagtggtagtccgagttatggacaaagaagcaacaattcttccaagatggcgttaaaagagagattcagaggttttaatgccagctttaagagttatacaggctgcaaacggcttgaaaggtcccggatcctcaacttcgtgaagaactgagaatatctatatcagagaaagtaatcccggcttaccgggctttcttcggaaggaataggagtcaactagaaggtggtaggcatgctggaaagtacataaagtacacaccagatgacctggagagttactgaccagacctatttgaaggaaatcaattggttattcaccacccgagaaggaaa

SEQ ID NO: 139087 - DNA, 529 bp, Arabidopsis thaliana landsberg; identical to SEQ ID NO: 65472

SEQ ID NO: 139088 - DNA, 1153 bp, Arabidopsis thaliana landsberg
  unsure (1)..(1153): unsure at all n locations
gaagatttttcggtggttgtgttggcttctgatctaggaattgacgctagacccttcttgacgagaagcgatgacgttgatgaacaagaaaactggcatgattgtccccaatacttaggagatgaagatttctctgatctcgatcttctccagttctttactctccagggcttggataggtccggtaaccggattttccgcatcgtcggaaagtatttccctggtaataactctctcttcttattagttgaaatgtgtcttaattaaaaatactgtgattttgggacaaagttgctacttgatcacaggacatgttgatgttctctgatttggcttattagattagcgttttggtatttcctgctgctttagataacgtctggtcatgtaatgtccacttcagtctcttctaattgtgtgtatgaaacgcagctcgtgtagtgagtgcggagcggctgaagaagtatatatcccagaagataagcaaccaatgtcctgagggacccttgtgcttggtttacatgcatagcacagtccaaaaggacgacaattcaccgggaattaccatcttacggtggatttacgaggaccttccttcagatatcaaagacaggcttcaacttgtttatttcatccaccctggtcttcgttcaagacttgtcattgccactcttggccgccttcttttaagtggagggtaatcatttcttttcatatgtatcagttgatttatatacaagttatttcaaacttgcataatcgaatattgaaccctaaagtttgaagctttcatgatctaataaactctggcgtctaggagtattgatcttcttttgagcttgtaacttgaaacggttatgggatctagattactttagaatcaacaactgtggacttaactgttttgtcaaaacaatatctctttcaacattgcagactgtannnnnnnnnnnnnnnnnnnnnnnnnnnnnnnnacctttgggaggacataaagaaaggcgaggtggaaattcccgactttgtgaagaaccatgacaatgtgctcgagcatagaccattaacggactatggaatcgaaccggatcctttccagttaagcgaggttcaatcttcatcgttctctctcaaccgctacgagaacagatgggtctca

SEQ ID NO: 139089 - DNA, 78 bp, Arabidopsis thaliana landsberg
aaaaaaaaaaaaaaaaaaaaaaaaaaaaaaaaaaaaaaaaaaaaaaaaaaaaaaaaaaaaaaaaaaaaaaaaaaaaaa

SEQ ID NO: 139090 - DNA, 776 bp, Arabidopsis thaliana landsberg
  unsure (1)..(776): unsure at all n locations
tcttattcgtgtccgcagaagnaacgagagaagagagagaagcaaaagacctaccaagaatatttatagcacacaaacatctagagacagagatagacatagagagagagcttgtggttgtggttgtgcgagataatatctagagatggggaagaagaagtgcgagttatgttgtggtgtagcgagaatgtattgtgagtcagatcaagcgagtttatgttgggattgtgacggtaaagttcacggagctaattttctggtggcgaaacacatgcgttgtcttctatgtagcgcgtgtcagtcacacacgccttggaaagcttctgggctgaatcttggcccaactgtttctatctgtgagtcttgtttagctcgtaagaagaataacaacagctccctcgccgggagggatcagaatcttaaccaagaagaagagatcattggttgtaacgacggagctgagtcttatgatgaggaaagcgatgaggatgaagaagaagaagaagtggagaatcaggttgttccggctgcggtggagcaagaacttccggtggtgagttcgtcgtcttcggttagtagtggtgaaggagatcaggtggtgaaaaggacgagacttgatttggatcttaacctctccgatgtatgaatatgaatctttttctttatcttcttttattattaggaaatgattaagaaatctgaaacaattctttttgaaatgcaggaggagaaccaatctagaccattgaaaagattatcgagagacgaaggtttgt

SEQ ID NO: 139091 - DNA, 134 bp, Arabidopsis thaliana landsberg
tgaaaagaaggtaagtttgtctgaagagaagggggcacacaagtaagtgctttgtcagatttcgcgtgcattcatcaaaacaaaaacaaaaaagctcttctttcttcttcttctctctttctttcattcattca

SEQ ID NO: 139092 - DNA, 80 bp, Arabidopsis thaliana landsberg
gtttgaaattcatttgtgaaatcgaaatatatctgtaaattcagaaaatattctctcatccattacaaaatatttgagtc

SEQ ID NO: 139093 - DNA, 222 bp, Arabidopsis thaliana landsberg; identical to SEQ ID NO: 128299

SEQ ID NO: 139094 - DNA, 119 bp, Arabidopsis thaliana landsberg
cacagccacaaattcctcaatactctatatttctcttcccgtttgaaactccaaagcttgtttgatgaaaacagagtaaacggttctgttcaaaacatttttcaagctctgttactttg

SEQ ID NO: 139095 - DNA, 94 bp, Arabidopsis thaliana landsberg
aagacttaccccaggcaatgtcttcttgttatgaaaactattgatcaccttgtcagcatcttcccttgtaggacatgtcagaaaacaacatcct

SEQ ID NO: 139096 - DNA, 381 bp, Arabidopsis thaliana landsberg
ctaatcacataagatattctgattcattcaaaaacaagtagagtagagacataacagagaagctattacagtttttagttttcacttcagagagttccgaagaataacacgttaacaacagaaaataaatgaaacccaaagcgttgcctgacagaatctttgtgctattttaaggatgatcaattacacaacctaaatcaacagagaagtttttgaatcctttgtcaaaaggatgaaaacaggtcatctcgagccacggggttcataccttctctctgacctctcagaccttctctctgatcttctctctgggcttcttccatgaggagagtaagaccgatctcttctagaccttctttcatcacgaggtgaatagtcgcg

SEQ ID NO: 139097 - DNA, 169 bp, Arabidopsis thaliana landsberg; identical to SEQ ID NO: 128036

SEQ ID NO: 139098 - DNA, 365 bp, Arabidopsis thaliana landsberg
ctctgaacatgatccctccggagacacataaagcagtgatgggagtgattgaatcctgcaaatcaccgtagaaagggatcaaaaagggcaattaattcttcattctccaatttctctgtacagcttctgcaatagaaaagaaaaaagaacttggaatgctttggggtgatcactaactctggtgatcgcattgatgtatgatataagattataaggctgctattagtacgttagttctctcttttagagttatactgtttgtctcggcttaggttttgtttagttgtcctttacagttttactcatacactccattctttttgtagttttcttgactaatcccatatatacaagtttgctctacc

SEQ ID NO: 139099 - DNA, 374 bp, Arabidopsis thaliana landsberg; identical to SEQ ID NO: 129016

SEQ ID NO: 139100 - DNA, 2522 bp, Arabidopsis thaliana landsberg
cctttttatttagtgactcgagattacataaaatcttctatacactggttccacatctgtttcaatcatggcggagaatggtgaagagaagttacttgctgttgcgcgtcacatagccaaaacacttggccacaatgaatccatggccgatgatatcttacagatcttctccaacttcgacggcagattttctcgcgagaagctcgccgaaggtcaagctggagaagatggatccggagtcgccacactcgagcgagctctaaattcaatagacggtcagatctctcgctttgttgctgcggaccaaccaatttgggctgatcctgcagattcagctgctttcctcgacacaatcgatgagctcgttgcaatcattagagagtggagtcccatggcttcagagaaacctatcggcatctgtctaacacgcgccgacgatatgatgcagcaagctatgttccgcatcgaagaagagttcaggtcgcttatggagcgtggagctgagtctttcggacttaatcctcagggagacgctggtgcgatgaatcatcgtttcgattctgaggaagaagaagatgatgacagagacttcaacaacggtgatgatattcagatcccagtggcacagccactcactgactacgatcttatcattgatgctctcccttcggcgacaattaacgatctacacgagatggctaagcgaatgcttggcgctggatttggtaaggcgtgttctcatgtttatagttcttgtaggagagagtttctggaagaaagtatgtcaaggttagggttacagaagctgagtattgaagaagttcataagatgccgtggcaggagttagaagatgagatagataggtggatcaaagctgctaacgttgctctaagaatcctgtttcctagcgaacgtagactctgtgaccgtgtcttcttcggtttctcctctgctgctgatctttcgtttatggaggtttgtcgtggctctaccattcagcttctgaatttcgcagacgcgattgctattggaagcagatcgcctgagagattgtttaaagtgcttgatgtgtttgagacaatgagggatttgatgcctgaatttgagtctgtgttctcggatcagttttgctcagttcttagaaatgaagcagtaactatttggaaacggttgggagaggcgataagaggtatatttatggagcttgagaatttgatccggcgagacccggctaaagctgcggttccgggcggtggtctccacccgatcactcgttatgtgatgaattacctccgtgcggcttgtagatcccggcaaaccttagagcaagtgtttgaggaaagcaatggtgtcccttctaaagattcaactctgttgactgtacagatgtcttggatcatggagcttctagagagtaacttggaagtaaaatctaaagtgtacaaagatccagctttgtgctatgtgtttctgatgaataatgggagatacattgttcagaaagtcaaagatggagacctaggattgctgttaggagatgattggattcggaaacacaatgtcaaagtgaaacaataccatatgaattatcagagaagctcatggaataagatgctggggttgctgaaggtggataatactgcagcaggcatgaacggtttggggaagaccatgaaggagaagctgaagcagttcaatattcagtttgatgagatatgtaaagtgcattcgacgtgggtagtgtttgacgagcagctgaaagaagagctaaagatctcactggccaggcttttggtaccggcatacgggagcttcatcggcaggttccaaaaccttggagacatagggaaaaacgcagacaagtacatcaagtatggagttgatgacattgaggcgcgtattaacgagctgttcaaagggactaccacgggaagaaaatgaaggtaacgaacacaaaaatagcctcttgtaacatcttcgtaacgaaccacctgctaaatgaccaatagcgaagtcttgcagggaggatttgtaacatgtattgtgtatccttttagacagttagctcagctctgttgtgttgttgtgtaatgttgtattgtaactggatcactttttttgtcattgtaaaaagagaaaacagttgaaaaagatgacatgttagggacttggatctacttctaagtcttgagtgcatattttatcaatatgttcttacatctaagtcttcccttttaacaaaggagtcaacacaagatttttcattattttactgattctcaataattgtgtaactatcaccaagtaaccataaccaactagtaccaactcttgaagatagtaaaaaacaagagaggacacaatggatatttgatgtttttaactcttgaaataaataatataagagaagtttcaaaactgagcagagtaccaaaagaaacgaagtgagtctaggaaatatgaaacgtctaaagaagcataacaaaggggatcctctagagtcgacctgcaggcatgcaag

SEQ ID NO: 139101 - DNA, 293 bp, Arabidopsis thaliana landsberg
gatatgagtagccaaatcgctttgtcaccggccatcgccgccgccattcgccgtccgtcctctcacgactgtctatccgcttccgccactactgctaccgccacccccatggctctcaaatcttgcatcgtcgcacctctctcgctattcacctctcaatctcaaatcaaacactcaagctcaagaaaaacttctcgaaccacgattcgatgccgatgtagcgataaaatccgcagattcgataaacgcagacgccaatccttcgtcctcaccgtcatcagaggaagaaatcg

SEQ ID NO: 139102 - DNA, 64 bp, Arabidopsis thaliana landsberg
gtgaaccaagacactgcatagaaatgagtagcaaaatgttcaagcaagccaataaggcagcaca

SEQ ID NO: 139103 - DNA, 153 bp, Arabidopsis thaliana landsberg
tgctgaaaatggaaaagcactaataatttagtcacattaagaagataaatcgctatacagctataattaaaatcttattctcattgtaatggtttgatatgaatcacaaagagccatgttcttcacagggaagaggtagtgagtagaagtcat

SEQ ID NO: 139104 - DNA, 188 bp, Arabidopsis thaliana landsberg; identical to SEQ ID NO: 113648

SEQ ID NO: 139105 - DNA, 328 bp, Arabidopsis thaliana landsberg
gttgtgagagctgatgaccctctcttccgttccctgagaacagaggagatcgacgagcacttgacggccattagtgaacgtgactgatcactttcactggaacattcagtcgggactttgcatctctttctgatgctttaattctatctaagatgattcacgtttcagagaaacgtgtttccattagtcatgagtcgtgtagttttcatttgaatcatctgcttcctcctaataggagttacatgtaagggtgtcaaattaaggtcgaatgagatggtttaaggttttgaattttaaaaggcaatacaaagaaagttatttacaaaaa

SEQ ID NO: 139106 - DNA, 423 bp, Arabidopsis thaliana landsberg; identical to SEQ ID NO: 105440

SEQ ID NO: 139107 - DNA, 58 bp, Arabidopsis thaliana landsberg
aacagagattcactttgcgaaaaagtcgcacgcacacatataaaagacaggactagag

SEQ ID NO: 139108 - DNA, 1248 bp, Arabidopsis thaliana landsberg
atcttaaacacaaacacgcaaaagatggaaaagagtcttcttgtcctctgtctcattttgttttttacttatagttacgtctcggctaattactatccacctaaagccttagtatcaaccgtctctaagaacacaatcttgcctatcttcaccttcacactcaacacaaaccaagagtttttcattcacatcggcggtccctatcttgtccgtaaatgcaacgatggtctccctcgtcccatcgtcccttgtggctcccccgtatgtgctctaactcgtagagtcactcctcaccaatgctctcttcccagcaacaaaatcatcaatggagtatgtgcttgccaagcaaccgcttttgagccattccaacgtatatgtaactctgaccaattcacctatggagatttatccatctcttctctaaaccctatatctccttcggtcacgatcaacaacgtttattacctatgcatcccccaaccgttccttgtagacttccctcccggtgttttcggccttgcggggcttgcacctacggctctcgccacttggaaccagctgactcgacctagactcggactcgagaagaagtttgcgttgtgtcttccttctgatgaaaaccctttgaaaaaaggtgctatttactttggtggaggtccgtacaagctcagaaacattgatgcaagatctatgctctcttacactcgattgattacaaaccctagaaaactcaacaactatttcttgggactcaagggtatttccgttaacgggaataggatcttgtttgccccaaacgcttttgcttttgaccgcaacggtgatggaggcgtgactctaagcaccatattccctttcactatgttacgaagcgacatatacagagtctttaccgaagcattctcacaagccacatcgggtattccacgtgtcagtagcacgacaccctttgagttttgtctttcgacgacgacaaatttccaagtgcctaggatcgatcttgagctagctgatggtgtgatttggaaattgtctcccgcaaacgcgatgaagaaggtcagcgatgacgtggcttgcttggctttcgtcaacggaggagatgcggcggcgcaggcggtgatgataggaatacatcagatggaaaatactttggtggagtttgacgttggaagatctgcttttggatttagttcttctttgggtttggtcagcgcttcatgcggcgactttcaaacacggccatgagaa

SEQ ID NO: 139109 - DNA, 428 bp, Arabidopsis thaliana landsberg
aacacaaacataatttatttcattttattcataaacacaaacacaaacataacagcagaaaaatatataaaacaagaaataacataattgaagcaaaacaagaacatgagaacaagtttcaaagattgattcaagaagaaaatttaagaccagaacctttaaacttctcttcaatggttctatcaatttcctctgccaatgactcactcaaagtatctctccatcctccaatctctccttttctaaagaaagttttagtctctattccatttggcaatttcccttctttgttaacttccaaattacttaaactctcaaagctacacaacttcacaatctctctcacttcttcttcttcaataaagccacattccaagaactccgcgatccgcttcatctcaacttcggtctgcttctttagctcctcg

SEQ ID NO: 139110 - DNA, 119 bp, Arabidopsis thaliana landsberg
ttctaacaagaagaagaatttaaacacaattatatatttaacgcgccaaaatcgcgtgtgaagtctctctattagtcaacgctatatcttgaaagggtctcgagactctccagccattt

SEQ ID NO: 139111 - DNA, 94 bp, Arabidopsis thaliana landsberg
cattttcccttttagagaagagagctgtgttggtttttgaggtaaaagaagagacccaatttcgatttggaggatagagacgaagaagaagaca

SEQ ID NO: 139112 - DNA, 414 bp, Arabidopsis thaliana landsberg; identical to SEQ ID NO: 105560

SEQ ID NO: 139113 - DNA, 815 bp, Arabidopsis thaliana landsberg
cacgaacgaagccacgaacttgggtctttggctcttctttgtgtcaatgtctccgtgtgagaatagaagactccatcgcttcttcaacttcaagatggcaaagtgagaaagataccttcttttcttcttatgccacagcttaaagttgcatcctttaaatatcaggtaggtcaaagttgtgactttttcttgtttattagagattccgatcatgcttggcttgatgggtttcttgtttccaagcttttgttctagtaaatttcgaaactttatgtgcttaaatctcaaaaattcaggttcagagttacaaaattcctctgcaattgcattgtctagctgtctatatctaaatagactttggaatgtggcttttgaccttttgttctatctagatattgaattctgatcgtatcaaagcatctcttgatcgatgcattctctgtttgaaatcaggatcttgtcaaaaccttacatttttattcagcaatgtgatatcgatttctctatggttccttggttgtctagttttggtttggctcaaagatcttcatttcaattgtgatgttgttgaatgacagattgctactgtctcatttggttggaggaaagaataggcgatgagcagaaccgttgctgaccatcttgcgtagagctggctgtgacattgtagaggctctacaagccggtgctttgactttctggagaataaaatggactcttttttcaaaaactcatatctggacccaaaggctgtgcgtgcccagcttcctaagagggctgatcttgcggctccttctgaaccgatgaccgttgcg

SEQ ID NO: 139114 - DNA, 357 bp, Arabidopsis thaliana landsberg
  unsure (1)..(357): unsure at all n locations
gatcacttgaacacttataaaaaatattttgctcttctttctatatatttatataaaaagtcaaaatatcaagaagaggaagaagaagaagaaactcattttctccgcagagaaaatacaatccatggcttctacttttaggctctctattagcttcctcactctcatcctcttctctctggtatgtttatctctccccatatatattgttaacaattttacacttatatgcatatgattctttatgcatatgttcctctatatgtgtgaggctcaaattgaaagccttattctntaaacatatgtacctctatatatgtggtatacatatgtatatgattaaacgtatttaaataa

SEQ ID NO: 139115 - DNA, 591 bp, Arabidopsis thaliana landsberg
  unsure (1)..(591): unsure at all n locations
ttacagttaaagcggcataacagtagttattaggtgagaatcctgtaaacaagcattgacttgccagatagatgtagtttggagactataatttacctaaatgtgttttcataaattcnnnnnnnnnnnnnnnnnnnnnnnnnnaagaactgaaaaggctatcatggtaaagaagaaaagtatcccttacgcaggcttctcaacatgtgatgtcaatgccagctgtcatcttcatttccgttagcgccaacttgacgagcttctacggtttgggagctgctgggcgagaatgtgggcggtatggaatgatcaaatctacaagctggaccaaatttgcagatgccatatcggctgtagtgtgtgcacatgctctgatcctgaaagtataacaaaataaaggaaaatgagttttaagtgtgaatcggagaagtgtgtgattgatcataatttttgtcctgaatcaaattcaccagaaatatcaagttctgtagcactacaaacgaaatttctcagtggcttcctaatgctagcacaaaagaacagcatgggaaaaaaacntcacaggtcttaggggcaagcccttgtcattga

SEQ ID NO: 139116 - DNA, 96 bp, Arabidopsis thaliana landsberg
tctacctttctatggcttagaatctaaaatcttctatctaactgctgacagattctagattgatgttggtttctgcttttcttgcatctagctgct

SEQ ID NO: 139117 - DNA, 1863 bp, Arabidopsis thaliana landsberg
gccgacaccggagactacatgatcaagccacagagtttcactccagccatcgacacttctcagtggcccatcctcctcaagaactacgaccgcctcaacgtccgtaccggtcactacactccaatcagcgccggtcactctcctctgaaacgtcctcttcaagagtatatcaggtacggtgtcatcaatctcgataaacccgcgaacccttcttctcacgaggtcgttgcttggattaagcgtatcctccgtgttgagaaaaccggtcacagtggtactcttgacccaaaagtcactggaaacctcattgtctgtattgaccgagccacacggcttgtgaaatcgcagcaaggtgcgggtaaagagtacgtttgtgttgctcgacttcactcagctgtccctgatgttgctaaagtagctagagctcttgaatcgctcactggagctgtgtttcagaggcctcctttgatctctgctgttaaaagacagcttaggattaggacaatctatgaaagcaagctgcttgagtatgatgctgataggcatttggttgttttctgggtttcttgtgaggcgggtacttacattaggactatgtgtgttcacttgggtttacttcttggggttggtgggcatatgcaggagcttaggagggttaggtctgggattttgggtgagaataataacatggttactatgcatgatgtgatggatgcccaatttgtgtatgacaactccagagatgagtcttatcttaggagggtgattatgcctcttgagatgatattgacgagttacaagagacttgttgtcaaggattctgctgtgaatgctatctgttatggtgctaagttgatgattcctgggttgttgagattcgagaatgacattgatgttggtactgaagtcgttcttatgactaccaagggtgaggcgattgccgttgggattgctgagatgacaacatctgtgatggctacttgtgatcatggtgtggtagctaagatcaagcgtgtggtgatggatagagatacctacccgaggaagtggggattgggaccaagggcttctatgaagaagaagcttattgctgatgggaaattggataagcatgggaagcctaatgagaagactccggttgagtggagcaggaatgtggttttgcctaccggtggagatgctataattgctggtgctgctgctgctcctgaggagataaaggctgacgctgagaatggagaagcaggggaagcgcgtaagcgtaagcatgatgatagcagtgatagccctgctcctgtaacaaccaagaaatctaaaaccaaagaagttgaaggagaagaggctgaagagaaggtgaagtcttctaagaagaagaagaagaaggataaggaagaggagaaagaagaggaagccgggtctgagaagaaggaaaagaagaagaagaaagataagaaggaggaggttatagaagaggtagcttcaccaaagtctgagaagaagaagaaaaagaagagcaaagacaccgaagctgctgttgacgcagaagatgaatcagcagcagagaagagtgagaagaaaaagaaaaagaaggataagaagaagaagaacaaagacagtgaggatgatgaggaatgagatgggtttgcgttatggtgctttttaagttttgaactcttttgattttgcggtatctatctactctggaacaaagtgagacaaaaggcattttatgcttgtattctacgtctcgcttacgttaccagattttatgtttttgtaaggttagtttcagttctaagcagattctcccttaagataaaatgactgtggtctctctatctgtaattggtctttgccgtgctt

SEQ ID NO: 139118 - DNA, 512 bp, Arabidopsis thaliana landsberg
acaacaccaatcacacttctcaaaaaagatcagagatttctagatccttcttcttctcctgcaaattcatctacctgaatcttccaactttataaatcgatcatgatctccgtcgtaatcatcgctgagttactagtagagtacacgacggctctcgcgaaactaaccgccgggattcttccatcgagacggcgaggcgatagtaacgttgtacggattggtggtttctctctgccttgtccttctccgtcgagtagtagtactagtcgatcatctgcgattccagatttctcttcttatctcgttgatttctgatcttggggaagacgaaacagattttgttttcttctctctcttttttttaaatctattcgaagattggattggacggctgagatttttccatgtgtgtctcttctgtctccctctcttcctctagattttaaaatcgcttattagatctttgtaaatcggtatctcaatataataatagtggttatgaatttttgatg

SEQ ID NO: 139119 - DNA, 362 bp, Arabidopsis thaliana landsberg
catcatttcatcatcaccattcccacacatgtttcaactatataacaaattttaacttttgactcgttaatgatgccaaatccgcacgctcagagcaacataagcaacgacttcttgtggtaatactattttattatcatcagattttgtttttttttccgggagtttaagacatctttattaggtgtaatatataatattttcttgtataatggatcttccatcgtccggattatcactaacatcggctgacaatatcagtactagcatgaatattacttccactacaagtccttttttctttcacaataagatatagaatgattgttggtgttaatttgatacataaataaccaatatta

SEQ ID NO: 139120 - DNA, 1800 bp, Arabidopsis thaliana landsberg
cgtaacagtataactgtataaggtctcattttcgtgcgctctcgtcgcgattactctcttgagctctctctctctctcttctaacatcggtcttgtattggtgcttattggatatctccggcgaaagaaacgagtttcgcggttagattttctttatcgcttaccggcgaggaggatgatcgtttcttcggtaaggtcgattaatcggttctgttttcgaagatgttgttgttagagttagatccgcatggttttggtgatcgttttggatcgaagacgtggttccacagacgcaaaaaatgccgtcgtctcttgctttgagatttggcttctgaaatctttcctctttcgttctcgttgaatcctaatttttgttttgtcttttttagaaatttttggtctttctaatcctggggataggttacagtctccgattgtaaatagaaatttgcggcgaggttaggaaaagttgtacagatagagattgagctctgaaacacatctcaggaacattttttgttccttgtttaaaaaagttttttttttgtgtgtgtttctctgggttggttagaaagtggcgaagatgaatttgggtgcggccgaggaagaatcggctcaggagattcatttaccagctgatatcaattgggagatgcttgataaatccaagtttttcgttttaggcgctgctttgttttcaggggtatctggagctctttatcctgcggttttgatgaaaactcggcaacaagtgtgtcattcgcaaggttcttgtattaaaactgcgtttactcttgtgagacatgaaggtttaaggggattgtacagaggatttggaacttctttgatgggaactatccctgctcgtgctttgtacatgactgccttggaggttactaagagtaacgtaggctctgctgctgtcagcttggggttgacagaggctaaagctgctgctgttgctaatgcggttggaggtttgagtgctgcgatggctgcacagcttgtttggactcctgttgatgtggttagccaaaggcttatggttcaaggaagtgctggtcttgttaatgcatcaaggtgtaattatgttaacgggtttgatgcatttagaaagatcgttcgcgctgatggaccgaaggggttatacagagggtttgggatatcgattctgacttatgcgccgtctaatgctgtttggtgggcgtcttactctgttgcacagcggatggtttggggtggaattgggtgttatgtctgtaagaaagacgaagaaagcgggaacaatagtaccacgatgaaaccagattctaaaacgataatggctgttcaaggagttagtgctgcgattgctggaagtgtttctgctttgattacaatgccactcgacacaatcaagacgagattgcaggttcttgatggggaagatagtagtaacaacgggaagcgtggaccgagtattggacagactgtaagaaacttggttagagaaggtggatggacggcttgttatagaggattgggaccaagatgtgcttcaatgtcaatgtctgcaacaactatgatcactacctacgagttcttgaaacggctttctgctaagaaccatgacgggttttattctaaatcatagtgataacaactgagaatccacatagaagaatcttttatggaaatgtctctagttttcttacttatcttgttctttatctagctcttctgctatttcatttgtttccagtcatatgtaaggaatgtgttaaattcagttgtttttaaataaataaatgttctttccac

SEQ ID NO: 139121 - DNA, 387 bp, Arabidopsis thaliana landsberg
ctcacttcccttctccaacctttaaacatttctctcaaaatggagtcgtatcactttatccacctcttccatctcctacgccaaacctctttcaccgctcctcctcacggcggagcaaccttccttcatcctccgcaacatcactctcacctctcatccttcccaaatcctcgccattattggccctagcggcgccggaaaatcaactctccttgatatccttgccgcaagaacctccccgacctcaggctcaatacttctaaactccgtccttattaacccttcttcttaccgtaaaatctcctcctacgttcctcaacacgacaccttcttccctctcctcaccgtctccgagaccttcactttctccgcctctctcttgctccc

SEQ ID NO: 139122 - DNA, 367 bp, Arabidopsis thaliana landsberg
cttcaatcaaaatcatgaacattttaaggtggtaacaaatttcgtttgagacatctctgtagtttgtttaaccacatacaacttttttcttagatagcattagcaaataccattataaacttctttcagatcctcagacttttagatgtttgattccttagctttgtataattagtttaaccttatgttttgatttgaattacatgggttttaattaataatatacttgatgacagttctcgcttggttggacttgttccaatgctgatcaaaattgatgctgcgaattccttgattgaggattatgccgcctgccttgagggacgacttgaagagggtgaagttgtagagaacagttgtgatgatc

SEQ ID NO: 139123 - DNA, 280 bp, Arabidopsis thaliana landsberg
agtaaaggtgaagattttctgtgctataatgtcactgttgtcgacactttctcaggacaatctgccttaccattctgccaatccagaggtatttatatgcctctcatcatcttatttgaagcaaaacattagttccattgtcgaaattccttggtctgcgtagtctgttttctgatggctggttttataacgtaaaatttgggttatacttatttttgtgcagataattggaaatgaattgctgttctttggtgattcatcatacaagcaggaacttgtc

SEQ ID NO: 139124 - DNA, 591 bp, Arabidopsis thaliana landsberg
gtaggcaagcaagtggtatcatcaacaaacaaagcacttctcttttgattcgattctctctttaccttgaagcttcaatatcaaccaaatcttttttctcaaaatctcaaagaatctctcaaactcagtctcctatctgtctctctgcaaactattaccaaccaggttagattcttgatctcaaagtttccatctttttattttatgtcggttgctttcgctgagttctggtttctttgattttcttagttacagaacacaacttactttgttttttggtttgggctgtgttgaaaattgagcttagggtttatgtaacagttgtcttagctcatagttacggttaaaaagctctcaactttgtctccctaatgataattgaattcaatcttgtttatgattttttctctattgggtcgatctttaactgaatctatctacataaagatccaacctttttaagaatcttaggtttcttatcatcttgttcaaaactaagattctgttttttggtgtggcagataatttagatatggaagctactcagaaacatatgattcaagaaggatcttcaatgttttaccatcaacc

SEQ ID NO: 139125 - DNA, 1842 bp, Arabidopsis thaliana landsberg
tattcttgtgatcttgtcttgacgaaaaaatggacgatgtgaccgtgatttcttcgagcattgttcaacccggaaacgccaggcattcgggtcgggaaaagatccatctcactccatccgatcttagccttctctatcttaattaccctcaaagaagtctcctcttccccaaaccctacccggaaacccggttcatctctcggttaaagtcctctctctctacgtctctagagatctacttccccttagctggtcgtcttgtcaaagtcaacaaccatgaagacaatacggtgtcgttttacatcgactgtgacgacggccgtggtgtcaaatttgtccatgctatagccgaatctgtctcggtaagcgatatccttcaacctcatggctctgttcctgactttttcaggcttttctttcccatgaacggtgttagaagcatcgacgggctctcagagcccttacttgctttacaagtcaccgagataaaagatggaatcgtcattagtttcggttacaaccacttggtggctgatggttcttctatgtggaactttatccacgtttggtcaaagctttgcttgaatggtcagtgggagattcatcagcctctagtcctcagaggatggttcctcgacaacattgatttccctattcatattccggcttcagagatagagacagagagggcaagaaatcgtgaagtttcaactaaggagagagtttttcacttcacaaaagagaaactttcagatctcaaagctaaagctaacgacgaaataggctcaagcgacataaaaatatcatctcttcaagcagttttggctcatctatggcgatcaatagttagacacagtggtctaaaccaagaagaagagagtcgctgcggagtagcagcagattttaggcagaggctaaaccctccgcttgataaagactgttttggtaatgtagccaatcttgggttaactacagccacagtgggggatttgctcgatcgtggactgggatgggctgctttgcaaataaataaaactgtgaggttgcacacgaatgaaaactttagaactttttctgagaattgggttagaaatggtaagatcccaagaattgatgttagaagtagaatgggtgatcatggttttatggtcagtaactctccttggttccaagtgtacgataatgatttcggtttaggtaaaccgatggctgttcgagctggaccgagtaacagtattagtggcgaactcgtgttttttcgtgggattgaagaaggctgtattgatgttcatgcgtttctattgcccgacgtacttgtgaaactactggctgacgtggaatttctggagaagtgtggctagtgtatgatttgattggttgagttattaaattagtgtttttgttgagttattgaattagtgcttttgttattgtctgctaggttatgatatccttcaattattgaatttattaatgttgctaacagttctgtgtttacaaacgacggaccatacacatgcttgtttagtggaaaaaagaagacaaagacaattattgaattttatgtttgttatttactttgttgtcacttgtcagctagtagtttttttacgtaaactagtgcttaattttaaagtttgttatggggcggtgcgtaagattatctttgtcttaatttacctaattttaaattacgtaagattggtttatccacatttatgtagatacaatttataaatgtaacacgcacatgttaaaagagaaaaagaaaaggaaaatcatcactcattggtgagtatacaaaggccaaagcacattagaatatgtgagtaaggtgcctcg

SEQ ID NO: 139126 - DNA, 270 bp, Arabidopsis thaliana landsberg
ccagaaacacatgaatattaacattgcccatgctgaactattccctgatttttcgggggcggtattcccttggaccaaccccaaagaaaggatcaagtcaaggttctcgtttttgccgtatgaccagcccatgttgctgtctgatatcgtgatcatacctgcggttacatgaactgaacctgatgattgtgctgcgtgtaaccggatagctgcatcctttgtagggaactcagaagcatttgcaagcggagcaggaatagcacccaacat

SEQ ID NO: 139127 - DNA, 414 bp, Arabidopsis thaliana landsberg; identical to SEQ ID NO: 93228

SEQ ID NO: 139128 - DNA, 202 bp, Arabidopsis thaliana landsberg
cgggcaaaacaaacagagagcgagtcacgcgccgagttttcctcacttgttctcaataaatctctctctctttcttctctatcgctttcatttttctcctccagatctcgattccaatctctctccctctctacttccttcaacaggtttggtttctccgatccatcgtcactctcttcgttagatctgttcatttttgctt

SEQ ID NO: 139129 - DNA, 930 bp, Arabidopsis thaliana landsberg
cttcgtctacaaaagctctctgctcaatcttcttcacccaatgcttcttcttcttcttcactcgatgctcttcttcaagattactcttttagagccttgcttcgtcctcgtaccggcattctctacgaggctactactgttccttccaatttgactgggatcaaactcgctgctatgagactcagaagcggaagctttagaaaacgtggagtcactccttttaatgagttctcaattcccagcggcgttatcgtcaagccgtatgtgacaaggcttgttttggtttatcaaaacctagctaatttctctcacttgtattaccctttgtctggttatgattatgtcgctcctgtcttgggtcttctcgcttacgatgctaagaatctctctgcgcttaatttgcctcagcttgatttaagggtgtctaatgatcctatcagaatcgatttctctgatctggaacgaatcccgcaagggtctagtgctaagtgtgttagattcgattctaaaggtgaagcgagtttcagcgattcgattcagcctggaaacacatgcgagactgagcatcagggacatttctctgtggtggtgaaatctgtggcttctgctccgagtctagctcctcctgggattgagagtaagaagaagaagaagagctctgattccaattccaagacttggatcattgttgggtcggtggttggtggattgatactgttggggcttttactgtttctggttttgagatgtcgaaattacaagaagcaagagaaaatgagggagatggagagagctggagagacaggggaagctctgaggatgactcaggttggtgaaacaagagcaccaactgctaccacgactcgtacacaaccaatgcttgaaaccgaatacgcagcttaggatacttttgtgtacatcatcatcatc

SEQ ID NO: 139130 - DNA, 52 bp, Arabidopsis thaliana landsberg
agggttttgagatgattgcaggcccattatttattacagatggcaattttct

SEQ ID NO: 139131 - DNA, 251 bp, Arabidopsis thaliana landsberg
gtttttggtacggaaacacttaatttgtgtgtaatcttaatttttccattaattgtagcagaactttttcgttgtcttgttgttcaggtgaggcagaaaatggtttggagagacttcatcattgtgcagaggaggagttgaaacagtttatcgggaaaattgaagacccatcaaaaaatttcggtgagctccgagcgaaattaattgatttgactaaagcaactaaaacctacttcgaaaatctggtgaaa

SEQ ID NO: 139132 - DNA, 322 bp, Arabidopsis thaliana landsberg
gttctgcagatgcagagaaacattaagataaacttctctgactgcatccaaaaccaaagctacaaaaagtatcaatcatgtcataccgaatctagcaagatgttagatgctttgaagtctcggtatataacttgcggttgagcattgtgaagaaaagcaagtcctctagctgcaccaagagccatacgaacccgcgtgttccatgaaagtggctgatagaatgttcctcctattatgagaaaaaagaaagaaagattaaccattgtgtataacaagttcttccatgagcttctttatctttgaagatttgaacttacttctg

SEQ ID NO: 139133 - DNA, 79 bp, Arabidopsis thaliana landsberg
gagaaagagcatcgttttgagcaaatgagtaggaacatggaagttaacgcaggcagttccggcgaaattccgtctccaa

SEQ ID NO: 139134 - DNA, 365 bp, Arabidopsis thaliana landsberg
ggaaaatggcagctaggttattgttccgtcgaagttctcaaatcctccgatcaattcaacgaaatcctcaaatctcatcgtcattcgaatcaccaccttgcccgatttttcactcattgaccaccgcctcaccagatccatcgcgattatcatccttaaccttcctccgatctctctccatcgctcgtcgcggtccaacacgtcctaagaaaatcgatatcggagccaaagcgcgtcagatgcagaatcgccgtttatggacctacgcgctaaccttcagctgcatcgccggattcgtagttatcgtccttaaccaatttcaggatcagcttgtcttctacctaacgccatcagacgctatggag

SEQ ID NO: 139135 - DNA, 209 bp, Arabidopsis thaliana landsberg
gagagttctcgtcgtccttatctcgatcttggttgattcgctctccgatcggaaattagggcttttgttttctgaagatgacgactgcagcacgaccaacctgggctccagctaagggaggtaacgagcaaggtggtgctcggatctttggtccatctcagaagtattcgtcccgtgatgtcgccgctcacacaactttaaagccaagg

SEQ ID NO: 139136 - DNA, 239 bp, Arabidopsis thaliana landsberg; identical to SEQ ID NO: 131516

SEQ ID NO: 139137 - DNA, 160 bp, Arabidopsis thaliana landsberg
atttttgtactatctaaaaatggtgatgatctgttcgaaaattcgaaacatgatcttatatattgaactagaaaaaatagatatatatgaattttagctgtaaaatttttgtacaataaggagaaaaagatttagaagagtcaataaaaagatgatgttt

SEQ ID NO: 139138 - DNA, 484 bp, Arabidopsis thaliana landsberg
gtcgaaaatcaccaacccgattataccatctcttttagtctctcatctctacttctctaagctaaccgaaaccttttggtgggaatcgtcgaaagttttcaagacacctgaattgcatgtatgttgaggtatatatataaatgtatagattttctctgagtatttctcttcttccctcgaaaatttgatgaaatttggaaccttttcacttcccagacaaattccaacctgcaaaggtgggcgctttacacgagttttgcaatctatcggatcagttattagagaattttcagcatctgcaaatgctttgcaagactgttggaaaaatgggaatgaaagtaaagagattgatgatgttcacacacttttcagatattgcactaatttgcaatcagccaaatgtctccacgcacgtctcgttgtctccaaacaaatccaaaatgtttgtatctctgctaaacttgttaatctctattgttacctt

SEQ ID NO: 139139 - DNA, 1218 bp, Arabidopsis thaliana landsberg
ttctcactcccaaaacgatgtcgtctctatctcgcgttctccgtggcaccttcaacacttgcccgatccgccgtttttcctccgccgccaccgtagtctccgaacccaccgcagtcactgccgcaatctcgcctcctcaaaagtcactaaccagtctcgtgaatggcgaacgaaaccccaaacggatcgtggagaaattcaagaaggcatgtgagtcggagcggttccggaccaacatagccgtgtacgatagaaccgtgcgccgtctcgtagccgcaaagagattacactatgtcgaagagattttggaggagcagaagaagtaccgcgacatgtcaaaagagggattcgcggcgaggatcatttctctgtatggaaaagccggcatgtttgaaaatgcacagaaggtgttcgacgaaatgccaaacagagactgcaagaggtcagtgttgtccttcaatgccttgcttagtgcatatggactttccaagaaattcgatgtggttgaagaacttttcaatgagttacctggaaagttatcaatcaaaccagatattgtatcttacaatactttgattaaggcattgtgtgagaaggattctttacgtgaagctgttgcattgcttgatgagattgagaacaagggactaaaacctgatatagttacattcaacacacttttactgtcttcgtatctaaagggacagtttgagctaggggaagagatatgggctaaaatggtggagaagaatgtagcaatagacatcaggacttacaatgctaggctgcttggattagccaacgaggcgaaatcgaaagagctagtaaatctctttggagaacttaaggctagtgggctcaaacctgatgttttcagtttcaatgctatgattagaggatctatcaacgaaggaaaaatggacgaagctgaagcgtggtacaaagaaattgtgaagcatggttatcgtcctgataaagctacctttgctttattgcttcctgctatgtgtaaagcaggtgactttgagtctgcgattgagctcttcaaggagacattcagtaagcggtatcttgtcggtcaaacaacgttgcagcagttagttgatgaattggtgaaagggtctaagagagaagaagctgaggagattgtgaagattgcaaagaccaatgatttcttaagttgaagctagatttgccgtcccaggaagagtaagtcat

SEQ ID NO: 139140 - DNA, 133 bp, Arabidopsis thaliana landsberg
ccagcagcaccatcgtatggttcaaacatggctcaacaacagcaatatggttatgcatcaagtgcgcctactcagcaaacttatccttcatatagctctgcagcaccatctgatggttataatggtacacaac

SEQ ID NO: 139141 - DNA, 364 bp, Arabidopsis thaliana landsberg; identical to SEQ ID NO: 104203

SEQ ID NO: 139142 - DNA, 183 bp, Arabidopsis thaliana landsberg
agaagacatttttatacaaaagagtttatcattatataagtttcaaactttgaagatatggcatcggcttttagatcatccacgaggttgattcttgtattaggtatactgattttgtgttcggtttcttctgtccgaagctggagcaaagaaggtcatattcttacttgtagaattgctcag

SEQ ID NO: 139143 - DNA, 58 bp, Arabidopsis thaliana landsberg
tcgagaaatcggcgaatctgagaactaagcatcaacaacaagaacaatgagagcgaag

SEQ ID NO: 139144 - DNA, 1673 bp, Arabidopsis thaliana landsberg
gctctcgtcaagacttatgtaagtgtacccttttagaaccctaaattttgctgtattttgtttctttgcgaaccagtttgatgttttctcatgagtaatttcgagctaattgctattttatgatcctatttagatcatttttgtgcttatatgactaactagcttcgggtgactctgcctcactgtttgaataagtcggccaagtgaaaaaaacgttcatagttatacttggtttgatatgttgcgtctccatatgtttttttgctgaccttgttaaaatctcaatccttcgcaggggttagtgccttactctgcacctatcaagaaagtggagaaagaaattaaggaactcaccgagaagatcaacgatctatgtggtttgtgcacactcaaatagtggtgttactttcattagtgacttctatttaccgaatgattaaattgcatatacgggtaacttgcaggtatcaaggagtctgatactggtttagctcctctcagtaagcaaatgatgcaagaggggcaacctctccaggtgggttatgtttcctgttttagatatatcccgatcgatctcctcatggatatcttttcgagagttcctgcaaagtctatagctaggtttcgttgcgtatccaaactctgggaatccatactttgtcgtcctgatttcaaggagttgttcatgactatgtcttcgattcgtccaccgttgcttcttttcaccttccaagatgatgatggcaatttgttcttcttctcttcacctcaccctcagattccatgtaacgagaatacgtctcttgtacccacccgttatcatgttcaacataccacagattctttttctgaaattggttctcctctttgtggattcatctgtcgccgaggtaagagaaatctagatactatggtaatttgtaacccagtcacgggagagtccgtatccttacccaaagtggaactgaagagtattaatactgagacaagaccttatttaggatatgatccggtccgcaaacagctaaaggtattgtgcatcaagtctgatgatatcccaaatacgtgtgatgagcatcaagttttgacattggagaatggaaaccatttatggagaacaatccaatgcaaaccccattatcctaaatctgatggaatatgcatagatggtattttgtattatacagctgggttcgatatgcgtgcaagggtttctatggtagtgtgctttgatgtgaggtctgaaaagtttagctttatcaacatacatgtattcatgttgatgaatgactcttgtactctaatcaactacaagggtaaactaggtgcacttcagtttacatgtttgtctccaaaacgtcttaggttctgggttctagtaaatgctgagaaaaatatatggaccaaatgtatctatgcattgcctcctttgtggaacaacttagttcagcatacggagttagccattgttggaatgactgatggaggtgaagttgtgttgtcacagtactgtctaatatacgcattttacatttattacttcaaccttgagagcaagagtctcacaagagttcaaatacaagatgttgaaatgttcaaacgtacgagagtttacacctctctaggctatgttggagattttaaacttatgtaagtgttcaactattggttta

SEQ ID NO: 139145 - DNA, 347 bp, Arabidopsis thaliana landsberg; identical to SEQ ID NO: 113312

SEQ ID NO: 139146 - DNA, 152 bp, Arabidopsis thaliana landsberg
ctttcactcttcccttctctctccccaaaataaatcagaaacctatcaacattcttcaacagccacaagtaaaatttatagacatttctgtctgaagaagaaaaagattgaatttttttgcttgttgtgggttctttaatggatccaagaac

SEQ ID NO: 139147 - DNA, 96 bp, Arabidopsis thaliana landsberg
tggagaaacactttagcacggtgcgacaagatggcgagctcagtgacgctgcttctatggagtcttcttcttctcggtacactaagcgctattcag

SEQ ID NO: 139148 - DNA, 316 bp, Arabidopsis thaliana landsberg
aaatggttcgaagatgatttggttggggaagtcatagcagaggagaataatgcgagttctaagaaacggaagagagaaaatcattctaaagggaccagagatagacgcaggtgtaaaccattgtccagacgaaaacagagaagcaatgtcaaacgaagaagataatatcaaggaaaatcaagaactcaaagcaaaatgataagatgataattggtccggattcttgaaaattgctttcactgtgactctagtttgtgtttggtcatcgttgatgcccttaatgaaccttggatagtattttgccaatttaaaggtt

SEQ ID NO: 139149 - DNA, 1070 bp, Arabidopsis thaliana landsberg
atactttagttgcagatttttgtaataccgctatctttgatgttgtttctttgagagtagcttcaactgtaatcttctacaacaaatgcaaacacccagtgtggccaggtatccaacccagcgccggtcaaaacttactcgccggcggtggttttaagcttccagctaacaaagcccactctcttcaactcccaccactctggtccggccgtttctggggtcgccacggctgcaccttcgacagatctggccgtggtcactgcgccaccggagattgcggcggttctctctcctgcaacggtgccggcggtgaacctccggccactctcgccgaaatcactctcggccctgagctagacttctatgacgtcagcctcgtcgacgggtctgtaaatcttacatcaaatctgctttcttttttacacaaacttaacttacttttttcactaattttgttctttttgtttgtttgttgtaatgacagttataacctggccatgtcgattatgccggttaaaggttcaggtcaatgtagctacgccggttgtgttagcgatctaaaccagatgtgtccggttggtttacaagtccggtcacgtaacgggaaacgtgtagtagcctgtaaaacgtgcttgctctgccttcaattcaccacagtactgttgcaccggcttgttcggtaacccacagtcttgcaaaccaacggcttactccaaaatcttcaaagtcgcttgcccaaaagcttactcttatgcttacgacgacccaaccagtatcgccacatgttccaaggctaactacatcgtcaccttttgccctcatcatcgccattaaattagccagtaaagaagaagaaacatttctctattagcaacaaactcttgtcatgtttcgaattcttgagtttctatatctacttttgtaacactatgattgaatgcagatcctattatcaatatcaatggaactcaaccaacttagtgatgtgtcttgtgagtgttaatctccaaattctaaatccttttatgttcagtggcttatgtactagacaatgcaagattaatgctatt

SEQ ID NO: 139150 - DNA, 681 bp, Arabidopsis thaliana landsberg
gacctgcgaggtgttaccgtcagatcaagggtaagccatacccaaagtctcgctactgtcgtggtgtgccagatccaaaaatcaggatctacgatgttggtatgaagaggaagggtgttgatgagtttccattctgtgtccatttggtgtcatgggagaaggagaatgtgtcaagtgaagcacttgaagctgcccgtattgcttgcaacaagtacatggtgaagtctgctggaaaagatgcttttcatttgaggattagggttcatcctttccatgttctcaggattaacaagatgctttcgtgtgctggagctgataggcttcagactggtatgagaggtgcttttggtaaagctttgggtacttgtgctcgtgttgctattggacaggttcttttgtctgttcgttgcaaggatgcccatggtcaccatgctcaagaggctcttcgtcgtgctaagttcaagttccctggtcgtcaaaagattattgtcagcaggaaatggtatgttcaaagattgatccttgaatcattttgttgtttgattgttatatggatacaagtaagctaactcatcaagtctttgacttttttttcaggggcttcacgaagtttaacagagctgacttcaccaagttgaggcaagagaagcgtgttgtcccggatggtgtcaacgctaaggt

SEQ ID NO: 139151 - DNA, 519 bp, Arabidopsis thaliana landsberg
cacacacacacaagtattagaagaacttaaaccctcttatgttctcttcctaagcttgagtttaattcaagcaagaaacagatttcgagagaagagtaagcacagagatagagagaaagaaggcaccaaaccctaaatgggtctaaacccaagattttaatcttcttttcgtattttgaggcaaatgccaacactatcattcccttcttcctctataaagaatcatcacttcttcttcttctcaatggatccttgggatacttataacataccactagaccaccaacaccgtctccgtaaccgccgtgaccaccgtcatccttccttctcctctactctcctcgaccaaatttaccgctccatcgacgattcctctactaactcctcatccatgagaaaaaccaaacatcagaaccgcgaggacacgcgtgtttctgctaaccgccgcgacgatttcaacagatccaagaatcttaaaaccatagaacctgttttcttcaaacattcaagctcaagctc

SEQ ID NO: 139152 - DNA, 77 bp, Arabidopsis thaliana landsberg
atcaatccaactgaggaaaaaaaaagaacagtccaaattagctagagttgtctttattatcatgcggaggaaaaaag

SEQ ID NO: 139153 - DNA, 102 bp, Arabidopsis thaliana landsberg
acccccaccataaccaagctctacgatagattttcactcggaaataggggcatatccgtcatctaaagtaaaacatatttacggtacttcctgaaaaacttt

SEQ ID NO: 139154 - DNA, 124 bp, Arabidopsis thaliana landsberg
aacaaaagaacatgattttatttctgtgtatttagaatatatgcagtagatgtattaaatgaataaaaacctggtctatatttagtgattttgtggctgtgtctcatcttgggtcttggcttta

SEQ ID NO: 139155 - DNA, 171 bp, Arabidopsis thaliana landsberg
tgaggattcttaaaattttgatattttcttgatttgtagaatgcttcgtttacgtaagcaacagttttgttcgaatttcgactcatacttatatagtaaactgtagcaaaagttcggtttatcagaatcttaaaccattacgtatgggaaagtccggtttatcaccaaacc

SEQ ID NO: 139156 - DNA, 589 bp, Arabidopsis thaliana landsberg
ggcgaaatcatcatcttctccggcgatgaagacgacggcgacgtcgtttgtaacgggagagagagttgtagttttcgtcgtggtttctcgtattctcttatctcttcctttatcacttatctcccatggcttctccctcttcctcctctctctctccgccttcctcgtcgagatccgcgtcgagacttctccgtttcttctctctcatttcagctccaggtgaaaaacccttaatctaatttcaaaattccgatctcagaatcaataaagtttcaatcttttgggaagaagatttcaattgaagatgcgtttttttcgttataattgagacgcggtgcgtcttcagggatattactaggagctgtgacacttccttctgttatgatatctaagttagttcagctttcaagagctatttcaatccatgaagctgaacaagatggtaactttcacagcttttgtattgggctaatgttagtatttagatcattaacatggtttgatttgtttgttgtgtagagcttgcacatgtgacaatgcagtattgggcagcatcggctagttgttgtgctatacttatatatctatc

SEQ ID NO: 139157 - DNA, 1417 bp, Arabidopsis thaliana landsberg
atttttgagactcctaaatcattttaaccttcttcctcaatcgtgaccatcaccaatgacgctacacgtcattgagactgcccgagtcacccccaccgactactcagtcatcaactcagccaacttgcacaaacttcctttaactttcttcgaccttccatggctactattccagccagtcaaaagagtcttcttctacgagctcaccgagtctactcgtgaccatttccactccattatcctccctaagctcaaggactctctgtcccttatcctccgtaactatctccctctcactggccacatcacttgggagccaaacgagccaaaaccgagcataatcgtctcggaaaacggcgtcgttttggtgactatagccgagagtgacgctgacttttctcatctttccggttatggacaacgtcctttgtacgagttacatgccttggttcccaagttaccggtttctgatgactcagcgaccgctttctccatacaaatcacgttgtttcctaaccaaggattctccatcggtgttgcagcacaccatgctgttttagacgggaaaacgtcaagcacttttatcaaagcttgggctcaaatctgcaaacaagaacccccaagcatgccggagaatctaactccatcttatgaccggtctttgatcaaatatccgacctatcttgatgaacagatgatagagttagtgagatctctcaaagaggacaaaaccaacatcagaagcttgacttcgcttcccgctagtaaactcgcagacgatgtcgtgttagccacgctagttctctctcgggctgatattgagagacttagggaacaagtcaagaacgtgtcaccgagcctccacttgtcgacttttgtcattgcttacgcttacgcgtggacttgcttcgtgaaggcacgtggaggtaataaagacagatcagtgagtctcttgttcgtaggagatttcagagaccggttagatccgaagcttccggggacttacttcggaaactgtatgattccggtgggttgttataaccgtaaggcggcggagtttatggaagagaaaggatttgtgacggcggctgagattattagcgatttggtgaaagggttgagttcaagaaagatagataccattgcggacactttcgttgaagggtttagttttcagagttggagtacacagtttgggacgatagccgggtcaacccggttgggagtatacgaggcggatttcgggtggggaagacccgctaaagttgatattgtctccattgaccaaggagaagcgatctcaatggcagagagacgtgatgagtcaggtggcgttgagattggaatgtgtttgaaaaagactgaaatagatttggtcgtgtcttttttcaacaatggtttacaaagctaaactctt

SEQ ID NO: 139158 - DNA, 432 bp, Arabidopsis thaliana landsberg
ctctgtttcaactccaaatgttgctccctttcttcaagtttcttttcctttaactcaagaaacttgttcttcacttcagtctctctggctgctgcttcatgtttcagttgaaagttgacttctttcttctccagctccatcgatttcccttggatggtctcattaagcaacctaagctcattctccctggcttcaagttgcttaagagatgtttccatcagctcagtctcttttctcattctctcagactctgttgtttgcttaagatcaaagtctttgactttcatgtctaaatcacaagtcttggcatcgatcgtcttagaaatcaaagcaacctcatttttccttgcttcaagctctgtcattagctcttcatgcttcttcatcatcgaatcatggagcgaaccaagaaagttctcttgggcgttgagc

SEQ ID NO: 139159 - DNA, 190 bp, Arabidopsis thaliana landsberg
ctctctctctctgtgttttttttaactccgtttaaattttccgtctgaattttacaaaggaacactaatgtcagcttttgacggcgttgaaaatcaaatgaacggtccagattcatctcctcgtctctctcaagatcctcgtgagcctcgctcattattatcatcttcttgtttcccaatcaccctcaag

SEQ ID NO: 139160 - DNA, 469 bp, Arabidopsis thaliana landsberg
caaaaatattggcctctttctctctttctctcttgctctctttctttgttgggttgatctcttcttccatggcgatccctacggagacacaacaccaggagaaggtactctttcaccattccatgattccttcgtgtcgtttttagccaaatcttttttccgtttctttcgatttttctttgttcttccttttcttttgcacgattttagggtttgaaacttttgtgaatttgaacaatcgatttatgtttggaatagaaagagaatcaattagggcagatgttcaaaaattgctcaatttcaaagcagattcgtttctagcgatgatctgaaaattggtttttatcaggaggcttcagatgcttctgcagcagctgcacaaaagagatggactttaagcgatttcgacatcggtaagcctcttggcagaggcaaattcggtcacgtctatctcgccagagaaaaacgg

SEQ ID NO: 139161 - DNA, 73 bp, Arabidopsis thaliana landsberg
tgtgactaaaaacattttatcctcagtatctatgtattgttattattcaaatacaattttgaagcttagtttt

SEQ ID NO: 139162 - DNA, 177 bp, Arabidopsis thaliana landsberg
cttcttctctcttcctcatatttattactctctctttcacaaacacacagaaaataaataaataaaattaattaatgtgagaaaatcaattcaaaaatttggacatacgtatcatctgagagaagaagggtttggtgaataccggcgggtggaaccgacggcgatggcgaagaccgg

SEQ ID NO: 139163 - DNA, 150 bp, Arabidopsis thaliana landsberg
ttacattgggatggaagactttcacattcaagagtttgtttcaagttttgagttctttgattctgaccataaagcaatgtttcttagttattacttatttttgatgattaatttttccctacttaatatcaagagtgtagatttgctcct

SEQ ID NO: 139164 - DNA, 92 bp, Arabidopsis thaliana landsberg
ctgcttctgcttgaactaattatgtcctttgctactctcacactcaactttgggtttattaatgtcattaaataaaattaaactttttcctt

SEQ ID NO: 139165 - DNA, 390 bp, Arabidopsis thaliana landsberg; identical to SEQ ID NO: 87233

SEQ ID NO: 139166 - DNA, 483 bp, Arabidopsis thaliana landsberg
acggaaacgggtttgattctcatgtggttccctttgataatattgggattgtttgttttgaaatgggtgctgaagagagtgaatgtttggatttatgtgtccaaacttggtgagaaaaaacactatctgccaccaggtgatttgggatggccagtcataggcaacatgtggtcctttcttagagctttcaaaacatctgatcctgaatccttcatccaatcctacatcaccaggtgctctctcttctcaaactttttgctttagttgagattttgtttttgctctcttgcttctccatatcatgaattgaaaacttagacatactctccgtttcctcaatgatgcaggtatgggcgtaccgggatttataaagcacacatgtttgggtacccatgtgtactagtaacaacaccagagacttgtaggcgagttctaacagatgatgatgccttccacataggttggccaaaatctaccatgaaa

SEQ ID NO: 139167 - DNA, 1830 bp, Arabidopsis thaliana landsberg
aaaatcgataaaaaccaaaaaggaagaaaaacaacaacagggcttctagtagtagtagtagtagtaccactcatctcaatttcaacctccttcatattcctttctttttttttgcctttcttcttaattaaaatcttgtttttttttgttgtaaatgaaaagaaaaaaaaaatcgaaacttgaggattctacagcgaatcgcgtgcttatgtgtgtttctgccgttgatgtgtttatcaaagctttttttctttttattatttaaatcaagttaatttaaaactaaattaatacaacaactcttgaagggctttaacgagcttttggtctcgtgttcgtgttgttgtctttcagatccgcaggctggttgcatgattatcatatcccccagattttttttttgaggaaccacttgtgttgagagtaaacatcttgccctttattgttttcaagtgtacagtccttgtcgtttttaaaaccggttcaatacttcaattcagattttttaatcccggtttactcgccgtccctgaaatgaatcacagaggaatcgaaagaacctttacgaggaagctttgactcgaaatctctctgaagaagaagaggagagacgaaactgttggcttagtttccgacgccgggaacgtcggaactccggtgaacagagaatggggctgcatttggctgctctgtttttcatcatttcaccactcttcgttttctcctctcaagtccagcagcagatcggttctaatcagaacttgatcaatgatctggactcagctaagctcagaatatctcaattgggtaaagtttgtttctttttgttcgtggtggttttgggttgaaccaccaaggcttctcttttttctttttctttttgctaattgtattgttttgtttgctgggaatcgattggctctgatcgtgtagaagctgttcttgaggcgacaatacagaagttggatggtaagaccctttacttgaaagagcgtgagaagttgatccaagttgctgaaactcagatccttgatttgcagtctgcttcatacattgacaaggttggtttggttctctaaggagaatctattgaacatttagttatgttaagtagaattagctaaaaggctttaaaaatttcctctgctgatgagggaatgaatgtggtaggacactcattagatcgtatgtgctagtctgaggctctcctatgataccgcctttctgaataatgtttactcgagaaaactcaatgccctattgagcttaatcattatagttgtagctgccacttctgtatagttgccacacctttgttgtaggatgtctaagtattggtgatacgaaaacttgcctggttgtatgataagtactcggctcgtaatgttttatccctcttctagttgtatttgaatcagtttataaacccttagaagattgtactgagtttgattatgttgctgctcttgaagtagggtctttgtttcttctgtttggagctagtttcttatctgaaatgtatattgtgccatcactttatcatggtagttgcattgctaacacttgttatttgatctcagagcggcttacctttggttcaaaagaggataagcgagttagaagaagaggtctgttcagtcatgtggctattctattctttagactagttctcaaaatgtttttttctattggtttatttcccaaattgtgttctgccaatgctggagctacttattcttcaactccactaatctaaagaacagggttggcaatggtaggtgaaacttctatgggctgccttgagaacaaccaacttcgagctacacgttt

SEQ ID NO: 139168 - DNA, 128 bp, Arabidopsis thaliana landsberg
aaaaaaaaaaaaaaaaaaaaaaaaaaaaaaaaaaaaaaaaaaaaaaaaaaaaaaaaaaaaaaaaaaaaaaaaaaaaaaaaaaaaaaaaaaaaaaaaaaaaaaaaaaaaaaaaaaaaaaaaaaaaaaaa

SEQ ID NO: 139169 - DNA, 114 bp, Arabidopsis thaliana landsberg
catttttttgttcttgtttactagagagaatgagattttgaatgagagattgatcaaaaagatgtgtatatattttggaagaggtaggagtgtttgttagatatattaagaaag

SEQ ID NO: 139170 - DNA, 394 bp, Arabidopsis thaliana landsberg
cttccccaaaagcgactgctctaatatagccattgtttcttaaacttgacgaaagacttttgagaacaaaaatagaaaatgtggccaaaatatcaacaagcctatacaaagtttgaagatgacaaaccagtcccggtcaagaatttcgatattatatttatataggttgcaagttgaaactgaggtggggttttccaaatgtttattttataactatgagaacagttctactgataaaggttatataattaattatcaattaatgaaaatgtttaatgtgaaagatttctcaaattcaaagaaaattaaacattgcaaagacttgttaatgttataatgctaaaagcaaggaaaactaagggaggttggtgtttagagttggatgatgtgacct

SEQ ID NO: 139171 - DNA, 111 bp, Arabidopsis thaliana landsberg
tttttttcttttggattagaagaaatgtaagatatgtaataatacaaaacaaatcatgtgatataaacgttactcagagaaatgctcatccttatcatgcagccatactat

SEQ ID NO: 139172 - DNA, 166 bp, Arabidopsis thaliana landsberg
aaaaagcgattttctaaagtctcgctctcttctctctctaacattcttcagagagggagactttatccttattctgccgtccagcatgattgctggttttccgttgccgtgttcttgtcgtccggtttcatgccgacttatgtaccaaatctccggtaagttaaat

SEQ ID NO: 139173 - DNA, 348 bp, Arabidopsis thaliana landsberg
tcttcctcttcatcggccattataaagctctgttttttattaccctgttttataaacagaggaagccctaaatttggattctctattctaaagttttctcatttcgctaattttggagaaaaacgattgttttttttaatcgtttcttcatttctgattcatttttcttggtttatgatctgttcaagtaaaggaacaatcttaatcgctagaggtaaaaattcaaatacaatccctagattacccctaaaagggtcatccacaaattacgcgaatcgaattcaaattcgaaacccaatcagtgtcaaaactttccggcgatcatcttcatcgtcaatggcggtggaa

SEQ ID NO: 139174 - DNA, 215 bp, Arabidopsis thaliana landsberg
gtaggcttgaagcatgatgacgacagtcgccgccgatctccaccgttatcttttcctgattaccgtttttcttttcttcctctgcgacaaaacctctcttgctctgaccacagacggtgttcttcttctctctttccgttactcaatcgttgacgatcctctttacgtttttcggagctggagattcgacgacgagactccttgctcttggcgtg

SEQ ID NO: 139175 - DNA, 164 bp, Arabidopsis thaliana landsberg
cgatggaaggagagaagcaattggaagaaactattgaagcggcgtttcagataatttcagccatgaatgatgagctttgtaatccgtctttgtggtctacttcagctaccccgagttccgccgcgacgacgacgggttctaatggttcggctctcgtttccgcc

SEQ ID NO: 139176 - DNA, 1382 bp, Arabidopsis thaliana landsberg
agccaaaaagctgctgaattggcttacttcttgcgtgtaccaattgaagtattttgaaatgaattaattaaatgctttggcagtaggaagaaaaaacgaaagaatttctttctttttttttttcaattgaatattcatctcttcttttatgctcgtttttttgatatatttgatagaaaagaaaaggagtttatttgtctcgaaattagtattgatcgaaaaaggggggaataacatcccggaaaccccattttttcttgattcaagttggaagtgtattctgagtctgtttctgtattctttctagattcaaagcaaagactcagtattgaatcaacagcaaaagataaaatggattcataggctcactatattctattcgaattagaatagaaacacatgctcgatagaaatattagatctaatagaatcaacaaatgaggtaggttcattaacaactcacagattcaaaatggcaaaaaagaaagcattcattccttttttttattttctatctatagtctttttgccctggttgatctctctctgctgtaataaaagtttgaaaacttggattactaattggtggaatactagacaatgcgaaacttttttgaatgatattcaatgaaaaaagttttctagaaaaattcatacaattagaggaactattccagctcgatgaaatgataaaggaatacccagaaaccaatttacaacaatttcgtctaggaatccacaaagaaacgatccaattcatcaagatacccaatgagtataatatccatacaatcttgcacttctcgacaaatctaatatctttcgttattctaagtggttattccatatggggtaaggaaaagatttttattctgaattcttgggcttcaagaattcctatataatttaagtgatacaattaaagctttttcgattctttattaactgattatgtatcgcatccattcgcctacggttgggaactaatgattggttatatttacaaagattttgggtttgctcattatgagcaaattttatctggtctagtttctacctttccagtaattcttgatacaatttttaaatattggatttttcgttatttaaatcgtgtatctccgtcacttgtagtgatttatcatgcaataaacgactaaaaaaagattcactgatccaattttaatctttcgtaccttatacatcataaccaaatcaaagtcgtatttactttactttttttacccatgagggattccttgtatatttcaacaaaaaaaatttgatttttttcagtaaatgtaaatagcagaattgtggctagggaagtatattatcgacctagctaactttattgtagaaattttcgggataaatgattg

SEQ ID NO: 139177 - DNA, 264 bp, Arabidopsis thaliana landsberg
ctactatgtgtttgtaattttggtatcagagctatggcagtctaaactttggctcttaacttctcaagtcgtgtatacatcttataactgttttctaccatatgctattatggaaagtatgctctatggttgccatattaatggatcctctacatcagaaatccgttttagcaagaaaaagagaacataaaaaaagaaatcaatgaggtcttagagctcgaagtaccttgagacttttaaggttgataagtgttttgccttagt

SEQ ID NO: 139178 - DNA, 57 bp, Arabidopsis thaliana landsberg
ccaagtaacaatataataatgaataagcgaaataaagaaaataatatgaaatacaag

SEQ ID NO: 139179 - DNA, 232 bp, Arabidopsis thaliana landsberg; identical to SEQ ID NO: 135132

SEQ ID NO: 139180 - DNA, 52 bp, Arabidopsis thaliana landsberg
ctttgatgaaagcaggagactttttgatttcgattttgattttgatttgggg

SEQ ID NO: 139181 - DNA, 170 bp, Arabidopsis thaliana landsberg
tcgatacattaaattggttttgctagaccaagtttttgaagatacataagtagaaattcatagaaatccgtaatgtgaacgacaatgtgaatttacaacagaccgaccaaataaccaacaaccccacacaggtcttttactctaatttttctctttagttttttttttgt

SEQ ID NO: 139182 - DNA, 551 bp, Arabidopsis thaliana landsberg
agctgaggatgaagataaagcaccatcggaggcacaagtggcatagctcaagaaagacttgcgatgatgacagtaccgaagatgtgagaagaaaacatttaaagcatcacaggcgcagtgaggtggtcacttcaagtgatagtgaggaagagagtggaagaagaaggcgaggcaaatatcacaggcacaacagaggttcagcctcctcgagtggctcggaagaagatagtgggaaaagtatgaagagaaggcaacataaaaggcatcgtttggctgagtcttcaagtgaggaagatggggcaatgagaaggacaaggcatcataaacatggcagagattcagcatcagagtctgatggaagaatgtaatcagatgagaaaagagagcactacttcgacaaatgaaaatggaaattgtctttgtctgtttcacatcataagaactgaatcttgtggtaaacatgattactacccagatgttgggacccaaatacgatgaatattgtgttgaattactatggtggcactctgttcttagattttcacttttac

SEQ ID NO: 139183 - DNA, 743 bp, Arabidopsis thaliana landsberg
ctttcgttagtttttccaatttcggatttggtcttgttgagaatatatttacgattttaattgagagattttgtgatagctcaatgtcaatggagtgtgtggttcaaggaatcatcgagacacaggttcgtttgtattttttgattgacgaacaaatcccaagtttttggagttcatggatcagcttttagctttcttatgatgtccaattgataaaccctaggcttgaatttttattagaatttgattagattttctactggattttgcagcatgttgaagctcttgagattcttcttcaaggtctttgtggtgttcaacgcgaacgtttaagagttcatgagttatgcttaagaagcggcccaaatcttggtaaagccaattccttttgttaaattcagaaacctgaagcttcctatgaatcatacatgattcacatttgtgaaatcttcactttttcaggagttgtgtcatcagaagttaggctattatgtgatcttgatcaacccgaacccacatggtacagcttcttcttgttgttgttgttgttgtatatgttcttgtttcattcaaaggaagctaatttaagaaccataggacggttaaacatgttggtggtgcgatgagaggtgcaggagctgatcaaatctctgttttggttagaaatatgattgaaagtaaagtaagcaagaatgctttgcgtatgttctatgcactcggttacaaactagaccatgagcttc

SEQ ID NO: 139184 - DNA, 472 bp, Arabidopsis thaliana landsberg; identical to SEQ ID NO: 128269

SEQ ID NO: 139185 - DNA, 2497 bp, Arabidopsis thaliana landsberg
cttcttcttccttctctctttcccagaaagtatcatcgaaagataacccttttttcacttttcttctcctctgacttttttcttcttcgaatctttagttttcgtttatagattctggtttcttcgtatatataataaaggtttgattttttcgatctgagagcaagagaaaaccctttccatggcctcagcggcgatattctcatcgttacgacggaggagatcgccgtctttggaagcattcttagcccccgttgacctttccggcgtcgcacttgttcaaaccctagcttcaatctcttcggaggttgtttcttgtttcacctctgttcgattctcgtttcaacgcaagaacgctcgttctttgattcgtaagatcgagatctttgtcgtattattcgaatttctcgtagattcaaattggggctcaacaacaacaagaacaagagcaagaagaagaagcaaaagctctgtttctgaatcaacagctttgctttgtctcaaagagctttatcttcttctctatcgttccaagatccttgttgattactgcgctcaatctagtaagttatggctcttgttacaaaacccttcgatttctgggtatttccatgatttgaatcaagaaatttcgactcttttggatgttttacctgtcaatgatcttggtctaagcgatgacattagagagcaaatcgagttgttgcagagacagtcaaggaaagcgagattgtatatcgataagaacgatgagtcattacgtgaatcattctattcgtttcttgatgggtttgagaacggtaagattccgagttctgttgatctgagaatgttctttgttgagaaattggggattagagattcgaagagttgtcgtagcgagatcgagtttttggaagaacagattgtgaatcatgatggtgatttggagccaacgggatcggttattaatggttttgtggcgattacaagatactgtaggttcttgttgtttggatttgaagaagatggaatggagtggtggattgagaataatccgaagaagcctcgaaaagggttcgttgcacaggagattggagacacgtttataactgtgccaaaggattttgtttgtccaatctctcttgatttgatgacagatcctgtgattatttccactgggcagacttatgatcggaactctatagctaggtggattgaagaagggcattgtacttgtccgaaaacaggacaaatgctaatggattcgaggattgttcctaatagggcgttgaagaatttgattgtgcaatggtgtactgcgagtggtatatcttatgagtcagagtttacggattctccgaatgagtcttttgcttctgctcttcccacgaaagctgcggttgaagcgaacaaagcgacggtgtcgatacttattaagtatctagctgatggttctcaagcagctcagactgttgcagcacgggagattcgtcttttagctaagactggaaaagaaaacagagcatatattgctgaagcaggcgcgataccgcacttgtgccgccttcttacatccgaaaatgctattgcgcaagagaattcagtgaccgcgatgctgaatctctcgatatatgagaagaacaagagtcggatcatggaagaaggtgattgtttggagtctatagtaagtgttcttgtttctggtctcacagtggaagcgcaagaaaatgcagcggctacattgttcagtctctctgcagtacacgagtataagaaacggatagcgattgtggatcagtgcgttgaggcattagcgttgctgcttcaaaacgggacgccgagagggaagaaagatgcggttactgcgttgtataacttatcgacacatccagataactgcagtaggatgattgaaggaggaggtgtgtctagtcttgttggagctttaaagaacgaaggtgtagcagaggaagcagcaggagctttggctttgttagttagacaatctcttggcgctgaggctatagggaaagaagactccgctgtggcggggcttatgggaatgatgagatgtggaacaccgagagggaaagagaatgctgttgctgcgttgctcgagctttgtaggagtggtggagctgctgtggcggagaaagtgttgagagcacctgccattgcggggttgctacagacgcttttgtttacggggacaaagcgggctagacggaaagcggcttcgcttgctcgggtttttcagaggcgggaaaatgcagcgatgcggtctggcgtttacgggtttgtagggaatacaaatgggaatagagacggtggttttacaacggatgtctcagttccgatatcaatctcaatctccgtaccagtgttgtgatctatgtttagtctaaaagaactctaaaagtggtacttttttgttgttggtggtgtttgtttcattgtttgtctatattatatacatttattggttgggaggtataatacaagtaatattttagag

SEQ ID NO: 139186 - DNA, 373 bp, Arabidopsis thaliana landsberg; identical to SEQ ID NO: 114705

SEQ ID NO: 139187 - DNA, 386 bp, Arabidopsis thaliana landsberg; identical to SEQ ID NO: 113612

SEQ ID NO: 139188 - DNA, 139 bp, Arabidopsis thaliana landsberg
gagagaaggactataagtttccatgagaaagaagaagtaatcacacacttgttcttcgattcgtttctgggaactgagaatatttaagaacacgatggctatggccgctttaaatcagctttttgttgtcctagcctca

SEQ ID NO: 139189 - DNA, 135 bp, Arabidopsis thaliana landsberg
aaaagaacagaccattgggatcacaaatctccgaagaagaagaagaagaagatatcaaagtgtttatttttgtgggatttctgctgcaacttgttcaagtctttcttctctgaccattggttgacttcttcttag

SEQ ID NO: 139190 - DNA, 2002 bp, Arabidopsis thaliana landsberg
aaaacaaaaaaaaatgaggaagagctgaaagattcgcgacgaagcaaaacgacagtgttatctatcgccgccttgttgttctgtaagaatctgaaaaatctgatctttgtcctctataatgttgtttagcttcgatcacttgttctatcgattcttgcttctctgtttcttcatcgatttcgcttcttctagtggatttctctttgccccttttcttctagggtttgatccactgaattggaatttggattctagttcaatcgatttctattacagaatctggaaatttgattagtgttagtgttagtgatggtgctgattctccatttcaggtttaacaagtgtagaggaaccaaagttgaaaactttgaacttcccattgattttaatgttaattactgatcattcgaatctgaaattgaagcatatgagtgcttaatctgtgagtgttagaagaagtagaagaagatgcagagggttagggtttcatctcaaagagcagttgtgcataagcttggtgattctcagatgacattatctcccaaatttagagtagctgcatcgatacaatcgacattgttcgatagatcatcggaattagaactgtctcttagaggagagcccttgattcccggtttaccagacgatgttgcgcttaactgtcttttacgggttccagttcaaagccatgtatcgagtaaatccgtgtgcaagagatggcatcttttgtttggtactaaagagacgtttttcgctaagcgtaaggagttcgggtttaaagacccgtggctgttcgttgtcgggtttagtagatgcactgggaagatccagtggaaggttttggatttgaggaatctcacttggcatgaaatccctgctatgccttgcagagataaagtttgtcctcacggttttagatcggtttcgatgcctcgcgaaggtactatgtttgtatgtggtggaacggtttcggattctgattgtcctcttgatttggtgttgaagtatgatatggtgaagaatcattggactgtcactaacaagatgataaccgcgaggtcgtttttcgctagcggtgtgatcgatgggatgatatacgcggcaggtggaaatgctgcggatttatatgagcttgattgtgccgaggttttgaaccctttggatgggaattggcggccagtttcgaacatggtagctcatatggcgtcttacgacacagcggttttaaacgggaagcttttggtaacggaaggatggttatggccgttctttgtatccccgagaggtcaagtttatgacccgaggacggatcaatgggaaacaatgtcaatggggctaagagaaggatggaccgggacgagtgacgagatttatgatcggttgtttatagtttcggagttagagagaatgaagatgaaggtttatgatccggttacagattcgtgggagacgattaacggaccggaattgcctgagcagatttgtagaccgtttgcggttaactgttatgggaacagagtatatgtggttggtaggaatcttcatctcgcggttgggaatatttggcagtcggagaataagtttggtgtgaggtgggaggttgttgagtcgccggagcgttatgcagatataactccatcgaattctcagattctttttgcttaaaagagatttgatcagtctgtttggtatggtttccaaatgtctgtgaaccatattgtatgaataagtaaaaacttgtcttagtaacatcatcatgatgtttgaactcttgtatcatatatactcatgtgcgtgtataactttaagtccgaaactgttaaatattacatggactggattgttgttctaggcttgttcacacaattttcaaaaacatttattattatttactgttctcttattgttttctaaataatactttcatttcaatatacagtaaatgtatagtttaaagttttttcacacatattaagaatacatttaaaaaatttcttcccta

SEQ ID NO: 139191 - DNA, 523 bp, Arabidopsis thaliana landsberg
  unsure (1)..(523): unsure at all n locations
agaagatattggaaagctctattctggggactgctatttggtcctttatacctatcattctggggaaaggaaagacgaatatttcttgagttgttggtttggaaagaaaagcattccggtaatttttatctaaatcataacagaatgtgaatccttagtatacatactgtataatcctccatttcagttaatttctctatttctaacttttatattggctatcttagtttcttcctggtattgcctggttgtgactgtagaactttgtatttcccttctgagtattgagggtnnnnnnnnnnnnnnnnnnnnnnnnnnnnnnnnatgattcatatttgtgagtgcgctgcagttttagctttgaatattattgagtcctgatatcattagtgtattgtaagttagctatatatgaacatataaatgttatggatatcagaaattcgacttaacttaagtttagccatctaaaagttctgaattctatcttatccaggaggaccaagatacagcaattcgactg

SEQ ID NO: 139192 - DNA, 171 bp, Arabidopsis thaliana landsberg
aagttttgtggacatcattggccattgattatagctttgactgctagtactgaagatcatgttagggaaagatgtttgcaaatggggatgaatggtatgatccagaaaccggttcttttgcatgttatggcttctgagcttagacgggctttgcagaccgcgagcgagtga

SEQ ID NO: 139193 - DNA, 239 bp, Arabidopsis thaliana landsberg
caatcgagtcgccattaacatatttcatcaagctcagtccactcttctcatgaaacttcatcatcatcgaccttgaccctgataggttataaaagttactgcatttgatctctctttgaactgcttctgttgttcaaggttccaaacatgctcagactcagtaattgaataatgggtattcttgttgcaggtttcagacgacacccattattgtaaatctgctgctggagtcttttttg

SEQ ID NO: 139194 - DNA, 342 bp, Arabidopsis thaliana landsberg; identical to SEQ ID NO: 112945

SEQ ID NO: 139195 - DNA, 1462 bp, Arabidopsis thaliana landsberg
agagaaagaaaagaagaagcaaaacagagagaaaatggcaggattgtttgataaacaagccgatctataccttgacgccagacctaattacccctctgagtggttctcgaagctcgctgatctcaccgatcaccacggtttagcctgggatgctgccaccggaaatggccaagcagctctcgccgtcagtatttgatgctcataaatttttatagagcttcaaacttagatttaacagatttagcttcttgctcgtaaatgatcacaacaacatgcatcagatcttggatttgacaaatttcgcctccattttgcaggttgcagagcattacgagagtgtcgtagcaacggacgtgagtgaatcgcagctgaagctagcaacgccacatccgaaaatcaattatcgccatacgccgacgtcaatgaccgacgacgagctagtggaattaatcggaggagaaaactcagtggatctaatcacggtcgcccaaggcgtacactggttcgatctccctaggttctactcagtggccacacgactcctccgtaaaccaggcggaatcatcgctgtctggggatacaacgacgtcatagtgagtccagagttcgacgccgtccagtatcggctccacgccacaacgctgtcgttttggaagtatccgtacattcagcacatcttcgattcgtacgaagcattgccgtttcctttcgaaaatgttgggatgggatcagaggggagccattaaagctggagatgcctaaaacgacgtcgtttgaagggatcataaggatgtttaaatcatggtcggccatcgtcacggcgagagagaaaggcgtcgagttgttaccggagagtttggtgagagagcttgaaaccgcttggggaggttctgatctggttcgttccgtcgtttacaaagcttttatgattgcaggaaaagttagagtttgatatcaccaaaccatgattgattgttgttctcatttgagtttatttataaaaattggttatattgcaaaaattctcagaaagtgttgttatttgacaaatcaaacaaaatacactctattacatatattaaaatctcttttggtatgcaacaaaatagaacctaaaatgcaacaaaaccgattttaaaaagaaaaataagataaactatgatcaccttttcttctttgtttccttaatcgccatgatgatcatcatatcctctaatcgatcttaacagaggaatagatgagccttgtgaaccagagacaagcatagacccctattgttcctgtgagcacaaaaaatgcgtaggaggcgatgagcatgtacccaaagtaaagcatcgcagagaccagtttggtgatctgaagctttgtgaagaagtagaacgtggcatagaggaagaggtagagagctgatgagcctgatgtgaggtatgatctccaccaccaaaggtagtcctcactgcaa

SEQ ID NO: 139196 - DNA, 1135 bp, Arabidopsis thaliana landsberg
gtgagatggtaaaaaaaagtcatttaacgtaaaaatgttggccttatatttcattctactcgtctgcgtgcccttaggtgtcatcatgaccgtgacgagtcctcgactagccatcactgtggccgtcactcagccggcggtcttaataatacaaaatcccaataataacctcacatctcctcaagtaattacatctcagccactggatcacgatgagttactccttcgtcaagcttctaaagccaacccaaacccttcacctaaatttcccaaaaaactagctttcatgttcttaacaacgaactctcttccacttgcaccactttgggagctttttttcaaccaaagctctcatcacaagtctctttacaatgtctacgtccatgtagacccgactcaaaaacacaaaccgggttctcccggcacatttcaaaaccggatcataccatcctcaaaaccggcttacaggcacaccccaaccctcatctcagccgcacgtcgtttactagcccatgcgcttctcgaggacccgtctaattacatgtttatccttctctccccttcttgcattcctttgcactcctttaacttcacttacaagacactagtctcctccacaaagagcttcatcgaaattctcaaagacgaaccagggtggtacgaaaggtgggcagcgcgtggaccctacgcgatgttccccgaggtaccagccgaggagttccgaataggatcacagttctggacgttgacacgagcccatgcgctgatggtggtgagtgacgtggagatatggtccaagtttaacaagtcatgcgtaagagaagacatatgttaccccgaagaacattacttccctactctccttaacatgcgagacccacaagggtgtgtatccgctacggtcacgcacgttgattggagcgtcaacgaccatggtcatcctcggacatataaaccgttggaggttagggctgagcttatacaaaagctgagaagtgcacggcctaggtatggggacggcaaccgaacgaggaaagatccatttcttttcgcccggaaattttctccggccgggatcaatcagttgatgaacataactcgaagtgtcatctttaacgattcggctcttgtgtaa

SEQ ID NO: 139197 - DNA, 69 bp, Arabidopsis thaliana landsberg
aaattcttttgtctctctgtatcatccaaaattcccagatttattcacggagttagaagaagaagatga

SEQ ID NO: 139198 - DNA, 1572 bp, Arabidopsis thaliana landsberg
atttgtacaggtgtcatcatgcgatttgcttatatgaatgcggcgtcccgtttagtaattcactcctctctgtatcaaaatttgtggctaatatatcactgcgaattgacgaattgagaatgtttaaaaaccaaaaaaaaaaaaaaaagtagataacttaacaatttttaaaatatatagtttctacttatcgttatcaataatgactaccaaaatatcatgtaaatttttttactttttatatgtttcacaaataatatagtttttacaaagacttttttgttgttttacattttttattgtcactttaaaatgtgttaggcggtgtaaaaatgtaaaactgatacagtatatttatgtgacacggtaaaagaggatatttcaaaagtgaaaaaatggaaataagtaaataaaagcaaagaatataaaaatattttattctatttattactttatatataccaaatatggctaaagcccgaaagatcctataaagtaggatttaacagtgacttctgaatcttctcactctaaacttaacagtctctctttctctttcattttatatacccttttcctctctttctccaaatctctgaaaattttcaccagaatctctgttctttttttcaccagaatctctctgtttaaaataataggtgatgatgatggatgagtttatggatcttagaccagtgaagtacacagagcacaagactgttatcagaaagtacactaaaaagtcgtctatggagaggaagaccagtgttcgtgacttggccaggttggttcgggtctcaatgacggatcgtgacgccactgattcatcaagcgacgaggaagagtttctgttccctcgaagacgtgtcaagagattgattaacgagatcagagtcgagcctagcagctcttccaccggcgacgtctctgcttctccgacgaaggaccggaaaagaatcaacgttgattctacggttcaaaagccctttgtttccggccaaaaccagaaagaagttccgtggtgttagacagcgtccatggggaaaatgggcggcggagattcgagatccacgaaaaggtgtcagagtttggcttggtacgttcaacacggcggaggaagctgccatggcttatgatgtagcggcgaagcagatccgtggtgagaaagccaagctcaacttcccagatctggatcatcatccttctactcctccgccatcgtctacttcactaagattatccgatcagccaccggcgaagaaggtttgcgttgtctctcagagcgagttagctcagccgagtttcccggtggagtgtgttggatttggaaagggggaagagtttcagaacctgatgtacggatttgaaccggattatgatttgaaacagcagatatcgagcttggagtcgttccttgagcttgacggtaccacggcggagcaaccgagtcaactagatgagtctgtttgcgatgtggatatgtggatgcttgatgatgtcattgcgtcgtatgagtaaaaggaaaaaaaaacagaagataatgtaatatgtaaaaaaaatcaaataaagtct

SEQ ID NO: 139199 - DNA, 166 bp, Arabidopsis thaliana landsberg
atttcaattagccctagcaggttttttgtctatgtcactactcttcctaagaagagccaagccgttatttgtatcttgttgttcagctactcattctcgctccagcttcttatctccgacgcttacgaatcagctagttcgttcgtttcacggttccagaacaatg

SEQ ID NO: 139200 - DNA, 293 bp, Arabidopsis thaliana landsberg
acacctttgaagaagttatctgaaggagattctttttttgaagttgctattaatctaaatctggagagttctgtagcagctctcaattttgttttgaaggttctgctgcttttaacctttgtaacaaagttgattgttggtttggctttagttgtgcatttatttgggactgtttgtgttccaggacgaagaaactggggcgtggtatcagcacaaagggagagactttaaggttcctcttgtagacgatgttcctgataatggaaatttgatcggagctaagaaaggatttg

SEQ ID NO: 139201 - DNA, 108 bp, Arabidopsis thaliana landsberg
cttccctgaagattccgatgtatcatcagtagaaactttgtcaggaagaatcttggtgtgcacatggagacatgtgtgagtatgtgtgttctctggtcccggaggatt

SEQ ID NO: 139202 - DNA, 162 bp, Arabidopsis thaliana landsberg
tttgttctgacagtctaaactctcaaccaagtaatggttacaagaaagtattcgaaatcattcaataggccatgagaagacggcgacaaagagatctttcttgtaattaatcaaacaaaaataaagcaatagatacaggagaaaagataagagaaaaagaag

SEQ ID NO: 139203 - DNA, 3555 bp, Arabidopsis thaliana landsberg
ttaagcccaaatggatttgaagtaaatcagcccaatgggctcattacggttgtacaatatacatgaatgttgattactgtataggtaataaatacacagtaatgcatcatttcatcactgttgttacttgttaaaattcgaaagagcataatagaaatctcaacttccaatgagatttggattccataaattttgccacaatttatttagactcacaacaaagtcaacattgctgttaactctagatatcttgcttcaattacaatagtctttacatcctttaaaatctttcaatttttttctttattcatacattacttgttctgattttcccattatactactcctttctatttcaaactcttactttctgtcattagcaaatagagaaagtgatttcttaaccaaacttataaaattggaacttaacaagaaagaagaaagttcgttttgttcacgtataaaaggaatatgctgccattttaggacaagtttgtacatttaaaaaaacaaaatacagttacagaatttagctaataactttttttactattttttaagaaaaggaaataaaaacagctcgtcatgatgcataattatgtcaagattcgtttcaaaaaaacgtggacccctaccgcctcctcctccactactactaccaccaccacctttggtttccgtttctctgtatattcattcctcgaaaccctccaaaaacccatttcaatcaatttctcgcttttgccctctacgtttctcgtcctgggtttctcaaatccagctcagtttattccccaattcaataatcaaaactctgtcttttggtgggtcttcgtcaaagctctctcctttacggtccttttctccagcgcatgaaataataaaggacacctgtatttattaaaatcactacattttccgtaacaaaaaaaatcaaactttgttttctcaatggacggtgccggagaatcacgactcggtggtgatggtggtggtgatggttctgttggagttcagatccgacaaacacgcatgctaccggattttctccagagcgtgaatctaaagaatgtgaaattaggttaccattacttaatctcaaatctcttgactctctgtttattccctctcgccgttgttatctccgtcgaagcctctcagatgaacccagatgatctcaaacagctctggatccatctacaatacaatctggttagtatcatcatctgttcagcgattctagtcttcgggttaacggtttatgttacgacccgacctagacccgtttacttggttgatttctcttgttatctcccacctgatcatctcaaagctccttacgctcggttcatggaacattctagactcaccggagatttcgatgactctgctctcgagtttcaacgcaagatccttgagcgttctggtttaggggaagacacttatgtccctgaagctatgcattatgttccaccgagaatttcaatggctgctgctagagaagaagctgaacaagtcatgtttggtgctttagataaccttttcgctaacactaatgtgaaacctaaagatattggaatccttgtggtgaattgtagcttgtttaatccaacaccgtcactttctgctatgattgtgaataagtataagcttagaggcaacattttgagctataatcttggtggaatgggatgtagtgctggacttatctcaattgatctcgctaaacagatgcttcaggtaaaatatcttattattcggtttggtttaatccggtttggtcttttagagtgttatgagtcgtcgtgattcgtggaagaataaaatctaggactttttcttattcgacttttaaaaattgaaaaggctaatgacagctcatgattttagaaattattaggggaattcaatagaattaccagctagaatttgcctttcaaaatttaattatttgcgtcttggtgtcacttaataaagcatttagtacacttaccagctagattttttgattaattgacttagctttcatgtcattaatacgtgctataattataatagttgtgtgactaatttgattaaaatgtagtcactggattggtttttagttgccgacttaatatggatgcaactttattctatatgagttgtatgaaagcataaaggccaaatttacgtgtaaaagtcacgtgtctatgaaaattctgacagtgacaggctttgtagtctttaggttggtggtagttgtgaaaatggaaaaaccataatgttgtgttaaatgatcaatgttttattcattaaaggttgattacatattttttcctttctcgaaagtattcatttattacgaaaaaatagttcatgcattaggaatttaggatcgatgcataattacaaatttacatccacttttgcttacatatttaaattgtagatctaagaagcgaaggtggtaacacgtgcttgcaagtttctcgaatctctaatgtggttggcaaattgaaccaaaggtcataaatgtgctacaacataatgttgggctacttgcatagattttacttacacatgagacatatgcacacacatacctctgcatttatagatttgtgtttaatgtccaccgtataacggttgtctagtcccaaccattgttagaattttcttagattcgaaaatgtttttattttattttattttaaatattgtatacacatttttctgagagtaataataaatttgtgacaataatgcaggtgcaccaaactcatacgcactagtggtgagcacagagaatataccctaaactggtacttaggcaacgaccgatcaatgcttctcttttactgcatcttccgaatgggtggcgccgccgttctcctctctaaccgctcctccgaccgctgccgctccaaataccaactcatccacaccgcccgtacacacaaaggatctgacgacaacgcctttaactgcgtttaccaacgcgaagacaacgacgacaacaaacaaatcggtgtctcactttccaaaaacctaatggctatagctggagaagctttcaagacgaacataactactctgggaccgctagttctaccaatgtctgaacaacttttctttttcgcaacactagtggcgcgaaaagtctttaatgtgaaaaagataaagccatacattcctgatttcaagctagctttcgagcatttctgcatccacgcgggaggtagagccgtgcttgacgagattgagaagaacttggatttatccgaatggcacatggagccatcgaggatgacgttgaaccggtttggtaacacttcgagtagctcactttggtatgagcttgcgtatagtgaagctaaaggaaggattaagagaggagataggacttggcagattgctttcggatcaggttttaagtgtaacagtgcggtttggaaagctttgagaacgattgatccaatggacgagaagactaatccatggattgatgagattgatgactttcctgttcaagttcctaggatcactcccattacatcgtcgtagtgttttaaa

SEQ ID NO: 139204 - DNA, 843 bp, Arabidopsis thaliana landsberg
agaagaagattgaagtgggaggtgataagaagaactaaaggttttaagtgcaaaaccaaggtttacttgagctttttctttctttccaagtttttttttttcttttgctgtttttgatttcattatgagactagaattatcatttctgttgactggtttagttgctttaaagactttgatctacttagttcttgacctcgtctacttgatgtttttccattgatataaagttggtctgattctgagaagagtgaaatttcttaatccttaagccagtttcttcctaatacaatgagactttgagtccaattcaaaaactgtacactaaaacacacaaaagagagttcctttcttcaccaggagtaatgccggaaccttctccgactcgttctcctaaaaggtttacaagcaagaatgctaagatcaacagctgcagcaagtgccatgaaaatggctgcatcttccacacaagttacatgtctcatagctaattgtacaacgggcttgctgcttttcccttccccttgcactctcgagctcattacaaacccacctccagagacacactgtcccaaccctgagaagtctccactactctgcgggcttggaattggtgtagctgcaactgttagcatctgtttatccgtgtcgattaaaaattccccacctttctcagcgctgatgaggatttcagacattaaaacatctccaacttctagaccgtttgatagaagatggaatctgcaacacacggagtctctgatcccgcgttcccgccaagcttcgagctttccccaaggctgccagctgtttggtctagacgggtcaggccggaccacaagc

SEQ ID NO: 139205 - DNA, 56 bp, Arabidopsis thaliana landsberg
caatggcgttgttctccccgccaatctcttcttcatctcttcaaaatcccaatttc

SEQ ID NO: 139206 - DNA, 1656 bp, Arabidopsis thaliana landsberg
atgacaaagaagagaaagctcgaatctgaatccaacgaaacgtcagagccgacggagaagcagcagcagcaatgtgaaaaagaggatccggaaatcagaaatgttgataatcaaagagacgacgacgaacaagtagtagagcaagacacactaaaggagatgcacgaagaggaagctaaaggtgaagataacacagaagcggagacgtcgtccggatctgggaatcaaggaaatgaggatgatgacgaagaagaacctattgaggatctattggaaccgttttcaaaggatcaacttttgattcttctcaaggaagctgcagagagacatcgcgatgtagctaatcgaatccggattgtggcggatgaagatcttgttcatcgtaagatcttcgttcacgggcttggatgggatactaaagctgattcacttatcgacgcttttaaacagtacggagagattgaagattgcaaatgtgtggttgataaggtatctgggcaatctaaaggttatggctttatcctctttaagtcaaggtctggtgctcgtaacgctcttaagcagcctcagaagaagattggaactcgtatgactgcgtgccagctggcgtctataggaccagttcaggggaatgctgttgtggctcctgctcagcagttcaatcctgagaatgtgcagaggaagaattatgtcagtaacgttagtggagacattgatccgcggaagttgctggagtttttctcaaggattggggagatagaagaaggtccattggggcttgatgaagctactgggagacctaaaggtttcgctttgtttgtctatagatccctagtcagtgctaagaaggcattggaggagccacacaagacttttgaaggccatgtcttgcattgccacaaagcaaatgatgggccaaaaccgggcaagcagcagcagcatcaccataacccacacgcctataacaatcctcgttaccaaaggaatgataacaatggttatggtccgcctggaggtcatggacatctcatggctggtaacccagctgggatgggtggtccaacggcacaggtgataaacccggccattggacaggccttgacagctttactggcatctcagggagctggtttggcttttaatccggcaattggacaggctttgttgggttccttggggacagctgctggtgtaaacccagggaatggagttggaatgccaagtggctatggtactcaagcaaatatctcacctggggtctatcctgggtacggtgctcaagccgggtaccagggcggttatcagactcagcaacctggtcagggcggtgcgggaagagggcagcatggtgctgggtatggtggtccttacatgggtcgttagattagccactcaggtaattattttcagcttcttttcatctatttcattgatgttctgtatcagaagactttttttgtagttcgcttggttcccttgtgtatttcaagacatggacttgctgtattttgaccttttcatggttactccattatgttaaactttttgcgttgcaagatcattttgttttcaaagttcctgtgactttgttgtgtttctgaagggtgttaggttttgcatcagtttataaaagtcttctcttaatttcttaattca

SEQ ID NO: 139207 - DNA, 253 bp, Arabidopsis thaliana landsberg
aagcatccgaaagccgatgttgtcgcttgtttccctcacctcaagaagtgatgaaagctattatctcaactataaaggattccaatgtataacgtatggatcctcatctttcctatgtttgtatcaaagtctcgacaaattttatggtttctatttctctctacttgtttcaacaataagtctcttgctatgattatataatgaagctttgtgtggaacctttttttttaatataagttggcttcttttcgct

SEQ ID NO: 139208 - DNA, 618 bp, Arabidopsis thaliana landsberg
gctatgcgccatggcacgccattagcgcgctttttaaaaccaagggttttatctcgtgtctaaatctgtttgttttggtgtttctattgaatttagattgaactgaaaactgctcctgctgattttcggtttccaacaacaaaccaaacgaggcactgcttcacccgttacattgagttccacaggtactcttgtgtgatagagttagtgactcttcagttcattctctaacttcaacaacaataacataaacaatatctgtgcaggtgcacaactgcaaaaggtgaggatgcaaatgaatgcgagaggttcgccaagtactaccgcgctctctgccctggggaatgggtttgtactttcattttttattatccgtcagcttcacctagctactcacattcttaacaagatatgtgattatcttctcgcaggttgacaagtggaatgagcagagggagactggaacattccctggccctctttgattcacacaagaatctctctttttcattttaagtttgagaccaaaaaaggtcgtgtggatgatcatgaaatctataactcttgtctttcattaatcgtttttccttggatgatcaattaaataaattggaacaa

SEQ ID NO: 139209 - DNA, 51 bp, Arabidopsis thaliana landsberg
gccaaacatcagaagccctagagcttgagccgtcgaaaatgtcgaagcgag

SEQ ID NO: 139210 - DNA, 188 bp, Arabidopsis thaliana landsberg
tatatatttattaaggaaaattgctaaaatttaaaatattgaaaagctagatcctgagatggaactagaagtctaaaacagcttaacgaggaaaactctacaaacaagagaacagaggccataatttgttgaacatggttgcatatcatacaaaaaatggccaaacccatagaaaattgaactttaat

SEQ ID NO: 139211 - DNA, 156 bp, Arabidopsis thaliana landsberg
agacaaacgtcatgtaaaagaagatgggaatgccattgggagccaagatcggtcaagcgttgttcttcaggatcgtggaagtgggcttcgacaggattcatgtggtagtacaaagcaaacggattattggaaccccaagcctagggaagttgaaag

SEQ ID NO: 139212 - DNA, 237 bp, Arabidopsis thaliana landsberg
gttaccaaatctctttttgtaaaattggagaaaatttgcaaatattttacaaatacaaaggggaaaactctaataatgacaacgtaagaatgtctagtttttggtgtgcaaaggaaggaagaaagatactacttgtctccgccaccgaacattcccatcatgtccttgccggaacccatctgcttcattagactctgcagaccgcccatgccgccaatctgcttgagcatctgaggt

SEQ ID NO: 139213 - DNA, 238 bp, Arabidopsis thaliana landsberg
gaggtggtggcccaatcatgggtgatttgtgggctttgaagggtctgatagatgaaggttcatccttaatttcttaaaaatgtattgaatctagtaggttacctcttaatttgtctacttttctgtttattgatcatattgtggtttacctttattgtggaagaaagagcgtgaaacacctggatggacccaactcaagcttcctggacaagcaccatcatctcgatgtggtcataca

SEQ ID NO: 139214 - DNA, 63 bp, Arabidopsis thaliana landsberg
atcatgaatgttcataggcctagctgttatgattgttaatgagcttctatagtgtttttcttc

SEQ ID NO: 139215 - DNA, 110 bp, Arabidopsis thaliana landsberg
tttgtaattggtgactttttgtcaggtggtgatatattttttttttttttatgtttctgacacagccaccacaatctatagtatgtcttataaaatgttacctttcaagt

SEQ ID NO: 139216 - DNA, 389 bp, Arabidopsis thaliana landsberg
acccatggaagactaggaagaaacaacaaagctgaaagatctctcttttgattgactctagtcttgattctttaagaagaacacgacgacagaacaaatcttcttctctttgccataacttcaaaagcaacaaatgtcctggactctctgagatttcagacaacggatgctgctgaatcactttgagtattcccattcccggatttgagaccgcaaccaactgttgttgttgttgtctctctttatgctcttcatctactggaatctccactacatgagaatctttagttccggccatagagaaaaaaaagattgagactttatgaagaaacagagatcggaataggaaagcaattagagagtaagatgaagattgaagatttgagttc

SEQ ID NO: 139217 - DNA, 303 bp, Arabidopsis thaliana landsberg; identical to SEQ ID NO: 131191

SEQ ID NO: 139218 - DNA, 130 bp, Arabidopsis thaliana landsberg
gcttcagtgtcttcttaatgaagatttgattttaaaatttcaaaatgggtttatttatgtctctctgcagatggctaggccaatcatcacgtgatctttaatcccccaccctgagacaacctacagagat

SEQ ID NO: 139219 - DNA, 105 bp, Arabidopsis thaliana landsberg
atcgtcttcgtacctttctgctttctacgccgtcaaaatctaactgctcgacagtgaccatgcaaagctcaatgacaatggaactacgaccatcaggtgattccg

SEQ ID NO: 139220 - DNA, 560 bp, Arabidopsis thaliana landsberg
caaagcattcatgttcataaacaaatgatacaacagagaaccaaaaaaggacaacgagggaaactaagttcctgcactcgttcaaactatatttaaccgatctttgtcctaacatgatccatcatcatcttcagacagaaagaaaacaaaaaatctaataaaggaatatgatttaatacaataaaaagacaacgagtttttcttgttctgtattgtgatttttgacaagaaagaaatcaacctatcatggaaaactgaagtttcctccgatctcagtattaccagccggtggattaatggcgacccaaagaagagaaatggtaatggccacaagaccagaccaaacatacacaatcgttggtgttcttcctcttcttcccattagacctttagcaaatggataaagatgtgccaaaacccaaaaactgaagaacactcctccaatcagtttactccactgaggaaccacactgtaaatcgtcctgctgaatccaaccgcaatcgctatcagattcaccataatgatggtaatcggagggatcataagtgaagtccatttc

SEQ ID NO: 139221 - DNA, 177 bp, Arabidopsis thaliana landsberg
gtaaaactaaaaataaaaggagttccacttttcaatttttctccactccaaaaccagaaagaaagaaaaaaacatcaatcatgacaacaacaacaacgaagaagccgcacgttctggtgataccgtttccacaatccggtcacatggttccacatcttgacctcacgcatcagattc

SEQ ID NO: 139222 - DNA, 378 bp, Arabidopsis thaliana landsberg; identical to SEQ ID NO: 113679

SEQ ID NO: 139223 - DNA, 59 bp, Arabidopsis thaliana landsberg
gccctttctctgcctctctctctgcttctttgaatctcttctttcccaagtacacttga

SEQ ID NO: 139224 - DNA, 2550 bp, Arabidopsis thaliana landsberg
gggaccaattattgataaattgcagacgtggcatatagacgaaatacaagattcagagataataaatacgtcaccaaaagttatcacccacaacgaatcttcttcttccatcgccattgccatggctaagctctctctttcctccatcttcttcgtcttccctctcctcctctgtttcttttccccttcttcttcttcatcggatggcttagaatcctacatcgtccatgtgcagagatctcataagccttccctcttctcctcccacaacaactggcacgtatctctccttcgctctctcccttcttctccccaaccagcaacgctgctctactcttattcacgcgccgttcatggcttctccgctcgtctctcccctatccaaaccgccgccctccgccgtcatccttcagtcatctccgttatacctgatcaagcgcgtgagatccacacaactcacacgcctgccttcctcggtttctcccaaaactctggactctggagcaactcaaattacggggaagacgtgatcgtcggcgttttagatactggaatctggccggaacatccaagtttctcggattcaggtctcggtccaattccatctacctggaaaggcgagtgcgagatcggacctgattttcctgcctcatcttgcaatcggaagcttatcggagctcgagcgttttacaggggatatttaacgcaacggaatggaacaaaaaagcatgcagccaaggaatcgagatcgccgcgtgatacagaaggtcatggcacgcacacggcatctacggcagctggatcggtggttgctaacgcgagtttgtaccagtacgcgcgcggaacagctactgggatggcgtcaaaggcgagaatcgccgcttacaaaatctgttggaccggcggatgttacgattccgatatcctcgccgccatggatcaggcggttgccgacggtgttcacgttatctctctctccgtcggagccagcggttccgccccggagtatcacacggactctatagcgatcggagcatttggagccacgcggcacggcatcgtcgtttcttgctccgctgggaattctggtcctaatcctgaaaccgcgacgaacatcgctccatggatcttaaccgttggtgcgtccaccgtcgatagagaattctccgcaaacgcaatcacgggagacgggaaagtcttcacgggaacatcactgtacgcaggcgaatctctaccggattctcaactttctctggtatattccggcgattgcggaagcagattgtgttaccctgggaaattgaattcatcattggttgaaggcaaaatcgtgctctgtgacagaggaggcaacgcaagagttgagaaaggaagtgcagtcaagctagccggtggtgctggtatgattctggcgaacacagctgaaagcggtgaagaattaaccgccgattcgcatctcgtcccggcgacaatggttggagctaaagctggagatcaaatccgcgactacatcaaaacatcagactctcccactgcaaaaatcagtttcctaggcactttgatcggaccatctcctccttctcccagagtcgccgctttctccagccgtggaccgaatcacttgacaccggttattcttaaaccggacgtgattgctcctggagtcaacattttagccggttggaccgggatggttggtcctaccgatttagatatcgatccaagacgggttcaattcaacatcatctccggtacatcgatgtcgtgcccacacgttagtggactcgccgctctcctccgtaaagctcatcccgattggtcacctgcagcaatcaaatccgcccttgtaaccaccgcttacgatgtcgaaaactccggcgaaccaatcgaggatctcgccaccggtaaatcatcgaactcattcatccacggagctggacacgtcgatccaaacaaagctttgaatcctggtttggtttacgacatcgaggtcaaagagtacgtagctttcctctgcgccgtgggatacgagtttccggggattctagtctttcttcaagatccaactctttacgacgcatgtgaaacgagcaagctaagaaccgccggcgatctcaattacccatctttctccgtggttttcgcatcgaccggggaagttgtgaaatacaaaagggttgtcaaaaacgtgggaagcaatgtcgacgctgtgtacgaagtcggagttaaatctccggcgaatgttgagattgatgtttctccaagcaagcttgcgttcagcaaggagaagagcgtgttggagtatgaagtcacatttaagagcgttgtgctcggcggaggagtcggatccgtgccgggtcatgaattcgggtcgatcgaatggacagacggtgaacacgttgttaagagtccggtggccgtccaatggggtcagggatcagttcagtccttctgattgatcattgaaattgggctctggttgtatgttttcattaaaaagaaaaaagtcctgtcgggtttgttaaaagggccatgttgtaatgggccgct

SEQ ID NO: 139225 - DNA, 52 bp, Arabidopsis thaliana landsberg
atctctctcccaaaaaccaaaacgcaaaacctccgataatgtccggcagtct

SEQ ID NO: 139226 - DNA, 525 bp, Arabidopsis thaliana landsberg
attcccattgtttgctccttcagcgtatgattgccgggatgtctcttgcaggtattcaggctacttctaataattcaggtttttaaatgaaagagcatattagtagaacaattgtaggaatatctttacggttctgatttttttttattttttttttccgttttcttctctttgttcagcgaagctacaacaattggtttgataaaggtcagagacacttatccatttggtctagatcctgtgtggcatggatcccgcagtgagctgccattcctgaactcgctgaagatgaaaatgtcaatccttctcggagtttctcaaatgaacctcggaatcataatgagctactttaatgctagattcttcaaatcaagtgtaaatatatggtgggttcagttgatattttctgaccatagcgtgctctctctctctccagttccttaaacagtaaaaatcagtcatcatctaaacatctaatataaacgggcttgcaggttccagttcattccccaaatggtattcttg

SEQ ID NO: 139227 - DNA, 166 bp, Arabidopsis thaliana landsberg
gctgtttctgccgtcgatcaaccgttgaaaatcatcaccggagctgatgactttggagcgagcctcaaggacgcgatggtaacacacctccgctctctcggcatagacgtggaggataccggagtgtcctcttactactctgctggatctgaagtcggtcgccgcg

SEQ ID NO: 139228 - DNA, 218 bp, Arabidopsis thaliana landsberg; identical to SEQ ID NO: 135184

SEQ ID NO: 139229 - DNA, 57 bp, Arabidopsis thaliana landsberg
attcagcataactcaaacacaatggtactcgcaaccaactctgactccgacgagcat

SEQ ID NO: 139230 - DNA, 431 bp, Arabidopsis thaliana landsberg
gaacaaatgctggttgaatgtaacaacacctttcatggtttatgtctttttatcttctctttagcatacgaaagcatatatatgaacaacaaacctatcaaagaatttagtcgagatccgattggtttgatgagatctgcatcaaccgagcttaacaggaactacagcaggaactttgggtgaagagggatcaagtgtgatgatctcctttcttccttctcctccattctcaactttctctttaaccgcctttgtcactgcgccaaacgcgtttgaaaaccacgaagctccacttgatacataagggtttgccattaaagccgttcttgcactgattgctgtctcttcagcagctgctaaagcagatttcgttatctccctcacctgatatcgctcatcgatatctctcaacttctcattaaccacagttg

SEQ ID NO: 139231 - DNA, 812 bp, Arabidopsis thaliana landsberg
ctctcttcttttctcatcaaacttatttctctctcgatcgcaatatatacgattccataaattctcccaaaaacaaattcagagatagaggagagatcatgaggtcaccggtgcaactccaacacggctcagacgccactaacggtttccacacgctgcagcctcacgatcagaccgatggtccgataaggagagtgtgtctcacgcgcggtatgcatgtccctgaacacgttgcgatgcaccacacacacgacgttggtccggaccagtgttgctcctcggtggtgcagatgatccacgcgccgcctgagtccgtgtgggctcttgtgcggcgtttcgataatccgaaggtttacaagaacttcatcagacagtgccgtatcgtccaaggcgatggactacacgtcggcgatctccgggaggtcatggtggtctctggactcccggcggtctcgagcaccgagaggctcgagatcttggacgaggagcgtcacgtgataagctttagtgtcgttggtggggaccacaggctcaagaactaccgatcggtgacgacactacacgcgtcggacgacgaaggtaccgtggtggtggagtcttacatcgttgatgtgccgccgggaaacacggaggaggaaactctaagcttcgttgatactatcgtccggtgcaaccttcagtctctggctcgaagtaccaaccggcaataatctcatctttcttatataaattgcaattatgtatctaattttttttgttgttctatttcttttagatgttcgatcttctttacaaggaagaaaatttcgagt

SEQ ID NO: 139232 - DNA, 225 bp, Arabidopsis thaliana landsberg
aaaaccagatcaagcttctttcaccattttcactcttctttaagctttctttcttaatttctctcatttcgaattttaaacacaaaacctaaacgatgcctgaggcaccaaagatcgcagctttggaggtttctgatgagagcctcgctgagaagaacaagaacaaactccaattcatcgaagacgtgaccacgaacgcagatgatgttcagagacgagttcttg

SEQ ID NO: 139233 - DNA, 412 bp, Arabidopsis thaliana landsberg
atggaattcatctcttttatacaaaaatctgctagggcaatacaggagaccagttactactgccacttccaaaatgttgttcagggaactggaaatatgtttatacaggattcccatgctgaaaaggtaagtgagatttctacaaaagctaaaaaaatcagtagaatcttcctggtgctttgcagttacaaaacttcgtttaatgtttttcaggaaagaccagtgttgccaaaagaaccacttagcttgacttgagaagcttcgttcagacttattttaattgtgtgggtctgtgttaatctatatatgtcaatgcattccacgagatccgcttcacatgtcagaagaacccactccttatcatcatccaggtacttaaggtcaaaccaggaaatgtcatctatgttgaaac

SEQ ID NO: 139234 - DNA, 446 bp, Arabidopsis thaliana landsberg; identical to SEQ ID NO: 85781

SEQ ID NO: 139235 - DNA, 207 bp, Arabidopsis thaliana landsberg
acgatgttgcatatgtacgtgacttgtgggtgtttgattgaagcttggagaatctttctggggatgataggttttgatgttgttgcttggaattcaatgattatgggttttgcgaaatgtggattgattgatcaggcgcagaacctgtttgatgaaatgccgcagagaaatggagtttcttggaattcgatgattagtgggtttgtg

SEQ ID NO: 139236 - DNA, 553 bp, Arabidopsis thaliana landsberg
gagcttcaaatctagttacttgttcttctacagtacatcatcaaaagtcaaaaccatggactcgagatgttttggcttcttctttactttgttatctctaaatgtgattgttcttgcttacgatcctgacacacttcaagatctctgcgttgcggatcgcacttcaggtacacatatatcttcaaattaaatttactgtctactttgaatgatttgttaaagtaatgaaatgtcgtcgtttttggattatgtagggataaaagtgaatggtttcacatgtaaacccgaatcaaacatcaccgcttcagattttttcttcgccggaatcggaaaacccgccgtcgttaacaacacagtcgggtcagccgtcacgggagcaaacgtagagaagatcgcagggcttaacacgctcggagtctcactcgcgcgtatcgactacgctcccggaggtttaaacccgccgcacacgcatccacgcgccaccgaagtgatcttcgttttggaaggcgagcttgacgttggattcataacgacggcgaacaagctcttcgct

SEQ ID NO: 139237 - DNA, 207 bp, Arabidopsis thaliana landsberg
taaagcttggtcgtggtttatatacaacatggttaatttgatttggctaagaaaatttattctagtttcatacgttatataatgaatctttgggtggacatgaagacagtaacaaataatgacatgaataacaagggtcttatttaaagacatgaaacttaaaaacaaggtttcttcagcttaatatggtgaaagggaaaagacatt

SEQ ID NO: 139238 - DNA, 94 bp, Arabidopsis thaliana landsberg
gttgaaagtcttttgtgtgcatataatgattcaactttatggctctgaaaatgcatcttgttcttaaggtaatgtaattaaagagatatattac

SEQ ID NO: 139239 - DNA, 201 bp, Arabidopsis thaliana landsberg
aatctcgaatcagagatggctctgattcgagaagtcgtagacgatttcccattcgtagcgatggacacagagttcccaggaatcgtgtgtagaccagtgggaacattcaaaaccaacacagagtaccactacgaaactctcaaaacaaacgtcaacatactcaagatgattcagcttggactcactttctctgatgagaaa

SEQ ID NO: 139240 - DNA, 118 bp, Arabidopsis thaliana landsberg; identical to SEQ ID NO: 103667

SEQ ID NO: 139241 - DNA, 51 bp, Arabidopsis thaliana landsberg
gggaaactcatccggcttctggaaatttccgtttatccgattcgttctcac

SEQ ID NO: 139242 - DNA, 529 bp, Arabidopsis thaliana landsberg
tattacaacatgaagaacagagagatatgtgttaaactttgacttatgtttttggattcatataaaccagttttcatataaatgcaatccttcaacaaaccacgatggttgtgatgttagtaccagttttatcaaagacctacactgaatagaggaatatacatgggttgagtcactctgattttaaactcttattgaaaagcttgaaaagttacagaatacaagaaaccagagacaacaaatgagacagagttccgtttcttattgaaacaacaagacaatcgacccgaaaacgaactccctcaaagaacacaaagctcacacaaaccccccaagtcaacatctccttgtttaaacaggtagtgagtacttagcggaaacctccttccacgcagcacggctactaatcttatcccaccaagcgctaacatgcttcctatctttgatcaaatgagccttcccaataggaccaacaagatactcggtgaaaggaaggtgagccaaatcagctagactcacaaaatcacca

SEQ ID NO: 139243 - DNA, 139 bp, Arabidopsis thaliana landsberg
tttgagttttaaagtatgtagctgttacaagtttcgtggaacttggttctggatctatgaaagtctcgatttttataaatctgtttttgaggtgttttgtgagactcttgagtatgtaaaagctaaaaaatttacattc

SEQ ID NO: 139244 - DNA, 83 bp, Arabidopsis thaliana landsberg
gggatgcaaaccaatggatcgaatggacctcatgaatggttctacttcagctagtccatgctcatcgtatcaacatagccctc

SEQ ID NO: 139245 - DNA, 90 bp, Arabidopsis thaliana landsberg
ggcagtgcgtaccaccagttgagtccggtggaagctcgaagttatagatgggtccgagtgaaccatatggtctacgattattgcactgac

SEQ ID NO: 139246 - DNA, 263 bp, Arabidopsis thaliana landsberg
aatataggccgttcgatggaacagcagaggaaatatctaccgttggatcttaatctaccagcaccagaagatgatctaagagagtcaaagtttcaagggatagtattctcagcaacaccagcgttaatagattgtcattactagttgttttttttactacataatatgatgaaatatttgtgaattcttcttacttactactatattgttgatcattggaattattttttttttaaattgaatcaaatattatcatttttaag

SEQ ID NO: 139247 - DNA, 418 bp, Arabidopsis thaliana landsberg
ttgtcgtcgataaagagctcagagatgtaagcatcccgggaatctttattgttcttgaatggttaagaaaatatggctataactaatggttatttggagtaatataagataaatataatgaatgataagttcatgttagattaattaacttaaattaaatttactagtaagatattgccagcgtcaatggtaactttttgatgaaatccagctatagtcactcatttttgttcgattgaggacccaatttttttttacatttacgctgggattcaaatttcatcggttgtagttaccatgaacaactagttgctatgtaaaattaagagaatgaatatatatgaatcaggtgcaaatgagcgtattgccagtagaatcagccgagaggtgtgcgaaagcaataatgcggagcgtatgt

SEQ ID NO: 139248 - DNA, 453 bp, Arabidopsis thaliana landsberg
ccaaggccggtctgatccgaaccagaacactggtacatcaatccaaaactgtacgattaagccggcggatgatcttgtttcgagtaactatacagttaaaacgtatttgggtcgaccgtggaaagagtattcaaggacggtttacatgcaatcgtacattgatggtttcgttgaaccggttggttggagagaatggaacggtgattttgcgttaagtacattgtactatgcagagtataacaataccggaccgggctcaaacactacaaaccgggttacatggcctggttaccacgtgattaattccactgatgcagctaatttcacggtcactggcttatttatcgaagctgattggatttggaagacaggagtgccttacaccagcggtctaatttcatagtaatttgtgatttggtcttaatcattttcttttattaatttaatttaaag

SEQ ID NO: 139249 - DNA, 216 bp, Arabidopsis thaliana landsberg
gccacctttcccacaaaccacacaacaaccaatgatgggtcacagggaccagttttggtctaatacagctgagtctcccgtctcagagtatatgcgttatcttcaaagttcacttggagattcaggacccaatgctaaccaaatgcagccaggtcatgagcagcggccttatatcccaggtcatgagcaacggccatatgtgccaggtaatgagca

SEQ ID NO: 139250 - DNA, 66 bp, Arabidopsis thaliana landsberg
gttgaatacattacatgtttatagaatacaattgattttttacaaatataagttttcaatatctga

SEQ ID NO: 139251 - DNA, 189 bp, Arabidopsis thaliana landsberg
caggttttggtggaagagaaatcgagtgttagaatcttgacactaaacagaccaaagcagctgaatgctctgtccttccacatggtatcgaatatttcccttcttgtacatgcgtactgtattgtcttagactcatttttttctgtagatctctcgattgctgcaactgttccttgcatttgaggagga

SEQ ID NO: 139252 - DNA, 94 bp, Arabidopsis thaliana landsberg
tttgaaagaagtgagtcgactcctagaactactagtcttagaaccagaaaaaaatagacttatttttcaattgaataacaattccaatctgaag

SEQ ID NO: 139253 - DNA, 92 bp, Arabidopsis thaliana landsberg
tgttctctagctggtttgattgtagcgtttcttgctattgattcatcacgggtactggaagctacggtttccgctatggctgtctttggcat

SEQ ID NO: 139254 - DNA, 867 bp, Arabidopsis thaliana landsberg
aacatttccacaaacacaccaaactcacctgaaaccctatttccatttaccattcacactaatggcacgaccacaacaacgctttcgaggcgttagacagaggcattggggctcttgggtctccgaaattcgtcaccctctcttgtaaaaactctccctcatcatcctctcaaattacgaaattaccctcggtcgctttttatttgagtaatgctaaacttttttgttttttttttgttttttttaggaaaacaagaatctggctagggacgtttgagacagcggaggatgcagcaagggcctacgacgaggcggctaggctaatgtgtggcccgagagctcgtactaatttcccatacaaccctaatgccattcctacttcctcttccaagcttctatcagcaactcttaccgctaaactccacaaatgctacatggcttctcttcaaatgaccaagcaaacgcaaacacaaacgcaaacgcagaccgcaagatcacaatccgcggacagtgacggtgtgacggctaacgaaagtcatttgaacagaggagtaacggagacgacagagatcaagtgggaagatggaaatgcgaatatgcaacagaattttaggccaatggaggaagatcatatcgagcaaatgattgaggagctgcttcactacggttccattgagctttgctctgttttaccaactcagacgctgtgagaaatggccttgtcgttttagcgtattcttttcatttttatttttgtttccacaaaaacggcgtcgtaagtgatgagagtagtagtgagagaaggctaatttcaagacattttgatctgaattggcctcttttgaaacactgattctagtttctata

SEQ ID NO: 139255 - DNA, 1362 bp, Arabidopsis thaliana landsberg
ttcggggaaatggtttcatcacttaacatcatcgaagtggcacgagtcaccccttcaaactctgactcggccgagtcactcagtctcccactcacttatttcgaccttatctattataaacttcgcgccgtcgaacgagtcatcttctaccgaatccccaacgtaactcgccctttctttgactcagtcatcgtcccaaatctcaaaacctctctatcctcatgcctctctcactatctcccactcgctggcaaacttatatgggaaccacttgatcacaaaccaaccattgtctactcccaaaacgacgacgtttcattcagcctcgccgaaacaaacgctgatttctctagtttatccggcaatgaaccattcccctccaccgagttgtacccgttagtccccgcgttacaaagctccgacgactcagcttccgccgtgtcgtttcaagtcacgttatttccaaaccaagggttttgcatcagcgttaatgcacatcatgccgttttagatggaaaaacgacaaccacgtttcttaaatcttgggctcacttatgtaaacatcaagattcttctttaccggaggatctaattccgttttacgatcgtacggtcataaaaggtccaccggagatcgatgcaaaagtcttgaaaatttggcactctattgataaatcaaaaagcttgaagttgttaccgagaccggagattgattccgacgttgttcgatacacattcgaactcactcgtgaaaatatagaaaagcttcgagataaactcaagagagagtcttcttcttcctcgcttagattgtcaacgtttgtgattacgttttcgtacgttttcacgtgcttaataggatccggaggcgatgatccgaatagaccggtcgggtatagattcgcggtggattgtcgaaggcttatcgatgatccaccgatcccgttgacttatttcggaaactttgtttactctgctgtgaaaatcccgctaatggcggggatgtttcttggtgaacaaggtttcgtggttgctgcgagattgattagtgattcggttgaggaattggattcaaatgtggcttggaagataccggagcttttggaaacgtatgagaaagctcctgtggactcacaatttgtgtcggttgccgggtcaacccggtttggtatatacgggttggatttcgggtggggaaaaccttttaagtcgttgttggtgtcgattgatcagagaggaaagatatcaattgcggagagtagagatggcagtggaggtgttgagattggcttctcgctcaagaaacaagaaatgaatgttttgatagatttgctacacaaggggataaaatgataatggaac

SEQ ID NO: 139256 - DNA, 180 bp, Arabidopsis thaliana landsberg; identical to SEQ ID NO: 38142

SEQ ID NO: 139257 - DNA, 62 bp, Arabidopsis thaliana landsberg
atcaaacgcaaaaacctattatcaaaagaactagggagaaatgactaatcccatgatcatgg

SEQ ID NO: 139258 - DNA, 386 bp, Arabidopsis thaliana landsberg; identical to SEQ ID NO: 113514

SEQ ID NO: 139259 - DNA, 182 bp, Arabidopsis thaliana landsberg
aaaaaaaaaaaaaaaaaaaaaaaaaaaaaaaaaaaaaaaaaaaaaataaaaaaaaaaaaaaaaaaaaaaaaaaaaaaaaaaaaaaaaaaaaaaaaaaaaaaaaaaaaagaaaaaaaaaaaaaaaaaaaaaaaaaaaaaaaaaaaaaaaaaaaaaaaaaaaaaaaaaaaaaaaaaaaaaaaaa

SEQ ID NO: 139260 - DNA, 67 bp, Arabidopsis thaliana landsberg
gagagaaagaaagcgaacaagggttgttgtctgagacgacgaaagctatgggtctagaggatgctgg

SEQ ID NO: 139261 - DNA, 2791 bp, Arabidopsis thaliana landsberg
gtccttccattaaaaacggaataaacagaatgaacggtggtgatgtcaccgtcgccggatccgacgatctgaaatctccgctcttaccggtcgtccataatgatgaaccattcgaacgacaaacggtgggacaacaacttcggacaatattcacgcccaaaaactgttacatcgctcttggtcctcttctttgcgccgtcgtgtgtctatgcgtagatctcgggggagatgaaacgacgacggcgaggaacatgctcggtgttttggtgtggatgttcgcatggtggttgacggaggccgttccgatgccgatcacctccatgacgccgctcttcctcttccctctctttggtatatcggctgcggatgacgtagcaaattcttacatggatgacgtcatctcccttgtactcggcagcttcatacttgctctcgccgtcgaacactacaacatccatcgccggcttgcccttaacgttagtctttcctttatctctttatcttcttcttcttcttcttcttcttcttttttctacataatttattcaatatttgattctttccgattgtgtgcgggtccacgggtgaattaattacaaaatatgatcgttaaataggtggattgcttcaattgaatccctacttataaaattaaacattacaatgtgtagtggtccatgttttatacgtggtgatgccagattatatgtttttccttccccatacatttttttccccacacacatttatttcgttttaattcttcttcaataatttgtgtgttcaaagtctaatgataacttgatcatttaaagttaagttattaacatacaaagagtcctttatttcaattttttaaacaaaatctttttcatatgcattttattttattttatttgtatcatagatgagatgtcatttcatgaggccctaggccaatccaaaattccatttatatgacaacccaaaaaaaaagatgagagacacgtaaacactatgtttctccagcaaaagcaatgatagtgagtatgatttaatttgtgcaagtgcgggctccaataattagctcacaagtcacaactataatcattgtttacttttatcatgtttttaaactataattaatcgtacgagagatatcctatgattaagagaaaactcaccagtcaccacgtatctaattatgataagctaataccataacttaatggataatctaattcttgaagataacgttggtgttctgcgtggagccgctaaacgcgccgctacttctgcttggcatctgcgccacaacagcgttcgtaagcatgtggatgcataacgtagcagctgcagtcatgatgatgcctgtcgctacggggatacttcagagactgccctcgtcatcatcgacgacggatgtggtgcatccggccgtggggaagtttagcagggcggtgggtgttaggtgtgatatactctgcggcggttggtgggatgagcacactcactggaacaggagtgaatctgattcttgttggaatgtggaaagctacttccctgaggctgatccgatcagttttagccaatggttcttctttggcttcccattggctttgtgcatattcgtggtgctttggtgtgttctttgtgttatgtattgtcctaaaggagcaggacaagctctctctccttatctccataaatctcatctcaggagagagcttgagttgttagggccaatgaacttcgctgagaagatggtcttagccgtgtttggtgggttggttgtgttgtggatgacaaggaatataactgatgatatccccggctggggtcggatcttcgccggccgagccggggatggaaccgtgagtgtgatgatggcgacattgttgtttatcatcccaagcaatattaaaaaaggagagaagctaatggaatggaacaaatgcaagaaactaccatggaacattgtcttgttattgggagctggattcgctatagccgatggagtacgcaccagtggcttagctgaggtcttatccaaaggacttgtcttccttgaaacggctccttactgggccattgctccaacggtttgcctcatcgctgctaccatcacagagttcacttcaaacaacgcaaccactacattgttggttccgttactcatcgaaatcgcaaagaacatggggatccatcctttgctcttgatggctccaggagccattggggctcagtgcgctgttttgcttaccacgggaacaccctctaacgtcgttgggttcacgacagggcatatagagatcaaagacatgatcaagacaggcttgcctctcaagatcgctggaaccatctttctctccatcttgatgcccactcttggtaatttactcaaaaccttcttctttatataataagattcattgtagtttagttttcttatagatattgttacatgatgccaggggcttacgtttttgcatcaatgggaggagtttagttctacaagccaagcacaagaccatgtacacaattgatttattgtactatattgtttactaccgtaatacatatgtagatatatagtcaatggaatgggaaatttacatgaggtcaaaaatcacaaaatcggcccatttttgtaacccgcccgattatagtttccggtaccattgctttcttttgtgcttccaacgtaccggtaactttggtcccttttttttttatttggtgtgtatatgaaaaagggttaatacagatttgtgtgttcttcttcctaacaataacaactagtggcaaatcc

SEQ ID NO: 139262 - DNA, 74 bp, Arabidopsis thaliana landsberg
ggcatacactgggttcttaaatggcatcgagtacatgggctactccatacccatggttctttacaacaaccagg

SEQ ID NO: 139263 - DNA, 445 bp, Arabidopsis thaliana landsberg
aaaagacgacggagaaatggcggaggagcagaaaatgaagcagctaagccgattctggatttgggctttatcttccattgctttccgattgatcttgatctccttcccgggaaatctcaatctctcttcccgtccggaggtctctacccctctcaccagcattcgccgccgtatctcctctctctttctcactccctcattagctctctaagatctcgaattcagctcacatttcttcgttttgtatgaacattttcagttgctgaaggttattggttgaagcaggcatcgatgtcaccatatgcaggtctatcttaagatttgatcctctgtaaatttggattcttaggctattagaagctgaagttgtacatatttgagcaggatctatgtatcatggctcaccattgctgctctcggttcttggacctctcacagttcaaag

SEQ ID NO: 139264 - DNA, 553 bp, Arabidopsis thaliana landsberg
gaattgtgtaaaaccactccaatggcgattctggacaaattgtttcgagcatctcgagcatggcgcggatcactctctcattctaaatccatggttccttcgcaatcaccacgggcacgagagcttcgtcgctgtttccaccacggtactctagcgaattcaatttgtagataatttttggtgatcccttgatttcgagtgaatccatttgattgtaagaattgctaattagtttaaaaattggaactttcggggaattgagaacacaagaagctgttttgtcttatgatcccttaattttgatttttggtcatgtacttatgatgaagaaatgatactacttctctgtccaagtagaatctttgtctcttagttaaaagtttgggtctttgatattgcaggaaactttgagcagagtaattcaaaagtaaatcaagtcttgagatcttgcagcaccctaaacgattctccatacttttccatggcacctgcagttttgggtgctctctttagcgttggagtaattggagtagcttatgctgaatctgatgag

SEQ ID NO: 139265 - DNA, 322 bp, Arabidopsis thaliana landsberg
tccactcttttcatcttcttctctgccgtcgtcgctcggagctcgcgaagctctctcatcagaaatcaaaaaccctaaaaaaagtcctttctgattcatctatacagacacatactgtattctcaaaacaatggagattccttctctgaataagcagcaagagttcactctcgcctccgtcactgatctcacttctccttcctcatctctttcgtcctctcctgttgtagctacgttttcatgcgttaatgaagtcaaggaactccgatttcaggaatcgaaatcgtctgatggtttcagttttgatcttagttcgactcag

SEQ ID NO: 139266 - DNA, 74 bp, Arabidopsis thaliana landsberg
gtgaaccgcttgttagcgaagaagaagaagaagaagctactgaagttttactagtggagaagacgaagttgtgt

SEQ ID NO: 139267 - DNA, 153 bp, Arabidopsis thaliana landsberg
tcctccaccacttgtgccaccatgccttgctgtttcggcatcaattgccagcttcccaacaagccatttggcgtttgtgcctttgttcccaagtcatgccattgtaattcttgctccatttgactgtatttttgcttctaccaacatgatgct

SEQ ID NO: 139268 - DNA, 269 bp, Arabidopsis thaliana landsberg
accaaacggacaacaatggaacacatgcagacgctttcaatataacgattggaaacgctattagtggcgttcattcatacggccaggttatgattggagggtataacaatgcagattcttgctatgacgcccaaaacacaatgtttcaactatagctaatgaagatccatctctctaattaaaaagtgtaagttaaattcttaatttttcatatggacgaaacaatcatatttggcaattgtataataaacgtccattgttttaattcc

SEQ ID NO: 139269 - DNA, 114 bp, Arabidopsis thaliana landsberg
ccgggggaagtagagagagaacccgccggagagatacagagagacgacgacggtggtggtggtggtgggtgatgacaagcagagcagagagattgaaaccctaattgaactgcg

SEQ ID NO: 139270 - DNA, 60 bp, Arabidopsis thaliana landsberg
aggttggaatactgcgaccaaactggctagatggagccaagtaccttggtcaacagaacg

SEQ ID NO: 139271 - DNA, 259 bp, Arabidopsis thaliana landsberg
tctcactaccacgagctcttcatctccacttccttctccgacaacgcttccgtcgctctaaacctccacaccctcacgcgccgccctcatgtagccggtacagtggccaacgctgaagcagcggaatatgttcgctctgttttcacctcctctgctctcaaatcacacgtcgttgcttaccaagtgtctctaacttacccagttcatcgctctttggtactaacgccgacagactctgcaaagccaatcactttcttgc

SEQ ID NO: 139272 - DNA, 72 bp, Arabidopsis thaliana landsberg
cataagtaaaagataagacatctacattcttctaatttgataattggctcaatatgaaatgcttaatgtatg

SEQ ID NO: 139273 - DNA, 236 bp, Arabidopsis thaliana landsberg
gggttacattgttgaactatatcataattaacaaacagaaaagcaacaacaaaaggagattaaaagaggagctacgggtaagatgatatccttaagaatgaaagggcttggtcattgcctagtttatgtcgtggtctttagtgtcattgcggctatagtgacagcatacgactcaccctcttcaacaccacaatacacttccccttatccacctaaaaactattctccttatctct

SEQ ID NO: 139274 - DNA, 114 bp, Arabidopsis thaliana landsberg
attagacataggtctatatagaaggaaattgttgtatagatgagttcatattcaattattggttggttagtttcccttgtaaaccgtttttaaatggtgaagaagaagatatct

SEQ ID NO: 139275 - DNA, 63 bp, Arabidopsis thaliana landsberg
ctttttgtgtctcttggcaccatttaactacaaatgggaagcattacggttcggtttcgtgct

SEQ ID NO: 139276 - DNA, 246 bp, Arabidopsis thaliana landsberg
attgtgcaggccgcaagtggttggagctatagcagggccttctctgggagaagcagctcatcgtctgatcaaaaacacccttaacatgaaatcctctactggtgcggcttcgggattaattgacccaaacggatactaccgaaatgtaccgggtaattattcttatggtggagtcaatagaccaagagcaccgggtccgtctccttaccggaaagcttatgacgatgactcgagctattactatgg

SEQ ID NO: 139277 - DNA, 151 bp, Arabidopsis thaliana landsberg
tgtttcaaaacaatatttctctatctgttaagtcaagtgtgttgtataatgtgaagatttgagtttgaaactggggatattacgaacctcaaaagtggaaacccaagttatatcaagcaatggatcatcagtacatattttagtgggattc

SEQ ID NO: 139278 - DNA, 376 bp, Arabidopsis thaliana landsberg
cagaagcttgatactgttcttaagcttctccctcttgctcgccaccgacggatactcctccagcatcttctcaactactcctccactacttgaattcaccaattccgccacgatctcctcatgtaattgaatgttcacaagatgccgacaatgtcaccatcaatcaaacttagcagtggatgagtcctgaagagtaaatcttcctgcaccctagcttcttcatatgtctcttctcctatacggtttctaacacagatgtaacctagtccgatactcacatcatctgcagttactttctgcaggagaccttcaggagccatgtcagcctttgtcacaacagccagagtccgttcaccagttttgtcaacttgtcttg

SEQ ID NO: 139279 - DNA, 550 bp, Arabidopsis thaliana landsberg
ccgaacccgagatgggattttgggaatgagccacttcaagttgctgaaacgattaggttgtggtgatattgggagtgtctatctggctgaattaagcggaactcgatgccattttgctgtgaaagtcatggataaagcgtctcttgaggaccggaagaagttgaatcgagctcagaccgagagggatattctacaactattggatcatccgtttctaccgacattgtacactcattttgagactgacagattctcgtgtttggtcatggaatactgtcctggaggtgatctgcacactctaaggcaacgtcaacccgggaagcatttctcggagtacgctgctcggtatgttttctctctcgcttacaatgttttcaaagctatatttatttgtcgttatctcactttctttggatgtgtttttgacagattttacgctgcagaggtgttgctagcactagagtatctccacatgctcggtgttgtttacagagacttgaagcctgagaatgttctggttcgagatgatggtcacataatgctttcagac

SEQ ID NO: 139280 - DNA, 253 bp, Arabidopsis thaliana landsberg
aaaatcaaagctttttcttttatcttcaattctcctccgatgaggtgtaaaagacacaccgtcgatctcagcagcagcaacggcgtttgcgcttcttgcctccgtgaacgtctcctctctctcgccgcttccgccgccgtatcagccgccgtagaagataatcaatcaaagaaatctaataacaataatcatcctccgcttttgattttccctcgctctgtttctccttacgttacccgtagaaaatccgacg

SEQ ID NO: 139281 - DNA, 4093 bp, Arabidopsis thaliana landsberg
attaaaccagtagagagcatcaattttgttttgttagaaaattaagttttagttaatatttattcccatgaaaatgtccgctactactaaagaaagaatcgtaacagacggatcacaaacagtcacagatccgagccctgttttgagtttacgagaagaatattaaaattctcatctttaaccattttatccgatcatgaatgtgagagacgagggaaaaactacggcggagaaacacggcggaggagaggagaataaatcaccggagaacaaatggcgatttaattctcctctagctcaagtgagcttaatgggattcgtttgtttctgttgtccaggaatgttcaacgctctctccggcatgggaggcggtggtcaagtagatccaaccgctgctaacaacgctaacaccgccgtttacaccgctttcaccgttttcggccttttaggcggcgggttttacaacgtcctcggtccacggctcacgttagccgctggatgttcgacttacgtactctacgccggatctttcctctactacaaccatcaccaccaccaagccttcgcgatagtcgccggagctttactcggttgcggcgcgggacttctctgggccggagaaggagctgtgatgacgtcataccctccgccgcatcggaaaggcacttacatagcgttgttctggagtatcttcaatctcggcggcgttatcggtggattaatcccgtttatcctcaactaccaacgtagctccgccgcatcggtcaacgactcgacgtacatagcgttcatgtgtttcatgttcgccggcgttcttctctctttcggtatcctcccggcgacctccgtgatccgtaacgacggatctagatgctctgccgtgaaatactcccgtccgtcaactgaagcagccgccgtgctacggctattcctcgatcggaaaatgctcctcatcgtccccgcggcttgggctagcaatttcttctacagctatcaattcaacaatgtgaatggactcctctttaacttaagaaccagaggattcaacaatgtcttctactggggagctcaaatggctggatccatcgccattggttacgtgatggacttcagcttcaaaagccggcgagctagaggattcaccggaatatcactagtcgcggtaatcggaaccattatatgggcgggcgggttagcgaatcagcacggttactcgttggacaaactaccggaaaagaaacttgattttaaagattccgggatagagtttgcgggaccattcgtgttatatatgagctatggattgttagatgcaatgtatcagagtatggtttattggttgataggagcattggctgatgattcgcagactttgagtagatatagtggattctacaaaggagtgcagagtgcaggagctgcagtggcttggcaagtggatactcgtaaggttccgttaatgtcacagcttattgttaattggtcacttactactgtaagttatcctttacttgttcttcttgtgtatttttatgttaaaaatgataatgatgatgatagtaatgataaggtttagaagatagtagtttattagaacattgagtaagttaactgttttttaatacgatgacgttctgttatgaatgtaacagttacatagagaaacaaagatttgaggctctgaaatgcctttattcttttatgcatggtaattgagttctcataaagtagtgtcctttgtttagtatatatgacacataacttttgagtagtgatgtcatcgatcgaaatggggtgagacagagatgataataatagagaatacaagttggcatcgatggtgcaatcttcactgtacggatggtgtgttacaccaatcacatacttgtcatggggaccagcaatttccataaccttatcaagatagggcaaaggctaagggataaaagaaaatctcattcttcgctgaataataactaaacttgaaatgtctttgtgtgaagagacatcatctgttacatcacagaagtgttgaatgagtcaagatggaaagttgtttgagaaaacaaattagaaaactctaaccttaagcatttgtgcacgtcttctttcttttatttgactcaccgtgagtgtggaaagaactgcctaattgtcaaaaactcacaaggcattatcatgtggacatgcaaccttttttttctatacgcattacagaaatgaaaacaatgattaggatcgcatgcacgtcaagaaaacaacctatagctgtactttgatatactaactcaaatcatgtcttggctcaagcacacaagcttctagctagatacaactgcaaacatatatgatggctttgtctaataagaagacgacgacttgggcaccgctttgaccagtcaatacaccaaatctgtatgtatcatttatataaataatatctttccacagttgttgaagaatcacatagacagcacacacggattccatggagactaaacagagtatccctctcctcatgccctataagatgggacccttcaatctttctcacaggtactcctttctccatgtctcagtctctgttatagttgccccctgaatcttccatttagtccgtttggatttgaatatgtgttttgactcttatgcatacacatagtgtttgatagaattccccaactcaaccttttaacttttaagcaccattctgggtttcttcaaaatcttttcttttgcttatggaaggtacgaagcttgaatgttgtctttgaattgtgatcagggttgttttggcgccattgactagatcgagatcgtatggtaacattcctcagcctaatgccaaattatattacactcagagaacaacacctggtggtcttcttatttccgaatcctgtgtagtctccgagacatcattggggtatatataactctgctggattataatatttttagcttatagttcaaaatacaccaatagcttcgctctctaacatgtgagctctgtttgtcaagctatccggatatacctggattatggaacagagaccaagtggaggcatggaagcccatcgtggatgcggttcattcgaaaggcggtatcttcttctgccagatttggcatggtggcagagtttttcatcaaggtttgctaaaaactgtagcttcctcctccttgttgtaaaccaaaacgaaaaagattttgatgctttaggttcttgtatactaaattttctccattctttagaccagccaaatggggaagcacccgtctcctctacagacaagccattgatgtgcaagaacatgtatggaggtcagtttaagcctccacggcggttaaggagcgacgagcttcccgccattgtcaacgactttagaatcgctgcacgaaacgcgatcgaagctggtaagcaaagtcttttcccctttggatgttagatgatcaagacacttgacatatatacaagtacaggcttcgatggagtggaggttcacggcgcacatggttacctgatcgatcagttcctgaaagacaaagtgaatgacagaagtgaccaatatggtgggtcattagagaaccgctgtagatttgctcttgaagtaatcgaagcagtggtgaacgagatcggttcagatcgtgttggaatcagactctcgccatttgcagattacatggagtcaggagactcgaatccagaagcattagggctctacctggtgcaagctatgaacaagcatggcatggagtcgtctacggtcacatggttgaacctagaatgaaaacccttgaaggaatcttcgaatgcacggaatcgcttacgcccatgcgaaaagccttcaaaggtacgttcatagtagcaggaggatattctagagaagacgggaacaaggcggtggaagagggaagaaccgatcttgtggcttatggacggccgttcttggcgaatccggatctgacgaggagattcgaactcaatgagccgttgaataggtacgatagatcaacgttctacacttcagatcctgtagtgggctatacagactaccctttcctcgagaccacagatacaacaactgcttaagg

SEQ ID NO: 139282 - DNA, 52 bp, Arabidopsis thaliana landsberg
cccagagtagcagaatctgatccatcccacctttttcaattctcaggcaaag

SEQ ID NO: 139283 - DNA, 280 bp, Arabidopsis thaliana landsberg
agttaaaatcattacactcccacaaaaaaccatctttagtatgttttatcataattgtcaatcttttacctaacttgactacctctaacttcatgcaactgaactaactagtgtgttcaagataattggtgcaaattctagcaatacttggttcaatggctcttgtccatttgttctattagattaagaaatcaaagtccaattcacaattgttttaactaaattgttgtttttagataatcaatcatgactcatattataacatataatcaatgaataa

SEQ ID NO: 139284 - DNA, 460 bp, Arabidopsis thaliana landsberg; identical to SEQ ID NO: 105257

SEQ ID NO: 139285 - DNA, 275 bp, Arabidopsis thaliana landsberg
ttcttcctaggcatattgataaacacttcacacgccattcccttgatatgattcagcgacaataactcctgctttaattgacacgtgtattgcacgtgacctcgattcttccggacatgctatgtttgggctttcctcgttttactattccggacaggatctatttgggctttcttttgctcattttatagaaaggcccccgttgcttttttttttctggaaaaatattggggagatgaatcgaatagaatattttaatcaaaatccaattaaag

SEQ ID NO: 139286 - DNA, 554 bp, Arabidopsis thaliana landsberg
gcaaagactaaaacatccttctttactatttatatctttggctccactacgaaggttattttcgtagttctacacaattccttacagagaataaagcgaacagatcaacaactactctgctcttacaggcgacgacgtcaacaacaacccaaaataccaaaaaccctcaaaagtctcaaacaaaactcaaaacccaacaattaaagaaacaacatttcaatatacagatttacttccttttacagattttcctaaaaaaccgaaattgaaacaaacaaaaccaaaagacgttaccttttttccattgattcctcaattctctaaacaaatgagttaatcttccatggctgccatgttgatgcagccatggccaccgtttcttcctcatctaaccctagttttcttaaccctaatcctctttttccctaatcaatccttttctcaatccgattctcctcgaaacatcgaaacatttttcccaaatgacacaatcacccctccagttcaatctccggttctatcgccgccgcaaaacccatcatcttcgtcatcgg

SEQ ID NO: 139287 - DNA, 427 bp, Arabidopsis thaliana landsberg
gaccctcttcgttttgcatcttgaaagcttagctttgaaagagtaaacgagtcctatatatccaaacaatgcaaaaagacagaaaaaacagaactatcttatattagacaagaaccaacaacagtgacatacactgagatcgaaaatgactgtaagtgaaagtaacatcagagaaggattcaagacaacaaaggcataatcgaattcgttgagtaacaaacagatctaacaggacaataatacgaatttgaagatctagggttacaaaaactacagattcaatactatttatccatcatggttcttctaccctaaaccatcggctatattggcaaaagtccatatatttctgataaatcgagacgaagagaagattaagtaaaagtacgattacctacctgagtagagagcgagagaggagaagcga

SEQ ID NO: 139288 - DNA, 234 bp, Arabidopsis thaliana landsberg; identical to SEQ ID NO: 26224

SEQ ID NO: 139289 - DNA, 994 bp, Arabidopsis thaliana landsberg
tatatatatatatatgataaaattagtgattatttattggttgctcaattatgatttaaagagccataattcttctttagccaaaaaaaaacaggaagagatagaaccataattctttcattaacaacaaggcagataattgcgttgatgatgggtagtgacctttttagttaatattggttcattactgaagataaaatgaactggtgtgctacagctacctgttcagttttattctcaatctatgacaaaagctatgcccatatgttctccaaggcccaatatatgtaaaattaggcctatgaaccaaacactggtttaataagaccggtaagcacaagttggattcggacattatttagaacaaaaccggttcaagagaatctacagaacacaacaagtacagagtctttttgtctttgacatttcataaaccttctcttctctcgataaacttcagatattaaaaaacccaaacttttatttcccccaatcaaaaaccctaatttcttcttatcttgtttggatttttcatttcttctgtttgattttattccacaaacacaataaaaaagtttgcattttttcctcttctaagctcgtttcagatcttcgatttcaccatttttataaactattatgcgaacttagttttgttctttgtgattttgtatgacaatgatcttcttctctaagcttaatcgctccatttctcgttcaaaggttagttgttattttcatttcattgattccttctcagattcgttctcaatttgttttttttttttgcttacctgatttttgtttatatgtgaaattagggatttttgtacggtggtggtgttagatcggcggcaaggctacttacttcgccgggacttgaggcggcgtctgtgaatgaagtggaaggtggattagggtttataagaagacactttgcttctttagcttcacggaagggtttagtcaataatgatttgattggtgtttttgc

SEQ ID NO: 139290 - DNA, 64 bp, Arabidopsis thaliana landsberg
attatgagaactattttcctaaagataagcaagaacccaagagtgatcagaaatcagagcataa

SEQ ID NO: 139291 - DNA, 96 bp, Arabidopsis thaliana landsberg
attagctcaggcaattacgttgtcaacttgtattgttgctcacaacaatgccttgttggcccttctggtgtcaaataactttgctgagatcaagag

SEQ ID NO: 139292 - DNA, 144 bp, Arabidopsis thaliana landsberg; identical to SEQ ID NO: 11804

SEQ ID NO: 139293 - DNA, 180 bp, Arabidopsis thaliana landsberg
aggtgtgacagtgtaaatgtgatgggcattttcatacccgaaaacaataagaaatttcatcattgaacacatccatttttatgctttttcattatgtatttggattcgaaagtcttgttctttgttgtgtatctctgtcagtatctaagcctaaagttttcaaaggtttgggtttattag

SEQ ID NO: 139294 - DNA, 56 bp, Arabidopsis thaliana landsberg
tgtatttattgctatcgaagtttaataaataaataaaaccgtgttgccatttttgt

SEQ ID NO: 139295 - DNA, 185 bp, Arabidopsis thaliana landsberg
catcgcaaaccgaccgttccatagctcggcgtctgaagtcatgaacccttttgactttgcctctgcccttattcccttgaacaacggaaccatcgatgccaacgtcaacaacgctgttgttcctagaaaccacccgacaccaccgtcagagatctgagcaaacacgttttctccctttgataact

SEQ ID NO: 139296 - DNA, 374 bp, Arabidopsis thaliana landsberg; identical to SEQ ID NO: 114551

SEQ ID NO: 139297 - DNA, 65 bp, Arabidopsis thaliana landsberg
ctcttcttcactcttttcctctctctccctccctccctcttccattaaatctttgtggttctctt

SEQ ID NO: 139298 - DNA, 90 bp, Arabidopsis thaliana landsberg
cccaacacactctttccttcttttgtaatctcaaagttatgaatctttttaacataacttttgcatatgtttgctagtcttgtgtaaatg

SEQ ID NO: 139299 - DNA, 54 bp, Arabidopsis thaliana landsberg
gcatataactcggagaagaatttatatgatgaacgagtaagttacaggaagtcg

SEQ ID NO: 139300 - DNA, 155 bp, Arabidopsis thaliana landsberg
tcgctcaagcttagtccatttttggatgaaatctggaattgttcctgacaactggttgtcacttacacgactatgtacaaaattatatgcattagcaaaaaatatcagaattgcatatatatagtagcaaataaaaaaaaaattctctatgaatc

SEQ ID NO: 139301 - DNA, 97 bp, Arabidopsis thaliana landsberg
tttgtaatatatctctttaattacattaccttaagaacaagatgcattttcagagccataaagttgaatcattatatgcacacaaaagactttcaac

SEQ ID NO: 139302 - DNA, 105 bp, Arabidopsis thaliana landsberg
gctcgaaagagttttgaaatgtaaagatatcatttctctgcctttatttttgtatatatcattgcctctttttgaacagatgtaaatttcaaaggagttgatcag

SEQ ID NO: 139303 - DNA, 77 bp, Arabidopsis thaliana landsberg
aaaaaaaaaaaaaaaaaaaaaaaaaaaaaaaaaaaaaaaaaaaaaaaaaaaaaaaaaaaaaaaaaaaaaaaaaaaaa

SEQ ID NO: 139304 - DNA, 57 bp, Arabidopsis thaliana landsberg
gatgtaaacgccacatctctgtttatcttcgtatgtgaatacacttcttttcgggtc

SEQ ID NO: 139305 - DNA, 110 bp, Arabidopsis thaliana landsberg
tttttgaatagcgcattagaaactcaagattatgcagttttcattcttcacttaaggatcattctcacactattttactgactacaaagggctgacaacccaccccgtta

SEQ ID NO: 139306 - DNA, 78 bp, Arabidopsis thaliana landsberg; identical to SEQ ID NO: 139089

SEQ ID NO: 139307 - DNA, 178 bp, Arabidopsis thaliana landsberg
gtcatctgccatagattcacaagctgtgtaatattccacagcatcactatcatccctctctatgtcatctgccattgtgtcactatcatccctctttatgtcatctgatacaggtaaatcctctgccatgattgtagacgttacacgctttcttttcgtcttcttcttcaaattttct

SEQ ID NO: 139308 - DNA, 84 bp, Arabidopsis thaliana landsberg
gctacaggatttatgttcttaatttcctggcgtggttattggcaggaattgattgaaactttagcgtgggctcatgaacgcaca

SEQ ID NO: 139309 - DNA, 125 bp, Arabidopsis thaliana landsberg
gaatcgaacttgatttcatcgtggtattattgggttatatatgctactgaaatttgatttaagaaaaacaaaaaagacagaggaatttcgaaatttggtgtactctgtgactcgatttcagagca

SEQ ID NO: 139310 - DNA, 132 bp, Arabidopsis thaliana landsberg
ttaattattatcatacaataacagcgtttcaccattctcttttcaatattttcagttactttctataagaaccattcacttattcttttttctctctatctgtgattatggcttcctctatttccgctgctg

SEQ ID NO: 139311 - DNA, 105 bp, Arabidopsis thaliana landsberg; identical to SEQ ID NO: 48031

SEQ ID NO: 139312 - DNA, 118 bp, Arabidopsis thaliana landsberg
aggaagacttttgggaccaggaaatattgtcgattgactgctcaagatcttttgttctgctcggttcatccgatgatttatctggtaccacttcagaaggcttcttctttccacgtat

SEQ ID NO: 139313 - DNA, 122 bp, Arabidopsis thaliana landsberg
gagcttgtctgtgtcaatagtgaggcactacatcgaggaataagaaagaagatctaaggagctaaagctattatgtcaacgaacactgaatcttcttcttattcttctcttcctagtcaaag

SEQ ID NO: 139314 - DNA, 136 bp, Arabidopsis thaliana landsberg
ttttcccggcggcggctagataatactggtttctgccagcaagatcgaaggagataaacttcgtaatcaaaaagtctccttctgataaaaagatgtcagaaaacacaaaagtcgaagcgaagagagtgttcatagg

SEQ ID NO: 139315 - DNA, 153 bp, Arabidopsis thaliana landsberg; identical to SEQ ID NO: 114666

SEQ ID NO: 139316 - DNA, 384 bp, Arabidopsis thaliana landsberg; identical to SEQ ID NO: 81893

SEQ ID NO: 139317 - DNA, 85 bp, Arabidopsis thaliana landsberg
cttgtgctacaacttataacattatgatcaatagttatggtgatcaagaaagatgggatgatatgaaaagattgttgggaaagat

SEQ ID NO: 139318 - DNA, 93 bp, Arabidopsis thaliana landsberg
aggtgggaggggctagaagaattcaagaaaatggaaagagagccattattctgcgaaagtgacagagcaacaagaggctttaccaaatcatac

SEQ ID NO: 139319 - DNA, 265 bp, Arabidopsis thaliana landsberg
ccgaatcgatattatcggattgcaaagcagagttgatttcggagtcaataactcggataagcgtttgctcggagctaattcgatcaatagccgtcgagtaatttaaggcgcgagagacgaatggacgaattgaagatgggttgcgagctagagaggcgcggttcgcaacggcggagatagatcggactcggccaccataaacggaagcaaacttagatgctgacctgcgtacaacgcaccaagctaaagccatggtgatttgatt

SEQ ID NO: 139320 - DNA, 462 bp, Arabidopsis thaliana landsberg
tgtattttagcgatgagtcatgattatgtattgatgcgtcgtgatagaggttttttgtatatgagtgaattggatattgagttgatagttccggcgtggtttatggctgttattaggggtaagattggttctccggcggccagaagggatgtgatgttgacggcggcgaaagtgacggcggatgtgggtgttaagatggggattgttgattcggcgtatggtagtgcgacggagacggttgaagccgccattaagttaggtgaggagattgttcagagaggtggtgatggacacgtgtatggtaagatgagagagagtcttttaagagaggttcttatccatacgattggtgaatatgagagtggttcaagtgtggtgcgtagcactggatctaaactttagaacaagtttgtacttcttgggctacttgtcagttctttttaagcaattgttctttataca

SEQ ID NO: 139321 - DNA, 182 bp, Arabidopsis thaliana landsberg
gtaattttttttatttctgtttatgtttaaaaaaatttttcgaaaaatctcttcgtttttaaaatgatgacgtatcaaaaaatccagtaagactttaccatactcatcttacttagtattagatagattgaattttggttgaatttaattagatttctttttttatttttaaacaaggccgt

SEQ ID NO: 139322 - DNA, 1565 bp, Arabidopsis thaliana landsberg
gattcggatacgtgtacagttccagaccactttcttccgaggaaactttccaagcaaaacttggacagattcatcccaaacagatccgtcatggatttcgattttgctaactacgctcttacccaaggaagcaaacgtaacctcgatgaggtaacttcagcatcaagaaaagcctacatgccgcaattggctgtggttatgaatcagaatcgcacccgtatttttgctttcagaaacaaacctaaagctctgctttctaccaatcactctgactctcctcaccaaaaccctaaacccgtaaagcctcgtagatacattcctcagaatagtgagagagtcttggatgcacctggacttagagatgacttctcccttaacttgttggactggggcagtgctaacgtcttagccatagctttgggagacactgtttacttgtgggatgcttccagtggctctacgtctgagcttgtgactattgatgaagacaagggacctgtcacaagtattaactggacgcaagatggttttgatctggcagttggtcttgacaaccagctttgggatactgtttccaatcgttaagtgagaacattgagaggtggtcacgagtcaagaataggatcattggcatggaacaatcacattctaacaactggaggaatggatggaaagctcgtcaacaatgatgtgaggatcagatcatctattgttggaacttacgtgggtcacactgaagaggtttgtggtcttaagtggtcagaatctggaaaaaaactagcaagtggtggtaacgacaatgtagtacacatatgggatcgttctctcgcttcctcaaacccaactaggcaatggctgcataggtttgaggaacatacaactgcagtgagagctcttgcgtggtgccctttccaagcaactttgcttgcaactggtggtggtggaggagacaggacgatcaagttctggaatactcacactggggcttgcttgaattcagtagacactggttcccaagtttgttcgttgttatggagcaagaatgaaagagagttgcttagctcacatgggtttacacagaatcagcttacactttggaagtacccatccatggtgaaaatggctgagctcactggtcatacatcaagagttctatatatggcccaggtaacgtcatcaatttctttaagtggtgaagtagtttgagtctttgaggtcattcagtccttaaacttgtgttgtttgttgtgttttctacagagtccagatggttgtactgtagcttcagcagcaggagacgagaccctgaggttttggaacgtttttggagtaccagagactgcaaaaaaagctgcaccaaaagcagttgccgagccattttctcatgtgaatcgtattcgatgaagctgttgaagactaaaacaacaaggaaaacccattgattgttacaaaaagaaactatatattattatttttattttattaccaaaggattcattcttcgtgaatataaagattacttgtatatattgaaatttgaaaaaagaaagattatgattttatac

SEQ ID NO: 139323 - DNA, 50 bp, Arabidopsis thaliana landsberg
aaatccttgggcagaggaaaaagtttatagcgactcttttcctctaaaag

SEQ ID NO: 139324 - DNA, 742 bp, Arabidopsis thaliana landsberg
caattcttttactttcattctctttatatattctctctacgctataatatatattacacagaatatacatggaaccgtccatcaaaggagatcaagaaatgttaaaaatcaagaaacaaggtcatcaagatcttgagttggggttgacccttttgtcacgtggaaccgcgacctcatcagagctcaatctcatcgattctttcaaaaccagctcatcatcgacttctcatcatcagcaccagcaagaacaattggcagatccgagagtgttctcgtgtaattattgtcaaagaaagttctatagttcacaagcgctaggcggtcaccaaaacgctcataaacgtgagcgcaccttagccaaacgtggacagtattacaagatgactctctcctccttgccttcttcagcgtttgcgtttggccacggttcagtcagcagattcgcaagcatggcatcgttaccattacatggctcggtgaataacaggtcaacgttagggattcaagctcattcaacgatccataagcccagcttcttaggaagacaaacgacgagtttaagtcatgttttcaaacagagcattcaccagaaaccgaccataggaaagatgttgccggagaaatttcaccttgaagtcgccggaaataataacagtaacatggttgctgctaagttggagagaattggacatttcaagagcaaccaagaagatcataatcagtttaaagaaaattgacttga

SEQ ID NO: 139325 - DNA, 178 bp, Arabidopsis thaliana landsberg
tttgtttattggtagtcagcgacacggaactcattaactttactcttctcactggtcaatcgtcggagataatcgggtgatcggcgatggagaatacggacgtcttcttggggctgcatgatttcctggagcggatgcgcaaaccctccgccggcgatttcgtcaaatccattaaaag

SEQ ID NO: 139326 - DNA, 478 bp, Arabidopsis thaliana landsberg; identical to SEQ ID NO: 28166

SEQ ID NO: 139327 - DNA, 202 bp, Arabidopsis thaliana landsberg
agatcatttatcgaaaccaaaaccttggtttaaccgaatacaagttccttctcaaagccatagtaagctcagggattggagaacaaacctacgctccaagacttgtctttgaaggtcgagaagagcgtccttcgttacaagatgggatctccgagatggaagagttctacgtggacagcatcggaaaactcctggagagaaa

SEQ ID NO: 139328 - DNA, 307 bp, Arabidopsis thaliana landsberg
aacatttcttttaaaaatgagaaagttgttggcatcgccgtttagttcattactcgccgtcgttttcatttccgtcatctccgtcgtcagatgctgctctcctaaagatcagacggctctcaatgctttcaagtcgtcactgagcgaaccaaacctcggtatcttcaacacttggtctgaaaacactgattgttgcaaggaatggtacggtatcagctgcgatcctgattcgggtcgggtcactgatatttctctccggggagaatctgaagacgccattttccaaaaggcaggccggtccggttat

SEQ ID NO: 139329 - DNA, 778 bp, Arabidopsis thaliana landsberg
taaaaccacacataacaatcacaaatgaagaatccttcagtgatctcttttctcatcattctcctgtctgctgcaactatttgcacccacggaaatgaaccggtgaaggatacagccggaaatccacttaacacccgcgaacaatacttcatccagccggttaagaccgagagtaaaaacggaggtggtcttgtcccagccgccattacagtacttcccttttgtccacttggcatcacccaaacacttcttccctaccaacccggcctaccggttagcttcgtattagcacttggcgtaggatcaaccgttatgacatcttcggctgtaaacatcgagttcaagtccaacatctggccgttttgcaaggagttttccaagttttgggaagttgatgattcctcatcagctcccaaggagccttcaattctcatcggtggtaaaatgggggaccgaaatagctcgtttaagattgagaaagctggagaaggagctagagcaaacgtttataagttgaccaccttttacggaaccgttggagccatcccaggggtttggttaagcgcaccacaactaattatcaccaaggatacggctaagaccttactcgtcaaattcaaaaaggttgatgatgctactacggctactagcaacttatacttcccgggttgataatttaggtctaaggatgttcccattctactaatcaactggtaaaaattattgtaatattaagcctgagactcgtccatggcctaaaataatgagttattttcaa

SEQ ID NO: 139330 - DNA, 1813 bp, Arabidopsis thaliana landsberg
  unsure (1)..(1813): unsure at all n locations
tttcccagtgagaaatggcgacgaaggaaccagaatctgtttacgagttaagcatcgaggtgaatacatttctctaacttgagtcatcgattcaataactctctctgtctctgataacttgaatgtgagatcttttgttaaaaggaagcacctttgatataagggttctaagaatgtgaagagtttttactttaaggtgtcttgtaggctattccggatgaaaaggaatgtcaaatttttatattgtctgaaggaacgatttgtcttctgttgtatcccgatgtttagtttaggattgcttttctcagtagaatcaatcagatcatgatggatcatgtttctttcttctgttgattggtctctcacagattgttttctatgatctttgattgatttcttgtgttggcctctgagtctttatcttgttcttcctgtaacaggatgcaaaagggaacaacttagcactcagtcaatacaaagacaaagttcttttaattgtcaatgttgcttccaaatggttagtttattagacattctattaagcttctttcgtttgtaactttctcgtcttgtcttgtttattatatactctatgatggtctcagtgggatgacaaactcaaactacactgaattgaatgagctttacaacaggtataaagataaaggtaaagtagtgatttcaacaaatttctaagtccacgttattagcttcctcattgatgttgttctgttgcaggtctggagattctagcatttccttgtaaccagtttggtgacgaggaaccgggaactaatgaccaaattactgactttgtttgtactcgcttcaaatctgaattccccattttcaacaaggtactatagttcactcgatgagttcactacaattctctatgattgtcctgaagttcttaaaacattcgtatatgtccaattttgtattagattgaagtaaacggagagaatgcttctcctctgtataagttcctgaagaaaggcaaatggggaatcttcggcgatgacattcaatggaactttgctaagtttcttgttgacaaaaacggtcaagctgtacaacgttattatccaactacttcccctcttacacttgaggtaaagcaactatctctcattcactctctctcagacactatctctgctaactttcttgtctcaatttttctgcagcatgacataaagaatcttctgaatatctcctgaatgatgaagctttgttgctgaatcgtattgtatttgattatgaacctctctcattcaataaagagccatgacattgacttggattgattagttctgtttgagagccaaatcggttatttagataaaccagcattattatctcaggctgatcaacttggatagattacttcatttctaaaaccaaacacttaaaaccaaaaccgaattgaacacagatattgaagaaaccaaaggaagctttaatgagtgatataaaagagttaaaatctcgttgagtagcctgaaagtggggtggttctgtttcattgagaatgttacaataaggaactgagagttctggtctcaatcctgaaatgtctggtttaaacattcccagagagaaatctacaacaacaaagatatgtacagcactcacataatgtatgctgctgctgcttccaagactaaagggtagtagtcggagtaaataggaagaaagactaataatgtttttgttttcaatcacccgcgannnnnnnnnnnnnnnnnnngtgggtttctgctagagtcaagtgatctgcctgagcctgagcctgagcctgaaccgggcc

SEQ ID NO: 139331 - DNA, 940 bp, Arabidopsis thaliana landsberg
gtaaactctttatgtatattatgtaacgtaggagctaacccaccgccaccgatgtctacctgtacatcaccaccaccgccgattggttacccgactaaccaaccgagtcatggttcggtagctcagggtaaagtggaaaccaagtctaagggtgacggattcttcaaaggctggtaagtacttatcatgaaattatgcaactttatgcttcatcataattatccttaatgggccaatatattaaagcccaaaaagcttattttttatttttaaaaaatatgcgatcttatcatgaaattatgcaacttcataattcaacataatttatgcttaatgggccgatatattcagcccaaataggttatttctttttctaattttgatatatctgatttgttttttttaatggaatctttgcttgtagtcttgcggccatgtgttgctgttgtgccctggacatttgcttctaagccatttgggaattgggatggtctatttatgacgagtttatgtgaatgtgatgtgaattattattattattctctccagccttattgtataaattctctattttttgtttattattttcttgtaatactttgtgagacgaacatattatggtttgtatttggatctctactctctagtacttaaattaatttgtcttgctcttggattggtatagttaatagctttaatctcacagaattgcgcgtttttctaatgattttctgcaattataacaatagatgaatctaattattacaactcatatagaaatctctaaatcatcaaataccaattgttgcctctgctttacgaaatactttttattattagggttaacacactttgaagctcacagatatcttttaatcaattgaaaagacaaatccacattttttctgttgaaaaaaaggaaaaacataaaacttaaagt

SEQ ID NO: 139332 - DNA, 1585 bp, Arabidopsis thaliana landsberg
tcccttcttccacatcagaacccatttgtctttgagtgagagaatcagctttcagagaaaaaagtatacctacagagagagttatggcggagagtggtggacgaaggatcggagtggcggtggatttctcggactgcagtaagaaggctctgagctgggcgatcgataacgtggttcgcgatggagatcatctgatcctaatcactattgctcacgatatgaattacgaggaaggcgagatgcagctctgggagaccgttggatcacgtaccttcttaatctctctctctctctctctcaaattccttttcacctttatattgttttcctggaaacgtgatatagaaattgggtgtgatcgctgatgatttaacttatgattttccggttttgtctgatcttgcatacctttgttgaaggaacctgacttatttatgcatcgtttgatctataattggttctgtatgatttgcttgtttaaatttggaaagaatctatttgaagtagtagttgatcgtgttttgctcatgatcatcttaattctttcccaagtttatggtttgaattcctactaatgatctcgttgttgtttgactctggttttgtgtttgtaacttttcagcttttattcctatgagtgaattctctgacgctgctgtgatgaaaaagtatgcattgaagccagatgctgaaacccttgacattgtcaatactgccgctaggaagaaaacggtaagccacttcttctttcccttttaatgaaagaataatccataaaacctctctgcaactggaaacacttttatgcttacaacagttttagtttactaatgttcacataacaatacctgaatcagagtattaagattatgattcccaaagatggtgatcttccagttgcggatagtttatgaatatgcatcactgaagagtaccgataacttgtacaaaataatggtctatctctggtgttctagacaaattaatctgaggattggtgggactatactctattgaataacctgtaacggtactgacattgaatatgttacattacatctatcatagttttattcagaagttcattgaaagctttatgttgccttgttagttgtgactaataagtgaacattgtcaatccatatgaatgtgactttctttaccacaattgtttggttctgtatttaaccaaaattcaactgttgtgaaacatgtgcagattacagtagtgatgaagatatattggggagatcctcgtgagaagatttgtgcagcagctgaacagattcctctctcaagccttgtgatgggtaacagaggccttggtggtcttaagaggatgattatgggaagtgtaagcaaccatgttgtcaacaacgttgcatgccctgttaccgttgtcaaggctcacatctgagtttgctcggagaactctaaataacaccaccgtgtattctataatttgtgtttttgtggtcggaatttctattgttaactgttgtgtgactggtgttttgttcatctgtatggataaacaacactccaccttctaataaatacagactcttttgatttttggaccaaa

SEQ ID NO: 139333 - DNA, 1947 bp, Arabidopsis thaliana landsberg
ggcaaaaccctccagcgccgcttggatctctctctcctctgttctctcttcccttatcttcttcttatacccttcgaccaacgaagaaccctagaaatcgattaacaaggtaagcccacttcagcaaatcgttcactcatttcatttccaagatattcgattgtttccttctgatttagcacaagggtcaagatcatttttttgtttttgttcttcctcgattcatatgttttttttcattgattactgtttttgacattggttatcttgttttccaataacttgttagttagttaaaagtaatgtttgtgtaatggtgacctaatcgattgaaaaaattgaaactttaggttaagctcattgtaacaatacgagctttgttcttctcgctgcactgttctcataatcctagtgtaatcaatttgtgggttgtgactattgctcagtattactgtttttgtcattggctaattaataacagtattagttattgtatatgcttaatttataagatacattttgggctaaatgggtttagctttgtgtgtttgttttgaaaaacagatgaatagggaaaagttgatgaagatggctaacactgtccgcactggcggaaaggggacagtaagaaggtatactcatttatgtcttttctgtgaatttgtgtttttgccatttttcatgttatattctctaaacattttgactctcatttcagaaagaagaaggctgttcacaagaccactacaaccgatgacaagaggctccagagcactcttaagagagttggagtcaattccattcccgccattgaagaagttaacatttttaaggatgatgtagtcattcagttcattaaccctaaaggtaaaacatcaaattttatggctttataaatctcaggtttcgtataaaatttattgtattaatggttgttgtgtctctgttttaatgttgctatcacagttcaagcttcaaatgctgcaaacacatgggttgtgagtggtacaccacagacgaaaagtaagtgtttgtatcctcattgttgatccaatactattctcggtttatgcatagtctaatcttggaatgtgaattatcctgcagaattgcaagacattcttcctcagattatcagccaacttggtatgcagcattaagtgttacactctgatgtcctttcccaaaccagtggtcccttaagttaacattttgttttcttgctttgataatcgcaggaccagataacttggacaacctgaagaagctagcagagcaattccagaaacaagctccaggtgcaggtgatgtcccagcaacaatccaagaagaggacgatgatgatgatgtcccagatcttgtagtgggagagactttcgagacccctgctactgaagaggctcccaaagctgctgcttcttagaggaggaggaagaagaaggagaagagctcacctgcaaaacccatcataaaaatgtttgtcgctcgacctcttctgagcactgtcagattcttgttttctctaatgcttgcgaacagaaagacttggttttattatcacttgatgctttttggtccgaacagcaattttccttttattaaggttagatcgctttttgtttaccacctgttcaaatgagtactactatgtcctgtcgcttcatacacttcttgcaacacagtcctttgttttgagtcaacgatgtcttgagatgaacaatcaacagtttcgtacatttaaatggaaattccaaagattttacatatttccaattattggatgtaaacattccatagaaatacaacactgtgaatgcaatcaagtaatcatgattgtttcgttttcgatctcttccgctttcccctgttgtgctagtgtttcgtaaagcggagcgtttcgagtttctcgtagccagagactcgcgatgccgctcagcactgatgcaa

SEQ ID NO: 139334 - DNA, 1056 bp, Arabidopsis thaliana landsberg
gagaacgtggaagaagaagccatggactctatcgtctccagttcgacgattcttatgcgatcatatctcactcctccggttcgttcatgttctccggcaacctccgtttccgtcaaacctctgagctcagtccaggtcacctccgtcgcggctaaccgccacctgctttcgttaagctccggtgctagaagaaccagaaaaagctctagttcggtgataagatgcggcggaatcaaagagattggagagagtgagttttcgagtacggttctcgaatcagcccagccggttttggttgaattcgtcgctacttggtgcggtccctgcaaattgatctatccagctatggaagccttatctcaggtttgatacatttaatctctcttttgtaatcatcagttcttgctggagaatcgtgagagtttgaaattgaatgagatcgtcagagattttcacgcatgatttggtggtacaaacttgggatttgagattttatgtatgagaaactattgttaatcatataccattagctctacaactactaaaaatgtcagttagtgactactgtttagagttgagcttccttttgcaagtgcttagagaataaattcagttctgagtgtttttagttgtcttggttatttaaactcaaaatgtttcctttgtttctcaggaatatggtgacaaattgacgattgtaaagattgatcacgacgctaatccaaagttaatagcggagttcaaggtttatggtttaccgcatttcattctcttcaaggacgggaaggaagttccagggagcagaagggaaggtgctattacaaaggccaagcttaaggagtacattgatggtctcttgaactcaatatctgttgcttaatcgtctctctccccaccggtattcttctgtctcaacactgtttttttaatgtaatcaaatctcttcaattgtgatgatcttcatccccggtttctcatttgatgtgtatatcttgcaacaaattttacgaatagaaaagagttgttctcttatcagggaaatatgtatttaggctt

SEQ ID NO: 139335 - DNA, 1565 bp, Arabidopsis thaliana landsberg
aaattactcttcctctctagccatggccgtctgtaactgcttcctccaagctccaccactctctcgcatactcctaccggttttatctcgccgagctactactctctctgccggttatggtcggctcaaatccacggtcacgttctgctctactgtgaaccggaccagtcctctgacatcttcggtccgcgcagaagtaaagcgcgtctcgcgtaaagacgataaagtagcttcaggtaacagacttgcttatctattattgattactctatgagcatgtactgtttatgtatgattgtaattttgtgataatgttgaagctactgatgttcaatttgagacgcctttgaagattgttgagtatccggatcctatactacgggctaagaacaagaggattgatatttttgacgagaatttaaagaacttggttgatgctatgtttgatgttatgtacaagtaagtcctccttataatgtaagtaacttagtacttaataacagagtgatactgtgattacatatggctattggacagaacggatggcattgggctctcagcaccacaagtaggtctcaatgttcaactcatggtgtttaatccagctggagagcctggagaaggaaaagaaattgtccttgtaaatccgaaaatcaagaaatattccgataaattagtaccgtttgatgaaggatgcctctccttcccggggatctatgctgaagttgttgtatgtccaccctttcttgactgaattacttaaaccttattattgctcattgtttcttggaaaccggttcttatgtggttggttttgctttcagcgaccacaatctgtcaagattgatgcaagggatattactggtgaaagattttcaatcagtctatcaagtttacctgcacgaatctttcagcatgaatacgaccatctggaggtttgttctccacttttattttgataactttgcttgattaaatatagcaatgacaacacagaaagtacatctatgtacagttgaatggctgcagtcacttatattttgatgtttcgacattgaaaagtgtcatcatttactcacgggccttatcttctttagtacttttgttcacttttacttgttttcatggaggtattttgtgttactgtatgtgagtatccctttcaagctttcatttcggtctgatggaacattcttcaaattacagggagttctcttctttgacagaatgacggatcaagttcttgatagcattcgtgaagagctagaggtgagtaaaactgtagcagggcagagtctaaagctacaataaccactagttaaatttcgtggataaaattaccatttgtatgttagtagtgactcgtgactttggtgaacatctttgcattcagtagtctattgtcttaaaatgtttgttatcatcgtaattctataatattcctgacaagttttgtactgtaggccctagaaaagaagtacgaagaaaaaactggattgccaagccctgaaagagtagaagcacgacaaaaaaggaaagcaggagttggttttggcaaacgttga

SEQ ID NO: 139336 - DNA, 2381 bp, Arabidopsis thaliana landsberg
  unsure (1)..(2381): unsure at all n locations
atggagagttcaaacttatacgatttcaatcatgaaaaaaagggactatcgaagagctctattcagaacatcccgatgttctacaaccgttcagaacatcaaacaaaatcgagttgctcgatttgcttacaggtgataaaaatgtaattaattagaatcatctaggaatcagattttaatatatgataataatgacttaaatcatatatatttctaatgttcatttttggggtgtgtaggattgggaagaaggggaagtaggaagaaagctagcaagatgtggccacacatttcatatgaattgcatagatgagtggttgcttagacaagaaacttgccccatttgtagagaccatctttcataacacacttctacataacaacatgttgtggataaactttcacaaagccatggacctcatgacccaatgggtccaaatttttaaaatttgcaatccaactaaactacacaaaaataaaaattaaattctcagtaatatatgtacctaactaagggtaaagtgggaaatacaaaaaaacatttcgaagagaaggaagaagacaaaagaagaagcacgagaatcatctgcttaaaatccaatcgcatcgactcagtcttcttcttcttcttcacctacctttctctctctctctcgtggtccattcgctattctatacttcttgtcggcgccggagagagtgagatgacttggtcggttttcagatccataaatactccaacactcgacctctccaccgcacttcgctccactcgtaccccattggtcgctgctggtgtcggctgcgcaacattcgctggtgtttctctcttcagaatgtcttctagatctcctcctttcgcttccctctctgtctctgcttcttctggtgacgattttactcaattttctccaatttggaccgatattagtactttctaaagatgcgatttttatgaatgtcagtgtcaaaaaattgaatttgatttcagttatcatcaatgcatatgtttgttagtattgggttttagtttctttcatcttccgtattgaatgatcaagggtttgagaatagggtttttactaaagaaatgtgatgttgtgtgtggtgtgcagtgaagaaggaagttgtgtctactgagaaagcaccagctgctttgggaccttactctcaggccattaaagccaataatctggtttttctttcaggtgttcttggacttatacctgaggtccgtatatataagatatgaaactgtgtaatcaccatgttgtttctcttttctgtgttctaagattacaagatttgctctttttgttttgtgtatatagactggaaagtttgtttcggagagcgtcgaagatcagactgagcaggttagctttcaaactgtcactttagtctctataaaaattggttttgtttagagtactttccacttgcttctctgttttggtggatgattatccacagaaaaggaggtctagcctctaggtcgtcatgatgttgtttgttggtgaaaatgtagtgagggatgacaacttaatgtgccttattctagctgagtttattgggatataaactttcatgatacaaaactaagcctttgaaacttttgggttttgctttaaaattcttgatttggttggtattagtcttcaaattaacttgttccagtgtagttgtagaaaggttgagttgctctgtttnnnnnnnnnnnnnnnnnnnnnnnncttctattatcttatggaatatcaaaggtactcaaaaacatgggggagatattgaaagctagtggtgctgattattcctcggtggtgaagacaacaatcatgtaagggatcttgtttttttcaacagtaccattgtccatttgaattctgaatctaaatagaaagaaaaacaatctcttctggttttctctcaaaggttggctgatttggctgacttcaagacagtgaacgagatatatgccaaatgtgagttctttaacaagattgtttgtgttcctactttgtttgagatgcataattattagtggagtcgttaagggcatgaaacatttgtctctgttgcagacttcccagctccttctccagcacgatcgacgtatcaagttgcagctttgcctctaaacgccaagatcgagattgaatgtattgcaacactctagaacactcaaatcaatctctacgaagggtattttggtccggaagatgtcaaaacaaataagagaaacaatggtttttggggcttaacccatatttaacctacttttcattttgctgcactacgaaaaatgttgcggattatcaaccattaggttggttacaaatcaaaagcctctaatcaagaataagttatttagtgtcttgtccacc

SEQ ID NO: 139337 - DNA, 668 bp, Arabidopsis thaliana landsberg
tcactaaccaaaacacacttcaaaaacgattttacaagaaaaaaatatctgaaaaaatgtcagagaccaacaagaatgccttccaagccggtcagaccgctggcaaagctgaggtactactctttctctctttgacagaactcttaaactggaaaaattgttgaagctataactctttgaaaacagttgaaacttgatcattactagaaatttcagttacttgtttaatttagtttgtcgtaattatgtaattgatgattttatggttacaatggttgtcatgtaggagaagagcaatgttctgctggacaaggccaaggatgctgcagctggtgctggagctggagcacaacaggtaaacaatccatacacagacacataacatataatatgtaacgaaataaacgtctttgtaagcttacatgtacgcagatttctgatatggttatgtatatgttataggcgggaaagagtgtatcggatgcggcagcgggaggtgttaacttcgtgaaggacaagaccggcctgaacaagtagcgattcgggtcaaatttgggagttataatttcccttttctaattaactgttgggattttcaaataaacgatctttgatcaagaattgcttatatatatatataaatatattgcaaaattattagacgagcc

SEQ ID NO: 139338 - DNA, 921 bp, Arabidopsis thaliana landsberg
acgattgttctctatttagctaaaaataacagatggttttaactttatgttttttgtataaaaccgaactttgtggctcttgtgaattagttgtcctcttctctaacatctcaaacaaagaaaacgattacaaaagagaagaggtatcaaaaagaagactagaatcttttaacattttgaaacaaatggcgtccaaagccatcttcttcttctttgtctccgccgtgtgcctgtcctctctcgccggtgtggccatcgctgatgccgatgactttgaccgtttccaaattcagggatcggtttattgtgacacatgccgtgtccaattcgttacccgtctcagcaagttccttgaaggtaaacattttcatacatctatatactacacattacacattgtttatgttattagtatttctgcttattcaaatttgtctacattgttttctataggcgcgaaagtgaagctagaatgcaggagcagaacaaacggaaccgtaacattgacaaaagaagccgtaacggacaaaacagggagctacagaatggaagtgaccggtgaccatgaggaggaagtttgcgagcttgtgctcgtcgaatcaccagacagtggttgcagtgacgttagcaaagaggcttacctacgtaacgccgctaagatcagcctgaccgcgaatgacggaatcgtctctcacgagacacgtatcgttaaccctctcggtttcatggttcaaactccgtcagctgaatgtcccgctgctttcaaggagctcgggatcgttcctgatgtcaccttctaaatttaatgacttcaagatcgtcatttaagtgtaatctattgtttgtttctatataacaaaacaaaaatgtaatttgataaaacacaaaaaaaatgcagtaaataaaataaattattttctt

SEQ ID NO: 139339 - DNA, 1423 bp, Arabidopsis thaliana landsberg
tgaaactactctccgccgcgagtcgtggtctcaatggacagttctctcgcttatctattcgcgccgtcgctacacaatccgcaccttcttcttatcccggtgagattatcaaactctttagctggatttgaaactgtactctttatctgtaaaatttcaaatgtttctattttccgagtagtttatagattcaaattgtttctcgttggtgacatttgtgtttagttgatgttactctactccacaaacactctcttgtagagaaatttcctggggcatttgatcaaattgacactatagctgcgttaggataaagtggaacattttcttctcatatttgatttatgtttttggttaaacagtgttctgatgagagtcaaatgtaggtcaagatgaggctgagaagcttggatttgagaaagtctctgaagagtttatctcagagtgtaaatctaaggctgttctcttcaaacacaagaagactggttgcgaggtgatgtctgtttcgaacgatgatgagaacaaggtgtttggcattgttttcaggactcctccgtaagtgtgtactagaatacatgaatctgtcctactagtttatctttagtataggtgacttggaaagttttgttgatctcggtgatttcttaatggtgtgtaagagatttgtggtatatgaggcttcgttcttgaattgtagtcgagtgagtgaaattctagcatatcaagggcaaaaattagccaatggtgaatagttttgcactttcagttggaataggtaccacgagcaagcgaaaattgtaactggaagtgcttgactgtggttttgataatagtttggttcttgatgcaggaaggattccactggcattcctcacatactggaacatagtgtattatgtgggtcaagaaagtacccgatgaaagaaccatttgtcgaattattaaagggaagtttgcatactttccttaacgcattcacatatcctgataggacttgctacccagttgcttccacaaataaaaaggtaataatacataaatactcttttcttccccaaccactgtcatatattcaagtttggtctcatcacatttcatcactatctatgctaggatttctacaatcttgtcgatgtatacttggacgctgtattcttccccaagtgtgtggatgatgttcacacttttcagcaggagggttggcattatgagcttaacgatccttcagaggacatatcttacaaaggttctatgtgttacatatgcctagtttaaaagcttgtttgtttttatctttccgtttgttgaacctctaatctattaacttactctccctgtctctttgttgatgtttctcatatcaggcgttgtttttaatgagatgaaaggtgtctattcacagcctgataatatactagggcgg

SEQ ID NO: 139340 - DNA, 708 bp, Arabidopsis thaliana landsberg
agcagagagcagtcgacaatcatgggtcactccaacgtctggaattctcatcctaagaaatacggtcctggttctcgcttatggtactatctttttctcatctctcggctttcttttcttttaaaataaaaattctgtttagtttagagaaattgggattgcctaagaacttttatcatgtttatcattcgaaagattttcaacataggaagattttttatctgaacctgatccttattgattatgtgaaacttttgatgtgaaattttgcttagggatagttaagtgtggtggtttaggtgtgtaaagcagaacactttatccatgaagatcttgtattaatcttaatagtttccatgggatagaaaattgatatgttcctccgctctgtttgagttgacttgttagatttcttcattccattttttactttagtttacgttaaaacattgttttgttaataaatatatggattactgttaatagttgtgttgatttggagcatcttaaacattcatgtatttgttttgtagccgtgtgtgtggaaactcccatgggctaatcaggaagtatggtctcaactgctgccgacagtgtttccgtagcaacgccaaggaaatcggattcattaaggtaaatacttgtatgatttatcagtcttcattgccattttttcaagctcttggatagattattcattgctctggt

SEQ ID NO: 139341 - DNA, 3899 bp, Arabidopsis thaliana landsberg
atggacagtagtgcacctgcaccagcgtcggatgtttcagttgttggcgaagcatcggcttgggacgagtcacagcttgtggcgagattgacatcaactttcatgagtttgtcagaaagactttctggctttctcagtgaaggtcagtctgtgttcatgtctgctaagttgtttgacaaaattgcaatgcttgtagatgatacacagctgtacgagcgctttaatgatataagatcgaagcttttgagtttgatagagtcaaagcaaaactcaggacttgttaaccaagtcagagatttggctcagcgccttgtgaatcttttcgacgatggtcaaaggtctgtctcgcctccgctgattgatttacaagagcgcctcactgcgaccatagaagattttcagaagcaactggatttgatagttaaatatgactgggattttgatcactacctggagaagatgtccctgctgcggtgaggcaatgttgatcttgctgaatactttgcataatcgtgtctgaattttgtttgaattgggtgtccgtctttggtttgctatagattgagtatgtaagagcacaaagcaagcccaaggacggcaaactattcgcaattgggcactccatggggggtatcctactctatgcaatgctatcacgttgtggtaagttagtattcatctttcaaacagaggctcatatattaaggccgaaattcatttcttctatattattttgttagcttttgaaggacgagaaccttccgtggcagctgtggcaactctggcatcatcggttgattacacaacctcaaattctgcactcaaattgctcatacctcttgtacgtgtcgttatgttatatcactctgcgcaggaatctttgacaagaattgatgtgccataaatatctttggtagctaatttactagatacttcttttacaggccaatcctgcagaagctctgagtgttccagttgttcctctgggtgctttgttggctgccgcttttcctctttcgacacgtcctccatatgtattatcttggcttaatgatttgatatcatcaacagatatgatgcaccctgaaatgttagaaaagcttgtcttgaataacttctgtaagtaaaaacagttgatcccatttaagtatgtgagttcttaatgtattttaagtggaaaagaaacgtatcttcattaagaaaaagaaaatgctggaacagttactattagatgcttgaatgtaccatgactttttttgcaatccgtaattgctccctttatggtgattttcaagagtttctttgttttcttacatctaggtaccatacctgcaaaactacttattcagctgacaacggcctttcgagagggaggcttacgtgatcgtagtggtaaattttactataaggatcatcttcccagaaccagtgtccctgtcttagctcttgcaggtgatcgggacttgatctgcccccctgcggctgtggaaggtatactaacataatgtttattatgaaattctgcatagatgactctagcatatacatgaaaccattcatttacccagatatgcatttcattttaaattctacattgctgttactgaattctttcgagttatgagaggctgtataaggcgtagatggattaacttttgtgatactttccacacacaccaaataaatttttaagctactcacacatgcattttcaccattatgactaattacaaatgcttgtgaatatggcagacactgttaagctgtttccggagaacttggtcacttataagttacttggagaaccagatggaccacattatgcacactatgatttggttggaggacgactggtatgtttgttccccagtcatttctaggtctcctcctctgttggaactttgttcaatgctgtatcatgtgcatgcttgtttcgtttgttaatcgtttctctgacaacttactgcaggcagtggagcaagtctatccttgcataactgaatttcttagccaccatgattccgcataagtgaaacatttcgggagtttctgttccttgcatgctatagcacatgtagattgtagacgtcgcactaaggtggtgtcgaagaagtgtgtttcagaagcgcctgttaaaaaggatgccatttccgtttaagacacgtacatttagtatctgggcaaactgtacatgagcttaggatgcagttttttcaagtcatacacctgtaaattaggaaaagcatcgaatgagatgctggaagctcttgtctactgtgatgatttcccttgttttgttatggcaacgagctttttatttgaacatttatctttagaagaactggtgtgttctcttgtactgctttgcttcttttggaggacttgagttatccatgagagcaattgtatagacatggatttatgtgtacattttctgtcttagatccattaatgacacagccctacttctcagataatgtgtgggatacatgatgtaatgatagatctgaattgtctagtattaaacaacagagctctctttcatgaaagatattgtctctccaccatcatgtaagaccatacctagttcttctctttctttgtccataaattaattcgttggattctctatggtacagaattctctagcacgacttacctatttcttttgtaacgtgtttgatgttgagtgattacaggttttgacttgagacaatgagttgtcaacactctctgataacattgagacacttcactagatagagatgtgcttgctgtgattagtatagtacaattctgacttcacgataatttcaggtttttgtgttggctaaccagatgtattgcagcgatcctccccatcccttgcacttagtggcatcagacaaacaacaaaaagaccacaaactgatcctttcctggaaggtaatgtgttgttgtcttttgtttgttccctgtctgcaatgatgtctcttaactctcctgacactcttagccttagctgcttgatataaatcaacatcattctcacctttctatgtatctgttatgtgctgaatatgtatttgttatagaaaccaacaatggactcagacccacacggtgttttcccaaattctcccaagtatcatccatattactcgcagaccacggagtttggtggcgtaatcgatttaggtctcagcctgagaaccatacaacatgagatttaccactcatctggccaaagtgagtttctttgccgtttccattagtatttccattacctttaatttcttggtaaattttttcaactctgagacggtgtttacttatgagttatgacatgtggcaaaggatattgtagtaatgaaggatacagacggaagtggggttatgtaaaggtcaccatggatggtttggtggtaggtcgcaaggtctgtgttcttgatcatggaagctattcaactcttgctcatcaactcgaggacatgtttggtaagtttttcatgggaagcttgggattcaaagatgagtaagtactataagtagtaatgttcctagtaggcttataccggatgttcattacaatctgtagggatgcagagtgtgtcgggattgaggttgttccagatggagtctgagttctgtttggtctacagagacgaagaaggtctgtggagaaatgctggggatgttccatggaagtaagctcttgatactttctttgtagattactgaaataaagcgtttacatgtgttgtgatttgtaaatgacagtgagttcatagaaagcgtggagcggctgagaatcacaagaagaaacgatgctgtacttcccttttaaattagcttctctctttcttcactctttgtaaaatttccaagtcagcttgatcggaaatgaacaaagagaaaag

SEQ ID NO: 139342 - DNA, 751 bp, Arabidopsis thaliana landsberg
agtctcttcctttgaccaaaacattgaagaagctcattcagtgagtagtccaagacgagttttaagcttctcgaagagaaataagcaaaagcctggtttccaagatacagacagtagaaggtcatcttcatttagagcatcagaagtgcatggacctaaaccctcagaggtgtacggtttcgtaggatcgatatcgactgttgttgccacagtcatcttcttggtatgggcatatgttccagataagttgttggagtctataggaatccattactaccctagtaggtattgggtattggctatgccaacgtatttgatggtgactctgatgttagctttggctttttacattggtctcaacttcatcgccactccacccccaacctctctcaataccttgtttggtgagtgcccgcaccgctctttaatttcctctcatctgatgttattggagatatgagaaattgtttcctaaaaatctgttttctcaagtaagtgctcgctgtgtcattacaatagctagagctagaatgcttcgaaatgttggatctgcagggcgtggttttgggagtttgcttaggatgataattctagttatgtttgtttgtttggtatggcagatgagtacagtagagaacctggtgaatttgctgctgggatggaggaaggtgaagacaggcctatagatccaatctctgacattgatattacaagaataaatgatcttatgttcaattcaagtgattaaaat

SEQ ID NO: 139343 - DNA, 1375 bp, Arabidopsis thaliana landsberg
gtgacgaagcggcgctttttcggtttggtcatcgtgctcctcttctcctccaccgcacagatccaagacattttgattacactccatcgccggcgaaaatggtgacggaaaagaaaacggtgcgccttattctctcccatcaaagttttatcccttttcctcatcatctagatatcgtttacgatctcaatgtactaatatgtttctgggtttattgcttaattgcagaagaagtctcatgagggtatcaacagtaggttggctcttgttatgaagagtggtaaatacactcttggttacaagtctgttctcaaatccctccgtggctccaaaggtaattgcgtcgaacacttggtctgcatacctaaatgttttagctttttgtagtttgttattgattctggtttttgcttatgttcacagggaaactgattctaatctccaccaattgcccaccgttgagaagatcagagattgagtactacgcaatgctcgctaaagttggtgtccaccattacaatggaagtaagttcctttcttctttagctcgtccagtttttaaagattcattgttctcttgtttttgtgaaggttttcattgtgtataataactgagaatgtataatcttaagtagatgaaagtgttaaaatctgcttctatagaccattaaactgatgatggaagtatgatctcaagtcgaagaaactgtaatgtatattgacgtgaagtcttgatctttcgcaagttcacgatcggtttgaactgctgttggtgtctctgtatgtggttattgcaaatattgacatggttcataataccaaagattgctctgttggtctatgatttcgcattgttagattttgactcttagacaaaacttgatcttgctcgatgataatactcgaaggagcgttttaatacattatcttgatgatttcatcaaagaaagtagatgaatgtttattctattgaacatagtttcatgtttcaacgctcattcatcggttattcctcttgtatctaccactttggcttaactgtgtttttcttctctccttgttaatggctttcagataacgttgatttgggaacagcttgcggaaagtacttccgtgtttcttgtctgagcattgttgatcctggtaaaagagctagctacttgcttatatattgctgctggttcttcattgatagatctactaatgattttgtctttcgacttgtttcaggtgattctgacattatcaagtcaattcctggtgaccagtgatacaattttcagattttatttttcccagactttttacccgtctttgtattcgagtctctcaaaattttatgagcaatagacattgtgtttcttctttgtcaagt

SEQ ID NO: 139344 - DNA, 1341 bp, Arabidopsis thaliana landsberg
ataacaactgccgccaaaaaaataaaaaaacgaaaatatataattacacatttacaccaaagtgtgatctaaattgaacggtgcaggttagtttaacatttatcccaaattttaagaaccgtacgatggagcatcttaatgacttaaaccctaaaagaagaaaaaccccaatcgagctctgtcaatggctcgcttcgtcagatgtctgagaagaacactcttttctaattcgtctccttctattgctcaccggagccctaggattggtttgcccacgaatctaaatcctaaaattttaatcagccgcagatgtctgagctccgggagttacgtctcagaaatgcagaaatcagctttccagggcaacattttgcgactgatccgtaatgagattgagtacgaactcgatcactcgcctcctcttcaggttctctatgaatctctttttttttggttctatattctttaagccttctaggaatctggttttggaatagtgttattgatcaattgattgttttggcatgagaatcatataaatgttgatctgtatagtgtaacttaggttgatacaatttggaaactattggatgaagaaaatgttcacatctctgcaatggcctctctgttttgggatttgcaagtttttttttttttttggcaagttgcagtgacctcttataaacccatacgttagctagtgacaactttctagttcgtctacaatgcatttccatgaacttttgcttccatttccgacatttctcccactggctacattgaataatactttgagcacttttgcttgtacaaatttgcagcctcctaacagttttggtccattcactgtggatgaacggcctggagagcagtggattagcttgaaaaggaattttggggataaagaagacatcaaaattgaagcaactatgtttgatagatcagttcccacgtcaaaatctaccaaaactgaacctgaatatattcttcacatcactttcattgtcaacatctccaaggctggtgctactgaagctttagagatcatgtgttctgcttggccagataccatagagatatcgaagctctgcattcgtagaggcatcaacacttcaccctcttcctatggtggaccagagtttgagtatggccactgattcttttcttcaacattaaaaatttgagatacacgaatgaaataactcaacttattggctttggcatttggttattacagggaattagatgatcagcttcaagacgcactctatcaatttttagaggaaagaggtataagcgacgagcttgctgttttcttgcatcggtatatgaagaacaaag

SEQ ID NO: 139345 - DNA, 1913 bp, Arabidopsis thaliana landsberg
agaaagaaacacaaaacaaaatcgtcgatggttgttacaaaaaggcttttgtgagtgtcccaattccattcacaaagttttagtgtttaataatatctgacactctctttctttgaccgtcgccgccgcaatgaccgtcggagttttagctttgcaaggttctttcaatgagcacatcgcggctctgcggcggctcggtgtccaaggcgtcgagattaggaaggctgaccagcttctcaccgtttcttctcttatcattcctggcggcgagagcaccaccatggccaaactcgccgagtatcataacttggtccgctcctctctctctagaatctaaagttattgtttgcgaggacccacttgaagaaactagttaaaggttccttttttatgtgtgttttgacacgaatctggcgttattcaccaaaattctccagaatttcagtcaaaacgtctcttatacctgaataattcagttagtactgttgaaagtaattagctttgagattgaaaatgaaggaactttgggattagttagccttcaagtacatgaagtaatgttttgtatctgaaacctttaaacattgtggaccaaactactcgttgatcttatggatgatattttctgtctttaatggaagcggtgataagtgtaggaaagggagagctatcatttacttttatctttaccaaactccttgtttagatttggttgtttttacagttttagtggtgaggacgaagaatagtgtaaaatgtctcttctctgttctaattttctttcatttgttgctcttttgaagtttccggctctacgtgagtttgttaagatggggaaacctgtttgggggacatgcgcaggtcttatattcttggcagacagagcagttggtgagtacttgaattcatcttcctgtcatttctgttgcggaaaatttagaaacttgagtaaatgttgaaattttcaggtcagaaagagggaggtcaggaattagttggtggccttgattgcaccgtacataggaacttcttcggtagccaggttatgtctcttaccaagattccgggttcatgttaagaaaatgtgtaaacacatatttaaatcaatcttgacttgcaatatgtggaaaaagaagctgcttatattagcatgagttgtggtgtactgatatataaaactcggtcttttcatgaatcaatgggagtaatttcatatggattctcattcactcttagtatcaaataagatgttgtgaaaatcttagattgttctcgaatttgttttcgatgtgtagattcaaagttttgaagctgatatcttagtacctcaactaacatctcaagaaggtgggccagagacatacaggggagtgttcatacgtgctccagctgttcttgatgtaggtcctgatgtcgaagtcctggcggattatcccgtcccatcaaacaaggtcttgtattcaagctccaccgtacaaattcaagaggtttgcttaattttgcactaattttcatgaaacgattactcttttgtgagcacatgtatgaatcccttcttgttggtttcattttttggggataaatcaggaagatgctcttcctgaaacaaaagtcattgttgctgtgaagcaaggaaacttgttagcaactgcttttcatcccgagcttactgcagacactcgatggtaattgattaacattttccccgatcttttgatatttgcagcaatgatctatatggtctgtttttactctttccggtttcatttttttgcaggcacagttatttcataaagatgacgaaagagattgagcaaggagcttcttcaagcagtagtaagactattgtatctgttggagaaacaagtgctggtcccgagccagctaagcctgatcttcctatatttcaataa

SEQ ID NO: 139346 - DNA, 1115 bp, Arabidopsis thaliana landsberg
attggtgaatttgttgaaagtacggaaagagagggattcgaaccctcggtaaacaaaagtctacataacagttccaatgttacgccttcaaccactcggccatctctccgacatcaagattatgactgagtatctgggtgaatagcgagttattcatcgttttttagattatggttaatagataccctttttgaccggaaaatttggaagtagatagaaggttttttttaatgagtccgcttttatgttagttcgtactatacaattcctttgtttgtgagaaaattttctcacaaaagaaaaggtaaaggaaataaaaagagttagagaatggattactacctatgccaagatcgcgtataaatggaaattttattgataaaacctttacaattgtagccgatatcttattacgagtcattccgacaacttccggagaaaaagaggcatttacttattacagagatggtgcgatttgattatcattattttttttctcgccgattttgattggaatagaaagaaaaacgagtattgaaaaaaaatctacgcttttgaaggtgaagtttataatataaaaaaaacaatcccttctgtcatgtatccacgattaatgcagccttagatgcttcaattgtgaattatagtattgagcaaaaggtttttacctatggttcccgtattacagatcaatcctactacactaatacaatatacgaataggaggcataggggaagaagcactacgccgagaaatcaacaacacgaaaactttcttaaaaatgattccctttctttcttcttcttcgttgggattgggactaattaaaatggttggaacaataaacatccatctcgttcgtattttggatacccgtataaccattgaagactgttgaagtgactaattcctggaaacttaggggcgttgagaacaaagaaatttttagagtttccttttttatttttatctagcatgaacccacttggtagtaagaaaagatcttttgcaagaaggttggctagggatttcttgtaaaaaacattagccccgcttagttcataatgacatcccattcttacatatattattttcgttatgcacctaaaggccg

SEQ ID NO: 139347 - DNA, 2217 bp, Arabidopsis thaliana landsberg
atgggccttaagagttaccgagattctttaatacttttttcgtcccgagaagaaacggcggttgtcttggtcgtcgacggcggatggagtgtgccgcgcgtggttttgcgacgcggtgtgttggtccaccgacgcggaggtgtggtcagtgtggtgctgtagcttattgctccgtctctcatcaggttttaacttctgctttaactctctcttaagccttcttcttcttcacagtgatgatttgatcggtcgcttgtagttaggtggataagcaaattaggatgttccttgttgaatttgttgatctttattttgtttgtagatttcgcattggagctatcacaaggaagaatgtgagagattagaagagcaaatgcgtcgtgttgatcttttaaatgattttccatttacatttacagaagaagctacaattcaggttaatcatcactttgaatgatagtgaggaatcaaatgccttttggttagtaaaaattcagctcaaagtttaagtttttggtttattcgttctttaggttagtcaaaaacatgagactaggtgctcattcttcatcaagaggggattacatcgtgttggaatgtggatgtatgagtgtaactgtggagctttggcttttgataggtttcattgcttatttttgctctttacttaatgagaatcacgttttggtttgaagctattgttggttgagctgactactatctttttctgacagttttaatattgaagggtggcatttgccgagctcttcttgtccatgtcgtggtatacttcattttcacttctctgtttatggttttactgaaagagtttgtttctatagagttctgattttggattacacagaggcctttatctccaataactaaacagctatgcacttgcaaggattatttctagaggagaaagttacctgtagattcacctgtagctctacttctccactgggtaataacagtttttctgatgactaatgtgatttcaagtatgatcagaatgcttgaggtgctcttttttttgactcataaagcttgcttttatttcagccacttacgatatatcatgcaatgcaagccattgcgatgggaaattcgactccccaaataagtgaagaacttcgtatacattatcttggtatgtatcactctggaactctcctgctttcagaagaactgtatcctctctgaagctgctatcatgatctcggagttctgcaaggcagtttttgttaattgcctccacttcctttatattagtttagtcccttaatattggcaaaagaatcatcagaaccactatggtgtaaaattctgatatatgatttgctgatagtttgagcttctgaagggcctcagaaggaacttgggcaacttggtgtttttgctgagctgcaagcgctcttccctggtctgcgcatttatgtagatttgattggacctgacgttccacaacatatgtgagccctgcattccacaatctatttgattactttgtataacactagttctattttagttaggaagagtaaagatatgtttttccttttaatcactcttctttagagttctttaagctattcagtgacaacattatagctggattttctttgtatgtgttgaactattgacataatttgatggatcgttctctatttgctttctcgatgaacagggatggagaaatgatctccctttgcagatattccccttgcatgggaaaagaatgtgaatgtaaaaattcaagcaaaattctcaattccgggagcaaacctgctttggtttcggctgtgtcattacagctccgtagagggttttaccatgatcgttacaatgacataacaaaggtacccctttctactagtctaggggcaaaacaatgatttactatactgttcttatatgtaatgtccattttcgtggaccttgaattgtttgtttcctaaaagatgtaataatttctgattgaccatctcggcaggattcatttcctccacacatagtgattgctccaaacgcaggcatcgctgcatatccaagctggttgccaactattgtacgtttttccagtagctaatgtcacatccaatagttcccaggatacacagagagagcatatgtttgttattcattcatgtgttggtgtgaataatttcaggaactgataaaggagatacaagtcccagcagtattctctgatta

SEQ ID NO: 139348 - DNA, 732 bp, Arabidopsis thaliana landsberg
atgtttttgctttatcgtaggcttccttcatttgcacgaacaacaacaacaacccttctctgcaaatctatggagcctgcgataacagcgacttcttcttcttctttcggtggtggctcttctcgtctcgccgctttagcccagcaacttcgccaatacaagcccccaccttcttcatcgttcgatgactccgaggagatgcagacagatcaggagaccgctgggaaagtcgtttctcaggttgggtttcaggaatctattgctcctctttcgaaagaccctgataggtttaaacccaagagagccgctgtgttgatctgtctctttgaaggagatgatggtgatttgcgtgttattcttactaagagatcttccaaattgtctactcactcaggttcgtatggtttgcgatttaaagttttcgtctttttactttgaaatcattggcttctttgattttggtcaatgagtatggtttagtgttgaatttgaggtggttgtttttttttgtggttgcaggcgaagtttcattgccaggtggtaaagcggaggaggatgataaagatgatgggatgactgctaccagagaggctgaggaagagattggattggacccttctcttgttgatgttgttacttctcttgaaccatttctgtctaaggtattaataaatggtgttaattctccatgtcttattggtggtgatgcatgctcttagtgagatcagaatt

SEQ ID NO: 139349 - DNA, 760 bp, Arabidopsis thaliana landsberg
ttgttaattgtctcgagtctcttcaataaacgacaaccagtcactgaagatgaaaccgttgatgaaaatgatgatgtagctcctctaattccgggaaaagacgatgataactcaagctggtgctcgtcctacagttctattttgacgagtacagaggaattggaaggtgcacatggtgaaggccacagtagtacaagatatctatgtgcaatttgctatgatgcgcctagagactgtttcttcctctcttgtggacactgcgttgcttgcttccagtgcgggacacggtaagaaaataacatgttcgatcttttcattattttagttgtgtcatttttgaatgggatcttttcatgacacaagaatgaacattaatgatgacttcaaaaattggatgtacaatacacaggatagctgaaacttcgggtttttgtccggtatgccgtaagaagatcaggaaggtcaagaagatcttcaatgtctaacagagagaatgaataacacacaatgcaacgttgcttgctgtttctgtttcctcgcattaccatatccgttgtataaatgtaaaagacaagtgtgggacggagaaaagcaagaaggttctggcgtctgtgttactgctgtctgtatatgaaatgatatggattccggagtttccgcttcgttgtacttgtaaccatatttcattgaacccggttgaaaatttatttttccgattcgataactgtttaacgtctggtttgcagcgtaaatttcttgt

SEQ ID NO: 139350 - DNA, 2052 bp, Arabidopsis thaliana landsberg
agtttctccactctgtacttcgtatcatcaagcgaaaccctaaagaagcaatcttaagtctcttctcttctttattttttctggggagaaagaaatttcacttttttttatccgatttctgcttcatctgggttttggatttttgcgatcgattttgagaaattagcaaacaatgtcgggttctggaggagtttcaatcgcacgtacagcgatccgtggtgagaatcggttttataatccacctccgatgcgtaggatgcagcaagaggcccaattgcagcaacagattagggagaagcaacgtcgtgatgatgaagatgaggttttgatggataaggaaaggagaaaggctgctactgttgctccgaggactactaggaaaggtcttggtgtgtcggagagtaagagtcgggttgttgtttcgggttcggaagtatgtgccggttcttctgattcttcttccgggtcgggtcgggttcttagtgatgggtctaacttggatcggttcttggagcatactactcctgttgttcctgctcgtttatttcccatggtaagcactgttttcaaatctattgggtcttgatacttattctgtgtctgttgtggctacttgaacttgatactatagtgttcgttgtgtttgtaatctctgtttggaattatagagttgaattggagaagactttgagttttgtcatgtgatttagtgtagaactcagttgattttgtattatggcttatgagcattgctttttgctgcaatttgttttgtgtagaggagcaggtgggaacttaaaacccgtgaatcggattgccatacgtattttgttttggaggatctttgggagtcatttgctgaatggagtgcatacggtgctggtgttcctttagagatgcatcctctagaaatgcatgggaatgactccactgtgcagtattatgtgccttacttatccggtattcagttgtatgttgatccgttgaagaagcctaggttagttgtttgatatgtatatgatttattgcgcggaagaactccaggattttttacatttgacggttttgattatggtcttgttgaatagaaatccagttggagataatgaaggaagtagtgaaggaagcagcaacagtaggactttgccggtggacttgagtgtcggtgaactgaatagaattagtctgaaagatcaatctattactggctcgttgtctagtggagaagctgagatcagcaatccgcagggacgattactattcgagtacttggagtatgaacctccatttggcagggaacctctggctaacaaagtaaatatcctcttaagcaaagacagttagatcattattaactttcaatattttctaataaagttttcatacacaccagatctcggatctcgcgtcaagagttcctgagctaatgacataccggagctgtgatcttcttccttcaagttgggtctctgtgtcatggtatgtttcatgtgaaccttcctgagtcttgactcttgggatcgttacattttggaatatatgtggaaatggatttgaaaatattgagttgtgaatttgttggtgtgtaggtatccaatatacaaaataccggttggtccaacactacaaaatctcgatgcctgctttctaacttttcactctctctaacagcacctcctcaaagtaagcacccgatgacgtaatggaacacaatatcctcttatgtcctcgtacttgtgatctctttctcagtgttgtgtatgtattggagcaggtgctatgggttgtagtgattcacaaccatccacaaagctaccgttgcctacttttggactcgcatcttataagctgaaagtatctgcgtggaaccaaaatagaattcaagagtcccaaaagatgacttctttgctacaagctgcagataaatggctcaagcgtctgcaagttgatcatccagactacagattcttcacctctaacagtccacaaatgaggtgaaaatgaaagatacattcttgaccatggatttggctctggtctgatcaaaagacc

SEQ ID NO: 139351 - DNA, 2650 bp, Arabidopsis thaliana landsberg
aggtcttcttcataatatatttcttctctaataattgaaagcaaaagaaaacagtttttttttttagaaaggtaaagaaatggaggaaacaaaggagagaaagatagtagtagcagtagacgaaagcgaagagagcatggaagctctgtcatggagtcttgacaatctttttccatatggttccaataatacactcatcctcctctacgtcaagccccctcttcccgtttactcttccctcgatgccgcaggttagtcctcgttctttcacgattcatatctttccctaattataatctgttcactttagttatagatttttgtttggtcgatttccagggtttatagtgacaggagacccggttgcagctttgaagaagtatgaatacgagctcgtggaatcggtcatggctcggtctcgaaccgtgtaccaagattatgagtctgatgtaagcttatttctatcgattttttatcacttaatttgctggattatacttgcttaaaaaacttgagaaattatgagaaagtgaatttaatcaagtagttatgagttaatctgtttatcatgagcaatatttagtacaaaaaatataacatatgataagcaaaatatggttgttttcaaagagagttggcgaaataaatgtaaatataaccaaattaatgtgcagattaatatagagagacgagttggaagaggagatgctaaggaagttatatgcaacgcagttcagaaacttagagttgatatgttagtaatgggcactcatgactatggcttcttcaaaaggtaaggtttcaatctcttataagaaacaaaaatattttggtttaatggttatttgataatcatttgatatatttgatagggctttgctagggagtgtgagcgagtattgcgccaaacgagtcaagtgtcctgtggttatcgtcaagaagcaagctcaagataattaagctcatatgattgcattgtgtatatgtttcgaaagaactggtgtaacacttgaatcaatcttcgtatgcgataataaaatacataacggtttaaacaaatttagcagatatttttgcttatataaaactagctgacaatgacatcaatcaaccaattaaattcaaatctacattctctacatacaatgccaaattaaaaactaatgtaaacgcaaatttcaatttaacgtatagaagaatgtaatgaaccatataccaagttttgaatatttgcaattttgttgtttgaacacttaattgttgttcgcttcaaagttcaataaaggcctcaaggcccaaagtatatctgttactcatccagtcgacacagtcatacttaaacgtcgccgtttccgtgttcgaagcttcgtgaaaatcttcaatctcgcgagagagaagaagaagaagaagaagaagaagaagcgatgttcctggtggattggttctatggagttctggcaactctgggactatggcagaaagaagcgaagattctgtttctaggtctcgacaacgccggcaaaaccaccttgcttcacatgttaaaggacgaggttcgttttcttcgagccatatcagtaatcgctgtctagaatcttgtttcttttacttagcgcgaacgaatcaaagtcttaatcagcgataatcgtttgatttgggtttcagagactggtccagcatcagccgacacagcatccgacatcggaagagcttagtatcggcaaaatcaagttcaaagccttcgatttgggaggtcatcagattgctcgtagagtctggaaggactattacgctaaggtttgatcttctttcttctttggattttattgttaggtcaatcaatttagcaagtctttggaaggactattgcgctcgtatagttgtatgtagactctaagctgactctgttatagattacaatcttccctgtgcccatataaacaatagttagatgatagaggtgaagtgaaatcttcaatgaagtttgtcatatagcaattctcttttgaatgttgcagcatgaggtcctgtgattacattctgctggttatgtgtacctagtaagctcttgctgtgtactactcctactctgttccttagccactgtgttgctccgttgggttatataagtttgcagatgatagtttgaaatgattgagctatagtaaaatcttcagatgatagatatacatatacatcatatactgtagtttaaaatgacattgtgattggtatgtggagccagtggaggttgaaaattagaagattgtatagctatagactactcttactgtcagttttagagtcatgaggtcccttgtgatttacattctcatagctgatgattccagtgaatcaagagattaatagactccggtgtttctattagctaccctctttgcattctatcttcaagtttgtaactttattattgtctcgtattaggttgatgcagtggtatacctagttgatgcatatgacaaagagaggtttgcagaatcaaagaaagagcttgacgctcttctctctgatgaatccctagcaaatgtccctttcctcatccttggaaacaaaatcgacattccgtacgctgcatcagaagacgagctgcgttatcatctaggcctcaccagtttcaccactgggaaag

SEQ ID NO: 139352 - DNA, 1892 bp, Arabidopsis thaliana landsberg
aagaaactaacacaagtataaatttacagaaaaatgcttgataagcttaccagagggatcggaggtctccggcgcggacatgggcatttccaggcaagcgcaggcttcgggttcgaggagcacaaggagttttcgagtcgtgtggagtcatcaggaggcttcgttgaccgtcaagcccgctacaaccaccgtacgggcaaccatggccgtccacccatgcatgtctgggatgaagaagactcagactcagacgtggaggagttctttgagagcagccggacccaacacactactgcgttgccgcaaccacttcatatgaacttcaggcctccacctccagtgactcagcctcaccacaacgtaagttatctcttttggtgtcgttaccttatactaatcatgttatgttatgttacttaatatatttatttatatgtaaggtatcttttaaaattttgaagtcctgaaaattggtgctaaaattttgccaaataaaacaattaattctgatttgtatatataaacatcagaaacaaagttatataaacagattgaggtggtggtctagtgataaaatggagttggtattttgtgccctaagttcaaacactctttcgtagagagagggcaagtcctgaattcatccggtataaaaacatactattatataaaatcaaaagtccatagcttcgaccttcacgccacaagagttttgaagataaattttaggcaacggtttgtggtttttatttatattaacaaactattataaaagaagcaccaattttttaatcttatatagaaccttctgtcatcctatctgcttaaacatatattttgttttttaatttgcctaatgatcatttttcagggaaaaatgggaaagataggtaatggattgcagcagggacacgagatacatgggatgaagcaccagggcggacatgggatccagcaccacgacatacacgggatgcagcaccagggcgggcacgggatgcagcaccagggcatgcacgggatgcagcaccagggggggcacggaatgcagcaccagggcgggcacggaatgcagcaccagggcatgcatgggatgcagcaccagggggggcacggaatggagcaccagggcgggcacggaatgcagcaccaggacatgcatgggatgcagcaccagggcaggcacggaatgcagcaccaggcgggcacgaaatgcagcatcagggcatgcatgggatgcagcaccagggcgggcacagaatacagcatcagggcatgcatgggatgcagcacccgggtggagtagtgtaaacgctactgagaattggcgggtcagcaaaatcaccggccagaaactcgggtggggaggtaagggactttagactccacctaaatactatgccggttcaaataagaaagtaatgattatgtacccaaataatacatttataagatgtatgtgtgtgatggacatgtttctgtatcgtaccaaaactaaataggtggcttttatcccaaaaaagtgctttcgtttgatgaccttatgatttctaaagagtgttgttgttgctgcttatgtttaataaaagtgatgtatattatcagttgatttccccacgtggaaggggtgattatattgcacaaaattaagttaaaagtaacattgtggtgtaataaaaaccctagtgaatttataacctataagtaagtggtgcagtagtgaatttataacttataagtaatttataacttctttaaccttcaaaaaaaaagaaaaaaaacatctgttttaaaataagcttcacattcttggattccgtttgtaataactaatgttttacactgtgaaaaaaacaagctttacatggtttaatcaaaaaaaaaaaaatgtt

SEQ ID NO: 139353 - DNA, 2363 bp, Arabidopsis thaliana landsberg
attctcttgctgcttttttcactgtgtattttggaatcttggtattttctcgttgaaatattggatcatcttaacaatagttagctgtctagaaagaatttttggtatgtgaaagcagatctacctaatatgaatccgagcttatcagaaagctttggcctgcagattcagggcactgcattggttctggatgaaatcattaaccatgtgcaaactttacagcgtcaagtggaggtaggactttccgtggtccaatttttgttctttatacctatattttacaatagccctgggcacaataaaagggtcaactcaaaacaatttgaaaatgaatagaattatgtgccgcaatctcatgaaactgtgacttgtgtttcccagatgctatctatgagacttgctgcagtaaaccccagaatcgacttcaatctagacagcatactggcttcagaggtaagtatcaactaatcatataggagaattaaggttgcatgtgatcttcttttacaataaaaactcttaaattcaatgttcactgggaaaaacttccctttgaccatgttactcgtttaagtaaccatagggattatgtttctttgagtaacctttttaagttgtatcacaaaaagagaaacttttggatatttattgatccaacattaatcgaccctattctagactaggcttaaagaagaagaacaacgtgggggaaataaatacttagaccttacaaaaatgcagtacaaacagtgagatcaaggactctaaaaaatcttttgaaaggactcattagttctctcaattatatcatacagagagataaaagtggtcagaaacacggaccacctttgttctatggtctatgatgctgtcttttttttttatccttgcacaattatttttctgtgggtctcagtcttaagttattgttgcttcaagtttcacctatctaatctaataatcaacttttgtttctctgcaaataactttcttattaaatgaccttcttcttttacagcttgtacaccatttaagaaccagaccccactcattaaaaaccttgttcttctaggatgagttacagtaaaatagagctggcttgttgactagattgagaatctaggatgttggatcaatcatctctaagagaagctgatatgttttacaaattgtgttaataatgatgaggtccaattatcttttctgcagaacggctctcttatggatggtagcttcaatgcagagtcttatcatcagctgcaacaatggccttttgacggcttgaaccagccggtatggggaagagaagaggatcctcctccagcccatttctcaatgggttcagctactttacacccaaatcaggtgaaaatggagctctaagttggaaacagtttgttatgcttatgtgtatatataagagttatatatatctactaaagtttcgattgttgaattagaggtagaaaatggttatgattgtttcaggtctttgttcatggcctttctatatttactagattcctcaatgtagaattcagaatgtctaaattgcgtttcccttgagagaagtatatgaagatttgatatgttactgagcaattacgacgtcgtacacgaatactatcatccaatactgcttaaccgactagtgtgaccaattcaatttggtctacctaaattataaccaaactgccagaaccgatttggactacaaaatttccagtcaaaccgtaaaacaaaatgagaactgagaataccaagtcataccgaacataaaagagagtcaatttcgtatataaatctgttagaccggataatctaagctgaaaccattatataattcccaattaaactgacaatttcaataaaccaaaattgaaattctcggttcggttcgaatgaaaccttttgtaggtcgtggtcgtatatagttggacacttgacaaatctgagcatttcctttttgcttacagcggaaatatctgaaccaacgcgatgccgtcgacgcagtccttgaccgtcgcagcgaagacgctacgaaatcggatcttctctaggtctggatctacatccgccggtccgagtcggtgggcgacgccaggtcacgaggagcgacctaagggttactttatgaaccgtactcctccggcaccaggacagtcgcgaaaatgggaagattgggagcttccttgttacatcaccagcttccttacaattgttatcctcggcgttggactcaatgccaaacctgatctttcaatcgagacttgggctcatcagaaagctttagagcgtcttgagatggagaagctcgcgaccgctggagattcatctgattaagcatcacccgtggatctccg

SEQ ID NO: 139354 - DNA, 881 bp, Arabidopsis thaliana landsberg
ctcattaacacatgcaacggctgcatgaagacacttttgacacgtgacatggctcaagcgagccccaccagcgctcctctccttcataaatcatcattacttactccgaaaacacatcactaccttttctctgctaatttctactatttgtgttggagggatatattataataaaaagaaccaatggcggaccaaacaagaacccatcacgagatgataagccgagacagtacccaagaggcccatccgaaggccaggcagatggtgaaggcagcaaccgctgtcacagccggtggatccctccttgtcctctccggcttaacactcgctggaacagtcatcgcactcacggtggctactcctctcctcgtcatcttcagccccgtcttggttccagcagtggtaaccgttgctctcatcattaccggattccttgcatccggtggctttggaatagccgccattaccgccttctcttggctctacaggtaatttacgaccaacacaaaatgtgacctaccgtttcaaaccgagcttgcaatgcacgttatattttatagaaagtttgaatattggagaatatggtcattgtatttaggcacatgacgggatctggatcggataagatagagaatgctcggatgaaggttggaagcagagtgcaggatactaagtatgggcagcacaacattggagtccaacaccaacaagtttcttaaaattcaaaggctaaaaacgatttccacattaaattgtcatccatcgttagacctgttctctttgtttttattttcaacgtttatgttataatgtgtgatatataataacatgcaatgtatgatgtaatcttgttgttgttgtgcgagtaatgttttgatcct

SEQ ID NO: 139355 - DNA, 2231 bp, Arabidopsis thaliana landsberg
gttgtttttcttcctttttggtttttatcgattttactattattattgtttgttcttcctcttcttcttattcttactcttatatattctacttctttttatttttatttttttacgtttttggatcagggtttgtttgttcaatagaaagccctagtttttgtttttgtgttctttgattcttcttgcggccgtttctgggtttcttcttcttcttctctttccatggagatgggttctgacggtgaagatcagaagatcaggagcgtcgttggtgatgctaatcttaataataagaagaagaagattgataataattcctcctctaaggatggtcgtgtcaagcctaaacgtcagatgaaaactccgtttcagcttgaaaccttggagaaagtttaatcagagaatcttattcatctcaattaatttgattcaatcttcgttctctttgtttttttaagtattgatgttgaatttttgattcagaggagaagtatccgtcggaggcgacgagggctgagttatctgagaaattggatttgtcagatcgacaattacagatgtggttttgtcatagacggttaaaggacaagaaggatggtcagtctaataaaccggtgaaatcatcggttgctgcggttcaatcggcttcggttaacgagttaccggctgctgctggatcggtacctgagcaagattccagatctgattcgggttctgagtcaggttgcagtccttattccaactctaggaggaattttgctagtggtagtagtagttctcgagctgaattggatgaatatgagacaatgggaaagccgagttatgagtcgcggttgtcgacaatggtgggtagagctattgtctgtattgaggctcagttaggtgagccattgagagatgatggacctattcttggcatggagtttgatcctttgcctcctggtgcgtttggaacacctataggtatgcattactttctatgtttgccctgttttatgacttgtgtaaccaatgtcagtgttagtattacacttcttgtgataagtaactctctaactttgttttcattggcatttcagcgatgcagaaacacctagttcatccctatgagagcgatctgtatgagcgacatgatccccgacctcgaagagttagttttctgactaaacagatatgctctatttagtttctttataacgcacctagatatctcaaattgactatttgaagaggttaccataaactgatggtctatgaattatatggtaggagtaatttttagagttctcattacatgaaggctgacattagtcttatggcagtttttagtctctgatcattgttagaaagatgaattccgctctgctgtttctattctctttcttgtccattcatgtattcacagttttataatattttctttttactactttgcttaacatatttgcttttgttgattatagtctcatgctgctgcccgttctttccatgagcaacaatctctggatgatccgtcttcttttacacctaatatgtatgaacgatactctgaaaatcatgcacgtggtatggactatgaagttgcacgttctagaagttcatcatttatgcactcgaatggacctgtaccaaggtcctatgttacccctggacatgcgtctcgtaactgttcgacatctcaacaagacatgccaagccccattgaatcagcgcatcatggtgatagattcctgctggagaaggactcatcagtccttggtacagaagatccatatttgttgcctgatggagtgcgtaagagtagtgatgtgcatagaaagggaaaggtagcttcattgtaccaacttttatttcatccatttttgttgacaagatgtgtctttgttgtaatgtcatttttctatgtttactctcacagattaacgatggtagacttggaagagggagtgaaacccgagagaatcatggaccaaaagatcttgagaagctagaaattcagaggaaaaaggtatttgctctacatttattatcctccttactgattatttggaaaggtgtcttattgtcttttattagtatcactgtaacagatatattgatgagttgatgcttgtgtcctcagaatgaagaacgcatgagaaaagagatggaaaggaacgagcgtgagaggagtaaggaagaagagaggttgatgcgtgaaagaataaaagaagaggaaaggttacagc

SEQ ID NO: 139356 - DNA, 587 bp, Arabidopsis thaliana landsberg
cccacaccaaaacctctttataaagagcaaggactctgcgacatctgtgcaacatatcatttcctcagaatctctttcttttctaggtttattactacacaaaaccaaacatcatcaactttagttactaaacaatggcatcaggctcaatgtcttcttatggctctggctcatggactgttaagcagaacaaagcctttgagcgtgctctagcagtctatgaccaagacactccggaccgttggcacaatgttgctagagctgttggtggtaaaacaccagaagaagctaagagacagtatgaccttctagttcgtgacatcgaaagcatcgagaatggtcacgtgccattccctgactacaagactactacaggaaacagcaacagaggcaggctgcgtgatgaggaaaagaggtatatttgttgcaatctaataagacacaatttatgctaataacaagtaatcaactttgtttatccataatagcccactataagatacttctatagacaagttctataccaataccatgacaagaaaacataaagggcatgttgggttcagcataaagcctgttaccttccg

SEQ ID NO: 139357 - DNA, 1692 bp, Arabidopsis thaliana landsberg
  unsure (1)..(1692): unsure at all n locations
cacttgctcggtggttcatttacgaccacactctctcttctctttagccctctcctctctatttattctccaacaaactctctcttctcttttcaagtcttcttcttcattactcgcaccatgaccaaaccctccgacccaaccagagactcccacgtggcagttctcgcttttcctttcggcactcatgcagctcctctcctcaccgtcacgcgccgcctcgcctccgcctctccttccaccgtcttctctttcttcaacaccgcacaatccaactcttcgttattttcctccggtgacgaagcagatcgtccggcgaacatcagagtatacgatattgccgacggtgttccggagggatacgtgtttagcgggagaccacaggaggcgatcgagctgtttcttcaagctgcgccggagaatttccggagagaaatcgcgaaggcggagacggaggttggtacggaagtgaaatgtttgatgactgatgcgttcttctggttcgcggctgatatggcgacggagataaatgcgtcgtggattgcgttttggaccgccggagcaaactcactctctgctcatctctacacagatctcatcagagaaaccatcggtgtcaaaggtaatatatacaaatttttgaatgcttcccaattccgacttgtgattttgtcttttatctcataaataaatatgcaactagaggaaaatttagctaaaagaagaaacagaggttaagatactattgatttgaagatttatatgtatttgtggtaatgtttatgattccattctaatttacagaagtaggtgagcgtatggaggagacaataggggttatctcaggaatggagaagatcagagtcaaagatacaccagaaggagttgtgtttgggaatttagactctgttttctcaaagatgcttcatcaaatgggtcttgctttgcctcgtgccactgctgttttcatcaattcttttgaagatttggatcctacattgacgaataacctcagatcgagatttaaacgtttcttgaacatcgcccctctcacgttattatcttctacatcggagaaagagatgcgtgatcctcatggctgctttgcttggatggggaagagatcagctgcttctgtagcgtacattagcttcggcaccgtcatggaacctcctcctgaagagcttctggcgatagcacaaggnnnnnnnnnnnnnnnnnnnnngtttgtttggtcgctacaagagatgaaaatgactcatttaccaaaagggtttttggatcggaccagagagcaagggatggtggttccatgggcaccacaagtggagctgctaaaccatgaagcaatgggtgtgtttgtttcgcatggtgggtggaactcagtgttggagagtgtgtcggcaggtgtaccgatgatttgtagaccgattttcggggatcatgcaatcaatgcaagatctgtggaagctgtgtgggagatcggagtgacgattagtagtggagtcttcacgaaggatggatttgaggagagtttggatcgggttttggttcaagatgatggcaagaagatgaaggttaatgctaaaaagcttgaagaactagcacaagaagctgtctctaccaaaggaagctcctttgagaattttggaggattgttggacgaagttgtgaactttggataaacatgta

SEQ ID NO: 139358 - DNA, 1299 bp, Arabidopsis thaliana landsberg
tttgaaattgtggttaagtttcaaaggtatctcttttacagggatacagtttttagggatcttattgaagcttgtatatggcaattggggattttgggaattgggtttagggtctgtgaaatgggttactgtctctttttcaaagttgtcttctttttagggatgactactctctactgtttttagggtacttggagcttgtatttggaattgggaattttgtgaaatgggtttctgagattctttgtgttggttttgtaaaggggtttttggatgatcaattcacagaattgaaaaagctgcaagatgaatgtagtcctgattttgtggctgaggttgttactctcttctttgaagactgtgagaagcttatcagtaatatggctagagctttgtaagtttacttttcttttactagtttaatcatcaaaagctagcagatatggtttaatgattggttcatatgtatactcagagatcagacaggaaatgtagatttcaaactggtaggttctagtgttcatcaactcaaaggtagtagctcaaggtatgtcacatttgatctgtatagtctcggtcctttagtctaatctcggatctagtctcagtgaagagctcctttcttgttgttctatgaagtgttggtgccaagagagtcaaaggtctttgtgttaccctcaaggagtgttgcgactctcagaactatgaagggtaagcttttgttttccggttcttctttaagagaatctcaaatttctgctatgttcatttgattgttgaaactaatttgggaaacaatctctgttataggtgtgtgagatgtttgcagcaagtggatattgagtacaagacattaaaagcaaagcttcaagatctgttcaatgtgagtgaaaagctacgtgaattgtgtcggttttttgctttcgaatttcgtgaataagtcttgcattgttttgttgcagcttgagcaacagattgtccaagctggtggtagaatccctcaagtggatatataaacaatagacctatcgacaacagaacagcaagatgatgatcatccagttgcattcttcagacgagtactactcgaatttgttgcttcgaaaaagaaaaaaaactcttgagaatgtgtggaaaagagaggtgattgttgttcatagatcaatactatgtatcttttgtatcatcatctcttgaatcttggtactgatcttatctgaatagtaaaataatgaatctcataagaccatatgaacaagagtgagttatgtattcaaaagcaggaatatttccaaacca

SEQ ID NO: 139359 - DNA, 612 bp, Arabidopsis thaliana landsberg
gaaacttagggtttatgtggtggatgaatgatttagcagcgaattgaagggtgtggtggaagatggagttttgtccaacatgtgggaatctgttgcgatacgagggaggtggcaattcgagattcttctgttccacatgtccatacgtcgcctacatccaaagacaggttcttttttcaattatataccttttgaaagtttgtgagcaaaccgttaaaattctctcctctgttcctgagtgctttggaattttgacaggtggagataaagaagaagcaacttctggttaagaaatctatagaagctgttgtgactaaagatgatatacccacagctgctgaaactgaaggtattttcagtctcttgtcttctcttcttctaattttaggactgtgatgagttggttcagagttgatctcacttggggaaagagtagagtagacttttgtttcactttctttctcatgttgggattgtttggttttaacagccccatgtccaaggtgtggccacgacaaggcatacttcaaatcaatgcagattcgttcagcagatgagccagaatcaagattttatagatgcttgaagtgcgagttcactcggcgtgaggaa

SEQ ID NO: 139360 - DNA, 2990 bp, Arabidopsis thaliana landsberg
cccatcaaggcctaatgtcttattgcacaacgaaaagggatgttgcaaaagatgataaaccggatatgaattcagtcgcggttaagttaacgcgaagacaaaaccggttggacatgttcggttttcggcgatgattatttcaacgtttttcagtctaatcaaaaccaatacgagcagacacagctccgtacgatcacaaggattcactgatttctaagcttttcatagaaagaagaagaaaaaggcggaattcgatggtggatgcgagtcaagtagctgagctgagaagattcgtcgagcagttgaaattgaatccttcgattctccacgatcctagtctggttttcttcaaagaatatctccgaaggtgattcattcttctgtgacttatctttctttcggtgaatttcatttggcagttgactttttccatggagctgtgagtttctttgtaatcgatgctcgttcccgtcttatcgtgtacagtttaggagctcaagttccgaagattgagagaactgtaagttgtctttcttatgaattatcgatgtttaggtttctcttgtttgtgctacttgggattgcgttcttaatatctttgtgttgaattgatgtacaaaacccttttctaggcttcaacactatctaaatgttgatcgaatagttaactataaattgcaggaaagagattatgaagataaggctgagacaaaacccagtttctctcctaaacatgatgatgatgatgatgatattatggagtctgatgttgaactcgacaactctgatgtagttgaaccagacaatgagccttctcagccggtaggtgttgaagttatcatctttggatattatgtggtgcttgtgtctctatgcatttttttacctgattggatgattttactttcttgtcttagatgggagaccctactgctgaagtgaccgatgaaaatagggatgatgctcagtcagagaagagcaaagctatggaggcaatctctgatggtacataactaccgttgaaattggttttgattatctacttcataagatttctccttaatgcttgattggtatacagggaggtttgacgaagctatagagcatctaacaaaagctgtcatgctaaatcctacttcagcgattctctacgccactagaggtaactttcttttactagttcactctcccttttcggctgaatgtgggtgataatactcaatatttgtgattgttgtcctgcagctagtgtgtttttaaaagttaagaagccaaatgctgcaattcgtgatgccaacgtggcgttacaggtgatcatttctcttgacataaacttgttttgtttgtgctgaaaatggatttggtaaaacaagtttatgtctcaatagttttatggcttgggagagtgattttatatctcaatggttttcttccataaacaagctaaactagtttattttggggtttagttcaactctgattcagctaaggggtacaaatcacgaggtatggctaaggccatgttaggccaatgggaagaggctgcagctgatctacatgtcgcatcaaaattagattacgatgaggagatagggacaatgcttaagaaggtaattgcggaaacctcttgatatcactgtatggtccttgagttttacagtaccaaatatatatgctgaaaatgtgtacttcccaggttgaacccaatgcaaagagaatcgaagaacaccgcaggaaataccaacgcctgaggaaagaaaaggagctccaaagggctgaacgcgagagacggaaacagcaagaagcccaggtcagaccgactcatacccataattaaatgttgtgtagagttacattttttgattatcttcttagcagaaatcacataggcctgattatcttctccctgtgagagttaaaatataacctcttctgatattatcaatatcatatcatatcaaacatctcacgctcattgatttgcttcttgctcgtgaatcctatcaatgcaggagcgagaagctcaggctgcactcaatgacggtaaacattttatccatttctttcaacggttttctacttcatgatatttttgcaaagaactaattaggtgttggaacatttatctgtgagtcttgccccaatgaattgtcttcactcaataagaagcaaagctcaatatgctcttgttagccactaaatccagttgataaggccactaaccagcatgcttatcccgcatgcagtctcatttgcattcacttacctgagaaattctgctaatccagaccagaaccgtaacctcccaacaaaaactaatttaggggatagtttagtggaaactcatggtgtattgacgcctcactagctttctgtttcttgcatgtatcgtagatcccagttattctcacaaagcttcatttacagcttttataaaacttaaaatgaaatttgcatgtcaaaaaggaaatgatcatcttttctccctgatgatacaggagaagtgattagcatccactcaacaagcgagctagaagcaaagacaaaggctgctaagaaggcatcacgtctgctcatcctttacttcacagccacatggtgtgggccatgccgatatatgtctcctctgtactcaaacctggccacacagcactcgagagtcgttttcttgaaagttgatatagacaaggccaatgacgtggctgcttcttggaacattagcagcgtcccgaccttttgcttcatcagagatggcaaagaggtggacaaagttgtcggagctgataaaggttcgcttgagcagaagattgcacagcactcttcttctaagtaatgttttatctcttctctcattacactcctctcgtttgtactgtatctttgcaacacaatgattgtcccgtaatttaaaagtgtagcataacttttaaagtacttgtaattggttagatgaccgatcagatcagttgaataagaagagttaagagagc

SEQ ID NO: 139361 - DNA, 1008 bp, Arabidopsis thaliana landsberg
tgacactgtaaacaactacaaacaacatttctgagattgcgccggagtcaaggagagggagagaacgatccaacggttgagatgtttctacgggcaatcggacggccattattggctaaagtgaagcagacgacggggatcgtcgggcttgacgttgttcccaacgcgagagcggtgctgatcgatctctacagcaaaaccctaaaggagatccaagctgtgccggaggatgaagggtaccgtaaagcggtggaatcattcacgcgccaacgtctcaatgtgtgcaaggaagaagaagattgggagatgattgagaagcggcttggttgtggtcaagtcgaagagcttatcgaagaggctcgcgatgagctcacactcattgggaaaatgattggttcgtactctcgttgcctatatagattgatttctgatttgagaacaattggaatatagattgatttgttgcgataatcactcaaattgagaaatgggttttgtaattgagaatctgaatcctgaggctttgtggattgttaggttgcaaaatctgaacactgagcattgcaaaggtgacccttttattgggctattgagtttaagtgtgtgttgaaaactgatatacaagtaagggaatgcaaaagtttaggtttttatataatttgctaactttggctatgagtgaatggttgcatagttcactttagtttggaacggcttttgctttcaatgtaggtgtgtggtcatcttcttgctttgtagttatttgtacattagtgttattgcttgtactctcttttgaatcttcataatcatgtgagcgaggttacaagtagctattgtttgagacttatcacattctttggttgcaatatacttccaatggttttagaatgatggcttatttattctgattttgtcatttacaacatgttcttcaccatggagttgtaatttgttctttttgcatatgcagagtgggatccttggggtgtaccagatgattacgag

SEQ ID NO: 139362 - DNA, 1740 bp, Arabidopsis thaliana landsberg
atgcaaggagtgtggagccaactatggaggaaatatgctgattataagtacaataagttcgagagatttgctgtttgggaaatgatcgaaccttaccgtcgaccaaaaaccttcacaactttgattactatctatgtcgccgccttttacaccggcgtcatcggcgctgcagttacagagcagctctacaaggtcagcttcgtattgttatcgattcaggcccggaattgttattagatttgtgggttctaatttgattctcgtgattggtaaatgttagggttcgaaatgtgataaaattggaaatgattcattgttgattactaataaaggattgtgtgatcatgaaaagaactatacttgaattgcttttcatgggaatggttcattaggtctttcaatgaagcttttacgtcttgattagtatctaatctaattcattgttctgtagtatattgtattctttgtcaatgtgtttcttacactgttttgtgttagtatcagttatgtttcttgtttgagtgtgaactttatgttactccactctctgtaaacaggagaagttttgggaagagcacccagggaaaacagtgcctctgatgaagccagtattctatcgaggaccatggagagtttatcgtggtgaggctattgcttcagatgctagcagccagtgaagctaacgattaggctatcagagactatggtgaaggatgtatctccgactttgatacgcagatataaatggatttatactggttcactagtatatgtatatcaaaaaacttcttttggttcagtagaatgtttgtgtctgtatttcgagtctaatgactctcttaagaatctattttctagaaattacatgtaatgacagtctcgttatagtataaggatttgatttgagaagtttaagggtatccattcattcctttgaatatctctgcttgtatctgcctctcttctggtgtcctgaaataaaacattcccaaataagatagatgatctaactacctcagaaacattgagccaacacagatttttctcttcaaattaggttgcttcacattctttagtccatatagattcctctggggacgtactctgtttctttccttcctttttttttttgtttgttgcttgtgaaagaatatgacaacctatggcactataccatcccaagaaaatgcttcgtcgagcctgagcttattaggacgagccaaagaattgatctcgttaggtcttagctctcaaaggccatggcttgaacttgtccaatgtagtgcctttagccttcctatctcctttagcgttgccactgaacgaatcaaatccaacatcatgatctttcgaaccaactacattgttatcttcattgttagtatcttcatcagcatgctttggcaacccgtccacctttccgtctttgttatcttgatagtagcatggctatatgtctactcccgtgataatgaaccatgggtaatatttggcagtgtgatcgatgattctactttggtgctggttttgttggtcctcacgatcggtatatttctactaacagatgtatcccgcggtattgtgatcggggttttggctggtttgcccgttgttctggttcatggcatgtgtaggaggaatacagagatgttgttcgtcttggaagatgatgaagagaaagtggcaatgaacacatcatcttcgtcactttcttcttcctcttaagtcttcacaattgag

SEQ ID NO: 139363 - DNA, 1966 bp, Arabidopsis thaliana landsberg
atgggtgaccttacatgttttgatcttcatattcatctaccttcggcgaaggaagacatcgaaatggagttcctcgagtactcctcaacgatgctatcatcatgtccagccgctccacgtccactacttcttctactcttaaaactgtttggttcgcttccgtttaatccaaaagttcttgaaccggctcctgtaccggtcccggtacttgtatagccgcctcctctacgaccttggagtccaggccgacccggtttaggcaatcgtctctgttgtgatgttgattggtaggtagtcctctcttgtgatgttgattagtagcttaaatgtaaaaccaaacaattttcgtgggtcaataaaagcaaaaatgaaaaaaaatattcgatctcttagtccggcccatgatcagtttcaggcccaattcaatccgtcgcattattaaaaatctctgaaatcgacttttaacttgtgaaaccgtcacagtcgccgggaaaaaatcacagatttcttcgacgccgccgatgaggttccggtacgcaatggtttgttcgtcgaatcagaaccggagcatggaagctcacgctcttcttaagagacaaggactcgacgttgcttcgtacgggactgggtcacatgtaaaactacctggaccatctctgagagagccaaacgtttacgactttggaactccttacaagcagatgttcgatgagctcaggcgcaaagatcctgaactgtatcctcttaatccgttcctttcttttgttgcttacggatcatgatttttcgaatccctaagtttgctttggtcactgaatcagtctcagtctccttctaattcgataatttgcttactttcttaggctagaacaacaattatgctatttaatttccttgaaattgtttcctaattcacatttaagtttcttggtttgatttaaggtattgattctgggaaaaagtatgttttcttctctccaaatgactgaagaaaaagtgtgtgcgttttagtaaatatacgaaatttcttgcttgtagctattgtgaagcatgttcattgggttgtatagggagatttgtaagcttgaagtttgatgcacttaactgttttcatcagatacaagcggaatggtattttgcagatgattaagaggaatttatccgtgaaacttgctcctcaaagatggcaagataatgctggtgatggtgtgtttgatgtggttatgacttttgaagaaaaggttttcgattcagtccttgaaggtaattgaaaaatcctccctattttacagttagatactttgtttgaaaattgcttcatcctgattgctcactacgtacatattgatcacaaactcttctaacattggaagaaaaaaatcctggtatcagtagatttgttcatcaacttatcccatttgaagaaaatcgaaatgttgacactttgatcttctacatgcattgtttccgaacaatcttctcatttggtaaattatgttaaactagttaggttagatgtttacatatgtgaattgatgaagtctaagtcatgtgaaactcaaaagttctgcttagtgattgccgtttcctgtaacttagtttacttttttaccttgctgtaattgttagctgaaaacccgattgcaatcatggtatgatagaactgtcggttttcttgctgcgtgaaacattcctgtgtcttaatatctttatctcatcaagttagatttgtccccaatctgcagatctcaacaacagagaacaatcacttacgaaaacaatacttgtgatgaacttggaggttaaagataaccacgaagaagcagctataggtggccgacttgccttggaactctgtcaagagattgaagggaatgaaacatgggaagatacgatcgatgacattgttgcgggttttgaaaaacaacacaggcggaaactggtctacagcatctcattctactga

SEQ ID NO: 139364 - DNA, 803 bp, Arabidopsis thaliana landsberg
actcttgtgctggaaaaagtgttgatctttttccctttttttatcattgacttcttatgtacttgtttgtcttgtttctatgaaacaggttacatcttacattggtcatcaccgcaactgtctgctgttggatgatgtaagtttatgtttcatgcactatgtttcctctacttgctagccactgctttgcattcacaaccatgggaatttgtatccagcccgttatttgtttatccaaccctctcttgtttgattgttgctgatcaacattaaccatcaaactatcaagatatagatccttctagcctttactacttccatttttgttgttgataggataacgtaatatcttgacacttctcatttatctgtggaacttatctctagtcaatgaattagtattcatgttaagagaaagtttctacaacatgaacattattggtcttctactaaacgctgtgcaaatcctttccttatatgcaattcattcattgtcttacatatcattacatcgtttttgtttcttcgcattggcaggtgggcaattgtatacattgcgcagatgaaccctctcattgtccctatcttaagcgaggtggagtagaaaccattctactcaaactaggaaaccaatgcacaaatttgagtaagagccccgctgctctttctgtatcttcttcaacatatttgctttcccctttgtattcttatcgtggtgtggaacaacgaaactatccccctctttactcaaacatattctctttcatttaattcttgaacagttttatatactaaagactcta

SEQ ID NO: 139365 - DNA, 2667 bp, Arabidopsis thaliana landsberg
gatcacccctcttgggcttcctgttgtgcaaccctattgcagaagtgaaagacatctggtaagtattatccattaagaatccttcatgttatttaaaaataatctctctgcgagccaataattttgactttgtaatcaaatatggccactgtgattacagataagaacatctcttcaggttttggctctgcagcgagagggtaacacggtaaagccgatttgtttgtttctttgttttcactgagcaagactatcagtgggtctttgcttaaagactatcaattcgcaggtggatgttaggaaacaaagaactgcatttcctcccaactttgtgcactcgctggacggcactcacatgatgatgactgctgttgcatgtcgagaggccggcctaaactttgcaggttagttctgtcaattcgactaatggcctaccaacaaaaaaagaagtattatcttcttattgaatgcttgggttctgcaggtgtgcatgactcatactggacccatgcatgtgacgttgacacaatgaacagaatacttagagagaaattcgttgagctttacaacacaccgatccttgaagatgtaagttttcgataactctctagttagaagcttaggactaaacgtctgactttctttttctgcacatctgccaaaacaaatgaatgtggttttcaccagacgattttcaaatcgtatgtgaagtattttccagcttttactgatcacaagtttatacttacgatcacaagaaatcctgaaacaaagctatctttattgaatatcaacattaatgatgatgctctagttagtacttctttctctaactgtatttaggatttgattgaagcgtttgtatgaattacagcctcgattggcttgttgacattgttgtgttcttgatacagttgctccaaagtttccaagaatcatacccgaatctcgtgtttcctccagtaccaacgagaggtgatttcgatttaaaggaagttctcaaatcacagtacttcttcaactgagtcatgcatgtagcaccagtgaaccatctgaagaagggagcaagtttttgacgcagggatcttccttggtggcctgtaaataacatccaccacctcaaaatgacatggaaagaaccagaaatgtgcaagaaagacaaactgatactgcaacacactaagattctgacataaattatcttgcagcagaagaggaattcagacaaatctacttagagaaattttggcagcattgaagaagtttctagctcagtaggtaggtcctagacagtcttgaataattgatgtaaggtatgagtcatttgcatcaagcttgtttttggagatgagattaggattagagttgtgttgtatctgtcattcgtaatgttgtacagagagagacttcatatacaaaacaagaacacaataacgacgatttagtaagtttaaagaaaatttagcaatgaatgggtcatcaggatttcagggcctgagtcccaaagcccattttattataactacgaatctgccgcttttgcgatttagggacattttctccttccacaagcagtttagggcttctctttctcgatactctctaccaacctcaacaatggcggagcaggtttctaatctcttcttttctatcatttttgtaaaagatcatgtctctttccttttttcttctcctctgagctcttagctccaatttaatgtgtgttgcagacggagaaggcattcttgaagcaaccgaatgtcttcttgaggtaaaagttaacgaaaacatcttttgatttcttcatttccttagagtatcttcacttattacgaatcattttcagctcgaagaaatctggtaaaggaaagagacctggaaaaggaggtaatcgtttctggaagaacattggtcttggtttcaagactcctagagaagccactgaaggtacacaattcctctattacactgtctttaagcaacggtttatttagattatgtcctaatttggatgaaaggtcacttcttttacaagtttcctctatggtttctgaaattggaatgagttatgtgtttatgtagtgtttgagttgttccttgtttgtgaattgtgtaggtgcatacattgacaagaaatgtccatttactgggacagtttcgattagaggtcgtatcttagcaggtacttgtcacagtgcgaaaatgcagaggaccatcattgttaggaggaactatcttcattttgttaagaagtatcaaaggtgacaaaaagatctttacttttagcttccttctgctgcgataccacctttcagtcttttaactttgaagtatctacaggtatgagaaaaggcattcgaacattcccgctcatgtctcaccgtgtttccgtgtcaaagaaggagatcatttgatcatcgggcaatgcaggtgaggacagtaatgatttatcttgaattcattagaatctttgtgataaattacatgctaatagataccattggcttaaaatgatgtttcagaccgttgtcaaagacggtgaggtttaacgtcttaaaggtcattcctgctgggagttctgctatagggaaaaaagcattcaccggaatgtagagacttcttaacttgttgggatcgatcgaattaagagtattttggttttcatat

SEQ ID NO: 139366 - DNA, 1506 bp, Arabidopsis thaliana landsberg
gatttagcccactttttcgggactgtatacaactttaattaggataaggtaaagtataatacaggttccgaatgtttgattagttaagatcagtttggttttcctcttaacaattattggggtgtgtttgataaggtccgaaatggggaaggtactacgttggaccaatacaaatggcggtttgctatggtgtggttattgccaatgcgctcttgggagggcaatgcctaaaggcaatgtacttggtagtgcagccaaatggggaaatgaaactctttgagtttgtgattatttttggatgcttacttttggttttggcacaattcccatcctttcactctctacgatacatcaactcactgtctctcctcctctgcctcctctacagtgcttctgccgctgctgcatccatctacattggtactcttctttactaaaccactttactcttaattcttaaaccttttataatgttacatttaaaaggtgagttttctgttaaatatcaggaaaaaaatcaaatgcaccagagaaggactatactatagttggtgataaagaaactagagtgtttggaatctttaatgctatggctattattgccactacatacggcaatggcattatacctgaaattcaggtttcattttgtttccattctttgtttagaacaccactttaatatttattcatcaaaaacaaaagggcagtcacatgatcgactacagttatatatatagagtatttgatatatgaatactatcttcttgcaacgcaggcaacaatatcggcaccagtgaaaggaaaaatgatgaaagggttgtgtatgtgttaccttgtagtaataatgacatttttcacagtagccatcacaggatattgggcattcggtaataaagccaatggacttatcttcaccaatttcttaaatgccgagacaaaccattactttgtccctacttggtttatttttctcgtcaatctcttcaccgtccttcaactttcggccgttgctgtggtaaatacaatttttttttaacgtttttctttcacatatatacattgttattattttattttattttcgtcacttatatacattgttactaattttgagttatacaggtatacctacaacctataaacgatattttggaaagtgtgatcagcgatccaacaaagaaagaattctctatccgcaatgtcatccctcgactagttgtgcgttccctcttcgtcgtgatggctacaatcgttgcggcaatgcttccattttttggagatgtaaactccttgttaggcgctttcggttttatacctctagacttcgttcttcctgtagtcttcttcaactttactttcaaaccctctaaaaaaagttttattttttggatcaacactgtgatcgccgtggttttttcgtgtttaggggtgattgctatggtagcggcggttagacagattataatagatgccaatacgtataagttgtttgcggatgtataa

SEQ ID NO: 139367 - DNA, 4439 bp, Arabidopsis thaliana landsberg
tattatttgtttaaaagtaaagtttttcttccatcaaaatggaaaatgtgatctggtttttttcttagaagatattaaaacaatcggagagaggattgcaaattttttatttttgttaatttgctgtgtgatgggtctggttgattctttgttaggaaaagatgcaagaaaatttctcaaaaggaaagatagtgatgctgcagaagcaggtacgtcattattataacaacaattcatgaatctgcctccatattcttcatttgatttgcctcatcataattcagatttctcatgatcaaaaatgatgctttatttattcccacgttgtctctgttcttcaccgtttaagttaaatggttttgatcggatctttaatggttttgatcggacctttaggcttttttgatctgtttgtgaatttgtaggacgagctttggaagaactcagaagttctttgtacaatgagcttaaaacatcagaaggagctaaaaggcaacaacagagattttgtggccctgttgttgcaatgtccctttaatttcgttgttgctgttggaatcatccttgccaataaattagtaatttggtttcttcaatctcaaattcttctttctcttttttttatttactatgtgattgtaattgtaaggttgaattgtgcaggtgatgggaagagttggattcaatttcccaatctttctaacattgattcattataccgtggcttggattcttttagctttcttcaagtctctctctttgcttccaatgtctcctccatcaaagacaacacctttctcatctcttttctctcttggagctgtcatggcctttgcttctggactcgctaataccagtctcaaacacaataggttcatagctcaatcgctaaagtttgaatcaagattcatagcttaagcttgaaagcttttgttcttctttgtttccagcgttggattctatcaaatggctaagatcgcagttacaccaacgattgttcttgccgagtttgttctcttcaagaaaaccatttcttccaccaaggtttcgcttatatcttttacgacatgtcaacaaaacaatcaagaattcattacatgtttttggtgcttactctgttttttgcaatttgtcctcttacaggtcatggcattagctgtagtatctctaggtgtggcaatcgcgacagtgacggatctagaatttaatttgtttggtgcattagttgctgttgcttggattattccaagtgccattaacaaaatactctggtctaatcttcagcaacaagctaattggactgccctagcgtaagaaataagaatctctctcttttacttttacttgaggtgtaagcaatacaagtctcttaaaataaaggctttattgaatgtagattgatgtggaagacaacaccgtttactgtcttcttcttgttggctctcatgccatggcttgacccacctggagttttgcttttcaaatgggatttaactaactcttccgcaatcctcatctcggctcttctcggctttcttctccaatggtctggtgcactcgctctcgggttagtctttttgttctcttgctttggttggaagttcagtcttgaggttataaaatgctaactaaatttgttgtttcttacagggcaacatcagcaacatctcatgtagtattagggcaattcaagacatgtgtgatcttgcttggaggttacgttatcttcggctctgaccctggtttcatcagcatctgcggcgctgtcgcagctcttggaggcatgtctgtctacacgtggctcaatcttccggggaaatccatcgatcacatgtcaaacaagcagctgccaaagcaaaacgtcaccgtttcaaaacctaaagccgaggctgacgacggaggaggagagaccggagtaaccgtagtttctgttgacccacttctctccaagacgataactgccaatatcgtatagttttacaatttgattagactgccaaagagaaaaaaaatgagtttgactttttcttcttcaggttttagtttgtaaaattggttcagttttgatatcaaattagtgtagtaaagtatactaataaaaatattttgatatcataatgtgacaagagggcttggtgggtttatttgtacgataatgaaatagatggtgtagtttagaagtaatgtaaaacttgatgtgtattttttttttttgtcgtcacttgatgtgtattatgaggtgcaattagtaaatataataaacctttttgactttttctataatttcagaaactttaatgtagtaaagtgaaaacttgtggggaatcgggttttcggtgataaaatcgggctgacccgaacccggtttagtgcgagattccactgtccgtcgttaactattgagctaaatctcagaacgatttctcgatttgcttttgcgacattataattttcctttcaattgactcagtgagtcgccgatcgagttagaaatgggaatgggaagtaacggagaattgaagtatgagatctcccagaacgcgtacatcaaactcgttcttcactcgctgcgacacaagacggcggcggtcaacggagtcctcgtcggtagaatcagccctaaggacgacggagttgtagagatctcagattctgtgccgctctttcactctaacctcgctctccttcctcctctcgagatctccctcatcatggttcgtatatcttcttcttcgaatcgatttgattttatgagctttgaaattgaattttgaaagagattatgatctgattgcattggtatgtatattaaattacgaattctggaaatttttagttcgcgtactaagcttgagctgcatatgttgttataagactgttcttagttttctatatgtttgcttgattctcagtaaagtctcattgttgtttctattttaacatagaaatttcagatcttgaatcgtttgttctgtatctgtgtttgagagagatttagtgtttgtatctatatcctttatagaaaaaacttacggattcaggtatttttttgttgtggtagatagaggagcattatgtggctcaaggattaagtattgttggatactttcatgcaaacgaaaggtttgatgacgttgagctctgtggtgtggctaagaacattggtgatcacatttctcgctatttccctcaagcaccaattctcttggtaaagaattgtcttatcctttactttcaagtgcagcaaattcttgaatcgttaggttttaactatcttatgttgcacctttatgatgtttgtagttgaacaacaaaaagcttgaagccttatcaaagaataaagagcgaagccctgtgatgcaggttggtatttctaatcacgagaatgattttaaaagcttaggagaatatgaatatgagattgagaagttagtcaatttagtaatgaatatgagatcaaggccactctacaccagtatagcttcttggtatttgaaaatatggttttggtatattgttatgctcaatttaagatcaagagaaaatagtggaagactgagactctcaaatttcgtagtatatgctaatttatggttagtccaggctcttgtttcaacgctgcattcatttttcaaaattgcatcctaagcaaatgctgtaaattatacgatatacatgaccatactgtctacttgaattgtgctaccaaccttctcgacaccaagcttacatggtccattttaatcaaccctttccttttggtactttctgcttgatgcaaatttcttttgcagctgttaaaaggcctatttatcactttttatgggtttagtaatagtgcatgttgtatgtatatgctagctctgtgtgaaggacgcttctaagaactggagagtggttggagcagatggaggaagcaagctactcttaaaagagccatccgccaatgtagttttgtcagattacatttcatctgagaaatggaaggacgtcacagatgttgatgatcatcttgatgatgttacaaagtaagttacatacacgaactgacacaaaaaaagaagctaggacctttatgtaccagatggtaaatatctcactcatattcactgtaattgcagggactggctaaaccctggacttttcaactgaagatgggtatgcgatatagctaaattagacttttgctttcatcatcttcagtcgaaaaacaaaaaaaatctcagagacccttgtttaaaatttctcttgaatcttgttttaaatgttatccagctacgcagcagagcttaaattacttttaattggtacacatcttaaaccttagttatatcatttgaatgatatcttttggagcttgttcacgtgatccattttcgtctctctggttacattttgattatatagttggaatgaagaaagctctactttatttggct

SEQ ID NO: 139368 - DNA, 969 bp, Arabidopsis thaliana landsberg
  unsure (1)..(969): unsure at all n locations
gatcataatattatccaatttctgtgttaagttgtgatctttgttttagaaaatgtgtttttgaagagatgtgcatcttctcagtgttttgttatgtgtattgatatgataacaggcaaacgcggcatcgggaatggctgtgcatgatgattgcaagctgaaatttatggaactgaaggcgaaaagaacattccgtaccatagtctacaagattgaggataagcaagtgattgtagagaaactcggtgaacctgaacaatcatatgatgactttgcagctagtcttccagctgatgattgccgatattgcatttacgatttcgactttgtcactgcggagaactgccagaagagcaagatcttcttcattgcatggtaaaagcaagatattgtcactcatgtcttttgatctgtttagattatggtcatcaatgtgtgtttgttgttgtgccaaaggtctccatccagtgccaagatgagaaagaagatgatttactcgagcactaaggataggttcaagagagaactagatggaattcaagtggagtttcacgcaactgatctaaccgatataagtcttgatgctatcagacgccgcatcaactaagaaataaaacccttgcaagagacttgaataaacttgttttctcgagtaatatgtttcctttgactattatgaaaacttttaacaccttaaatttaatttattctacagtatttggtattattgtatgtcttgatatgttttaatctatgagaactaaatgttagtgtgcgtcaacaatanccgtgagatatcggatctaagattccgttatataatggaagcattagctactgtgatggctcctacacgtatttcatgtcttacatcatctttatttattactacagagtcatgagagctatagttcaccacacatgatctgcgaagagatgtaaacgctttatggcttcttgactttggtc

SEQ ID NO: 139369 - DNA, 1089 bp, Arabidopsis thaliana landsberg
ctgatggatgtaaatcgggaatcggatctgtacccgatccatcgtgaggtctctcacagcgaaagaagggttttgagggttttcacacctttcgctgtttcctcgtcaatttctttgtttggttgttctttcttcgcatccaaagatgaagctcgtcaggtactgtttcgttctcagttcttcttttctttagaaaattcatgttgttcttaatcttagttagctcctggcatggaatccattcccaatattgagcctgagctgatttgtgttatatggttttgattggatcgagtaggtttttgatgaagttaaacaatgaaactgtgtctatcgagctgaagaatgggactgtggtccatggaaccatctctggtaagttcttattgttagcttccggtttctttgtagctcttctcatcttttcttctctctcgatttctccgttgctaggtcttatacaagtcgcgatctgttcccttattttcaattggccctaatcgcgtccttgtgatcacatgaataggttgagtaaacacacagttagagtcagtagtcataaaggtatatttattgaagtttaagcttgatgatttgggcaggtgttgatgtgagcatgaacactcacttgaagacagtgaagatgagcctgaaggggaaaaacccagtaacacttgatcatcttagcttgaggggtaataatattcgctactacattcttcctgatagcttgaacctcgagactttacttgtggaagacactcctagagttaaacctaagaagcctgttgctggtactgctccattcatttttggtgtttgtaatattcgtcttcataagctaaaagacttctttatcagtccatttattcgttctctctttctttcttctttagggaaagctgttgaacgcggtcgcggacgtggccgtgggcgtggtcgcggcagaggtcgttagatgtagcagcgctctggaacatgttgaaggtttgtgagtttaatttttaggagaatgtacgagttatgtaactagcaactctggcaaaggaaagatttgattgagaaatagtatgattgatgctctagtaa

SEQ ID NO: 139370 - DNA, 2292 bp, Arabidopsis thaliana landsberg
gtggagatcaagaaagctgaaccaaagaaatctctaaaccgttcacctccttcttacggtagtcaccctagaggtcgttcttctaacgatagttatgcaagttatggtggaccttacggaggttttgatggagggtatggtcatcctccaggtcccattaggtcacatggaggtcctgctagtagatatgctgggggatatgggtatggtcgtggcagtgtaggccctgaatttggaggaggttataataattatgggggtggtagtttaggaggttaccggaatgaaccaccccttggctattctagtcgttttggaccctatgggagtgggtttggtggtgagggatatggccgtggaggagaaggagcctatttgggatatcctcgtggaggaggggaaggctatgggggatatggtgggcctggttacggcggtgcatatgaatctggtggcccaggtggcagttatgaaggagcaggtggtccatatgggaggggttatagtagcagtagtcgataccatccgtatgcaaggtagggtcgaggtaatagcaatcagttggagctatagaagcttctctcacaggttcctctagattgttccaattgctctaggtgcattctagagttatcatgtagcgccaacatcaggaagggttgctaaggacaggaagagcatcaaaaagcttttattagcatcttttagttgtgtgtttacctaatttaagtgttgtcttatctctataacttagattgtgttatgtagactttagcatatttgggcttggagtttgtttctcactggcacaagaatgatttatcatttggtagtcttgttagatgatcaattactcgcttagcttagttttcacaatcatacgaattagcttaagaagctctgcaaaatgtgcactcatctattctttagagctcaagttgaatgctttatgtggtctcttgtatctctgtacattttgttgtgctgaacaaaggtttgacggcagttagttagtgcatgtgtaagtaggcatatttttgtcagctgcatacgtaggttctagctacaaattggaattgtatgtgtttgaaaacgtaaaatcaattataaatgtttttgaaaatcatctatacaagcatggttatttggttcttgtttccttattttttcgggtaagggccacggataattggttagacattggttctaataatgtgggttttgttatctgtaatttctcgtcaaaatgatgtactgtatcattaaatgaatatcacttattgtacatgcttttataagttaattgaaatccaaactcttttacgttttaagtgcaaggattgaatgatacaaacagcaaagagacaattctaagacaaagttttcaaaaatttatgacgacgaatgtgtcacacgtacgacacattaaaaagagttgacaaaaatacataatacataaaaggtctacccaatcatagttgataatcttaattagtgattaaaacgaaggtgtaaagtgtaaacatgattttaatctcaatgctttaaggccgatcttagcagtagagtaaagtgtaaacgaacgtattgtttttacacctagaattttaagttctgaaatccattctatctatttttgaaatgcaaaaacgattttccaaaatctccatatattttgtttggtcgataccaaatctctctatttaattgacgattttactgcaaagaaaacgacaatctcggatattcaggctcgcaaagaaaggacacaaaggaaaatcactatttttagatacataatgtttacattaacttctcttttataactctacaaatctttttttctttcaccagtttcacaattccgactattttttagagttttctctattcgtaaaaaggtagagaaagaaacacagaagaaggagaaggaaaaagaaaaaacacaaatggaagggaaagaggaagaagcaaagaggaggatgatgatgaagatcaaacttaaggagacagaagcagacgtaagccaagacgacattaaaagacaagaagcttacaacatgtctccacgcgtacgtcgtggtggtggtggtggcggtggctcggtaggtatgagcaagtcatcgagcgtgaggcaaaactgtttatgcgcaccaactacacaccctggctccttcaggtgccgttaccaccgtcgtaacgctggactcgggatgtctcgtggcacatccgttccctctaacctttccatgttggctggtggagactctaattctcccaagtgatgattaa

SEQ ID NO: 139371 - DNA, 3779 bp, Arabidopsis thaliana landsberg
atgctcgaagaaagagttttttccttgggggctttgggctttgggcaccgcctagccgttcgaactctctggtttgacacaaggattcaagctgctctggagtctttccacggcgatgcagcacaggttgttctacttggtgcaggtttgttttcccctgtttagacattttaacttatgtgtgtatatatatatgtggagcatgagtttaagataagtagccaacatagaatgatgtaattgaatttcaggaatggatgcaagatcatacagactaaactgcttgaacaaaagtgacgtattcgaagtggattttcaagatgttttggaaaccaaagcgagcctagttcaagctgcagtaaactctagagatgagcttaggatgacagcgaaatcactagtcagagtagcaattgatatcagagacaacgattggtttgaacagcttaaaaaatcaggttttttgccagagattaacacggtatgggttctcgaaggtattctctattacctgtctcacacagaggcaatgcaagtactaaacctcatagctgagaagtgtggactaaccagcacagttctcttggcggatttcatgaacaaaccatcagctacacttccaaactctgtgttccacttttacagtgactggcctgatcagctcttaccaactttgggattctctcatgtcaagctttcacaaataggtgatccagatgcgaatttcggtctgctccacgatccacggaatctcttcaacaaacttctccgcctgccaaggactgcacaaatccatccagatgatggaaaaccatgctgccgtttgtatttggtcgaagcttccggttcaccgcctcaagataaccaagcgagcttgtaagctccttccggacgtgcatttggcactgcacgcttttgcagaacagatatatatgtgagtctttcacactagagaaattgtgtaggaggttaatgtaatttgatgtataaacgattgatatgaacaattcattatattctaaactctaaagttctatatttctatctgcttgaaaattacaacgaagaaagaacgcttgtcatgcctttcgataactagcatgatcgtccttccttactgtaactcaaacgatgaatgaagctcagcatcaagcataagagtatattcatatagaacgagatatcgtctctcacttagacagttgtaaaaaaagttggtacacctattcagccataatgatttcacaagaagaaaaggaagagagaactagacttcatctcaaatctcaagacagtctttgacacccttctcaaatttgtcaagataagagatagtctctgtaaccccatctgcaactttttttctgcaaaacaagttaaaacattgtactgctttagtgacatgagagataccaaatcatcatacaaatatagtttcgagtaacagagaacacatagaagacaaccgttcctttgatggattaagagcactaacccatactaagggagattcatgttaacctcattcgactgcacgactagggaaccgaaagacctgctacttaaagcaagtgctaatggaacaaacatgaaccatatattacggcattggcatgacatgtctataattgaacaaccaatttcattacacatttcaatagagagtcacactagcacatacctaacaagatcatcaagtatattctctgcttctaatttaactggatccttatcatcaagtaatgaagcagcattcttcacaacaagcttaaatgtacaaacctaatcaacaacatcatcatcatcatcataaaaatcaaaactttaatgtcattcataactaaaaaccaaaactttaagatcaatttaagattctagaaacctcaactccggatttagattgaaaatcaacaagagagcttctttctttaggaacacaatctcttgcagaagacttaaacagattctgcagattctccaaatctttctctgtataatcagattcactagttaacgaaagataagcagattgaagagcttgacgagttgcatcaatgggagcaagtaagaatcttgaagacttcttcttctgatctttaagccactctttaggtcctgctgtgtgagaaaattagtttttttttcaaaattcacaaatttggagataagatcaataaaatgaagagtgagtgagaagtgtgttgtgtacagattcctaaggagaaggcgaaagcgggattggtgggggagagagtgaggagaagagaagtggcggaggagagaagaacggtggcgtctcggcgagagataatctgtggcaggtggtcggagatttgtgcggcggcgattggtggtggtggtggaggtttagtgtttgaagagaagaaaggttgagaaattgggataagacgagccatggcttaacattaacgagctaagttatgtgtacccgctcatgtggtatttaccaatggtttcctttttgaacagatttttgtcttgtttttaaacacaaaacgacgtcggtttgtgaacataataaaaatgtaaatgttgacttatctttgctaaattggtccgtcagctaaggatgtaccttatttagcaaaattaacgaaaattaacgatttaattgaaaatcaactaaagtttaaaattaaagtcaccctactcaaaattggtgctttgtttcaccacttttgataaactggtgatagtttttatgacattttttccaataataaaaggggtagttatgcaatttagtagaagttaatgggtttctaaacaaacttaaaaaccaaatttttctttattgctttgctcgagagtgcctgcaactgcaacagttgagattttgagcgtgtcaaggattctgattgataacgatattcaagttcagcaatctcattgcagtagaaaatggaatcgaatcatcctcacttcaaggtccgcttcttttcaataggtttctagttcgattcatgaactgtttctgcagtcaatttcgaacttgtgaaatctccataacttgtgctttgaatgtatttgctaaagctataatcttgttgcgtttcaaaaaccatcctttggaaaaattggagtcttttggttgcttattgaaatttgtttgcagctaattttgggatcttcttcgattgctcgacgtaagatactaacagatatgggataccaattcactctcatggtaatttcttgttcctttgaaattattattcaaagactgcatttttgtatttgggcttctagttcaagtagaagtttactggtaattgttaatgtagagtgctgatattgatgagaaaagcatccgcaaggagaaacctgaagagttggttttggctttagctgagacaaaggtaacttcattagtcatctgcaataaaatggttgcttttatggttcatgtttctttttgttaatcttgtcatcacaggctgatgctattgtgtcaaaactacaaattagtgaatgtgaagatgaggaacaaccgagagtcttgattgcatcggatacagtatgtagtttttggtttagctaattactagtaaagtctccatctactatcaccaagttccattttatgttcttgggaatgcatcatcatcttctttggaaatatacactcttacgtcgtaatagctctgatttgtcctgcaccagaagttgctttatgggttttatctctttagggtcctctatatcttactctgaagctagtatttgtcattctttaggtcttgatctactcatgttga

SEQ ID NO: 139372 - DNA, 4214 bp, Arabidopsis thaliana landsberg
aaattgagcacaaaaccaacaaatggggatgagtcgtcaaagactgcactctctcctcttcctctggctccggcgaaaaaccccttttcgatttcattgataaaacgcaaatcgatctctcgtgtggaagaagaagaagaacacgatgggaacaatgggtaaagcattctacagcgtaggattctggatccgtgaaactggtcaagcacttgatcggctcggttgtcgcctccaagggaaaaatcatttccgagaacagcgtatgtcttttggatcgccttgtcttctcttagttccattcgaatcctggtgatgatttttttttgtttcattactcgtcgggtcttcgaaatgtttgtgtatttctctggaatcaggtcatagttttgattgatgcgtttcctcttatgttgatgattgattatggcatttttgattagaaaccttagagcttaagatcaaatgttcttcattttgctagtgacggtatccatttctgtggttgcgaagagagattctcgttaattttctcttacaagttcctcttatgttctctgtatttggctagttattatcctagttgaaatcttcttcacttagacaagtgtgttatgtgttagcctgtgctatgatgggtggttcacttgtctatcttctgaaactctttttttgttccagtatcaaggcaccgcacactcatgaatgtttttgacaaaacccctaatgtggataagggggcttttgtggctcctaacgcttctctctctggtgatgtccatgtgggaagaggttcttccatttggtatggatgtgtcttgagaggtaagctgctggagtatttgacattgttgattcaaatgtgctttcattgagaggataggcactctttagttcagacataccctttgatttaatgaccgactctgcaggagatgctaacagcattagtgttggagctgggaccaatattcaggacaacgctcttgtgcatgtggcaaaatcaaacttaagtgggaaggtcttacctactgtcattggagacaatgtcaccattggtaaatctcaatacatttgctgtcataaaattgaagtgtgaatattaaagtcagggtaatggataaagcaaattgaatttggagcaggtcatagtgctgttttacatggctgcactgtcgaggatgaggcctatattggtacaagtgcaactgtcttggatggagctcatgttgaaaaacatgccatggttgcttcaggagctcttgttaggcagaacactagaattccctctggcgaggttcttagccacgctcttatatgttgaccttctcaaacgtttgttattcgcttaagctctggtgaaattacaattctggttttccttgcaggtttggggaggcaacccagctaaatttctgaggaaggtgacagaagaagaaagagtcttcttctccagttcggctgtggagtactccaacttagctcaagctcacgccacagagaacgcaaagaacttggacgaggctgagttcaagaagcttctaaacaagaagaacgctcgcgatacagaatatgattcagtactcgatgatctcacgctccctgagaatgtaccaaaagcagcttgaggcgtttaacctgtgccgccttgcgaatcttgatttgtttggatttgaaaagtaaaaacaaagaacttgatttcctgcttctccaataaagttttcttgggcgtaaaatccattggccagtgctcactgggaaagttttcggcttaaaggcattcatttctctgttaaagattgtgaggggttttgttctcttgtaacttgagaaagaaaagttgtaaccttttcttcctttttatgtcgtctaataaattgttgatcagacagacatttaggttgaccttgcccataaaaagatagctctgcttctataagtttcgtctgtagcggtaacaagtaaaacatgttcgcatgtttgcgtattggacgctttattcgtctgggtaacgttaccgttaaatccactaatttggtactgagatgtgtctttatccgaaattttgccacccatgccgaccacctgttcgacgaattgccgcaacgagacctctcctcacttaactctcaactctcgtctcacctccgcagtggaaacccaaatgacaccttggctctctttcttcagattcatagggctagccctgatctcagctcgcacactttcactccggttctcggggcctgttccctcttgtcgtacccagaaacaggacgccaagttcacgccttgatgatcaaacaaggcgctgaaacaggaaccatatccaaaactgcgcttattgacatgtactccaagtacggacacttggttgattccgttagggtattcgaaagcgttgaggaaaaagatctcgtctcatggaatgctctgctttcgggtttccttagaaacggtaaaggcaaagaagctcttggcgttttcgcagctatgtatagagaaagagtagaaatcagtgagttcactttgtcttctgttgttaaaacttgtgcctctctcaagattttgcagcaagggaagcaagttcatgccatggtggtggtcaccggacgcgatctcgtggttttaggaactgcaatgattagtttttactcgagtgtaggtttgatcaatgaagccatgaaggtttataacagtttgaatgttcatacggacgaggtgatgttgaattctttgatatcaggttgcattcgaaaccgaaattacaagggagcgtttctgcttatgagtaggcagagacccaatgtgagagtgctcagtagctctcttgctggctgctctgataactctgatctgtggattggtaaacagatacactgtgtcgctttacgtaatggtttcgtttcagattctaagctatgcaatggcttaatggatatgtatggaaaatgcggtcagattgtgcaagcgcgtactattttcagagctattccatctaaaagtgtggtttcttggacgagtatgatagatacgtatgcggttaatggggatggggttaaagctcttgaaatcttcagggaaatgtgtgaagaaggaagcggagttttaccgaattcagtgacatttcttgttgttatatcggcttgtgcacacgcaggactagttaaagaaggtaaggaatgttttggtatgatgaaggagaagtatcggttggttcctggaacagagcattacgtatgcttcatcgatatcttaagcaaggctggtgagacagaagagatatggagattagtcgagagaatgatggagaacgataatcaaagcattccttgtgctatatgggtagcggtactcagtgcttgtagtcttaatatggatcttacgcgaggcgaatatgtagcaaggaggcttatggaagagacgggtccagagaacgcgagcatttatgtgttggtttcgaatttctatgcagcgatggggaagtgggatgtcgttgaagaattgagaggaaaactgaagaataaaggtttggttaaaacagcaggacacagcttattcatatgaattgctttgttttttcagcattacactacacttgagctactgtttttgtgtcaagaaacagagcaagtccactaaagtctaaagcattgttgtggaactgtctcgttgtcctaattaagtcaaacaccaaagaagacatagtcaaaaataaagtagcattgacccacgaatagtagtaggtgaaagggcaatgtcacataaggtttaagttaaaggagtcgttgggataaggagaagagaagtcaaaagatgtgtccttttcaaaatctatcctttcttaaaaacatatcaccagagagaattgatcaaaaccacaagaaataatgattagagcgctgagcacgaggaaggttcgaggcagctacaagaagctcggcgacgaagaagaagcaggcgcagggcttttagaagtgaaaccggagagcgttcctacaaatccccatggtcaatccccgaaggtgaataaaccggtggagaaaaccaggggttcggctcaccctctatttagtttcttcgatatgagtctaaagaggaagaagaagaagaagagcacgacgactgcaaaaccagaattcgctaggtacttggagtatgtcaaggaaggaggtgtttgggataacacttcaaatggacctgccatatattacaga

SEQ ID NO: 139373 - DNA, 1168 bp, Arabidopsis thaliana landsberg
actgtcaaaccaaaaaaaattgaaaaccctaaattggttgaatgggaaaatcgatggtcagattcgcagaattcgccattagactctcttccgagaatccaaccagaccacacagaccttctccttctccacggaacaaagtcttcgtcaagaagacgacgagagacaccacgtcacacctcgattactccaatctggttaagctggagaaggcgggatcgcactcgggttcgaatcccgctccggcttcgggttcggatcctattaaccgggttcccctcgctcaggtcgtcgaggattgcgtcagacgctggttccaggatacgctcaaggaagccaaatctggtgacgttggtatgcaggtcttggttggtcagatgtattgcagcggctatggaatccctaaagatgaaaacaaggttcacttttttgctctaatttttctgggtttaggttgttttcttatagttcttctagagttgatataaaggtttgattttttcgtctctgtgtctacattgtatgcctctgattaggttttgttgtgattggtctgaattagggttcttaaaatgtatgtggttagctctgatttgaagatgtgattgtgattctgattcagaatgtgtgattttgatctgtaaagggtcgtgcttggattaacaaagcttcaagaactagatcatcagcttggcaagtgagtgataagcctccaggtaataatatatgatagaacttgtgttgtttcaatcttttattgaattagtggaatcttgtgaattgtgtgttttatttgggattcttgttcttctaatgtcagggtataatgcaagcgattcagattccaatgataagaaagattgatgatcatcttttgaatgtttgtattgccattgactttgatttgttagtttctctctcctttgtttaactctacttgatttattcaaatttgaagcttttgtatcatcccaatggtcaaaatgtgcccctcaagttatttattaccaggcagtgaagtaattcaactgtgagtctgttgtagctgaaatccttgcattgccaatagatttttgccaggctttatgcttgttctttgtccccagaagtagaatcaaacagtttgcaaagaatgaatctggaatctggaatctgcaatgtcacttga

SEQ ID NO: 139374 - DNA, 683 bp, Arabidopsis thaliana landsberg
gggtctggcacaacaacggagtcaggttgtcgtttccaagagccgagtcttctataaacatcactatgggttgtacgcttcagcgtgggatagcaaaaagcttaagtcaggaaaacctagtggagttatctgatgaaaatgatgatctatgtcctgtggagtgtgtcactgagttcaagacagatgatgaattgcttagcgttcttgaaaagtcgaaagaaactaattctttggttgtggttgatttttatcgcactgcatgtgggagttgtaaatacatagagcagggcttctcaaaactgtgcaagcaatctggtgaccaagaagctcctgttatcttccttaagcataatgtgagtttctgatctctcatctttgatgtataaacaataaagaagtagagaaaaaatccattaatagctcaaatgctgctatttgcaggtggtagatgaatatgatgaacaatctgaagtcgcagaaaggctccgtatcaaggtaatccctctttagaattttggtactatcaacactcaaaaattaactgaacagcgtagtaaagagtttgatatactacaatcttacaggcggttcctctcttccacttctacaaaaacggagttctcttagaatcatttgcaactagagacaaggagaggatcgacgcagctattctcaaatactac

SEQ ID NO: 139375 - DNA, 1026 bp, Arabidopsis thaliana landsberg
acaaatctgtatttgatttctccattaacagagaatcggtaagtttgaattttatttcaatctatctctctcaatataagcccttttctcttcttttatgtaattatttgcattaagatggaaaattttcaattgcagaaatggccgctgcttttgcttccagattaacccgaggtaagagactaccttattcctcttccttcgatctcatcttgtgtattgaatccattaatcctatgttttagactgtgatgggttttggttattgatgggtttgtttaaaaatcacatctttgtgaagttaaagattcccatttttcaacatattatcagcttcaaaattgttgaactttgtaattgatttagcaaatttagagccaaaattttaaaatctgttgtctttgttgtttatggttatagtatctgatttgattcatacacaaatcatgagcaggaggacgttcattgcttggaggtcttaacaatggtggttcgatgaattcttctaatggaatgatgaatgaaagtatcctctctcaggtcagaaaccaaccaatgaaagtattcttctaatggttttagtgtcttaagcttattcttttttgttgatgttggttgaagcagcagcagcagagaaggacatttattcagatggggactgttctcaaagtcgtggacaattcaggtgcgaagaaagtgatgtgtattcaagctctaaaggggaaaaaaggagctagacttggagatactatagttgcttcagtgaaagaagcgatgccaaacggtaaagtgaagaaaggagcggttgtgtatggtgtggttgttcgtgctgcgatgcagagaggtcgtgttgatggaagtgaagttaggtttgatgataacgcggttgttcttgttgatagtaaagataagaatactaaaactgatcgccagccgattggtactagagtgtttggtcctgttcctcatgagcttcgcaagaagaaacatctcaagattcttgctttggctcaacacgttgcgtga

SEQ ID NO: 139376 - DNA, 987 bp, Arabidopsis thaliana landsberg
agaaaacgcgagagtcgacaaggaaaaggcaatgcaagaagaagcttaaatctctcttctctgctcctgaagtctgttcatggcgatgtcgggaactttccatttgacttctgactatgtccctggtacttcactatcctgtaccctttacatgtctctctctttctcgcttgtcgataatttttctgttttattttgataattgtgaaggcatctatctatgtgcgtctctatttgttttccgggaatattgttactgttcttccttgaattctctccgagcacctagtgttttatgcccctgtcactgtaggcggaaacggcatgtgtgtggagaaatcattttgcttttggtttgttgtccaccagttgttcgatgaaatgattctcttgagttttatagacttctgcttattcgtgtgtgtaatgcaacttgcttctgtactggcctgcctctagggttctatgaataacgaatgttctatctttcaatctgcttactctatgttgtgtatttgcttggtaatacaggttacacactttcagacagccgttgcttctttaactctgctgtttcaagaagaacacttgccatattaccttgctcttcctgtctcgatcacaagaatgggcgtctgaaatctgtccccaatagaagttcttttgtgtgccgagcaagttctggcggctataggagaaatcctgatttctcaagacttaataagcatggttaccggggaaacaacaggcaaagcggagggagagaggattttgatatcgaaaactctgatatgttgtcttcaagaaatgggcctttattcaacctgtctagttcccccaaattccaagctacctcatcccctggacctagagagaaagagatcgtggagcttttcagaaaggttcaagctcagctccgagctcgtgctgcagcaaagaaagaagaaaaaaagattgaagaagcttctaaagggcagggaaaagaaa

SEQ ID NO: 139377 - DNA, 2250 bp, Arabidopsis thaliana landsberg
aaacatatagtaaaagatacgactctctcattccctcttccccaagtattattattgcctgataattgataaactacccatcgaaaataaatatttattatgcacatggatctttaaaaaaatggatttgtttattatttgacctgatttgggcttttaataaggcttcttatttactctgttgaccgtaggaaaggcctgtcattatttaaagatctaccaactgaatttcatcagtcagtatcgatgggattaggtatattaatggtaattgttattttcataatataggcctagtgtgataagacctcaaaaacaataagctttgatattacgatgagagtaggagtatataataaaagcataagattatgatgatacaaaggacatcaaagttggtgaacacctagaacaacaaaaggagtaggtaaaaggggtcagctttgcattgtgcttatctcaactaccttatgagaagaaaataatatttttttctaaagtcaaatgtttgatgagtgtagtttggataatgccgcattaaaaaaaaaaacgtgaaatgacaatcgaacattgatgattggagggcttatttgtaattacgataactatagtcaaacggcccaaaccattaataataaaaggtgaataaagaattttctgaaagacgaagaagagaaacgaaattcgtagaaatgatctcgggctcggcgacggcgagtcatgggagagtgttgcttccgtcacaaagggagcgacggcccgtctcaactggatcaaatattttacgtttcagagaaacagtaccgagacaattcagcctgatgatggtgacgaaggcgacggcaaagtatatggggacgaagatgagggaggagaaactatcggagatgatagaggagaaagtgaaggaagcgacagaggtttgcgaggcggaagagatgtcggaggagtgtagagttgcgtgggacgaagttgaagaagtgagtcaagccagagcagatctgaggatcaagctgaagttactgaatcaggatccgctcgagagtttctgccaggagaatccagagaccgacgagtgtcgaatctacgaagactaaaatttgagttttcgtgtttttaatgattgtagctaatctcaaaacagaggacttagaacagagactgattctgattaataaatctcaatcgtccattgaaaccgttgttcatcgtgttcacttacaccgattgatttggaatgaaactctgcattttggatcttttgctttggaacaaaacggttgttttgattgtttatggatctaacgatgtggcctgttacttaattgggcctataatctggatccgccgagtccgggctttttaaagaactggcgaatatcattacacgtggccagatccataactttgaaaatttggttatttttaatttttgtggaaaattagagaccgcttcttgctcttctaacttcacctctgctttcttcttctcgagtgaaacagacagccaaatcaagatttgacggtgagccaaattccatggcactgtttcaggagaagctttcatcactttcctcaagttattcgtcaattcattctcttccgaggattctcgtgtccaagcctcgtaatagaattgccgtgacaaagtcccgttcgatttgcagagcttcgtggcaagaggtttttgttgaatttatcttcttactagaaatcatcattttgttttctcctcgttctttttgaaactttgctgttgtttttagctcgccggagtgttggttttctcggcgattccattcactgcggttaaagcaattgcaaatagctcaataggagtttctctacggcggagattagaagagaaaaagaaggaagccgtagagaattcttcaagattcaagtctaaagctcaggaagctagaaacgacaggtaagattgagtttatcagtgtttttttgtgaaggcaatgtttgataaaatggtagataaattcagttttctgcggcaacgattatttgatagatacatacaaaagttctatgttactgtaactatatggatcaaacatttccttggtttgttcctgtaagtgtgcagcaagtggtatggaaaagaacgtccccgttggtttggtccaatcccatatgattatcctccataccttacaggagaacttccaggggattatggtttcgacattgcaggacttggcaaagatcgtttgacctttgataagtatttcaagt

SEQ ID NO: 139378 - DNA, 848 bp, Arabidopsis thaliana landsberg
tcgattctgttattttgtttcgattttagttcggtacattcgattaggtttatttgcgcaggcttactaatactgattcaagaaaaaattaattatttacaatattttaatatacaactcttagggctttgaaagtgtatccaagtggcgatggcgaaggacagggtaactcgttgtcgttatatgttgttgcggttgatgttaagccgtatgacaagatttacctaaaagctaagctacggattataaaccagagagattctaaacacatggagaagaaaggtaaattatatcgaaccataatagtgtggctaatgttacttactctattaatttttttcttttagagtttaattaacactaacttaatgacagttgaaagctggtcggatcaagcaaacagttggggattccagaagtttgtaccatttgctgatcttaaggatacttctaaaggtcttcttgtgaatgatacattgaagatggagattgaatttgaagatttctctaacacaaaatactttccaagttaagttttgcataatgcaaaaccagagagcttggaaccaattgtgttctgttttttaagtgtttttgtgctaataattggaggattggtcttcctaaggtttaggagcctatctcccacttttcccaattccctagtttgtagaaatcgttgattccaagctagcttttcttgtacttgtttcctatttaaataaatgaaaattaagaataaaagcagtcttaatttaccattgaaaaactcttgttcttacttcattctagctgcgactaagactaacactaaccgtggaataacacttctaaaatcaaccgaataa

SEQ ID NO: 139379 - DNA, 1616 bp, Arabidopsis thaliana landsberg
tggaaaactaagaaaggttctgtgtttagggttctggttctgggaagctcgttctcaccggaaaaccgaagaatatgatcggagtcgggaaaatgaaacagtactccaacgtccttgacaagcctctcagcaaaggcaagcaagaggtacgttttcgctacgtagatccacttttctcttccaatttcggagctttcctcagaaaattttacactgaactaagtatggaaattgagaacattgttcaatttggatccggatctaatagttgtgggagggttcgatttcaaatctgtcgggttttgatcttcttcttctttgatctctttattgtgatcattcgatttcgagcatctgctgattggttagtcgttttggaattgtacttgtgttgtaggtgagcttgaccgcatttgctttcttattctcggagctcgttcagtacaatcaaacccaggttgacaatatagctgaacttgaaagaaggtgagctgattggattcttagaaatacatatgatttttttttattagtctaattcatttacattccatccttaacaatgtgttttcttttatgatgactctcagactagaggatgctgggtatgcagttggatctcgagttctagagcttctttgcaaccgggaaaaggtacatcttatttttgcaatctgatattcttacttgtgtgttttgcctcaaaaactggaaaaaaaaaagaacgtttccatacttctagttttgttcatggaagagcaatgcagagttcaatcatgtcttatggatatattgtttcattgtttcagggaaacagaagagagacacggttactgggaattctgtctttcgttcacagtactgtgtggaaagtgttgtttggaaaggtgagtggcgatttcaaattcaattagttgttgagtctttctatcgacatgcctgttcctggattctaactcacacttaacgaacatgccataggttgctgattcacttgaaaaaggaacagaacatgaagatgagtacatgatcagtgaaaaggagcttcttgttaacaggtttatactgctccagctctttccataaacactctgagataatgtaatttttttaaggtcaagaaaactgataacaaatgtgaaagtgtaggttcatttcgattccaaaagacatgggaacattcaactgcggagcgtttgttgctggcatagtgaaggtgagtgctcccttgacatattcacgaatagggttcaaatttaattggtagaggaagaagataatgagcctgacacggtttcctctatgtagggagttctggataacgcagggtttcctgctgtggtaacggctcattttgtacccattgaaggacaacaacgtcctcgaactactattttgatcaagtttgctgatgaggttaatgcctacatccatctcttttcctcatctagatttgtgggaaaaacttaattcttgacagttgttttacttctatgccaaacaggtgcttaagagagaggcacggctaagccaatgagagtactatggtcacgagtttccacaatctgaaaactattggctttatgtgaactgcttgtgcaaatctgcggtctgtt

SEQ ID NO: 139380 - DNA, 598 bp, Arabidopsis thaliana landsberg
agaaaatgcagatcttcgtgaaaaccctaacggggaagacaataaccttagaggtagaatcatcagacacaatcgacaatgtgaaagcgaagatccaagacaaggaaggaatcccaccggatcagcaacggttgatcttcgccggaaaacaattggaagatggaagaacactagctgattacaacatccagaaagagtcgacgcttcatttggttctacgtctgagaggaggtgcgaagaagaggaagaagaagacgtacacgaaacctaagaagattaagcatacgcacaagaaagtgaagctagcagttctgcagttttacaaggttgatggaagtgggaaagttcagaggttgaagaaagagtgtccttctgttagttgtggtcctggaactttcatggcgagtcatttcgataggcattattgtgggaaatgtggaactacttacgtgttcaagaaggctgatgaagagtaggttatgtctttttgcttttggaatttagattgtttttttttttaattcagatattttgagatggttttatactattgagggatggtttaattgttgcataatacattatattatctttgatt

SEQ ID NO: 139381 - DNA, 401 bp, Arabidopsis thaliana landsberg
atcacgaatcgctcatgtttattacaaatactttataaagtagtgacaatatctgaatatatcattaagcacaattactaatatatattcattttgagtgacagaaagagacgaagtaaagcaaacggagcagtttggcgggtttccaggaggagggtatggagggttcccgggaggagggtatggaggaaaccctggtggaggatatggaaaccgtggtggtggatatagaaaccgtgatggaggatatggaaaccgcaggtggaggatatggaaaccgaggaggaggatattgtcgctatggttgctgctacagaggctactacggtggctgcttcaggtgttgtgcttatgctggtcaggctgttcaaactcagccacagagtactgagccgggtcac

SEQ ID NO: 139382 - DNA, 1413 bp, Arabidopsis thaliana landsberg
cttcttcctctggagatcagctcgagaagtggacagagtagtttcacattttatttcagtttcattccgcacaatgaaatcgggtgatgatttgtttgacttctttcagagagcaggatgagctgaagaagaaactgatcgcgtacgatgacttcacatggaagttatcttcatcaacggaactgtctcagggatcggagatacttaagtatgttggaggtgtagacatgagcttttgcaaagaagattcttccgtcgcatgcgcttgtctcgtcgttcttgagcttccttctctccgtgtagtccaccatgacttctctcttctccgcctccatgttccttatgtccctggatttcttgcctttcgtgaggtttccttctcctactacttcgtgtccccgagcaatgctctgctaaattcatttgcttcactaaagtatctcagatcccaaaattggatttttcatgttacaggctccggttcttttgcagattctgcagaagatgagagatgagaagcatccattctatcctcaggtttcagttttatctataagttgctttagtttgcaattggctactcttaaaccattgcttttgcgttgattttttttcttctaaaagtctcttgctttgctcttgcaaaggtactgatggtggatggaaatggaatacttcatccacgaggtataaacacacaactttacctttgttttgtagttgcatttcaagctctgtaattatggtgttagatgtaattgtcttctataggatttggcttggcgtgtcatttaggtgttcttgctcacctaccaaccattggggtcggaaagaatgtacggtcttcagaatctcaagctctgaaatttgtgatgttatttttgttttgccttgcattttccatctgatcgttaatgtggaatttatgatgttgtaacattttcagctgcatcatgtggatggtctgaatcaatctgaggttaaacagtcgcttcagctccaaataaacgagcatgagcaaactatcactttggtaggaaactctggaattacatggggagtagtaagtgactttgactgaacatctactgtagttgttgtgtctctttggtaataccgcgttatattagtagtgaattatcagttttagcaacgaaacttctccatagttgtggttttgataatcttgtgtaagatagtgaatttaatgatcaagttttacatattacgttcaacagggatttaggccaactctgagttctctaaagcccatatatgtatcggttggccatcgcatatcactggactctgccgttgaagttgtcaagataacctgcaagtaccgtgttccagaacctattagacaggtaagtgatgcatttaccaacaaacagaaagttatcctgtagatat

SEQ ID NO: 139383 - DNA, 682 bp, Arabidopsis thaliana landsberg
ttcaaaagccttgtctttcttcatcactctctatctcaaaagaaacaactacagctttatagatcgtctatataaagcttactcttgcattgagtttactcagctcgttttgtgtgataaaaccataagaagatgtgtctgacaacttcagagccaccattcccagacactgacacaccaactatgagatctgcttcgtaccatatcaaacataaatctaagacacaaacccatcttcgtatccttaatctcaccaggttcaatgtcatactccgcatatatcaagcgtcctcagacattgactatattttcgtttctgaattatataaaacagtactttctttttcattgtaaacaggaggagaagattactgaaggaacagaaggagatggagatgaggaacttgaagcttttcgtagagaatcaaagcatcatacgagagaatgaagctttaaaaaagaaagctcttcttctccaccatgaaaacaatgctctgtttgctctgcttcacccaaaatactcccctgtttcaacctccttgcttcagtgatcttcgtgaactttgtttattgattcttctcgtcttcttctttccttttccaacctttaatggcactaaaataaaatcaaactaatgatttatgggtgatttactcttctatgaaagctttgattattctt

SEQ ID NO: 139384 - DNA, 703 bp, Arabidopsis thaliana landsberg
aaacaatcaatcaaaaacataaaattcaaagtgtaagcaaaaccagaacgagagaaaatggacaacaagcaaaacgcgagctaccaagccggtcaagccactggccagactaaggtctctctctctctctctttcttttgttacacatttcgtatcaatttgttgaaatatatgtaaaagatctctacatttctaaattcatatagttttcccgcaaatacttacggattacgatagggtgttctttttagacaaggttgatctaataatgtataatgttaaacttatgtgaatataggagaaggccggtggaatgatggacaaggccaaggatgctgctgcttcagctcaagactccttgcaacaggttcagttttgattctttcatttcattttgctcccttgtagtaaaaccataatattgaacttttaaatcaaattgtgaattgtagactggacaacaaatgaaggagaaggcgcaaggagctgctgatgtcgtcaaggacaagaccggcatgaacaaaagccactaagcaagcaccttggacttcttttctaattaattcccctcttcgacttgtgtttaataaatttggggttttaattctcattcctgctactttctgatgttgtttccttgcgtccatttggatctttatgtaatcttatctatctagttaataaaagtatgctttttaagaaa

SEQ ID NO: 139385 - DNA, 484 bp, Arabidopsis thaliana landsberg
agatcacaccatgaacctttcctctaacgaccaaccaagccaaggccgtatcaaggccaaggattggtcgactgatttgtgtgaatgttggatggacataaactcatgctgcttgacttgttggtgcccttgtgttgcctttggacgcatcgcggaggttgtagacagaggatccacatcgtgtggtgtgagcggattgatgtacatgatcatattcatgttgaccgggtatggaggaagcagtctctactcttgcttttaccgaaccaaactaagagcgcaatacaatctcaaggagcgaccttgttgtgactgttgtgtccacttttgttgcgagccatgcgctctttgtcaagagtataggcaacttcaacacaaccgcgatttcgacttagccatcgggtggcatgggaatatggaacgacaggcgcgactggctgcctctacaccttcggctcctccacgtcaagcacccatgtctaga

SEQ ID NO: 139386 - DNA, 1139 bp, Arabidopsis thaliana landsberg
tcttttgtttacttataaacgatatgaaagaaataaataaaaagaacatagaatcttattatgatctagaagaattaattaaagatatatatatatatatatatatatatatatatatatatatatttttcatttctactcatgtttcttatacattctttaaatttgttcaccattttgatttacttgttctcatattagtttgttatacaactcacttagaataatgtagattacatttcagccaaattcatgtaaaagatgcttttctttgtgatgttcttaaaatgctttcttttcactttttttctttcttaactataaatcttgatgcaatgcctaccttcttagaacataagatcttctttaaaatccaaaatcgtaggccactatttcattatacttatgtaatatatgtgatacagatacatctatatacaaattaaacacgaaaccatacatgcacggtgtgatcacacacgcacacacatagaaacataaacacgcaataatttctatacagtttaatttcatttttaacttacttctttttttttggtgaagattcttgagagaaaagaaatcgaagatggcaacaaaatctaccggaggtaccgagaaaaccaagtcgatagaagtgaagaagaaactaattaacgtgttgatcgtcgatgatgatccattaaaccgtagactccacgagatgatcatcaaaacgatcggaggaatttctcagactgcaaagaatggcgaggaggcagtgatcctccaccgtgacggcgaagcatctttcgaccttattctaatggataaggaaatgcctgagagggatggagtttcggtacttaatgatcttgattcttgatctgcttaccaaatagacaaatttaagtggctcgatcatcactatacttaaaaacctcctctttaatatagtttttatgttctttgttgattttaattagacaactaagaagctaagagaaatgaaagtgacgtcaatgatcgctggggtaacgtgagtagctgaccaagaagaatagcgctaggctgttatggaagctggactcaaccattgcttggaaaaacccttaaccaaggacaagagcttaccgctcattaaccacctctatggtggt

SEQ ID NO: 139387 - DNA, 884 bp, Arabidopsis thaliana landsberg
ctcggccatttcagtccaattacatcgtccctaaaaccaccgtcacgccaccggcgattcctacaccacaatttgtcccccaaaacaccccttcaatcttctcttatcaaattcggcgccgaaaactccgaacctcaacctccacggccgttgccggaaactgattgtcccgttccgccggagcagcagccaatcaacgagtatcaatctctctccacctctttccctttctcctgggcttcaggagatctaatcgagtactctaccagacttttcttaaccggcgcttctttcgcatttttcgtcgggttacccgtttcctggttcggatccatcggacccgaatatgaacctgttaagaggattctcgccgccagctctagcgggatcttcgttgtcacgcttgctgtcgaaggatgtatcttggttgggcttatgtcggtaatcgtcttcttagcgccaccgtcgagtatgaagaaactggttggtacgatggtcaggtatgggtgaaaacacccagaagtcttggcacgagaccgtcttcttggatctttctcggtaaagccagttcttgcgagactgaaaaacacgctagttattctcggattatcgctcattcttgttataaaccttggtgattctccaattgcaacgtcttatagaacatacagggatcctagggacagatcctcgctgccaatcccaggagcgtacaatgatgaaaccgcaagaactttcgaaccagaagctttctgcggtgaaccatcttccgatcttctttgaaaatctcttcatcacaacgcaaatacagatagttcctgatagtaaatatatctgtacattcctgtatatttcgataaattggatgtaaaggacaaaaacca

SEQ ID NO: 139388 - DNA, 840 bp, Arabidopsis thaliana landsberg
ggagcaagtagtgaagagagaacattggctatgataaagccagatggagtctctggtaactatactgaagaaatcaaaacgatcgtcgttgaggctggtttcaatatcgtcaaggagatgcttactcagctggacaaggagacagcttgtgcgttttacgaggagcactcatcgaggagcttttttcctcatcttgttacatacatgacgaggttggtaagttctgtttagtgtgcttgccataattcttccgcaatctctgctatgtctgcatttgctaatgtgtgtaaactgtatctttgaaacaagtggtccggtgttggtgatggtattggagaagcgaaatgcagtttctgattggcgtgatttaatcggtccaacagatgcggaaaaggctaagatatctcaccctcacaggttcgatttgttgccaaacacaattcttgactttgcaaactcaaatgtgagggctaagatgaatatagtcgtaagctgtattacttgaaatcgttctctgacttgttatgaatcattaggttgttctttgatcctatttacttataatatggccttctcttgtttctgtagcatcagagcattatgtggtaagaactcacagaagaactgtgtgcacggctcggattcaacatcgtcagctgaaagagagataaagtttttcttcaaggatgtagtttcaggtttattttcttcaccccctatattacttcttaaactcttacctctttcctcgattcaagtattatctgttatgacttatgatcactgaccaaccaaaccccattgtaatggcaggtgacattgctacacaacaacatgacg

SEQ ID NO: 139389 - DNA, 489 bp, Arabidopsis thaliana landsberg
aactccaaagtgatcaaagagagaaagagatagagaatcgccatggcaaagatgtcagcactttctatcttcgccatctttatcatcctcgttctggttatctttggtaaatttatttctcacatatttattcaactttatgattcacaggatccaaagagtatttctttcggtgatagcaataagtttcattatatgtgattttttatatgcttaaatctgtatgtacatatatttgtgcagaaatacctgagatagaagcacatgatagcgagtgtctgaaagaatatgggggtgatgttgggtttggcttctgtgcgcctaagatatttccgacgatttgttatagaaattgccaaaaggacaagggggctaatggtggaaaatgcctctggggagagggcggtaaagtgaaatgcttatgcgacttctgcagcaatgaatcttttaatcagtttataagtcttacttaaactgcatggtgtcgtt

SEQ ID NO: 139390 - DNA, 619 bp, Arabidopsis thaliana landsberg
aaaacacacatataaacatctgaattctcttacaggaaccgaacatggagtcatcatcgtcgacttttctcaccacgacaagcttagacaagaaaaaaccatctccggtttcaagaaaatcaccaaagcaaaagaagaagacgacttcgacgaataaacccatcaaagttcgttacatctcaaaccccatgagagttcaaacttgtgcttctaagttcagagagctcgttcaagaactcacaggccaagacgccgtcgatcttcaaccggagcccatctattccccttcctccgacgaccacaacctttctccaccggcggagaatcttgcgccacgtgttcttcatcaggagccgttcggtgagagagacagtgattgttatgagccgttgaatgcggaagacatgtttttacctgatcagatgtcggcaggtttttctgggtttttctctaatgggttttacaatgtcaatgactttggaagcatcgattctatgtgataatctttcagagtttttattaggggtttcatctagtagatatatatcattatgatatcgatacataaatttaacccccaaattgatacatggatttgttaattactatagggtttggg

SEQ ID NO: 139391 - DNA, 817 bp, Arabidopsis thaliana landsberg
tttcttgcagcgaaagccatcttattggctttttcatcttcatttgtatcttgttacgacccaagtcctcttcaggacttttgtgttgccgtcgatgacgctagtggtggtaatctctctaatttactatacatactccttaatatagttcctcaataccgtactaattatgatttatgagatactatatctttactctctaacatcaattagttaaatcaataacatcaataagatcttcatctatttatcagttttcgtgaatggaaaattctgcaaagacccaaaatacgtgaaagctgaagacttttttacttccggactaaacatcgccggaaacacaataaaccgcgttggctccaacgttacaaacgttaacgttgacaaaatccctggactcaacaccctcggagtgtctcttgtccgaattgactttgccccgggaggtcaaaacccgccacacacgcacccacgagccactgagatcctcgtggttgtcgaaggaacactcttagtcggttttgtaacatcgaaccaagacaacaacagattgttctcaaaggttctttacccgggagacgttttcgtgtttcccataggaatgatacattttcaagtgaacgttgggaggacgaacgcagttgcgtttgctggtcttggtagccaaaatcccggtacaatcacaatcgcagacgccgtttttggatcgaagccttcgattatgccggagattttagcaaaagcgtttcagctggatgtgaacgtggttaaatatctcgaggcaagattttcttccaattatgatcgtcattattaa

SEQ ID NO: 139392 - DNA, 710 bp, Arabidopsis thaliana landsberg
ccgcccaagagacaaaaatccttcgcaatcgagcaacggaagctcctgcatccaccgtccaaatctcttctaacgtcgccggagatcggtaaaccggttcttcatcccgtattcatctcttattgaggtcttagattcatctagcaccttttttttggcgtcgaaactttcagattcccgatttgtaattagttgcgaattttgattcgacgatttgttgctcgaatttgaatcaacagatcgttggggaagtagagaatggcgacgtttgagctgtacaggagatcgacgatcgggatgtgtctgacggagactttggacgagatggttcagagcggtacgctgagccctgagctagctatccaagtccttgttcaatttgacaaggtttcaatttaacttttatttgactgatcttggcgtcttgattcgtttttgtggttttttttttctttcctctttttgatatctgtatgcttgttgtagtccatgactgaagctctggagagccaagtgaagaccaaggtgtccatcaaggtgattttcagttcttttaatctcttagtcagcgtaattgggtagaagaaaatatccagttcgtgaattgggtggaagacgattaagagtttctaaactatcttgctctattcggttatcgttaagagtttctgtgagtaatgggttgaagctggatatcaaataatttagtg

SEQ ID NO: 139393 - DNA, 1346 bp, Arabidopsis thaliana landsberg
tgacactgagaagttggacatctcgatacttttggaaaccccgatttgttgatgactcttgaatctatgggacggtgaatcctaaagaatggttccattttaagtttgttttgtattgttggtggaggctggatgattttgagagcacttgtacttgagctttgttctcatatcttgaattagacagtggaatagaaaagatgacaactttgtattagtaagatgatgaacacttgtagctcttcttgctagatatttgattagtggaattgctgttttccctttttttgagttgcagtggatttcaggattgataatggagtagctgctgggatgatgatggggattcctgttgagcttgaggttaccacggttgagaatcataatgaaatgggtgaaagctctggtcaagcaatgattgagcaagatgatgacaaccataatgaactcggtgaaaattctggtgagcaagatgagaaggtggatcttgattctattcctctggctgttgcagatatgacagaggctcaaggagatgagccttacgttggccaggagttcgaatctgaagcagcggctcatggtttttataatgcgtatgctactaaagtagggttcgtcatccgtgttagtaaactgtcacggtcaaggcatgatggatctcccataggcaggcaacttgtttgtaacaaggaaggttacaggttgcctagcaagcgggataaggttattagacaaagagcggaaacaagggttggatgtaaagcaatgatcttgattagaaaagagaactctggtaaatgggttatcacaaagtttgtcaaggagcacaatcactctttgatgcctggcagagttcgaaggggttgcatttatgatcaatatccggttagttgttactctctttcgttggtcaatatttctttatattcagccattgcatttgaaaatccaaattggcgtttcttggttagctggttaatatatatatatatatatatatatgctgatgtgatactggttcgtgactagttgctatatagcatattcatattcatgtgctggtgttttgattttgcttatatatcagttgttactagaaaagacttaaattctaaaactttgctctcctcatttgcagaacgaacacgacaaaattcaggaactgatgcagcagctagcagcagagaaaaagagagcggctacttacaaaagacatctggagatgctatttgaacagatcgaacagcacaacgaaagcctgtctaagagaatccaacacatagtagacaatgtgaggaatctggaacagagagatcatcaacagaaccaccaagtatagtctt

SEQ ID NO: 139394 - DNA, 594 bp, Arabidopsis thaliana landsberg
ttcctccttttttatttcctttctgaacgaagctctctctctgattcgccggatctgccggagagaaaaatgacgacgagtattcacatcacagctctcgacggaatcgtcaacgtgaactcactcttcacactcgccgtattcatcggattagcttggaaccctaccgatccagacaacagcctcgtaaccgaccctaattgcgtccccacagctcgtatggctgagaatctcgtcgccttccatgtgtactctttcgcatcattcctattctcaagtctcatcgctctaggtctcaaacaagcaatgaggctcaacatagcttcttcgtttcacatctctactcgaatcgatcctgtggtttactatgtgaacaagacggctcttagatttgggatggttacatccggtttgggatcggtttgtggatgtgggtttctcatgttggctttgattaatgttgttcagatcaagcttgggactttgggctgtggtgctagtggtcatacttatgcagctgttgtgccgcttgtgattctggttccttctgcacttttcagctatgtttctcctatgttagatgctttcactcgt

SEQ ID NO: 139395 - DNA, 487 bp, Arabidopsis thaliana landsberg
aatcaacttccttttcccgagaaaatcagaaagaaaattcacgatggcaccaagagccgagaagaagcccgccgagaaaaaaaccgccgctgagaaaccggtggaagagaacaaggctgctgaaaaggctccggcggagaagaaacccaaggcggggaagaaattgccaccaaaggaagccggtgacaagaagaagaagcgatctaagaaaaacgtcgaaacctacaagatctacatcttcaaggtgctgaagcaggttcatccagatatcggaatttcaagcaaagccatggggattatgaacagtttcatcaacgacatattcgagaagctagctcaggaatcttcgaaactcgctaggtacaacaagaagccgaccattacatctcgcgagatccagacggctgtgagactcgtcctccccggtgaactcgctaaacacgccgtctctgaaggtaccaaggcggttaccaagtttactagctct

SEQ ID NO: 139396 - DNA, 717 bp, Arabidopsis thaliana landsberg
gactttatgtgatgcagactctatgtcaggggaaccatacttggctacaaaaggtgcgcattgatacatgatttgctgatgttgttttccactttagtcgtttttgctctagctcccataaacagtgaatcttggctgataatactggttaatacactttttttatgacctcagtttagttgcttataggattcaaaagttagttcctgagaaagtagactcacttgtcttcgtccgatcttagattgttgaatttgggaatagggtatacaaaataaggagactatcttgattttgcttgttatagtcacgagctctacgtttaccaattggcaataaagttttagcgtatacacttaagcaaaacaatctaccatttagtgttgtttctgttttggatcttgtcagaatggtgtccttaaacacgttttgtgtgtaaatatgtacaggtcgaagtcaaaccagtatcccaacacgtcactagtccaagtcgagggagttaacaccactgaggaagtgtcatggtacaaaggtaaaaggatggcttacatctacaaagccaagaccaagaagaacggtagtcactaccgatgcatttggggcaaagtcacaaggcctcacggtaacagtggcgttgttcgagccaaattcacatcaaacttgcctcctaaatcaatggtaatccaaatcatttcagttatatatgtttgaaattgg

SEQ ID NO: 139397 - DNA, 1558 bp, Arabidopsis thaliana landsberg
atgaaatttaagcaaagattttttcttttttctatttatgattcaattctgaaacaaagtttttatttttattctttgttgcagctcgagagtgtaaaattatttgttgggcttccgttagacacagtttcagattgcaacaacgtgaatcacttgaaagctattacagctgggcttaaagctttgaagctacttggtgttgaaggcattgagttacctatcttttggggagttgttgagaaagaagctgctgggaaatatgaatggtctgggtacttggcagtagctgagattgttaagaaagtgggacttaagcttcatgcttcactttctttccatggatcgaaacaaacagagataggtcttcctgattgggtggcaaagattggtgatgctgaaccagggatctattttacagatagatatggacaacagtacaaagattgtttgtcgtttgctgttgatgatgttcctgttcttgatgggaagactcctatggaggtttacagaggtttctgtgagagcttcaagtctgctttcgcagattacatgggcaacacaatcacggtatgatttcacaaatcatctttgtttttgcacttacattctgagtttaactactctggttttaagtttctgattttctgttcattgctttgcagggaatcacattaggtttgggaccagacggtgagctgaaatatccttctcatcaacataatgccaagctctctggcgcgggagagttccagtgttacgacaaacacatgctttctgctcttaaaggctacgctgaatccactggaaaccctctttggggtctcggtggtcctcacgatgctcctgcttacgatcaacagcctaattcctcttcattcttctcagacggcgggtcatgggaatctcagtacggcgatttcttcttgtcttggtattcgtctcttctcacctcccacgcagaccgagtcctctccgttgcttcatctgcatttagcgggattggagtgcctctatgtgggaagctacctctcttacaccaatggcacaagctaagatctcatccttctgagttaacagctggattctacagctctaatggtcaggacaggtacgaggctatcgcagagatctttgcaaagaactcttgtagaatgataataccaggaatggacctatccgacgagcaccaatcacctgaatctctctcgagccccgagtcattacttggccacatcaaaacttcctgcaagaaacaaggagtcgttgtctcagggcaaaactcatccaccccggttcctggtgggtttgagaggatcgttgagaatctgaaggatgagaatgtaggaattgatctgttcacttaccagagaatgggagcacttttcttctctccagagcatttccatgctttcacagtctttgtccggaacctgagccaattcgagttgtcctcagacgatcaagcctcagaggctgaggttgaggccgagacagctagcataggttcaggcactggtgcacctagtttgcaaaccgcttaatgaaatgcaaaatcata

SEQ ID NO: 139398 - DNA, 2177 bp, Arabidopsis thaliana landsberg
atggctacggctgttggtggcggaagcgatgtggaggttggatttgcgaagcttcaaggtgaggatttcgagtactatatgcagtcttactccattatactcggccggaattctaagaaagccaccgtcgacgttgatctctcatccctcggcggtgggatgaacatctcgcgcaaccacgctcggatcttctatgacttcactagacgacgcttctctctcgaggtccttggcaaaaatggctgcctcgttgaaggtgttcttcatctccctgggaatcctaacgtcaagctcgattcacaagaccttttgcagatcggagacaaagagttctactttctcctaccggttcggagcatcttaggcgggccgttgggacctaggcaccacgtctctgggcaaacaagtgttgttccataccataattatcagtcgggtccaggttctgggtcgggtaagaagggcgtcaggagtagagagttgtatgagtacgatgatgaagatgatgatgacgacgacgatgaggaggacgatatgagaggaagtggaaagaaaacaaggagagatggacatgaagtagtatatgcttccggaggtaaaaccagattgctcatgattgtttgagttttcattgtgcaactagatatgtttcagattatgatgcttacttgatcacatcaggcttgtttctttagactttgattgtggtggttgctgattgaaccttgttagacttggattgaatttgaatgctagtgacaccacgacattgtatctgcttcatttgtgcagagaagaagagagagggaagatcaaaggtagatcgtgaagctgatgatcaacaatttttgcagctggaggaaaaagatgttgtatcgtctgttgccactgtgctttccgatttgtgtggtccgggagagtggatgcctatggaaaaacttcattcggtggttagtttttatgagaaagttccttgcctttttctaatacagaatgtagtacgagtaatcaattgaaacaagacttgtataatgtcaaggtgataattagtgtgaagctaggtccttaattagttttccaatggaaacgcgctacgctacttatatgtgtctaagtctagaaagtatgtcagttactccatagattttgaatgactagtgtagtctgactatgaacttctttgtgattcaatatgatggctaatgcatggtagtggttggtctgtgacagatattaaaggagtatggaaacgtatggcatcacagtcgagtaagaagatacctatcacaagaagactgggctatccctgaagcaaaaggtaaaccatggtacggtttgctgatgctgctgagaaaatacccggagcatttcgtcatcaacacgagatcaaagggaagagttacccttgaattcgtttccctcgttaccctactctcatgagaactttaccttagtgactcggattaagatttaagaagcttttctctcttttctttgtttcatatgtaaaatattttggcattgattagtaacacgctgtgtcgtttttctgcacccaaaaacgccaacttcttggttcttatttttgataaacccatcgagatttttctttcatcaaagggcaaaaaattcgtgccaattcagaaatcgttatgttcggtggatttgggccataaaaagagaaaaggccgaaacagagaatgatccaaagtggctcaagtacgtatccagacaatataaaaaggttggaatgtgcaaacttagggctatactcgtatcttgtagcagccactaaagcaaaattctgagatcgaaaaagctaaaaaaaaaaaaaaactgcttccgtttcatcgattttgtccagatcttccccttcttccggtaatcgaagcttacgagatagttgagtgaagatgatctatgatgtgaactctggtctattcagatccttcctgagccagaagggtagctcgtccgacaaaaggtacaaaatcttgtcttgtctgatccaaatatgagattatctcgatgttgttcccagatctatctattgatgtgtcattcttctcatcttcttaattctcatcatctttttatgtttaatcaggaaaatggaagataagccaagagaacagaagcccaaagccagcgacaacaaacctgttatgaatgaatga

SEQ ID NO: 139399 - DNA, 377 bp, Arabidopsis thaliana landsberg
ccataaagttagaatagattcttcctgggtcgatgcccgagcggttaatggggacggactgtaaattcgttggcaatatgtctacgctggttcaaatccagctcggcccaataattagctgtctacataaccattttttttttttttgcataaatgacagagaaggggtaagaaaaaaaggtcaaatttcagggtatagggtatagttcgactttacttttttctttatttcttatgtttagttactttttttttccagaaaaaattccgatcttgatcttgctaaggattccgatatggatcctttaaagagaaactttaatgaacagagtcgataaaataatctatttttttgtaaaaaatagattatcaattga

SEQ ID NO: 139400 - DNA, 1458 bp, Arabidopsis thaliana landsberg
tgtttctcttcaatgtctgatagagatgctaattgttgctttggagatacaattacaatctagtgtcatataacacttatggatcgtgtgaattaatcacagaacaaagaaagtcattaattttggggtaattctgttgcagttgttttgtgaatgattcagtgctctgtttctatttcatatggaggatttataggtgacattccgagatccagaagctgctaggagagcttgtgctgaccctactccgattatagacggtagacgtgcaaactgtaatcttgcttcccttgggagacctcggcctccattgccctatgcagtgatacctaacatgcctggtcagtcttatttagactggcttaactctggtttaatattctatgttgttgtagaatactcgtaatttagtgtattggtgggtttctttgtgtggataggacgcttaagacctgcttccccgtacattggaaatgtgcagggtcctcgaggttcacttattggaaattatccgtatcagcaaccacttccatataactaccagcaaggagttgtctatccttatgggtaaagtcttgcaattcttatatcacacagtacacactgatgtctttgcgcaagtgtctaatgtttgtttttattttctatctcagagtaaccgcttatggacccgagtacatgtactcgcaatcacaggttgacaatggctatgaacacttgctattatttctcttcgtcattaaactctcttctaactttggctatgtcttttcttgtttcatggtctagggtttatatagtccatacatgggtcagcaataccttcaggtctatggagtacctggagcagtgaattcacccgtttatcaatacgggcaactaagtcagactattcctaatggccatggttatacagcagttcaaggctattcggttccaggaagccatattctgcagcttggtggacccactgtcagtacgatgaccacttcatctatgcctgctcttcaagctccttacccttcaggtacattttactgtcttacgcaccataatgttattctctgactgttatctcaaatgtctcggctactaatggtttagatgctattagttatgtctcctttgaattatgtttgtcaggtataccaggccctgctcccgtacagtcgcatatcattgtccactcccctcaatttatgcagagtaccgcttctgaccaaacaacaaggtgagaatcaatacaacgctttctttactttgggtgtagtagtgatgaattatgcacatttgtctttgttccactgctaatatgatactaatggtttcagttattcttgaagactgaagagaaaaggaagttaagttagtgaaactgctactggaggtgttgcagaagaggcttcctgttttattaagtcttgcacgttatttatcttgcatccttaaggtatgcgg

SEQ ID NO: 139401 - DNA, 732 bp, Arabidopsis thaliana landsberg
atggatccaacacacgatgaaaatgacagcttccaaatcatcaattacaagagaaaagaacataatgcgcgtggggttgcttagattcctttgtaatcttgttacttcttagaaatgttgatatggcatacccttaattaagagagacattttttagtttcgaatttaaatctcaagttcttttttaataaaaaaagtaatgatatttaatgcatgatgagagaaagcatgggataaagtcttcttgttacttatttatatttctttccatctatcatggggataatgtatacatatttgcctacctacatagtatatatgcatgtatgtgagtatatataagttaagtctttctcagtttgcacaacatctctatgtgctaaggcatctctttctctccctttctcaccaaatactctctcaatttctctctgccactctctttctctagagattttcataatgaaaggtaccaagaagaagacgccatgcaacaaaaagcttggaggatacttgaaagagcaaaagggaaggctttacatcatcagaagatgtgtggtcatgcttatttgttggcatgactaatttacaacttatatgtgttatatatacatgcatatgcacatgcatattatagacaatatctacgttgtactacaacggtttgattgaagaaagggatcggatcttcgtggttgtggcgatttgtgatgtgagcggagttcgcaagat

SEQ ID NO: 139402 - DNA, 572 bp, Arabidopsis thaliana landsberg
ggtcatcttcacccctaaatactctcaatatcagcctgatgaagcacaacaataccattaggatctatatttcctacaatcctgtgtactcttcgcagcaatcccaaaccctaacggaacatcagacatcgagaacacaacaacaccatctccaggaacaatactatcagtaatcctcgctaatccacctttcaagacatggttcccataaagaaacgacatctccgaagtgggtttaagccataccttgtgtttagcattcgccgccaagatattgagtgacataatcgtcagatggaaactaccggcgtgagtgtatttcccgatgcaggttccgaaggagactaggtttttcctggagatgtttgtggctcgcttcacgagggcttcgctgacgtagtagactctgtttttctggaggcggaagcagtagctgccgggtgtagattcgggtccttcgtctgatgggttctcgacgatcttcttgaggttgttgccgacgaatttgaagagcttctcgaagacgacggttgtctcggtctcgtctaaaggacgcatcttcggggaagaaa

SEQ ID NO: 139403 - DNA, 339 bp, Arabidopsis thaliana landsberg
tgcccccagctagtcacatactcatgattgcaaaatctctctctctctctgcctctctatatattaacctttcttcttcctttactttctcatcttctatctctcaaaagaaaagcagacaactttatttgcaaaaacagagtttttttctttcttttcttgagaaagttcaacagaagatgatgttggagaaagacgatctgggtctaagcttaggcttgaattttccaaagaaacagatcaatctcaaatcaaatccatctgtttctgttactccttcttcttcttcttttggattattcagaagatcttcatggaacgagagttttacttcttcag

SEQ ID NO: 139404 - DNA, 450 bp, Arabidopsis thaliana landsberg
ctggatcctaaaattaaaatagaagattgaggtgaatcataaatccaaaggaggtttcatggccaagggtaaagatgttcgagtaacaattattttggaatgtaccagttgtgttcgaaatgatattaagaaagaagccgcgggaatttccagatatattactcaaaagaatcggcataacacccctagtcgattggaattgagaaaattctgtccctattgttataaacatacaattcacggggaaatcaagaaatagatcaaattgagtgcttgtatgtcaacttttattttaagaacaggaataatgctagtatctatatattattacatatatataaatataaacaaataaatcaatagaaagaaatctaatccgatattcttaattctatatagaaattctatcctatatagaaatagaaattgtttttattttgatccgatcag

SEQ ID NO: 139405 - DNA, 990 bp, Arabidopsis thaliana landsberg
tagggagtccacttggtaacaactagtccatttgggtaatcaaggatttctcctctttgggagtgagggcaatttattctgaggaatttgtgatcggtggctgcaaatggtaagaaaccactctgtctttttttctgatgttttccggtgaattttagctagggtttcatgtgacacatattcatttgttttgcttacaggcgtcttatagcctatcccatgggaaataggattaaaaagtatatgtctttgtatgtggaagttgctgattctaaacatttgccttctggatggagtataaacacagaattgcgcatggaagttgtaaatcacaatttgtataagccctcccaacagaaatgtgagtttttctactgcactggacaaaaaagtgtagatttttatgattctgtgtctgtatttctgtttatcattgtgtgatgcttgactagtgttgtttgtttcgtgaaatttcagatagaaaaaatttgtggtttgatcagaagactccttcctggggttataaaaccatgattcgtcattctaaactttctggtgaagaagggtttttggtaagtggagaagtcacaattgtagtcaagatagacgtttatagagtttttggcaaagtagctgcaatagagatttctgaagagggatctaaagagggatatgaatatgaatctgaagaggtatataaaaaggaatctgaagagggatataaatatgaatctgaagaggattacgaaaagagacctatagagagatttgaatatgaatctgaagcggaatctaaaaaggactacgaagagagaactagagggggatttgaatatgaatctgaaccggtatctaaaaaggattacgaagagagacctagagagagttttgaatatgaatctgaagcggaatctaaaaaggattaagaagagggatctagagagagatatgaatatgaatctgaagaggaatctagaaaggattctgaga

SEQ ID NO: 139406 - DNA, 4104 bp, Arabidopsis thaliana landsberg
aacaacaccgagttcctatatccaacaaggttcgagctgtgatcaaccgtgaagaaaaacgggtggatcaagtaaacggcaaaaaaagtacaaacaaaccactaataaactcttctcaatttccatggcaaagatctaagtatacgggatcgaagactgttactgcggttgtgaaaatcaggaagaagatcaaagagaagctaacagagagatttgagcatcaattagagcttttcatgaaagctattggtcaagggatgttgattcagcttgtcagtgaagaaatcgatcctggtaaattatctaaaattcaagtttccttttttagattttgagaaatcagtttgttactattttgagctagagaacaaagctaaactgatcacttagattttgagtggcggtgaccaattttgttcggttcttctgtggattttattgcgttagatttagcttttgattcttgctcgcattttttgctttcttgaatctgccttgatcgccttgtgcttgttcctacgctgccttcaagatgacagctatttacttgatcataatactcgattagataaaagacccatgggccagtcataattgaaattctatccttcctttgctatcaatgaccattatgcttgacacgttggtcattctaaagattgtatatttcattactatattacgaccaaatgataaaccgaatctttcttcttacttgctagatctgaaattaggcatagcttacattacaccaatttttgtacattattattttcttagattgccttgttcatttataaggcagatcatcaaatttatcaacccggttgttctttttcggtagtatcctctcggtaattggcccatagtttttgagtactttgtcacacaattattaaatcaaatgtaaatgcgtagggtcggtataaagttattgagagttttaaataatttagaaagaaaaaaaaagactcttgacttttcatagtttcatcatcccttttcttaatcccacgtcaccgaatgtatttaatgcatatttgttttgcttaccacattttttagttacatgttacgtatagagattagatatgtatatgaatagcttcttgatattttgcagaaactggtaaaggcagaaagagtttagaatctcctgtgatgggactcccaaaggctgtgaaagatccgagatacctcgtattcacagccgatttcactgtcccgattaactttggtaaacctggtgccattcttgtcaccaatcttctttccactgagatttgcttgtcagaaattatcatcgaagattccactgacaccattctcttccctgcaaacacttggattcactctaagaatgataatcctcaagccaggattatctttagaagtcaagtgagatatcttcttctttacgtcattgaagtgtcttaaaatgtgttttgctaacaagtggaaccattgtttcatagccatgcctaccttccgagactccggatgggattaaagaactacgggaaaaggacttggtcagtgtccgtggtgacggaaaaggcgagagaaaacctcatgagagaatttatgactacgatgtttacaacgatttgggagatccacgtaaaacagaacgagttaggccagttctaggtgttccagagacgccttacccaagacgctgcaggaccggccggcctctcgtttcaaaaggtgattgatctctctgtcactcactttgcatagttatggttcatagagagaacattttgtgtagtaatatataagttagtgtgagacatttttgtggttcttgacttggtgaattcattcagatccaccgtgtgagagcagaggaaaggagaaggaagaattttatgttccaagagatgaagtcttcgaggaaatcaagagagataccttcagagcagggagatttagggctctctccacaatcttgtacaatctattgcagcagcattgtcaaacttagacattcccttcacatgcttctcggatatcgataatttatataaaagcaacattgtcttgggacatactgagccaaaagacactggccttggcggctttatcggcggtttcatgaatgggatcctcaacgttactgaaacactgctaaaatatgacactccagccgttataaaatgtaactttgtctatgagattctctcattcagagtaatatcattttcttaaaccatatacatattttgaatcctcttttatgtgttgttttcaggggacagatttgcgtggctgcgagataatgaattcggacgtcaagctcttgctggtgtcaaccctgtgaacattgagctactaaaggtttgtttcattttaccatttgaatcaaaaatcttctatgaagagtttttgaaacttttgaaatgttttgataggagctgccaattcgaagcaatcttgacccggctctatatggacctcaagaatctgttctcacagaagaaatcatagctcgagaagttgaacattatggaactactatagaaaaggttagctattagtgtacatttttctggttgagataaaatcttctcatcttgttgatcgcgactaatgcaggcgcttgaggagaagagattgtttcttgtggattaccatgacatactcttgccatttgtagagaagataaactctatcaaagaagatccaaggaagacatatgcttcaagaacaatcttcttctattcaaagaatggagccctgcggccattggccatagagctctcgctgcctcctacagccgaatccgagaacaagtttgtttatactcatggacatgacgctactactcactggatttggaaactagccaaagctcatgtctgctcaaatgatgctggtgttcaccaacttgtgaaccactggtaaattaagttacttccttgctttgtagtctccattgatgttttcaacagtacataatttgtgttttttggcaactatcttaggctaaggactcatgcttccatggagccttacatcattgctactaacagacagttgagtacaatgcatccggtttacaagctacttcatcctcatatgcgctacacgcttgaaatcaatgctcgtgcgcgtaaaagcttaatcaacggaggaggaatcatcgaaagttgcttcactcccggaaaatacgcaatggaacttagctctgcagcgtacaagagcatgtggcgatttgacatggaaggacttcctgctgatcttgttcggaggttaaacatttttgctttgtttataacaaactaacaaactactccgttttaatctctcgctaatgcagtctctggcttcatttacaggggaatggcagaagaggattcatcagccgaatgtggcgtgaggcttgtgattgacgattatccatatgcagcagacggtcttttgatctggaaagccatcaaggacctagtggaatcttatgttaaacacttttactctgattccaagtccataacatctgaccttgagctgcaagcttggtgggatgagatcaagaacaaaggtcattacgacaagaaagacgagccttggtggcctaaactcaacacaacacaagacttgtcccaaatactaaccaacatgatatggatcgcctcgggtcaacacgcagccataaacttcggacagtacccgtttggagggtatgtcccaaaccgacctaccctgttgaggaaacttataccgcaagaaactgatccggactacgaaatgttcatgcgaaaccctcaatacagctttctaggctctctaccgacacagctccaagcaaccaaagtgatggcggtccaagaaacgctctcaacgcattcccctgacgaagagtacttgatcgagctgagagaagtgcaaagacattggttccaagatgaacaagtggttaagtattttaacaagttctcggaagaacttgtgaagatagagaagacgatcaacgagagaaacaaggacaagaaactaaagaacagaacaggtgctgggatgcctccttatgaactacttctccctacttcaccacatggagtcactggccgtggtattcccaacagcatttccatttag

SEQ ID NO: 139407 - DNA, 2775 bp, Arabidopsis thaliana landsberg
gttgcgattctgtcgctgtatccgtcattgaggttgtcggcgtcttataaggagtcaagttctgggaggaggagcccggttaggcctagttctgaagcagctgctgataatgagtgtaatattttgcttcatggtttggatccagtgaaagttatgcttaatcggcttgagaatgaagttagaggtgagatcaatgcttgctcgatctagtcgttttcgtgtcgattcagatctgattttgtttattgactttgttttttcaaatgtggttttagataaggatcgagaattaagtgaagctaatgctgagatcaaagcgttgaggttatctgagagacaaagagagaaagcttgtgaagaggtgtgattttttttttccttttttggaagattttgtttgttttttgtggcttatggattaggttatggcaatgttgttagagaagattgatagcttatgtgtagtttcaagttccttattgtgcttcttgttagctgatttttatcttatgtgctttggaattttaatagcttactgatgagctagctaagttggatgggaagctcaagttaactgaatcgcttctccaaagcaaagtatgtatcaaaatctccctccttacgatcatgatttggctggatatctgattatgaactatgttgcagaatctagaaatcaagaagatcaatgaggagaagaaggcttccatggctgctcagtttgctgctgaagctaccttaagaagggtccatgctgctcaaaaggatgatgatatgcctccgattgaagccattctagctccattggaagctgagcttaagctagctcgctctgaggtatgttttactcatttgaagtccaaatttctacttgcaaatcggatattaatttatgatgtttctgtgaagattgggaagcttcaagaagataacagagctttggatcgtctcactaaatcaaaagaagcggctttacttgatgctgagaggactgttgaaactgctctggcgaaagctgctttagttgatgatcttcagaataagaaccaagagttgatgaaacaaatagaaatctgtcaggtgctgtactcattatcatcttctttgtatctagttagtcaggctttggatgccttctacttatcactcattgtttgttaataatttctattatctgtttgattctttaggaagaaaacaaaattctagaccgaatgcacaggcaaaaggttgcggaggtggaaaagcttactcagactgtacgggaactggaagaggccgttcttgctggtggtgctgctgcaaatgccgtgagggattaccagcggaagtttcaagagatgaacgtaagttaatacatttccgaaaaaagaagtatagaatctttactcaactgatgaaggaatatttcttgctctacttttgcaggaagaacgaaaaactcttgaccgggaacttgcgcgtgcaaaggttacagcaaacagagttgcgacagtggttgcaaatgaatggaaagatggtaatgataaagtgatgcctgtgaagcaatggcttgaagaaagaaggtttctacaggtttactttgatatgattgcccttttcctaaatttgtggaatccagattctttgaagtgacaaaggcacacaaccttacattctcactctttaactctcttcttgcagggagaaatgcagcaactccgcgataagcttgccatatcagatcgagctgcgaaatctgaagcacagctaaaagtattcatcgtatttatgcattagtcattgtcgaatttatgttcttgtttaactgaactaattagtaaactatttccttatacaatttctaggacaagtttcaactacgacttagagtgcttgaagagacactgagaggcacatcaagcatcagcataaggaacacacctgagggaagaagcatgagtaatggaccgtctcgcaggcagtcaatcggtggatcagataatttacaaaagtttgcgtcaaatggctttttgtcaaagaaaactccgatgagaaattcctttacttctaattccacctcggtattgaagaatgctaaaggaacatccaagtcattcgatggaggcacaagatcattggatagaggcaaagcactcttaaaaggacctgggaattattcgttcaacaaggcttgtgatgaaaccaaagaatcagagtcacctaatacctggaaagaagattcagaagagaagccaccaagtgaactccctgcaccagcaaccgaagacaatgtcccaggggttttgtatgatttactacagaaggaagtagtcgccttgagaaaatcttcgtatgaaaaggatcaaagcctcaaagacaaggatgatgccatagaggtaaaatctctctgaatgtaccatataaaatgttgttaaaaagacgtgtttgtaatggaagtcttgatatttttcttgtagatgttagcaaaaaaggttgaaactttaacaaaggcaatggaagttgaagcaaagaagatgagaagggaagtggctgcaatggagaaagaggttgctgcaatgcgtgtggataaagatcaggataatagagctaaaaggtcttcaaacaccaaaccctcatccaacaccgcccagattcttgctgcaaggtatctaacaatgttgaatatctttgtctatttttatgatcaaattgcgattttagcaatcagactaagcttggtgttcgatattctgcagagctgctggccgaagtgggttaacaaggagtacacaa

SEQ ID NO: 139408 - DNA, 1646 bp, Arabidopsis thaliana landsberg
ttaaaaaaaatggagaacgaaagctcagagagtagaaacagagctcgtcttgccattatggagcttgctaacatgattagcgttcccatgtctctcaatgccgccgtgcgactaggcattgccgacgccatttggaacggcggagccaattctcctctctctgccgccgagatcctccctcgcctccacctaccatctcacactaccattggtggcgaccccgagaatcttcagcgtatacttcggatgctcaccagctacggtgtcttctccgaacaccttgttggatccattgagaggaaatactctcttacggacgtcggaaaaactcttgtaaccgactccggcggcctctcttacgctgcctacgtcctccaacatcaccaggtttatgactcattttcattttccaaattggagtgatatattaaaggactaatgatggtataataaactaatgtctaaaacttgttgtgaaaatgatatatattacaggaggcgttgatgcgagcatggccactagttcacacggcagtggtggagccggagacagagccgtacgtgaaagcaaacggcgaggcggcatacgctcagtatgggaaaagtgaggagatgaatggtctaatgcaaaaggcaatgtctggcgtatctgtaccgttcatgaaagctatattagacggctacgatgggtttaaatcagtggatattttggttgacgtaggaggtagtgcaggggattgtctgcgtatgatccttcaacaatttcctaacgtccgtgaagggattaatttcgatttacctgaagttgttgccaaagcccccaatattcctggtgagattttgtatttatgatatattgtacgtacgttattttctgaaagtaaaaagctatttttagtaatgtacggagtaataatggatgatatattgtatggtttaggagtgactcacgtgggtggggatatgttccaatcagttcctagcgctgacgctatcttcatgaaggtttgttgtaacattattgtctgtcacgagaatacacctactaacatttttgctaataggacgaattctagtttctgtatatagttttaatgtttagtgatataggtataaatttataagtcccttcggacaatatgtttggtagtatatagtcttagttatcgttagatcatgcgactggtcactttcatttatttatgatcatttaaatattgattatagatttctcaaaccaaaaacttgtgatctgttagaccatggatagggatctcatgtttgttgaaagaacaacacaaacaaatacacacattttttgcttctctggtcccaaattaatatcttgtaatattgttgtttgagtgtaaagtgggtgttaacgacatggacggatgaagaatgcaagcagataatgaagaattgctacaacgcgttaccagttggaggaaagctgattgcgtgtgagccggtcttgcctaaggaaaccgatgaaagtcaccggactcgtgccttgttagaaggtgacatctttgtcatgaccatctatagaaccaaaggtaagcactccaaccgaccaagagtttatagagcttggtctctacgcgggataccctacttttcgacctttctacattgattacttc

SEQ ID NO: 139409 - DNA, 2836 bp, Arabidopsis thaliana landsberg
cttttatctttttttcttttccacggttgcttaattccaatgccatcgtgatcgattcatctctctctctctctcttccaattttcccaattcttttttaaaaccctaatttttcagatatctgattatctcttgtatttcttctactcgatttgctcccataaaaacccttactttcttcaagttctggttttcaccgattgatgggtcgtggctcagtgacgtcgcttgctcctgggttccgttttcacccgacggatgaggaacttgttcgctactaccttaagcgtaaggtctgcaacaaaccctttaagttcgatgctatttccgtcaccgacatatacaagtctgagccttgggatctaccaggttacaacttttttctctcaatctctcttttttgttgtctagttagatcgaattatggagcttgattatgaatgatctagaattctgattgattcgattgattttgtgtgtgtatagataagtcgaagctgaaaagtagagacttggaatggtacttctttagtatgctggataagaagtacagtaatggttccaagacgaatcgtgctacggagaaagggtattggaagacgactgggaaagatcgggagattcgtaatggttcaagagtcgttgggatgaagaagacacttgtttatcacaagggtcgagctcctcgtggtgaaaggaccaattgggttatgcacgagtatcggctttctgatgaggacttgaagaaagctggtgtgccacaagtaagttttgagcaattgggtttgttttgttttccatttttgatctgaaagttgttttcttttgtgtctatggagagttattgactttgttgagtctttttggtggttggtggagaaggaagcatatgtgttatgtaggatattccagaaaagtggtacgggtcctaagaatggggagcagtatggtgctccttatcttgaggaggagtgggaagaagatggaatgacttatgtacctgctcaagatgctttcagtgaaggattggctttgaatgatgatgtttatgtcgatattgatgacattgacgaggtagcctacctttttcttcaaccgttccagaaattatttctctttgtgattagtgtgtagtgtaaaagtgattagttatatggttagaaagatggcgtggaatatcgcaaatgcgaaagagtgataaatgcagtgttttcgtgttagcaagccttgggtgccttttgcttatgtgctggaatagtatacctgtttaggtttaagatgagtgatggatgttagttagctttaggtcttggcatattgatgatgatatagatctttacatcttctgatggtttggattcattcatgacatgtcttttatgttagcgtctgaatatgatttccttttgcagaagcccgaaaatctggtggtctatgatgccgttcctattctacctaactattgtcatggggaatcaagtaacaatgttgaatcacgcaattactcagactctggaaattacattcaaccaggaaacaatgttgtcgactctggtgggtactttgaacaaccaattgaaacttttgaggaagatcggaagcctattatacgggagggtagcattcagccttgttctctgtttccagaggaacaaattggctgtggtgtgcaagacgaaaatgtggtgaatctggaatcttccaacaataatgtgtttgtagctgatacatgctacagtgacattcctattgatcataactatttacccgatgagccattcatggatcctaataacaatcttccactcaacgatggtctgtacctggaaacgaatgatctcagctgtgctcaacaagatgattttaacttcgaagattatctcagcttctttgatgatgagggtttgacttttgacgattctctattaatgggacctgaagattttcttcccgaccaagaagcccttgaccagaaagtaagacccgttcttccaacgtgcttagtttatatatatgtgaaaaacttctgtttaactcacctttacatcaacagcctgcccctaaagaattggagaaggaggtcgcaggaggcaaagaggcagtggaggaaaaggaaagtggcgaaggatcttcttcaaaacaagatacagatttcaaggactttgattcaggtaacactcagatgttcatggaattccttttaaaacaagtcatatgatgactgattctgactcttttgaatctaaatcatgtagctccgaagtacccatttctcaaaaagacgagccacatgcttggagccattcctactccatcttcatttgcttcacagttccaaacaaaggacgcaatgcgtctacacgcagcacaatcttctggttcagttcacgtgactgcaggtatgatgagaatatcaaacatgactctagcagcggacagcggtatgggctggtcatatgacaagaacggtaacctcaacgtagtcctttcattcggggtagtccaacaagatgatgcgatgactgcctccggaagcaagacaggaattacggcgacaagagctatgttagtcttcatgtgtttatgggttctcctactctctgttagcttcaaaatagtaaccatggtgtctgctcggtaataggatcaaagttgaatcgtctcaaagactttttttggtgtttgtacctctccaatcatatagcctttaactttggcagtgctttgctgctcaatatttaaatttttattcgaagggtttggtgtagcttgaattctctatatggtttctagtttgagtttctagaaataagaacataaacaactttcttatgac

SEQ ID NO: 139410 - DNA, 2252 bp, Arabidopsis thaliana landsberg
acggtggaaactttgctctgcataaggtatatgcattcttagtacacaaccatcactgctttctcaggtaaagcattactgaacatgctttgcttctccatttctcagttccctttagtctctagaagtggaagaatccggagaatagctgcagaacatagagattcagatatctccaaagtggagcttcttaatctcccaggaggagcagagacattcgaactagcagcaaaattctgctatgggattaacttcgagatcacttcttcgaacgttgcacagctcttttgtgtctctgattacctcgagatgacggaagagtactccaaagataacttggcttcaagaacagaggagtatcttgagagcatcgtatgcaagaatcttgagatgtgtgttcaagtcttgaaacaatccgagattcttctccctcttgcagatgaactgaatatcataggtagatgtatcgatgccattgcctcgaaggcttgcgctgagcagatcgcttcaagcttttcgaggttggagtatagtagctcagggaggcttcatatgagcagacaagtgaaaagcagtggtgatggaggagattggtggatcgaagatctttcggttctgaggattgatttgtatcagagagttatgaatgcaatgaagtgtcgtggtgtacgtccagaaagtataggagcttctttggttagttacgctgagagagagctaacaaagagatctgaacatgaacaaaccattgttgagacaattgttacgcttttgccagtcgaaaacctcgtggttccgatcagtttcctattcgggttactgagaagagcagtgattcttgatacttcagtttcctgcaggcttgatcttgagaggaggttaggttctcagctcgatatggcgactcttgacgatctcttgatcccgtcttttcgtcatgcaggagacactttgttcgacattgacacggttcacagaatcttagtgaatttctcacagcaaggaggagatgatagtgaggatgaagagtctgtgtttgaatgcgatagtccacattcgccttcacaaaccgccatgtttaaagttgcaaagcttgtagacagttatcttgctgagatagctcccgatgctaaccttgacctttctaagttcttgcttatcgcagaagccttaccgcctcatgctcgcacccttcacgatggtttataccgcgccattgatctctatcttaaggtatgttgctacaagaaaattttacttactcttgttgtgacttgatacttattaggttttatgctcttaggcacatcaagggttatcagattcagacaagaagaaactatcaaaacttattgacttccagaaactctcacaagaagctggagcacacgctgcacaaaacgagcggcttcctctgcaatccatagttcaagttctctactttgagcaactcaagcttcgaagctccttgtgctcttcttactcagacgaagagccaaagccaaagcagcaacaacagcagtcatggagaatcaatagcggagctctcagtgcaacaatgtcccccaaagacaactatgcgtctctgaggagagaaaaccgagaactgaagctcgagttagctaggttgagaatgagactcaacgacctagagaaagaacatatatgtatgaagagagatatgcagaggtctcattcgcgcaaattcatgagcagtttctcaaagaaaatggggaaacttagcttctttgggcatagctcttcaagaggatcaagctctccatcaaagcagtctttcagaacagattcaaaggtactgatggagagaacttgcgcaagcacagattagctcagtgttatcattttctcttacctgttgctgctttttaagtgagacttgagactggtgtgtgagtgatattgtaaatggatttgattgatataagacaacaaaggtagatggcttaaaaatcaaaggtctatcagttgattggaatagagaatataatgatgtcttacaagacaaacagaggtagagacagagtttaaccacgtcgtacacaagcaattcacttaggccacaattcaatctttcaagaagaaggagccttggtcttagtgtagtaccgaatgccgaaagccaagcctaagattagaagtggaacaaggaactgaaggagcttaataacaaaatccgagctcttatcctgagtagccacggctttcgtcgacgtaggaggcacaaacttagc

SEQ ID NO: 139411 - DNA, 2048 bp, Arabidopsis thaliana landsberg
  unsure (1)..(2048): unsure at all n locations
gttagtacattgaagaannnnnnnnnnnnnnnnnnnnnnnnnnnnnnnattgatgtgggggaattaaatccttctaattgtccatatatttatagcccgtgggagtaattgggctgggctcttagttgctgatgtaaacgggtaagaaaaacccgacccgacaccgagcaaccagctcctcaaaggaaaagcaaaaacactgaaacaaacaaaatcaagttctacttttttttgtttgcatagaatcgagatcatctatggcggtgattagtccagctacacgtttcgcaccgccgctgaaccggccttttcaccgccgatcaatacttgcctcgtttcattcttcctctaggaacttcctcttcctcggaaaacccactccgagctcgacgatcgtttccgtccggtgccagaaacctgtttccgacggggttagctctatggaatccatgaatcacgttgcatcttcagtttcgtcttcgatcgatttcctaacgttgtgtcatcgtctcaaggtatgtgttgaaccatatagactactaccgattccgaaatcaaaacaatggattgagttaacaacacttgagagtggctctcaatttttgaattggagatctgcatagttatattcattggtcaacattgtcaagtagtgaacttttccttcttgtgtagacaacaaagagaaaagggtggattaatcaggggataaatggacctgaatcaattgctgatcatatgtaccgtatggctctaatggcacttatagctggtgatcttactggagttgacagagaaaggttcggttttgcctcaaaatgtttttcctttatttagatgatagagaaaggctactgtatattgattgtacaatgcattttggaaggcctggtgtatacatatgatttgtttaggtttttgataaacgagcttgtagagctccgtgagggctgatgtatgtacgtttctcttcctaaagtgattggttctatcagaatgcgggtatctaaggagaaaccgatagatcgttgatgggctagttagttattgtgcactttatcttctagagaagtggcnnnnnnnnnnnnnnnnnnngtagtgaaaatgttcctggagttgaatgaaatatatgagcagctagtcagaattacaaaacatgtgctcttaaagatttaggtatgatttgaatcagacacgttcagaaagttgaatgaaggataagatagggagaccatccgtgaacaattgatttttaagtgtgaattccaaattttctggctattgcttactggatttttctgtcttccttctttcttggcatcttaaacaggtgtataaaaatggcacttgtgcatgatatcgctgaaggtaaataaacatttgatcctacttttcaattgtgaggttcgctatatttcctatattcactagttagttaagtttcattcaaaaaatactgggtggtttggaggatacaaacttgtatagatttataccctgagtagggtagtatatgtaatagatacacttggattcgtatatgaaaatttaatttgctgtggagatggaactaaacatgtgttgagagctgattactttggtttctttctctcaattcatatatactcttcttctgcaacttaacgcgtagaaattttcaaagcctcaccactttactggcttccgaatagctattgttggagatattaccccatctgatggtgtgcctaaggaagaaaagagtaggagggagacagcagctttaaaagaaatgtgtgaggttcttggtggaggcctcagaggtatatacgcctttgccactgtcatcttctattgttttggtttccaaaacacttatttataagcctaatgtcaacgtgcagcggaggagatcacagaactttggctggagtatgagaacaatgcttctttagaagcaaattttgtaaacgactctgataaggtggctaatgggtttcgagtttgcaacaatccatggcgttaattccttgtttctgttaagagtcaaaactactcacacaagggtt

SEQ ID NO: 139412 - DNA, 1695 bp, Arabidopsis thaliana landsberg
  unsure (1)..(1695): unsure at all n locations
atggaccaacaaagcgagagagtgaagcaattctgcaatcatccgttaagatacgcaagaattaagcaggagggagtaattacaggttggtcaaataactgcgatggatgcggtgatgattcangctaccgatattactgtgaacgctgcaatattcaagctcatgtggcttgcataggttggccagacatcatcaaccatccgtgtcactccaaacatcctctcaagaaagtcttggccgagacaattgactatacagatggtaactgtcatttttgtcgaagcccacttgatgaggtgatgtatcattgttccatatgtaatatcagcatagatttaagctgttggatatatcccccaccacttactatttatcaaccaaagagccacaaccatacattcaccctcatggcgagaaaggactctttcacttgtaacgcgtgtgggttggttggtgaccgtaatccttacgtttgtcttgaatgtgatttcatgctacacaaagattgtatcgatttgcccagagtcataaacataaatcgtcatgaccaccgcgtctctcgcacttaccatctcggtcagggtgattgggaatgcggagtttgtcgcaaacagatagattggacctttggaggttactcttgcaagcgttgtcctagttatgctgttcattcaaaatgtgcaacaaggggtgatgtgtgggagggagaagaactagaagatgagcctgaagaggaagaaattgaagatccatacaaggtaattaatgaaaaagaaatccttcatttcagtcatgaacataatttaagacttggtgatgataatgctgctgataattaaaagatgctgtgcgacgcttgcatcactcccatcagttctgatccattcttcaaatgtgtgcaatgcgagttcttccttcataaagtatgtgctagtcttccacggaggaaacgaaatatcatgcacaccgagaagcttgatctacaagttacgaaggctggcgagtataataagtgtatatcttgtagaaaaatatttgatggcttccggtactgttcaaggtttgaaaagtttgatgtgcggtgcggctccatttccgagccttttcaccatgaactgcatccccatcccttataccacattttgtcagcagccgaaaaacttaagctttgtggagcctgtggtaaatatttacactatgtcttaagttgtactgtttgtgagtttaatttaggcatggattgtgccactttaccaagaaaagtgagacacagatgcgacgctcatgatttatcgctgcatcatggagctgaaaactccagcggtcaattgtggtgtgatatttgtgagggaaaaacagatccgagtgtatggttttatggatgtgatgattgtgggaatacactccatatcaactgtgtacttggagacatgtattacttcaagccaggcaatagatacggcaaagctgaagtagttgccaatgttggtatgactagacctttttgtgtagtttgtggaaagcgttgcattttctcttcctttcttaaggctactactgctttagatttaagtgctttagatccagctgcttcagattcaactgttctatgctcttgttcaattgaatgtgcctacgaacgcggcccttaccgagatgccgagccgaagtggtattatgaaagtcaacgttga

SEQ ID NO: 139413 - DNA, 742 bp, Arabidopsis thaliana landsberg
atataacaataacaggtacaaatattaaattgaggtacccattttatgacaactttcaataacttaccctctatttttgtgcctttagtaggcctagtctttccggcaattgcaatggcttctttatttcttcatattcaaaaaaataagattttttagatcggctgagaccgaatcatatcaccttttttttttattttaaaaacttcgattcgataagacccatttggtagaatgttgtataacacatagattcctacaaacataaataaaaaaaactcttatgcatgtgtaaacgtaaaaaaatttgcgctcttttgaaaaatggatcatcgtcgggccgatgtctgaaattccagtcaatctatttatttgtatgtatataactataggggatcatataaaggaaggagatgttatttttttagatataaacaattctatgaattactcctaaggtaaaggttcacaacaaaatagtttatattataagagttactttgaaaacaaaaaaaaggaaagtcatattttctcaattccaaaaaattgtataactggatctaatatatatgagttggcgatcagaatctatatgaatagaaattataacctgggactcgaaaaacataaaaccttatgctgtgcctatatcctattattacgttcattaggattcttattgcttggaacttacactcctctcgtcacaaatgttatactggtcattccctcccaccaaatc

SEQ ID NO: 139414 - DNA, 1476 bp, Arabidopsis thaliana landsberg
tcgagattgcgtattttgagcgatgcgggaagtggaaacaacggcaatcacagcagctccttcacaattttctcaaatgtttcagaaattagccatggccgtcaagaccaagacctacgagttcttcaccgaagacgataatgagagaaccgatgctgagggtttctctcttctcgattcctccgaggattttatcaccgatcagaaagtcgtcgttcttaaacccgataagcctcttcttagtgcttcttctccgggatctcctattgaatctccggtgaacgatgttcagacgaagaatttgggtgtggtaagtgttgttaaacctaatcaaaagaagctttctcaggttaggaaattggatacacagatgggattgagtttgatttcttctgttttcgctactgcttcgtcttttgaagcttcgtatcttcaattgcaagctgctcacgcgccgtttgttgaggaaaatgtcaaggctgctgatagagctctcgtatctaacctccagaaattgtctgatttgaagcagttttataggaattatcgccaaagtttggattttgagtctgatttagctattgggtcttgcttagaatctcgtgttcaggagaatcagagcaagcttagagctttggaaaccgtctcaaatcgtttacaagctgagatggatgcaaaggatttgcaggtttggagtctgaggaacaaattaggtgagattcagaaatctacttccaagttgtctaagagattgtcttcaaattcatcgttggatgttctgttatcggttagggtttttgagtctctgttgtatgatgcctttaaagctactcagaaattcactaagattctgattgagttgatggaaaaagctgggtgggatttggatttagtggctaagtctgttcatcctgaggtagattatgctaaggagagacatatccggtatgcattgttgtcgtatgtttgcttggggatgtttcgtggttttgatggagaaggatttgatctaaatgagaatgattatgaagagtctgagagaagttctgtagattcttccttgagggaattgatgcaacatgtatcgagtaatccgatggagcttcttgatagagataaagattgtgcattctctagattttgcgataagaagtatcacgagctgattcatccgaacatggcatcttcgatattcagtaacatggatgaaaacgaagctgtgttgagttcttggagatctttgagcacattctatgaatcgtttgtcacgatggctagctcgatttggacccttcacaagttagccttgtcctttgatcctgcagttgagattttccaagttgaaagcggagtggaattttcgattgtttgcatggaggatgtctcagacagttcactatctgtggaggcctagatgagtccgggttgttccgctgtagaattggctgtgggttcagggtgtatagtcgggtcgtt

SEQ ID NO: 139415 - DNA, 1127 bp, Arabidopsis thaliana landsberg
acgatcggattttttttttttgttggtgatgatgcagaaatggtttaggctatgaagaaagttgctcagcttgatggggagctaactgtggaagagaggaatcttgtatctgtagggtacaagaatgtgattggtgcaaggagagcatcatggagaatactatcttccattgagcagaaggaagagtccaagggaaatgatgaaaatgtcaagaggcttaagaattatcgtaagagagttgaagatgagcttgctaaagtttgtaatgacatcttgtctgtcattgataagcatctcattccatcgtctaacgctgtggagtcaactgtctttttctacaaaatgtgagtgtcatctttattatactctgaccattcatgtgatatttgtgtgactaagaatgagatcatttccgtttgactaaagttaaatgtttaagctattacatagctaccactcttgcttgtgttcttcctgaaatgatgatgattcatgaacttttccttgtttcactgttttgacttttcgtgtttttttttctttctatgtaggaaaggagattactatcgctatcttgcggagttcagttctggtgctgaacgcaaggaagctgcagatcagtctcttgaagcatataaggtcctttgatcatgtttatttgttttcttatttttgtgccacccctcttatatttgagctgggaataacctaagacaagtcttgcttttttcgtactgggaatgtaggctgctgttgctgctgcagagaatggtttggcacccacacatccagttagacttggcttggcgttgaacttttcagttttctactatgagatcttgaactctcccgaaaggtttgtttttgtattttggattgaacataatagtggaatctgtggtcattttctgacactatgaaactatgtattgtacagcgcatgccaattggctaagcaagcattcgatgatgcaattgctgaacttgacagcctcaacgaggaatcatacaaagacagcactcttattatgcagctacttagagacaatctcaccttgtggacttcagaccttaatgaggaaggaggtattcttattttcttttgtttccctatctcatgatcaaat

SEQ ID NO: 139416 - DNA, 1602 bp, Arabidopsis thaliana landsberg
tatttcatcgttctacttctatctcgttccaacgtcttcgcaaaagaaaattccgaaattgtttcgaaaaatcctgaagaagaagaggtaagctattttccttctcacttatccttcttctactgaaaatttataacataatataaaccacaaatacatttttgtgtaatccttgtagctcattgctaatctctgattctccagaaattttgctgagtcctctgttcgattacacttcaattattttttatctgcgctgtatctctgttaatgggtttctttaagttttgattctcagttgttatatgatttcgaatttcattatatcctgaaaagcttttatctttatgtatattccaagtattgaatctcaaagtttctagtcatttcaatttcaataggtctttgaatcaacaacagttccatgttgtgcccaacgtatacaccaagtgtttaccattttcaaacgcaaaagccagttttccggaaacagaggtttcgggtttgttcatctacttctggtggtgagaatgatagattcaaagtagagtacactccttggcttatcgttgggttgggcaatccaggaaacaagtatcatggaacaagacacaatgtaatgatacacaatctttttcttttacttatttgctggatttgatcttggcaatgctacaactttgtgttgttttcaggttggtttcgagatgatcgatgtgttggctagaaaagaaggggtgttgatgaacactatacagtccaaagctctaatcggaataggttctacttctcttgctttggttctttggtttgaagaataataaaactgatgactttttggttctatgtatgaatcagtacaggtgctattgaagatgtacctatcttgttggctaaacctcagacttatatgaacttcagcggcgaatcggtttgtattttctgttcataactttgcaaagatcagctgcgtgatcaaataatcatcatacctgaaactgttctgttgtcgttttaaaggttggatctctagcttcacactatcgagtaccattgcgccacattttaatggtaaagtcactgacttaagcatcccttgaaaccagaactatgttccatatgaacacttttgtttctctctactagatttacgatgagatggctttaccaaatggggttttgagacttcaaccgaaaggaggtcaaggctatcacaacgggtatgaatatacctcttgaacatctaaatgtgttctatgatatattaactgatgtcaccttttatatctgttacagagtgaagagtgtaatggggcatttggatggtcgtcgaaactttcctcgtttaagcataggtacggttttggtttgattcaggtttcaaagcgagactattctttgtttctctctcaatctcttatgttttttgtcgatttttgtcaggcattggtaaaccacctggaaacatggatatgaaagcttttcttcttcagaagtttagtccattggaacagaaacagatcgaggaagcactcgagcaaggaagtgaagcagtgaagactcttgtgcttaatggcttcaatcaaggaaattcgagattta

SEQ ID NO: 139417 - DNA, 2892 bp, Arabidopsis thaliana landsberg
attatgcacatatgtgtttgtgactcaagaaaatttcttggcatgttaaacatctttgctttgagaaagtaagagcaaaaggaatggttattgaagtgaaagtattgaaattttcaggttcagttggagcctacagctacatgggctctgaaagattctcagctgaaaccgaagtacaatggtttgtttcgaacaacgaaggatatctttagagaggaaggtttatcggtaagtcgttgcctagataatgttcttttgaaggtgttaactgttgtattttgttatgctgagtcatttaccaatgttgtcatcgatgcaaagtgttcacaccaattcttttcttggcaaatgatttttcatcatctctaatggtaagcttagttttgttgagttggaatgtgaagtgttataaatatcttgatgacgatgcagcctcgttgatttagacttgtctgatgtttgagaatctccacggttatgatacatgatattcaactgcagattttgagcactcatagatagcctttttctctctacaattttgtggacactgataactcaatgaatgaccttattctagactgctttaggaattgatttcttatggctaatagacactttctgaattttaaatcaagttgcttatggcagggtttctggcgtggaaatgttccagctttacttatggttgtgccttatacatccatacaatttgcagtcttacataaggtgaagtcttttgccgctggttcatcaaaggccggtacatcactaactttgaataaatctgttagtgacatgtattatatatccaaggtgtgatctgtacactttaaaacgcttaggttcatgtaaatttaactcctttaaatgagctgtttatggcgacatgacttggctttatataattcatctacatatcaaaccccttgaaaattacacaaaccacaaaagagagaacattccacaatgtttcagaaagttaaaagatagattttagcatgttgtttttgacaggaattctgaattctgatcttctgcagaaaatcatgctcaactgagcccttatctttcttacatcagtggggcactagcagggtgtgcagcaacagttggatcgtatccgtttgacctattgcggactgtattggcgtcccagggtgagccaaaggtacaatatttcttcagtaaaagaatgtgatgacatagttatgggttctctgtaacgtttactcctgtaaaatcaacaatatagtttgagaaagaaaggaaaaggataaagttttgagaatgcgttgacataaataaagtcattttttgagaaagcgtgaaacccatctatggagttctctgatattcatagaaatttttattatttcactgatgtcttagttaaccatgaatttattatcagctattgacgagtgatatatcgaaattcttgggttaggtgtatccaaatatgaggtcagcatttctgagtatagtgcaaactcgtggaatcaaagggttgtatgcaggattgtcccctactctgatcgagatcattccttatgctggtctgcagtttggcacctatgacacatttaaacgctggagtatggtaaagctatagcttcatgaatgttctcaatttttttttcctttggaatatataacatagatacacaccattgcctttaccacaactttgtgttctaagcagcagattatcttgaagcggtatctggagttctcatctcactgttggtatacattttgcgctaggtatataataagcgataccgatcttcttcatcaagctcaacgaatccaagtgatagtctttctagctttcagcttttcctttgcggtttagcttcgggcactgtttctaaactagtctgtcatccgcttgatgttgtcaagaaaagattccaggttagttttttgccatcttgtgttttagctatgtgttcttaatgttttaccaccgaagtccacgttaccagaagcctaaagtgattttacaaagcattttagatcaaacatcaaggtttgatacaagaatgtttgtcgctgcaggtcgaaggtctgcaacgtcacccaaaatatggagcccgagtagagctgaatgcttacaagaacatgtttgtcggtttagggcagatattaagatctgaaggttggcacgggctttataaaggcattgttccatcatccattaaagctgcacctgctggtgctgtaacatttgtggcctatgaacttgcatccgattggtttgaggcaaatttgacctgaacttgtaaaattcttcaattctatttgtaaatcttattctattttgcttttgagtaataagtaatataagattccatccttctctgaacagagaccaataatgcaaactctttcttactaggaacggtagattttcactaaatctattcattcatatcagcaaagtgtgttactgctgcagttttcaaaaagaatcatggcttggttgaaaaaagctttgtattcttagctacacagttttacattattgctcagcgaaaaataaaatttaaagtcaatgtcatctttggttctgtgttactcatcgaggcacaaaactttctaaaaactggcaaggacaaaagaaaccaaccagttctgattacttctgaatatgaacgaacagagcctttacttttttattcatattgtttcttctgcttatcagtaatctcttgaggtaaagacaggaactgagtgatcttctgaacctgagagacatcaatccggtatttttcagctatctcgttaacacccattggaccatggtgatcctgagattttccctgaaagagaagcatgatgtgtcgcacttgtgctacgttcaacgttccttgaggcaccgggttt

SEQ ID NO: 139418 - DNA, 1777 bp, Arabidopsis thaliana landsberg
cgccggtctgttctttcttcagccaagaatgctcgtttcttctccggtacgtaaattttctctctgatcctcttttttcctgaaaatgtgataaacgtcatgggatgatacatctagatagacgtcaaatattttatgaatctacctgtggttttcttcgttttctagattctcgattgtattgaatcagtgatctgttgtatcgtttccaatctaaaatatttgatcgaagcttttacttgatcctacgtgtgttcccatcaagaaaataaattgtttgtttcttgtgagagaatacttcttgctaacacattttatgtgaaactattggatacacaaatttagactctcatattccggtttttgtctcatcgttgctttgcctacataagacttcttattgattttcccattaatataaagaggatgtttaagatctgttggttttattattcacatatgaacagaagtcacaaaccgtgtttcgtttacattttgctgatacgttgattattatatgttttcagaaggccgagccattggtgcagcaagtgtggtgcatgcgactggaaaagtccctcagtatgcatccaactttggaaaatcgggttctggcttcgtctctaatagctggatcaccggactccttgctcttcctgctgcaggttttacatgcataatgtttcctataaatctgtgatttactgttttatgaatatattctacaggacacattcaaatcttcacttttgtaacacagttagtgtaaattaagcctttcaacgttttgactccaaaatgatgtctaatatcagttatacgtacaagacttatagctgatgagcttttttgtttatctatattcatgttttactttgatgtgatgattaacagagcccttattatattcgccttgctttcttttttatcatttctgttatagccttcatgctccaagatcaggaagcacttgctgcagaggtaactgattcaccaaaccaaacacacatatctctatatctttctcttgtgttatccctggtttctctgtttaattggatttctctgttcgaatcagatggaacgcactttcatcgctatcaaacctgatggagtgcagcgaggactggtttgttacttgttattctcttgtaatttcatgtcttctttattcaaatgctcaaaactcttaaatctttaaactccctccagatatcagaaatcattacacggttcgaacgcaaaggatacaagcttgttggcattaaagtcatggttccttcaaagggtttcgcgcagaagcattaccatgatctaaaggagagacctttcttcaacggcttgtgtaacttccttagctcaggccctgttgttgccatggtaaagaagcaactctcacataaaaccgacttgttttagctctaatgatccaataagacattgtttttaggtatgggaaggtgaaggagtgattagatacggacgtaaactgatgggagccactgatcctcagaaatgagaacctggaactatccgaggcgatctcgctgttgttgttggaaggtaccattctatttttatgacatatgtatatatgattgcttgtctgttttctcggagattatagttttgcttttgttttttgggaaattgcaggaacattatacatggaagcgatggaccagagacagctaaagacgagatcagcttgtggtttaagcctgaagaactcgtttcttacactagtaacgctgagaagtggatctacggccagaac

SEQ ID NO: 139419 - DNA, 2165 bp, Arabidopsis thaliana landsberg
taattatgtcattatgtatgagttttttggttaattttaaggttttttatataataaatttttgatgttgtaatgacatctcagaagcaagaaagagatcatggccacaaatttaatcatgactttgagaacttcaaaacttgttagagaaaaactgttctgtctctaaaaactatggtattagttgtaacagtttgtcaaagcatatatataaaagaaagatcatcagggtttggattctgttttagagtatgattagcaccaaacatcatgtcgcttttttgcattccctttgtacacatcatgccgtttagtatttaccgttaagaagcgcctaaagcaagttccatgaacatacaaagatacaagcaaacactaaacttgagataaacacaatggaacaggagatgatagtgagcatggcagttgcaggagccatcgttggagccgccataggaggttgggcgaacgacaaattcgggaggagaagcgcgattctcatggcggatttcctctttttattaggagctatcattatggcggctgctcctaacccgtccctccttgtcgttggccgtgtttttgtgggcctcggggtcgggatggcctcgatgaccgctcctctatacatctcagaagcttctcctgctaagatcagaggagctttggtcagtactaatgggtttctcattaccggaggacagttcttgtcttacctcataaacttagcctttactgatgtaagtgatactagcctaaagacagtgaaagatcaaactttggctagttttgaagtttttaatgttctgttttctctgttttttaggtgaccggaacgtggagatggatgctcggaatcgccggaattccagctcttttacagtttgtcttaatgtttacactcccggagtcacctcgatggttataccgcaaggtacattttgatatttttctcttctccaagattttgtcacagactatgatgaactaaaacgtgtgtaaacagggaagagaagaagaggctaaagcgattctaagaagaatatactcagcagaagatgtagaacaagagatacgtgcacttaaagactcagttgaaacagagatacttgaagaagggtcttccgagaaaatcaacatgatcaaactatgcaaagctaaaaccgttagacgaggactaatagctggtgttggtctccaagtgtttcaacagttcgttgggatcaacacagttatgtattacagtccaaccattgttcagcttgccggtttcgcttcaaacagaacagctcttctcttgtctctagttaccgcaggacttaatgcatttggttctataattagcatttacttcattgatagaatcggaaggaaaaagcttttgatcattagccttttcggagtcattatctcgctaggaatactaaccggtgttttctatgaagcggctactcacgctcctgcgattagctcactcgagacacaaaggttcaataatattagttgtccggattataagtcagctatgaataccaatgcttgggattgtatgacttgtttgaaagcttcttctccatcttgtggctattgttcctctcccattggaaaggtaaaatacttttcgaaaagaccaaaaatatattttgaattcaagatccttacttatatgatgatggcaggaacatcccggggcatgttggatctctgatgattcggttaaggacttatgtcataacgaaaaccggctttggtacacgagaggatgtcctagcaattttggttggtttgctcttcttggattgggactttatatcatcttcttctctcctggaatggggactgttccatggatagttaactcagagatttatccattgagattcagaggaatatgtggaggaatagctgcaactgcaaattggatatcaaatttgattgtggctcaatcttttttgtcattgaccgaagctattgggacttcttggacttttctcatctttggagtgatctcagtcattgctcttctctttgatatggtttgtgttccggagacaaaaggaatgccaatggaggagattgagaagatgcttgaacgaagatcgatggagtttaagttttggaagaaaaaatcaaaacttgttgagaaacaaaaccagagtgcatga

SEQ ID NO: 139420 - DNA, 1594 bp, Arabidopsis thaliana landsberg
  unsure (1)..(1594): unsure at all n locations
tctgagtttcgtctcttggatgtattttcaataggtggtccaggaagtggaaaaggtacccagtgtgcttatattgttgaacattatggttacacacatctgagtgctggagatcttcttagagctgagattaaatcaggttctgaaaatgggtatgccttttaaactttctgacattgtcaatgtttgggttgctgaaagaccttcgctttcattgtccttgttgaggttctttgttattgtgttgaatgaagttgttcaatggttttgcagaactatgatccagaatatgattaaagaggggaagattgtaccttctgaggttactatcaagcttctacagaaagctattcaggaaaacgggaatgacaagttcctcattgatggtttccctcgtaatgaggaaaaccgagcagcatttgaaaaagttgtaagtatagtaaaatatcttaacaaatatttatgtgtgcgttaccattgcttaatttacatgcctttgatgatttctgtagactgagattgaaccaaagtttgtcttattcttcgattgtcctgaggaagagatggagaagcgcctgttgggccgaaaccaggttaatatgatatgaaaatctcttgtcacttaattctgtctaggctcttgtttcactccacgttacacatatattgattgttgcgtccatttctgttgttgaaggggagagaggatgacaatattgagactataaggaagcgctttaaggtgtttcttgaatctagcttaccagtgattcattactacgaagctaaggggaaagttaggaaggtaaaatctttttcttctttgattgcattaaggtccaacaattgttaagttgtaacaaagtgtttgttgtactacttatcctcagattaatgctgcaaagcccattgaagctgtcttcgaggaggtgaaggcaattttttctcctgaagctgagaaggtaaaactcaatagttgtgctattctctaagtagtcaaaaaggaaaacaaaaattcctatgaaccacctctattgtagaggcttgtaactgatgctttttacaaatctgaatcatgcatgtatgattgttctgtaagattaagaataatgcatttgcataccctttgatccaagtctatgtttttctgcaattccattttaaaattgcttggcacggtgatatcgtttatactataggccactatgatgccattattaaatcactaannnnnnnnnnnnnnnnnnnnnnnnnnnnnnnnnnnnnnnnnnnnnnnnnnnnnnnnngaagcctaggctgcagcatcgtaaaaagataccgaaaacccgataaattgatcaggtatgtatgcatcaatcaatgatgatcactttttcttatttatgtttagacctataaaagtgaaaggtaactttagaatctggaataaagtgtgtagaagctgatgcttgttgaacatttgtataaatggtatctaattctgtaagagccttcagcaccaagccatgattttgttttgtttaaaattttgcaagtagaattgggtgtgttgcatctttctcacaggaagtctcccccctggccgtggttgttt

SEQ ID NO: 139421 - DNA, 3291 bp, Arabidopsis thaliana landsberg
  unsure (1)..(3291): unsure at all n locations
ctccgtgaagtttgcgtctcacgcgccgctaggagtgttccttactcgtcgcgacttcaattccgagctcttgagctctgcgtcggtgtnnnnnnnnnnnnnnnnnnnnnnnnnnnnnctccggcgacggaagaagatccaccggtttcgaattcgctcatggcggcgatcaaacggtctcaggcgaatcagagacggcatccggagtcgtatcatcttcagcagatccacgctagtaacaacggcgggggaggatgccagacgacggttttgaaagtcgaattgaagtatttcatactctcgatccttgacgatccgattgtaaatcgggtattcggagaagctgggtttcggagctccgaaattaagctcgatgtgcttcaccctccggtaacacaactttcttcccgtttctctagaggtcgttgtccgcctctcttcctctgtaatcttcccaactcagatccgaatcgtgagttcccgtttagtgggagcagtggtttcgatgaaaattcccggaggattggagaagtattaggcaggaaagataagaagaaccctctgcttattggtaactgtgctaatgaagctcttaaaacgttcacggattcgatcaacagtgggaagttagggtttcttccgatggatattagcggattaagcttgattagtatcgagaaggagattagtgagattttagccgatggatcgaaaaacgaagaagagattcgaatgaaagtggatgacctaggaagaactgtagagcaaagtggctcgaaatcggggatagtgcttaatctgggagagctcaaggttttgaccagtgaagccaatgcggctcttgagattttggtgtcgaagctttcggatttgctgaaacatgaaagtaaacaactttcgttcatcggatgtgtatcgagtaatgagacttacacgaagcttattgatcggtttcctactatagagaaggattgggaccttcatgttcttccaatcacagcctctactaaaccttcgactcaaggggtttatcccacatcgaggtaatgcttttgctatttccattaacattataagtgttatttatgcctatcaaaacaatcagtaaacttgtgggaatagtttattgcttgcgtcaacgtcgataacataaaacttaaatattttgacatatccactttccttctcagctttatgcttcccatttttctgagagtagacattaatgttctgtcttttctcaaaactatgattcgactttgcaactgatcaagttcgtaattggatgaatctgttggttacagcttgatgggatcctttgttccctttggagggttcttctcatcaacatcaaatttcagagttccattgagtagcacagtgaatcagacgctctctagatgccacctctgcaacgagaagtatttgcaagaagtagccgctgttctcaaggccggttcgagtctttctctggctgacaaatgttccgagaagttagccccatggctacgggctattgagaccaaagaagacaagggaataacaggcagcagtaaggtgcgtttttattaacttcttcctcatttgtagtcgcttgtaatggtgttgatatagtatcttgttcttctgattcagtgcaggctttagatgacgctaatacatcagcctcgcaaaccgctgctctacagaagaaatgggacaacatatgccaaagtatccatcacactccggcgtttcttaaacttggttttcagtcggtgagtccgcagttcccagttcagactgagaagagtgtgagaactcctacaagctatttggagacgcctaaactgctgaatccgccaatctcaaagccaaaacctatggaggatcttacggcatcggtgactaaccgcacagtgagtttgcctttgagctgtgttactacagattttgggttgggagtaatctatgcatccaaaaaccaggaatcaaaaacaacgagggagaaaccgatgctggtgactctaaactcttctttagaacatacatatcagaaagatttcaagtctctcagagaaatactctctcgtaaagttgcctggcagaccgaagctgtaaatgccataagccaaattatctgcggatgcaaaaccgactccacgcgaagaaaccaagcaagcggaatttggctggctcttcttggacccgataaagtggggaagaagaaagtggcgatgactctttctgaagtcttctttggtggtaaagtcaattacatatgtgtagattttggggcagagcattgttcccttgatgacaaattcagaggcaaaacagtggtggattacgtaaccggtgagttatctaggaaaccacactctgttgttttactcgaaaacgtggaaaaagctgagttcccggatcagatgagattgtctgaagctgtgagtacggggaaaatccgtgatttgcatggaagagtgattagtatgaaaaatgtgattgttgttgtgacgtctgggattgccaaggataatgccactgaccatgttattaaacctgtgaagtttcctgaggagcaagttctcagcgcgagaagctggaaactgcagataaagctaggagatgctactaaatttggggtaaataagagaaaatatgagctagaaacagcgcaacgtgcagtgaaggtgcaacgttcatatctggatctgaatcttccagtgaatgaaacagaatttagccttgatcatgaggcagaggacagggacgcttggttcgatgaattcattgaaaaagtagatggaaaagtgacgttcaaaccggttgatttcgatgagttagccaagaacattcaagagaagattggttcacattttgagcggtgctttggatccgaaacacatctagaacttgataaagaagtgatccttcagattctggcggcttcatggtcatcattatcatcgggcgaagaagaagggagaacaatagttgatcagtggatgcaaacagttcttgctcgaagctttgctgaagcaaaacagaagtacggttcgaatcccatgttgggcgtgaagctggttgcttcttctagcggcttagcttccggagtagaattgccggcgaaggtggatgtgatatggtgacatgcatatatataaatgaggtaataataaagagttataatcctcagattgtttttctcatggaaagttttttgcttgtgtaaattacaatgtaaaatggctaagctatcacttggtagataggtttgtttaggagtaccaatttgccgcatgtttttgg

SEQ ID NO: 139422 - DNA, 1319 bp, Arabidopsis thaliana landsberg
  unsure (1)..(1319): unsure at all n locations
ttcatcgtgaagggagcgcgaaagccggtaacacaacattcgctcttgtccgagaagcatctctctctgatcctgtcaagagcaaaaccatccagagcttcaaagatctcggtgtcacaatactacacgtatgcatgaactctcactctctaacatgtttcatacaaactcaaaaccataacctagttatgtaacttggacagggagatttgaatgatcatgagagcttagttaaggccattaaacannnnnnnnnnnnnnnnnnnnnnnncgggcacaagcaaatctttgatcaaaccaagatcatttccgccattaaagaagctggtaacgtcaaggttggtatttgattcaaacctcaatacatataaatggcaatccgattagcatatgatctaactgaaaatagttatgagaaaaaatccagctgaacataacctcttactagatttatagtttttgctttgcagagattcttgccggctgagtttgggatagacgttgagaggaccagtgcggttgagccggcaaaatcattatttgcagggaaggtacagatcaggagagccattgaagctgaaggaataccatacacttacgttgttagcaattgctctgccggtttttacttgcgtacgttacttcagttcgagtctggtctcatttctcatactagagacaaggccatcatctttggcgacaacaatgttcctcctagagacaaagtcaccatattaggcgatggaaatgccaaaggttgagaattttataatgtaacagaacgtataatctatttttttttataaagattcttatgtaacaagttttttaaattgattttgcagttgtgatcaacaaagaggaagatgttgcagcttacatgatcaaggcggtggatgatctaaggactctgaacaaaaccctctacattagtcctcctaacaacattttatcgatgaacgaaatggtcaccttgtgggagaaaaagatcggcaagtctcttgagaagactcacatatcagaagagcaaatccttaaaagcatccaaggttagaaattaataacataccacaattcaccaagaagtcgttgaaattctttattaccatttttttttcatttgctgaattaaaagatatgttctttttgcgtaatctccagttcccatcgatgttttcaagtctataaaccacgcggtgtttgtgaagggagatcagaccagtttcacaatagagccttggttcggtgaagaagcctctgtgctttaccctgatgtcaagtacacgagtattgatgagtatctcagtcaattcacttga

SEQ ID NO: 139423 - DNA, 4064 bp, Arabidopsis thaliana landsberg
  unsure (1)..(4064): unsure at all n locations
ctgaggctgctctttacagagagctatggcacgcttgtgctggtccgcttgtgacggttcctagacaagacgaccgagtcttctattttcctcaaggacacatcgagcaggtgagatatttcatctatgagttcttgctatttttggctaaatctttgagttaacccctctgtgattcgtacctgttgagatattttctaatgaactttgtcggtttccattgttttatgattaggtggaggcttcgacgaaccaggcggcagaacaacagatgcctctctatgatcttccgtcaaagcttctctgtcgagttattaatgtagatttaaaggtaggtttctttaacttcttggaaaattttggtttctgtgtcttggattgtcagctaacaagagttttgtttatgattttacaggcagaggcagatacagatgaagtttatgcgcagattactcttcttcctgaggctaatgtaagttttgttttctgatttattggtttgagtgttgtagaggtgatcttattcttcaagatgctgaattctatatattttttgttccatacagcaagacgagaatgcaattgagaaagaagcgcctcttcctccacctnncgaggtccaggtgcattcgttctgcaaaaccttgactgcatccgacacaagtacacatggtggattttctgttcttaggcgacatgcggatgaatgtctcccacctctggttggtgtttcatttgcgcttctaactatctattcattggcttatttttcctgaattttgttctaagattgccttcaattcattttttgtttcttccctcaggatatgtctcgacagcctcccactcaagagttagttgcaaaggatttgcatgcaaatgagtggcgattcagacatatattccggggtataggaatctgtaacttttttattttctgtttttctcgagtctgtgtgtcatcaaacttatctggttgttgatgtttgtgataatggaccaggtcaaccacggaggcatttgctacagagtgggtggagtgtgtttgttagctccaaaaggctagttgcaggcgatgcgtttatatttctaaggtttgtggattttagttcattgttttctttagctgtatctgttagtttctataatgtggaatatcttaatcttctacaggggcgagaatggagaattaagagttggtgtaaggcgtgcgatgcgacaacaaggaaacgtgccgtcttctgttatatctagccatagcatgcatcttggagtactggccaccgcatggcatgccatttcaacagggactatgtttacagtctactacaaacccaggtttgtatttgtattagctcacaaaacagctttcagttttttgagctctttgctttgtatgtctctatatgtctgatgcttggtagtgaatcactctactaaattttcatgcggtgttgttttgtttaatacaggacgagcccatctgagtttattgttccgttcgatcagtatatggagtctgttaagaataactactctattggcatgagattcaaaatgagatttgaaggcgaagaggctcctgagcagaggtaaaacctgtcttctgcttttgaaatatgttagctctcgagcctttttctcttggaataacgaacctaacaagttgtactgatttatattaggtttactggcacaatcgttgggattgaagagtctgatcctactaggtggccaaaatcaaagtggagatccctcaaggtatgacctagtttctagagaggatcaagactattgtttgaatataatgaatgctgattgttcaattgtctttcaggtgagatgggatgagacttctagtattcctcgacctgatagagtatctccgtggaaagtagagccagctcttgctcctcctgctttgagtcctgttccaatgcctaggcctaagaggcccagatcgaatatagcaccttcatctcctgactcttcgatgcttaccagagaaggtaatgtcttccccttccactgtagtacacatagtagtgcgtctgaaacttaattgaacttgtcagtgggagtctaattcattgtacacaaaacaggtacaactaaggcaaacatggaccctttaccagcaagcggactttcaagggtcttgcaaggtcaagaatactcgaccttgaggacgaaacatactgagagtgtagagtgtgatgctcctgagaattctgttgtctggcaatcttcagcggatgatgataaggttgacgtggtttcgggttctagaagatatggatctgagaactggatgtcctcagccaggcatgaacctacttacacagatttgctctccggctttgggactaacatagatccatcccatggtcaggggatacctttttatgaccattcatcatcaccttctatgcctgcaaagagaatcttgagtgattcagaaggcaagttcgattatcttgctaaccagtggcagatgatacactctggtctctccctgaagttacatgaatctcctaaggtacctgcagcaactgatgcgtctctccaagggcgatgcaatgttaaatacagcgaatatcctgttcttaatggtctatcgactgagaatgctggtggtaactggccaatacgtccacgtgctttgaattattatgaggaagtggtcaatgctcaagcgcaagctcaggctagggagcaagtaacaaaacaacccttcacgatacaagaggagacagcaaagtcaagagaagggaactgcaggctctttggcattcctctgaccaacaacatgaatgggacagactcaaccatgtctcagagaaacaacttgaatgatgctgcggggcttacacagatagcatcaccaaaggttcaggacctttcagatcagtcaaaagggtcaaaatcaacaaacgatcatcgtgaacagggaagaccattccagactaataatcctcatccgaaggatgctcatacgaaaaccaactcaagtaggagttgcacaaaggtaagtttttgcaatatgtagcacaaagtgtatgaggttgtgataacccttgaatcacttttcaactaacacatgacacattgatgtaaaggttcacaagcagggaattgcacttggccgttcagtggatctttcaaagttccaaaactatgaggagttagtcgctgagctggacaggctgtttgagttcaatggagagttgatggctcctaagaaagattggttgatagtttacacagatgaagagaatgatatgatgcttgttggtgacgatccttggcagtaagattttgcaaattttccatcttagtttatatcgatgttagtgtttttcttataacactgacacaatgatctctcttgcagggagttttgttgcatggttcgcaaaatcttcatatacacgaaagaggaagtgaggaagatgaacccggggactttaagctgtaggagcgaggaagaagcagttgttggggaaggatcagatgcaaaggacgccaagtctgcatcaaatccttcattgtccagcgctgggaactcttaaacaaacaaaataaccaacaacccttttgctgcaagccgaggtatgtaaaagcttttgagatattagtagactagagacacagccaaaagtttatatcattacattcgactgatgtttgttctgttaatgacagcaggatgggggtcgattggtggagactggagagcaaaatgggatgatgggtttaagataagatattaaaaatgcaatttttgaagtattttgttggccacttagataattagcatcttccatcacccttattatctatctaataataattaatagatattataaagtaaaacataaaaaggttacaggtattatatagtagaatatgaaaagctcttttataagtagaatatgatggtgtggagttgtagtcggaggctggtatcggttctttttatggatgtatttttttccttcttccaaagatctcttgaagtctttttattgtttatattaatcccaatgtacataagttttcaa

SEQ ID NO: 139424 - DNA, 2721 bp, Arabidopsis thaliana landsberg
accattgcaacacaatctcactcactttgatagttatggttttttctattaatactttatgctgactatttttcatcgaatattaactataatagcaacattatgaactacattaatcctcaactccttgttattgtcacaaatatcatgacacgtgtgatttgcatgcctcgcgacgattacactagaaaattggactccaagttggaccatagaaaaataaaaacactacatacaaattgtagtaacatgaatatctcgtaaaaccaataatagtagatatagagttctataaaaacactttatcaacttcgatttttcctccttgtgtgaataattgaatataacctcccccacttaatatatttcgcataaaaagacaatactttcccctacccacatccgcatgaaataaaaaggaatcttttattttccgaaatattaacaattcaaaacttccacacaaaaaaaaaaaaaaaaaactacaattttctcattattatatcagaaaacctaacacacctcattattgttcccacttcatacccatttgcttccttgaatggcaagtctcttctcctcacgtctcagctctcaatctctttctctcctcatcaacatcttcttcatctttctcatctttctccatttcgcttcacaaaatcctcctcctccggatccatccaaaccttaaattcctttgccggcggtgacagtgacagctgcagcggaggactcgccagccttgacgaccaccgttccaagtgttcttacataagatctcaatcaaaatgtggcccacaaggttacatagactatctcaagattttcttctgcatcttcggacaatcccctgttttgggccatctagttttatccgcctggttgtttgttctgttctacttgctcggagacacggccgcgagttacttctgtccttctttagacagcttatctaaggttttgaagctgtctcctacaatggctggagtcacgcttctctctcttggcaacggtgcgcctgatttgttctcaagtgttgtctccttcacaagatcgaataatggcgattttgggctcaactctattttaggcggtgcgttcttcgtctctagcttcgttgttgggacgatttgtgtgttgattggatctagagatgtctctatcgacagaaacagttttatccgcgatgtggtttttcttcttgtcgctctttgctgtctcggtttgatcatcttcataggcaaagtaaccatttgggtcgctctctgttatctctccatttatctcctctatgtagggtttttatcggtttcacatttctttgaccgcaagaaacgtatgtccgatcagattcttcgtagcagagaagatttggccgagatgggtgtttcgttgctaggctatatagcagaggagaagctggctttgccagagaaaacaactcaagaattcaagattgtgtttgaagattctccaaaaaggcaccgatcttgcttctcggtgctagtgagcataattggactacctctatatctccccaggcggctcacaattcccgtcgtttgcgaagaaaaatggtcaaagccttgcgctgtggtttccacggccatcgctcctgttctactaaccgaactttactgttctcattacagcgggtcacaaagaaacctaatcttgtacataatatccggatctatcgggctaatcgtcggtatcttagcttacttgacgacagaaaaatcacatccgccgaagaaattctcattagtttggcttctaggagggttcacgatgagtgtgacatggacatacatgatagcacaagagctagtctcattgttaatatccttaggtaatatctttggtataagcccatccgtgctaggactaaccgtcctagcttggggaaattctctaggcgatcttatcgcgaatgtgaccgtggcgtttcacggaggcaacgatggtgctcagatagcactttccggatgctacgcaggcccgctattcaacacggtaattggactaggtgtgccacttgtcatctcctcgttggccgaataccccggggtctacatcattcctagtgacaattcgttgcttgagacactagggttcttaatggtaggcttgctttgggcacttgtgataatgccaaagaagaagatgagacttgataagcttgtcggtgggggcttactcgctatttacctctgtttcttgtccttgaggttggctagagttttcggagtccttgataccgaccggtgaattttatagtaatgtaaattttgttttttttgtttttgtaatagtagttaattcttaaagaaaaaatttgcaaataggtcaaatttgtgggtcttaatttactgtcaaactcacttagtacctcactaaaattaaaaaagctttggattgttgttctaggttcattgttcatggattgtaaatagatacgacatcattaatactaatatgcggtctaattggaattcacagtaattgttcatttgattatttaaatgaatcttatcttcgttatgatataaggatgtcattttcttgaacttataaacttaccgatcaagattcttaaacatctgaagattttctagtcctgaatattagctactaaatttcatgtatagtctgatctgataggtaaaataataaatatgatcaattacgctttatgatcttctagttaatttatga

SEQ ID NO: 139425 - DNA, 1719 bp, Arabidopsis thaliana landsberg
agtaatcgcgaaaacactcaacaatcgctggactctgctactgcgaagaacaacaaattccttgtttatcatggttggttacaacatctctttctatggtggataatagatcatcgtctctccactcaatttcctcgtaatttttggttttttttttcgatttgatcaggcgaattccggcgaagagaagttgaagctctactcttactggagaagctcgtgtgctcatcgtgtccgtatcgccctcgctttgaaaggtctcagctaatgatcttagtttcggttctagtcattttgtgagcaaagagtgttgttcttggtctgaatctggatcttgttgacttttttttagggcttgattatgagtatataccagtgaatttgctcaagggtgatcaattcgattcaggttcgtagtttcttgtttttgattcgaattcacacccttatattgaatttgatttgaaaaaagtgtagaagctattatagtaagtaagtaagtaatcatgtggatgagaatgttgaaatgtgcttatgaatcatttactgatggtttgggttcttgtgttgaaagtttatcgttttgatcttcaagatttcaagaagatcaatccaatgggaactgtaccagctctggtggatggagatgttgtgattaatgattcttttgcgataataatggtcagtagtaacacatccatttaagttttttttggtattgttgattaaaaagaacatttcatcgatcttcggttttgtggtgattgggttgacagtatctggatgagaagtaccctgagccacctttgttacctcgtgacctccataaacgagctgtgaattaccaggtatttcaagctttctgtcttttggtatttcgggtcaactcttggtttctcggtttctttctttgaatcatactttgttacatgtgtttccatgaacaatatcaccttagattgtcctgcttcccactctgatgcattttttattttgtatattgcaggcaatgagtattgtcttgtctggcatacagcctcatcaaaatctggctgttattgtgaggacatgagattgatgtcagtttcttagattctactgttctagatagagtaaacttagctacatttttcgatttttttacagaggtatatcgaggaaaagataaatgtggaggagaagactgcctgggttaataatgctatcacaaaaggatttacaggtatgcgatctctaatctaccctaatctgcaacactctgtcattggcatgagtagtaagatacagagacgtgatcaagaaacaagacatatgttagtgtttttagttttatagtgacctatctaattatgtctcctttctctttcagctctcgagaaactgttggtgaattgcgctgggaaacatgcgactggtgatgaaatttacctggtactactctaaacctctctggattttctttatggtgctatcttcgtaacatttaagattcaagtcagtgattctttggtaactttagaatagtatcctttattatacaaaccagcaagtagacaattgttaaagccatgaagcattgttttgcaggctgatctctttctagcaccacagatccacggagcaatcaacagattccagattaacatggtacttttccttctctgaatttttctttttgctacccaacactatttcaggcttagatttttgcgtactata

SEQ ID NO: 139426 - DNA, 1414 bp, Arabidopsis thaliana landsberg
gagcttaataaacagaagccgttctccttcactttcgttcctctcacttccatacaacatttgaaacctcagctatgcctaaatcaaagcgagatagaccaggttagaactcttcttccttcactctttctgctctctattgtctgaaccattgtatctctgtcactggttttggaagctgtaacttttgtagccgccgtcaagggttttagggttttgttaggtttttagaggaacccttttgaaaaaaactttaacttgttggagttagtaatgttttttcatagcttctatggttgaatcgattgatgaatggtttatctaagggttttgttttctgattttttgctgcagtgactttgtctaagacgaagaagaaaggaagagagcataaggagtgtattgtgaatggaattagggaggctgttgaaaaatattcctctgtctatgttttctcttttgaaaacatgagaaatatcaaattcaaggagtttaggcagcagtttaggcacaatggaaagttagtttctttgtccttcttctggttgatgttagaattacttgaatgttatgactgactcggttcttatttgtctaggttcttcctaggttcgaacaaagtgatgcaggttgctcttggtcgttctgcagaagatgaactccgttctggtatctacaaagtctccaaggtttgtgtattctgcttcttacaatggttcttttatgttaaatggtcattttttgtcagttagatttacatatgttgtggaatgttgtttcagctgcttcgtggtgatactggacttcttgttactgatatgccaaaggaagaagtcgaaaggtatctatctatgtatctcttgacgtcctcttttttcctcttttgctttggtgaaacaacagtgacgggtttgaattgtatacatgtctagttgttgtaactgttcacaatacttcttctggttgtgtattgcagcttatttaacgcttatgaggattccgacttttcaaggaccggaagcattgcagtagaaacggtttgtgaacagaacttgtgccatctctatatactgttgtttctagataaataaataagcttgactatgatcaggctctgcttctctttgttatttaaaaaactttgtttcgttacttttatcttaattactatattggtaccacctaaatgattaggttgaactgaaggaaggtcctctagaacagttcacacatgagatggaaccacttcttcggaagcttgaaatgcctgtacgactaaacaaaggtctgtcgtctcaccatcttaatattcctctttctcatactcacctttcctatctatattaatccaaaaacttaaatctacttcttattttaatatgtaggtactgtggagttggtcgcggacgttgta

SEQ ID NO: 139427 - DNA, 1410 bp, Arabidopsis thaliana landsberg
  unsure (1)..(1410): unsure at all n locations
ctagctctgatttttttcaattccgatggaggcgggagagcggcgcaatggcgattcgatgagtcacaatcaccgcgcaccgaagaagccacgtctcgctgggttattaaccgagtcagatatcgactctgagttcgctcaccaccagaccggtgttgccagaatcaacaacggtagcttcgggtgctgtcctggctccgttctcgaggcgcaacgcgagtggcagcttcgttatctccgtcagcctgatgagttctacttcaacggtctccgtcgtggacttctcgcttctcgaactgtgatcagtgacctaatcaacgccgatgatgttgatgaggtctcgctcgttgataacgccaccactgctgctgctattgttcttcagaaagttggaaggtgtttctcggaagggaagtataagaaggaagatactgtagtgatgtttcactgtgcgtttcagagtgtgaagaagtcgattcaggcttatgtctctcgtgtgggaggttctactgttgaggttaggttacctttccctgtaaattcgaacgaagagattatctccaagtttagagaaggactagagaaaggtagagcgaatggtagaacggttaggttagctatcattgatcatataacgtcgatgccgtgtgttttgatgccggtacgagaattggttaagatctgcagagaggaaggtgtggagcaggtttttgttgatgcagctcatgccattggtagtgttaaagttgatgtgaaagaaatcggagctgattactatgtgagtaatctgcataaatggttcttttgtccaccgtctatcgcgtttttctattgtaagaaacgtggttctgagtctgatgttcatcaccctgtggtgtctcatgagtttggaaatggtnnnnnnnnnnnnnnnnnnnnnnnnnnnnntagggattacagttcacagcttgtggttccatctgtgatggagtttgtaaacaggttcgagggagggatggaagggataatgatgaagaaccatgatgaagctgttagaatgggtttaatgctggctgatgcttggggaacgaatctagggtcacctccagaaatgtgtgttgggatggttatgatcggtttaccttcaaaactctgtgttggaagtgatgaagatgctattaagttgcggtcatatctgcgggttcattactcagttgaggttccagttttttatctcggattgagggatggagaggaaggagtgaaagacaaagacagtggactaattactgcgtatgttcggatctctcatcaggtctataacaaaactgaggattatgagagattgagagacgcaataacagagttagtcaaggatcagatgacttgtcaaaaccttcctgcagtgtagtaaccagagtatgctcttta

SEQ ID NO: 139428 - DNA, 1224 bp, Arabidopsis thaliana landsberg
  unsure (1)..(1224): unsure at all n locations
gaaacgtgtgcanaatttcccgcacttatcgtatttggtgactcaactgttgattcaggcaccaacaaccagatttctactgttctgaagagcaatttccagccatatggccgggattactttgacggcaaagcgactgggagattttcaaatggccggattgcaccagacttcatttctgaaggtttgggactcaagaacgcagtccctgcctacctagatccagcatacaacattgcagactttgccactggtgtctgtttcgcttcagctggaaccggcttagacaatgcaacctctgccgtgttagtaagtcaagcatagttatatatcttacaacatatatatattctactgtactggacttagatttctgacatgctttctctgaattgtcatcgacttctaaagtctgtaatgccgctatggaaggaagtggaatactacaaagaataccaaaccaggctaagaagctacttgggtgaagagaaagctaatgagattattagtgaatcactttacctgattagtatcggaaccaacgatttcctggagaattactatcttcttccccgcaagttacggaagtactcagtgaacgagtaccaatatttcctgataggaatagcagcagatttcgtgacagatatatacagactcggagctcggaagatgtctttgtcgggactctctccttttggatgcttacccctggaaagaacaactcagctcttttatggaagcaaatgtattgaagaatacaacattgtggctagagatttcaacatcaagatggaagagaaagtcttccagttgaacagagatctgaacggaatccagctggtgttttcaaatccatatgaccttgtttcagaaatcatataccatcctgaagcattcggttagtacaaagttctaacaaaaatattttcccaaccattgcaaccctgcaaagacatagggctaagtttcaatatgtaccaaatgctcttaaatcaagaattcttatgataaaattccaatgtgcattgcaggtttcgaaaacgtaagaagtgcgtgttcggaacgggatactatgagatgagctacttgtgtgataaaatgaacccattcacatgtacaaacgcagacaagtatgtgttttgggactcatttcacccaacacagaagactaatcacatcatggccaatgctctcatgaacagcacattccctcacttcctc

SEQ ID NO: 139429 - DNA, 1849 bp, Arabidopsis thaliana landsberg
cacagatatgcccgtcatggctcaggtcaaacctcgtacttctccacttccattttcatttgatttgatttgattggtctcttgtctttttttctttgaagtgaaaaattgttggggttttgcgtgcagattcggagtttgatggcggaattgacgaaccccatgtctctcgcccaggttttgccctctctagaaatgtgtgttttatttattatctaatctagtttagttcacaaaagacttgggctttcgtgagtggtcaccttctttggctatactttgtctggagttttgttttgtctgcaggctgattcttttgctcatgtgcttttcagggagtggtgcattggcagcctcctcaaaaggccttagagaaggtcaaggagcttgtctgggatcctatcattagttcttatggccccgatgaaggtcttcccgagttgagacaggctcttctcaaaaaggtaatcgcataggactgaaccattcttctagctaactctggcaacctttcttgtatccaataaagtgaccacttttgctgctcttgaatccaattccgtgactgagcttgttttatttttgattccttgtcttgttctgaagctgcgtgaagaaaacaagctaaccaattcacaagtgatggttactgcaggtgccaatcaggtataacctgtctttgtttactcttttgattgctcttccttctgttttcttctactctcatactctgtttctgtttttgcatctaatgtaggcgtttgtgaaccttgttattacattatgtgatgctggtgattcggttgtcatgtttgagccatactacttcaactcctacatggcctttcagatgacaggagtcaccaacataattgttggtcctggccagtcagacactctctatcctgacgctggtacctccttgattctgtatcacgtttttcatgacttaacatagctttagttgtgaccagtgaatcatttttgttccagactggttagagaggacactgtctgagtctaaaccgactccgaaagttgtaactgttgtgaatcctggtaacccaagtggcacctatgtccctgaaccgctgcttaagaggattgctcaaatatgcaaagatgcagggtgctggctgattgtagataacacatacgagtgagtttctcatttccttaattcccatgatgtccaaattgaatgtagtaataagcggggatttgaaaatcgcaggtatttcatgtatgacggtttaaaacattgttgcgttgagggagaccacattgttaatgtcttctctttctctaaaacctatggcatgatgggttggaggcttggatatgtgagtgctcgattcaattctattccaaactaaacactgggattgtcttataaaaagatttgatggacctgcagatagcttactcagagagattagatgggtttgcaacagagcttgtgaaaattcaggacaacatcccaatctgtgctgccataatctcgcagcgactggctgtatacgcattagaggaaggttctgggtggataacggaacgggtaaagagtctagtgaagaacagggatattgtgaaagaggcgcttgagccgctggggaaggagaacgttaagggaggagaaggagcgatatacctgtgggcaaaactgccagagggacacagagatgatttcaaggtggtggcggtggctggctcaccgcatggtgtggtggtgatcccggggtgtgcaagtggtagccccgggtatctccgggtttcctttggagggttgcaggaggttgaaatgagagctgcagcggcgaggctgaggaaaggaatagaggagctgctt

SEQ ID NO: 139430 - DNA, 1879 bp, Arabidopsis thaliana landsberg
atgtccgggtccgaatctgtgtatcggatcgccagtgagtttaataaaagttgaaacttgcttgcttcccgagagttatttcatgaaaaaccaatctagggttttgaactctgaattgggggattttgacctttcagttttgtgggatcaaattttgaatttcgagggttatggttcctactgtttcagaccaatggatatggatggttaccacaaacggagcgccggtttaaacccttgtaaacacttcggtttctcacattcatcaagacccatggcttcaggaatttaccgttacccagaagtgaaatcttcgttgcggagacaagttcatgcgcctgtgcggatactcaatagcggtcgagatcgtagcacacgacaaggttttggtaatgtgttgggaacctttctcacaaggaacaatgacatgtggaaaagaaatgcacttgattcgtctttacgctatagaacggatagagaagtaattgatgttgatgatgagcttggagatgttgaaatgatatctgatgatacaagtagggagggtgtcgaaaacgtggctatggaggtggacgaggtggaagagaaggcggagatgggaaatggattgttttctgaggttgccagtctgaaaaatgggagcttgagggtgggtgaatgttctaaagctaatagtagttcactcgttgtgaatcgccctgtgactgatgtcacaagttttgaagcatacagaaaggttcttgagagtgctgtgaaccggacttctaaactgaaagacagaggctttgttgatttttttaaagagagaggtcgtgctttactacgaagcttgtcttccttttggagacaagatgaagaaccagtagaggtgtggctaaagtttaagcgtgtatgctttgtgatatgaatcggtcggtttctttagattttgtgaaatcggggtgcctcattgttctataattgattttcaggttgtacaacgtgaggcatttgtacctctttctagagaggaggagacagcagtcaggcgtgcattctcagctaatgattcgtatgattttgattcttgctctcttgtttacttgctctgagatttcatttttgtttttgtgatgtaattgtatgaacgtctctcgctgcagaaacatcttggttactcataagaactcaaatattgatattaccgggaaaatcttgaggtgccttaaaccaggcaaatggttgaacgatgaggttagtcgacgcatctaaatctcacgtgatttcttcttagagattgaatataattttcttgtctaattaggacctctatgatttggtaaaaaccttggactttgttctatgtaggtcattaatctttatatggtattgctgaaagaaagggaagctagagaaccaaagaagtttcttaaatgtcattttttcaatacatttttcttcactaaggttatacccatttctatggctaatgaaatttaaattttagcccctatatatgctcatgaatattaacaagaagacattaccttaaatcacacctcagttagttaattcggcgactggatacaactatggtgcagtgagaagatggacttcaatgaagaggttgggctaccatctcaaagactgtgacaaggtaaacttgttgtgtgcttcttctgcgaccactctctgtattaaactcctttttgagataatcaaacttttttttttcattttaccatctaagagaccttgtttgttttcagatatttatccctatccatatgaacatccactggactttggctgtaattaatataaaggaccagaaattccagtatcttgactctttcaaaggaagggagcctaaaatcctcgatgcactggtaatatatga

SEQ ID NO: 139431 - DNA, 1694 bp, Arabidopsis thaliana landsberg
agtgtgcaaaagccaaagctttgatctttcattaattcttctcaagatcttcagagtctgtaagtatttttggaatcttatttttcttgtttctcaatcgatgtaaaataaaattcagttgttgatgattttaccatgtttcgggagcttgtgttgatctagttcttcgctctcactaggctaattttgatcttcctgatgtgcacaatgtgaatgggtcttaggtattagtgatttatcggctttttatttgatccattatctatccaaagatctaattttttctgttttgctgaagttgtaaattggaacccttttgtgaattgcgtggtttttttagtttggtattgcatagctggtttctctgaaactgtgaattatatctgagaatggcgtcttgtgatctccaattacttgtgcgatgcttatgttatgcttactcaaattatgataaggaagcaaagttatgttgatgctgatgataataagctcttctcttatttttggttcatgtgaaagacaagggaagatcaaagtaattaaataagctgaagtaagaggaagtgatgttttctcttatgtctggactatggagttacatgtttagcaagactgagtttaatgtgcttattcttggtatcgacaaagctgggaagacggtaatgctttctttttaatcttttctgttacacgaatctgaaatgttgaggatacacctctcatgtacttgcccttacttcaatgtcgtagacatttttggagaaactgaagacgatatactcaatctcggaaggtcttcctcatgatcgaattgttcctactgtggggcttaatattggtcgcattgaagtctccaatgctaaaattgtgttctgggatctgggaggtcaggtgagttagagatgccttagctcatatcattgatctctcttctttgtacctaattatgtgttcctacaagtcacctataccaccaaagagaatatgcttgtaagttgatatgagaaatataggatacaaggaagatccctttgaactccttccctctctaagtttatgcgtgagccttttttgctttatagattgtttcgtcctgttgaaaactactatcggttgttttgatttacaaaccctgattgtgaacaaggatcagtctttctaatcaaataactgtggcttttcccctttatggcagcctggtttgcggtctatttgggagaaatactatgaagaagcacacgcgttgatatatttgattgatgcagcttgcccaacccgctttgaagattctaaatctgctttaggtaagtctccgaacacaagttgactccaaacagcattatgaagctaaagctaaaatataaattgtcttcaccagaaaaagccctgcggcatgaggatttgcaaggagcccctcttttaatattggcaaacaagcaagtaggaatttgtattgcgtcatttgtttcacttaaattcttcaaatatatgttgttactgatagtctttgaatctgtaaccaatgagcaggacctcacaaatgctgtatcggctgaggaactggaccgataccttgatttaaagaaattggatgaaagagtgtacatgtttgaagcagtttctggatatgatgggtaaagtaatctaacgtaagctacacacaggatccttatagcgccaatcgaaacaccttt

SEQ ID NO: 139432 - DNA, 1639 bp, Arabidopsis thaliana landsberg
atgccaaatccctcgattcctggatttatttcttcaaattaaaaaattcaattttcagatcaatcggagaaatgaatcataaccgtcgatatcacgagagtcttctgattctgtagatggcgatttcaaatgagatcgaaaccgccattaacgagaccttccataaacgtatcatcaaactctgatggagagtcagcaacaacaatcaccggccgttgaaacgcctttgttgctcaattctaatcaggatcatcaagaccgaccttcgccggaaatcgacggcggcggtggcggcggaggaggagaaggtgttaacgacgatctagaccgaacgctagaatggttagagacgtttttgacgctccttgggtttaatcaatcgtctaaacaaagccttgttctgtcttggatcgtgtttttatcgattggtttggtgcttccggtgacagtgttggagctaggtcattgtttagggtgtgagagatatcagtacaagagtttcgagctcaacatcgttgtttcgcaggcgttgttagctggtgtttctctgctttgcgtttctcataatttgagaaaacatgggattcgaaagtttttgtttgttgatcaacttagtggtcgaatggatcgtctcaaagctcaatacattcaacaaatcttggtgatttattctactttctcttcgtttttgagattgcaatgtgatgatgatacttacttcaaagtttgtatctttcttattgtgttgcagaactctgtaagattgcttgcagtttggtcacttccatgttttgctttgaagggtgttcgtgagatcatcagaatgtattatgtgcctcatgaccagccatggttatctgttgcaattctcttgtctatgatcttgtcgtggacttacttaagcactatctttctagctgcaagtgctatgtttcatttagtatgtaacttgcaagttattcactttgaagattatgcaaagcttttagaaggggagtctgaaatctctcttttcatctatgagcatatgcgtttgcgtcattatctttcgaaaataagccataggttccgcatctttctgcttctacagtttctggttgtcacagctagccagtttactacgctttttcagaccactgcgtatagtgggcgtatcacttatataaacggtggtgattttgcagtaagtcttcttcttattcactgattgttatgttcttatgtggtgagcttaagcttggaacatgatatgttttcaggtctctgcggttgtccaagttgttggaatcattttgtgtctacacgcagcaacaaaaatatcacacagagctcaagcaatagcatcagttgcaagtagatggcatgcgatgatgtcttgctcgtctacagattcaactcagataagggcatctcctagtggagttcatttggaggctaccacgaatccgcccatctcctttccgatttcccgttcagatagtgatgtggaatcaatggatcactacatgaggatgcctgttactaaccagtttccttcttatatgtccatgtcctcatatcccaaaccccaagctttcggtgagatttgtttagaactttttaacttgtacctttacagctaaactcagatatgatgata

SEQ ID NO: 139433 - DNA, 1558 bp, Arabidopsis thaliana landsberg
cttgcacattggtttgtaagatctcacggctcagtgtttatgtggatattctcaggttcccgtggctccattgcagagagcaaacgcccctccttctcctaataacatccaatggaaccaatcacagagagtttttgataatcccccagagcaaggaatccctaccatcattacatggaaccaaggaggtaatgatgtgacggtggaaggatcatgggacaattggagatcaaggtatagttgactttgtttctcgtggaccctctctcgagatttcgtgatatatgttaaaaacatatatgtttacattcaccaggaagaagctgcagaaatcaggaaaagaccactcgattctctttgtccttccatctggcatataccattacaaggtgattgtggacggtgaatccaaatacatcccagatttaccctttgtagcagacgaagttggcaatgtctgtaacattctcgatgttcatgtaagttactttcccacctcttttttctcatgttaaatctatcaatcagcttaacagtatctgcaatcattatgcatgcagaactttgtgccagaaaacccagaaagcatagtggagtttgaggcgccaccatcacctgatcatagctacggtcaaaccctaccagccgcagaagattacgcgaaagagccactggcggtgccacctcagcttcatctaacacttcttggcactactgaagagacagccatagccacaaagcctcaacatgtggtgcttaaccatgtgttcatagagcaaggatggactcctcaatccatagtagctttgggtttaacccacaggttcgagtctaagtacataactgttgtcctctacaaaccgctcacacggtaaccctaaaaattcagtgccacattgttctctctctttctttttttttcatctctcaattatgtgaaaacatgttctttgttcatagtgactagtgagtgcccaacatttgagtttattaacctctttcttacctggtttgtggtgcttgtgtacaaagcttctctcattgtaacgattgttgttttattttctgcaaaaactgtaaaatacattcgctaataatggctataagaagcttatctgctagcaaccaaacacataaatcctgttttttttcttcttctgacaaaacgtttgcgaaactgacaaatttttgaaaataatcattctttttggtattggaaaaggctaaccaattagaaagtgtactcataaatccacgtcgtctatttgattgaaaattttaatttggataagaaaaagataaaagagaaataaggtgagaaaaagtgagccacacgatggagttggcggaagaagcatcgaccgagtaattgagacgctctgtttccaattactactctctcgagctcctccgctctgcattgtcgccgagagttcctttcttgtccgacaaactacttcttctccttcgataagccaattctgcgccatagatttttgaaatctactgccggaaaggctgcatgcgatttcaactcccttttccgggacaattgagg

SEQ ID NO: 139434 - DNA, 1113 bp, Arabidopsis thaliana landsberg
ggtttctcgtgatgggttttgaatgtgtttgttctctggtgcagatgttcttttctaacttcaaggatttggttgaacaagaagtgacggttaagctgaagaatgatttagccataagaggaactcttcactcagttgatcagtatctgaatatcaagctcgagaacactagggttgttgaccaggacaagtaccctcacatggtaaattttctttcttttaagcgatttctctaagaattgggaatttagggtttattggagcagcctattgttttttttttgttcacataggcaaatattttctttgttgtgtgtgcttgaagtgctcttaagtgtttgacattatactggaattgatctcactcgctagtttcttgctatacttctttgtctcgtattgtaaaatatcacttatgaactgattgaaagcttaatccttggctcttgcaaatgtgtttaagccttcactcttttctttttccttgctttcatttactgtgaccaagcttgagaagctctaacgtgatattgattagatttacagacgcaaagggatgatttgaagtgattagtggttctggttcacatatttgattgagattgctgcttttgtactgcaatttgtcaagtctactcaggattacaaaagatttgcaatatgtttgcatgaccaatttcaatgcatttaggttttatggcgtttatattgttatatctttggcactgtatttctttatcttgtcagtgtcacactttagaaaccttgtcaaatagtacaatttcgctagaatcctcccgaagatgtttttagctgacggatttgtgtgtttgttctgtgtagctttcagtgagaaactgtttcatcagaggatctgtggtaaggtacgtgcagttacctaaagatggagtcgatgttgatttgcttcacgacgcagctagaagagaagctaggggtggctgattctgaaatatctttgtatctccaaaacttgaatacttttcattcggcgtaatggctttataatgaatatttccctgatgtagagccaatggtatggccatgaatcttgttccattttattaacaatggataatttaatttcttttcctc

SEQ ID NO: 139435 - DNA, 3119 bp, Arabidopsis thaliana landsberg
tgtttcagtcgggtccgttgaagatacagccaaaccggtttcagctagttccccagagaaagcaatattggattctagtgaaacttcatctgactctgatgttccatctttgagacaccaccataatgttgttcctgttgatgttgagagtgatccttgttcaaaaccttcttctcttgaacaaggtaacagatctatattattaggggataaagatgaccttaaatctcaatcagggagacaacaagattcgggttgggatcggtttaggaaaagaacaaccaagagatgtgattctcaaagtgtcatcaacagattatccacttctaggcatccttgtgatgaaggcacttcttcttcagcaaactactttccagattcactccttgaattccagaaacacttgaaagatcagagcaacgaagcaattgagcaagaccgagctggacttctgagacagttagaaaagatcaaagaacagcttgttcagtcttgcaatgtggcaactgacaagtctaaagaacaggctcctagttcttcgtccgcctcggggttgaacaaggcgcctccaatgcggtttcacagtacaggaaatcacgctgttggaggtccttcttattaccatcaaccacagtttccttacaacaacaacaacatcaatgaagcccctatgcaccacagtctgatgcatccctcttatggagaccctcataggttcccgatacacggaagaggtcctcatccctacttctcgggacaatatgttggtaataataacaacggtcatgatctctttgacgcatacccgcagcaaaacgggcattttcatcactcatcttgctcttgttaccactgttatgataataaatactggcgaggttcagcaccggtggtccctgatgcaccctataatgctggtttttatcctcatgagagcgttatgggttttgctccaccgcataatcctagaacttatggttctcgtggtctacagcctcatggaagatggcctagtaacttcagtgatgctcaaatggatgctctttctcggattcgtcctcctaaagttgtattatcaggcggatctcgtcatatccgccctttggcaggtggtgcaccgtttataacctgtcaaaactgctttgagcttctacaattgccaaagaaaccagaggctggtacaaagaaacaacagaaagtgcggtgtggagcatgttcctgtttgatagatttatctgttgttaataacaaattcgttctctcgacaaacacagcttcaacgagacaaggagaagcccgtgtagctgctgattacacttctgatgactatgatcttcttggttatgtatttcactcgttggatgatgaaccaagagatcttccgggattgatttcagacaagtctcaagatatgcaacacgttcattctcattccgccagcctttccgagggagagctaagctcagacagtctaaccgctaagccactagctgaagctcacgaaaactttgttgattactcttcgatcaatcatgaccggtctggagcaggcagccgtagctctcgttcagaacacgacaaggtcacactgagcaaggcaacagccatgagacagaactccatgaaagaggtttcacttgcaagtgagatggaagttaacttcaacgactactctcatcgtaacagtggagtatctaaagatcagcagcaaagagctaagaagagcggattcgcgagcattgtgaagaaaagcttcaaagatctgacaaaatctattcagaatgatgaagggaacaaaagcaatgtttcgataaatggacatcctttaaccgaacgtctgctgagaaaagcagagaagcaagccggagtcattcagccaggaaactactggtaagtaactttcgatgcctcttctgttatgacatcttcttcatgactgctaatgtgttttggggacattctaggtatgattacagagctggattctggggagtaatggagggtccaggtcttggaatattaccggtaacaacatttttgatattgcttcttgtcaatatgttcatgaatcttactaaaaaggcggaatcctttttgttgcagccattcatagaagagcttatttacccaatgccagagaactgctcaggtggaacaacgggagtgtatgtgaacggaagagagcttcaccggaaagatttggacttgcttgcgggtagaggacttcctccggacagagatagatcctacattgttgacataacgggtagagtcatagatgaagacaccggtgaagagctcgattgcctcgggaaactagccccaacgtaaacctttttacatcacaacttttgttactttcttcacaagaaatttatgtgtgatccagttggtttgtttgttgatggtgcaggattgagaaattgaagcgtgggtttgggatgagacttccaaagagaactacgtgaaagaagataagaggagagatatgtatttagctgaatatcttttgtttagaaagagagagcttatgtatgtatttagaaattggtattatttgcttccaagtttaatttttagacttcttcaatcaaaatttgctgcaacgaacaattgaaatgaatttgtcatacgtctcaatagaaaacaaacaaaaaaattgagatgaaagattcttaaaccaattctcaagaaacaattcatgatggacattatgatgacattggctcctttaaatggaacagaaatagcagtgattgatgatctaacagacgttgacatcaggctagtctttgtgcggagatagaagcggcctggttatgagaatgttggagccatcaattgctttggttatcatgccatttgtcctcaaatcttgattctgcccactacatgatctacaactccatggctttgaagtagcaatagaatctgctatcggatccaaatgatctcattatccaaaccacaacagtgtcttctttgatggttagtataagtcttgcatcttatttagagtgtttgtgtttggttcgattgatctttgtaactgtgtttatgtaatcactcaagtatgctgtctgggtagtcggaagacagagtattatttattccctcct

SEQ ID NO: 139436 - DNA, 1362 bp, Arabidopsis thaliana landsberg
catctctccatcaccatcatcatcatccctcagatgcatggatttagtagcagtaactcttcttcttacatcgcttctctctcctctgattctgaagaacgtcttagctacaacgttctctccgtccctgataaaccagactccgatgacaccaaaccacattttttcgactacattgataacttcaagccgcaggtcaaagccacggtggaaaaacttactgacccgggtccaccagattcgccgtcgcgtcttgctggattcgtggtggatatgttttgcatgatgatgattgatgtcgctaatgagtttggtgttcccagttacatgttttacacatccaacgcaacgtttcttggattgcaagttcatgttgaatacctttacgacgttaagaactatgacgttagtgacctcaaggactcggacactactgagctggaagttccttgtttgactcgtcctttaccggttaagtgtttcccctcggttctattaaccaaggagtggttaccggttatgtttagacaaaccagaagattccgagaaactaaaggtattttggtaaatacattcgctgagcttgagcctcaagctatgaagtttttctccggcgtagatagtcctctgcctacggtgtatacagttggaccggttatgaatcttaaaatcaacggtccaaattcatctgacgataagcaatcggagatcctacggtggctagacgagcagccacgtaaatccgttgttttcctctgtttcggaagcatgggaggtttccatgagggccaagctaaagaaatcgcaatcgcgcttgagcgaagtggtcaccgctttgtctggtctcttcgtcgtgctcaaccaaaaggatcgatgggacctcccgaagaatttacgaatcttgaggaaattctcccggaaggattcttggaacggacgacagagataggaaagattgtaggttgggctccacaaagcgccattctagcaaatcctgcgatcggagggttcgtgtcgcattgtggatggaactcgacgctagagagtctatggttcggagttccgatggctacgtggccgctttacgcagagcaacaagttaacgcgttcgagatggttgaggagctagggctagcggtggaggtccgaaatagtttccgaggagatttcatggcggcggatgatgagttgatgacggcagaggagatagagagagggatccggtgtttgatggagcaggatagtgacgtgaggagtagagtgaaggagatgagcgagaagagtcacgtagctttaatggacggtggatcttcgcacgttgctcttctaaagtttattcaagacgtcactaagaatatctct

SEQ ID NO: 139437 - DNA, 4394 bp, Arabidopsis thaliana landsberg
ccgtcgttggctaaatcgctctggttgccaactcgatcatcatcttcttctacccactttctctatctgctctccgtctctaggagctccctcagatctgtgcttaattctccggtaacattaccggcatcactgggattgctgatctggaaccgctgtgaaattttaggttttctctgagaagacaggcaagtttaacgatggcggcgaagacggccagatcaaaagctacgccgacgaaggaaaatggtgtcagagtcgaggaaggattgagtctgttcaagtctgataagttcgatgctgatgcttatgtgcaatccaaatgttctatcaacgagaaggtttttttctgttcttttatcatttcgtgttcttattctcgttgatttgttgttatcacgagtgagaattttctaggactgagtctgtggggacttgttcgtagatttgggattgtatcatcgcagtgttcttgttttgttgcatttcgttttagctgtaggaaatcgtaattgtggaatggatattaggtagcagcagattttatacgctcgagaagatgatgatcaatgtaaaaatactcattgcttgtatggttgttcttgtgatcttctggagtttgaaggcagtttgtgaattatgattatgtaaaaatgttactcttaagaaatgctgataggtttagtacccatttataagcttttagcttgccaaatgatgtgttcagtgtaatacagaatgtagctcatgtgaatatacatggatgactatgtcttgtatcagagacagaatctgttgttctcgttttctgttacagaaaagattcaattcggttatggtattgggtataaagggtgtctcgtctgtgtagtcactttctgtgatggtgtgagagagctgagggaaaagttagtttaggccttctagagtttactacaaaaagagtagtgtttgatttggttaacatagattgttggattacttggctggactctttgttttttctcagttattttgggatgatgacatatttctgttcggttcacaggatataaagcagttatgctcgtatctattggatttgaagagagcatctgctgaagaaatgcggcgaagtgtttatgctaattatccagcctttatacggttagctgatatcctgtctgtttttagtgcttggttattttctttgaagttgatgtgataataaagctctactttttcaagttatttcatttcttgtgggtattggtgcatttgcgttttgcatatgacttctttttcctgggactaccttattgttttttcttggcggtgtgttattttgaaaattaaacttttttctgttctgtgcagcacatctaaagagatatcagatcttgaaggggagctatcatctatcagaaatcttctctccactcaggcgactctaatccatggcttagcagatggagttaacattgatgacgataaagtttctgatgaatctcttgggaatggtttattgaattttgaggacaacggcctctctgatctggagaaatgggctacggaatttcctgaccaccttgatgctttattagctgaaagaagggtggatgaagctctggcagcttttgatgagggagaaattttagtatctcaagcaaacgaaaagcatactttaagctcttctgtactttcatctcttcagtttgctattgccgaacgcaagcaaaaattagctgaccaacttgccaaggctgcttgtcaaccttcaactcgaggtggggaacttcggtcagccatagcagctctcaaaaggcttggcgatggtcctcgagcccatactgtacttcttgatgcccatttccagagatatcaatacaacatgcaaagtcttcgtccttctagcacctcatatggaggggcgtacactgctgcactttctcagcttgtgttctcagctatctctcaagcttctagtgactcattgggaatctttgggaaagagccagcatatagttctgaactcgtgacttgggctactaagcaaacagaggcgttttcccttcttgttaaaaggcatgcattagcttcttctgcagcagcgggaggactaagagctgccgcagagtgtgcacagatagctcttgggcattgttctttgttggaagctcgtggtttgtccctttgcccagtgcttttaaagcactttaagcctattgtggaacaggcattggaggcaaatcttaagcgaattgaagaaaacactgcagctatggctgctgcagatgattgggtactgacaagtcctcctgctggtagtcgtcatgctagtacagcatttcagaataagcttacatccagtgcccaccggtttaatctcatggtccaggtagactatcttgacaaacacttttctccgaaattttcagcctttttctaaagttgtgctagaaaaataaagtgcttaggaaatgcagacatgcctagaaaaatgaaatatttttcactcttagacgtctggtgtgtctcttagatatgccagtatcccatgaaaattgcttatattatgagtttacacatcagctgtaaaattgactagccatcgttgatgacgattgattagaacttgcactcgcgttcccactgaaaaattattataaactctaggcagtaccaattctgtcttagctgctctgataggcagaggattcccaagtggactgtcatgaactttggatgtatttgtcaagtagatccttttgataatggtattttgttgcaggacttctttgaggacgtaggacctctgctaagtatgcaattgggaagtaaagctctggaaggtctgtttcgggtgtttaactcatatgtagatgtgctggtaagagcacttcctggttcgatagaagaagaagatccaaattttgaaagttcatgtaataagattgtccaaatggctgagacggaggcaaaccaacttgcattactcgcaaatgcatcattgctagcggatgaattacttccacgtgctgccatgaaactctctcttgatcagactggtcagaggacagacgacctaaggagacctttggacagacaaaatcgtaatcctgaacaacgagaatggaagaggcgtttacttagtactgttgacaagttaaaagatgcgttttgtcgccagcatgccttggatctcatttttactgaggaaggagatagccatctgtctgcggatatgtacataaacatagatgaaaatggcgaggatgtggacttctttccatctctgatattccaggtagttgttgtttcatttccatcagtccagttagcctttatgaagtactgtacccagatgtgtagtcacttgggaactcttattggcagattggatactgtagagttgaatccatgtttgtcatagtctactgtccacttcaagaacatgatttttttctgtcttttttagcttaatattcttatactttgggtgttgcgtcgttgaaaaacaggaactttttgccaaacttaacaggatggcaagtctagcagcagatatgtttgtaggaagagaaagattcgccacatctttgttgatgcgattaacagagactgtgatcttatggctttctggagaccagagcttttgggatgacattgaggaaggtcctcgacctttgggacctcttggcctacggcaggtttgtacactcattcttgcttctgtatatgtatattcagcgagcatcgaaattgttgtgtacctttgttaacaaacaacctgcatctgtcacagctgtatttggacatgaagtttgtcatatgctttgcatcccaaggtcgctacctatcgaggaatttgcacaggggaactaatgagataatatctaaagccttagcagctttcactgcaacagggatagatccatataggtacatcggttttgagggtgttttgcaatgttttagcctttatggtaagtataaatgattaaaatgtggttgtgaatgatgtgcagtgagctgccagaagacgattggttcaatgacatatgtgtggatgcgatggaaagattgagtggcaagacaaagggcaacaacggggatgtccacagtccgactgcttcagtgtcagctcagtctgtttcatcagcgagatctcatggcagctattgaaaccaaacccatcttacatttgttaagaaggtgaatggtcaataacttttgatcttctcttttcagctctgcttttccaaaagctttctattttgtagagtctccagttgttgatgagatgattttgggggcgtgtaaatgttgttgagttgacatgtttgttttcttgtattggtcctctctctctctctcaatggatgcattctttgggttaaaatattgaatcagat

SEQ ID NO: 139438 - DNA, 1464 bp, Arabidopsis thaliana landsberg
gagttggttgccgaaatccggcgacgaaatcaaagctgctgtatgtttctgtcatggctatggaagcacttgcactttcttcttcgatggttcgttagatttatctctacttgcatcatttagttgaaaggctcttcttttaatatatgtgggaaaaaaattgggttgttttacaggtatagcaaagcaaatagcaggttttggttatggggtttatgctatagaccatcctggttttggtttatcagatggtttacatggtcacattccaagttttgatgacttagcagacaatgctattgaacagttcaccaaaatgaaaggtatatctaaattgtacctgttattgctttttggtgttgaatcttgcttttgggttttatttaagtggtttgattcctagggagatcggaattgagaaatttgccccggtttttgctgggacagtcaatgggaggagcagttgccttaaaaattcatcttaaagaacctcaagcttgggatggtcttatccttgtcgctccaatgtgtaaggtaagtctctaactatatcattttctatgcatgtaattgaggtctggagatttgtttctcaaatctgcaaataagattttcagtgcttggaagtatctgtattcacattttacatctagttagttcatgtttgaaatacctgaccttgggttgtctcaagatttcagaagatgtaaaacctcctccactagtcttgaagacgttaatcttgatgtcgacactatttcccaaagcaaagctctttccaaagagagacttgagcgacttcttcttcagggacctgagtaaaagaaaattggtactttctcttagtttttcaatggtacattttctgaagcatttttgctaactttgtctttgatgtttttgttctctgtggataaagtgtgagtacgatgtgatatgctacgatgatcaaacacgtctcaaaactgctgttgaacttctaaatgcaacaagagacattgagatgcaagttgacaaggttagttgtagaaccaaagaaataaaggaaagctcttctcatcatagacaggggcaaaaaatgagatctttcttttctatgttgcaggtctcgttgccactgttgatacttcatggagacactgataaagtcacagatcccactgtgagtaaattccttcacaaacatgcagtcagccaagacaagactctaaaactctatccaggtggctaccattgcattctagaaggtgatacagacgaaaatattttcactgtaatcaatgacatcgttgcttggctcgatgcccgcgttgatcccaagtaaagtgagatcatctctccacaaacctatacttattattgtcttctgaatactgtcgagtctctgtgattaaacatccggataagaagaaaaaatagatatgtggcttacaatgaatacacaaccttagccgttgtttgctt

SEQ ID NO: 139439 - DNA, 1626 bp, Arabidopsis thaliana landsberg
agccaattagctagtgaagggattagagttgttttgacctctagagacgaaaacagaggacttgaagctgttgagacactgaagaaagagcttgagatttctgatcaaagccttctttttcatcagcttgatgtcgctgatcctgctagtatcacatctcttgctgagtttgtgaaaacccaatttgggaaactcgatatcttggtaggcattattagtaaactctctttgatcagtttactctgaaacaggtcttagactttacagtttcaaacgtggttttgactagaatgattgctttacaggtcaataatgcagggattggtggtataatcactgatgctgaagctttaagagctggggcagggaaagtatgagataatctttgtgattattttgcaagcaattactttcatgatattattagtattgatgatcttctgtgaagtatttaaatgttttcttgttatattcgacatggcaggaaggtttcaagtgggatgaaatcatcacggagacttatgagttaactgaagaatgcatcaagataaactactatggaccaaagagaatgtgtgaggcgtttattcctcttttgaagttatctgattcaccaagaatcgtcaatgtatcatcctccatgggtcaactaaaggtaagtaagaaaagattagatatcaaggaagcttgagagatgtattgttggctaagaaacactatttatgttacaattgattattgtttaccagaatgtactaaacgaatgggcaaaaggaatcctgagcgacgcagagaatctcactgaggaaagaatcgaccaagtgatcaaccaacttctcaatgatttcaaagaaggtacagttaaggaaaaaaactgggctaaatttatgtcggcttatgtggtttcaaaggcaagtttgaatggttacacgagggtcctggcgaagaaacatcccgagtttcgcgtaaacgctgtgtgtcctggatttgttaagacagatatgaacttcaagactggagtcttgtctgtggaagaaggagcttcaagtcctgtgaggttgactttacttccgcatcaagaaactccttctggttgtttctttagtcgcaagcaagtttcagaattctgaatcttcttttgtgtgagaataataagccaaaaatgtagtaatttaatgagaggattatcgtttgaatgtcgaacatatactcttagataaacaaaaacttttatgagatgttttggtaatatactcataaacttgaatataattactttacaaacagaataatatatagttccataagaagaaactaaacaaaatttgagtctacttcattgcattagttaagaaattatgctctttaacaatttatgattatatatatttcacaaaaggaactcccggatatttcttaggattcatgttcttcagctgctgcatcagaagtttcttcttctgtagggtttgcttcatcttctttgggttcggttttgtcttcctcagccgtcgagcgacggtggttagccgcggcttggaggacatgattgtcattacccttctcaaggaaaagctggctgaagtggaccttacagtaaaggacgccatcgagagcagcatatga

SEQ ID NO: 139440 - DNA, 3059 bp, Arabidopsis thaliana landsberg
atggacaccaaaataaagccgcctttaacggtaacggtaacggtaacggtaacggcgtttgagtgctcttcacaatacatgagaattagtaatagagttaagaaaggaaattaatagagtttggagtgagacaaagagagaagagaagattagagagaggagaggaagggtcaaagaatacatagcatcaccactagtcaacgcttttataaaacttcttcttcgtctcctctccttctcacatctctctctgtctttctctctcaaacctaacaaaagcttcagacttcaattctttagctacctctctcccatggcagtaagtgttttctttccttttttccttctcctcttcttcttatttaggtctagagctttctctcagattatagtttttgtttcgattccgtcaatctctgaccctttttttggaggatttgtagaaagttgagtcttaatctatttgcatttatggttcttcctattttgatatcttttctatggattgcgatgtctattagtattcaactttatgattctgatttgctttagataagaaaagggttttatgaaagttactatttttatggtaaagtttctatttttgcttagcaaagatttcaactttatcattgtacttggtcgaaatcgataaacccaatttgtatttgttctgttttggattcttaagtgaatttgctatcttgtttctgtgatgattgttctttaggatgttatgttattgaatgttttgtggaaggacattgttgttgaattgtttgttgcaacagcgttcgaatgtaccaaaatttggaaactgggaagctgaggagaatgttccttacacagcttactttgacaaagctcgtaagactcgagcacccggtagcaagatcatgaacccgaatgacccggagtataactttgactctcaatcacaagctcctcctcatcctccttcttccagaaccaaacctgagcaagttgacacggttagaagatcacgtgagcatatgagaagccgagaagagagcgagttgaaacagtttgatgatgctggtggttcatcaaatgaagctgctaacaaaagacaaggaagagcttctcagaacaatagttatgacaacaagtcacctttgcataagaattcttatgatggtactggaaaatctaggcctaaacctaccaaccttagagctgatgaaagtgtaagaatctcacttttaacctctaaagagagaatatctctgtttgttgcttatgtgttgtcatctgtttatatatagcctgaaaaagtcacagtggtgcctaaattcggtgactgggacgagaacaacccgtcatcagctgacggatacacgcatatcttcaataaagtccgtgaagagagaagttctggagcaaatgtgagtggatcttcaagaacgccgactcatcaaagctcccgtaacccgaacaacacttcctcagtaagacattctttaaaactcattttcaagtataatcattagtgaatacgtattcaaatagtgagtgtgtgttgaacattggtttgtcttgtgcaatttgacagtgttgctgctttggctttggaggaaaatgaaagggaccggaagattgtatatagttatcgagaaatcagtgtgtaatcttgatgattagacattcgagcttctttagatgaaataaggcataagtctcacttgcataagatttttatagtataatttttgtatgtatattttgcaattcttccttaatacttttggtgttttcataagacacattccagtttcggatctgcttgcagatgcattatatcttgcttggtacggcctgagtgatttggtaaccgatttgatatgaatcagagatatttgggtacctccaagtttgttgtttctaatgttcaaagccttaactctgcaccactataaagaaagacccataactttttatataaaatcaagattaagatctttggaggatgatgactcgtatggtccatatgatatggacatcaaagaagaacgaattgacacttgtttcctatatggctttgtacagtgtaatcaggtttgattctccagctttatgtacttactatttcagcattctctatgcccaataattagacttaaatgcaatctttttaaacctggatggtgaactagactactttttaggtcacggggtcaatggatcaaccggattcgaccacggatcaattgattaaaatttatttaatattatagaaattattagtttgtataaactataaatataaaaataattataccatggtcaaacaataataataaagtaattaaatatttaaatctaactaaaagtctaaaatagtaacatatactaaaatagtaggagtaatgacgaaaataaaataataaaacatcgcgaattcaaaacaactaatctcggttgtctctatcaccattccattcgtttttttaggcggtattgtgagatctttgtcaaaatctaaaatatcttctaagtcttaagaattaaaaaaaaaaatctaaaaataaccgaataaagtctaaactcatatattttattccagaatcaaatgaatttttaaaccaccattcttcaagctttggttgatacttggttagcttgaaaaacggtttagtgatttggaacatgcgaagaaagcttatgattctagtttgaaacattaatctcgttgcataccactcagaatctcgcttgatgattttgaagagaaggtgaatgggctgaatcctaattcatatttgatatgatcctaatatgattgtaatgactacctggttttgttacaatatacgaaagacccattagataagtatatagtagatgtagaaaacataataagattgaatttttggaggtttgattcgaaaccaaatgagccatttaatatgttggacatatgtgtccaatgatttgattagttcagctagagtattacatggattggacagtgagtttgttccactttctccgatgtatttgtggcgcagtgttcgtcgagaattaactacattaaatga

SEQ ID NO: 139441 - DNA, 2206 bp, Arabidopsis thaliana landsberg
atctgggggggtctattcttcattcgccagtcacatgctaggaatgacagaagggtgagtatatattctttgcacatggcgttgtgaatacttatatacatgggcctactgtttgttgttcgagccagtctgctgctatctttgtttgcatgtatttgaagcattaaatggctccttttccttgcgtccgcttatattcattgtctccatgtctctgccagtttcctttgtatatatatagagagagcaaatcggctgatgcattagatgaatatacactgacttctcgcgaatattcctgccatgaatattaagcgttctcttagtctatttggttaatgcatctagttctttgtccatatttatccttctagaaactagcgcagaacagtattaagattattactgagtcctttttccatgttgtcctccctcctcacccagacgattgctacagtctgcatgttccttgcgggaaaagtggaagaaactcctaggccgttaaaagatgttattgttgtctcctatgagataatacacaagaaggatcctactactgcacagaaaatcaagcaaaaggtctgaatattctaaactttctctaatccggtttcctgtttagtaataagcgaatttgcactgtttctcgcatattctattttactatgacataaattttctactaaacccaggattgtacttgtttgtgaacaatcctcctatgatcattgtccttgtcgttggatctctcatctgtgctggtcaccgtctctattatttctcttctttgtactgaacgtatttcactttttgcaggaagtatatgagcaacaaaaagagcttatactaaatggagaaaaaattgttctttctacgctgggatttgacctcaatgtttatcatccttataaacccctggtcgaagcgataaagaaatttaaggtcgcacagaatgctctggcccaagttgcatggaattttgttaacgatgggtacgttaaaagtctgtttccttgaaagcttcagatagatctatctgtcttgtattttcttcttcatacaatgaaaagatgcttgcagtctgcggacgtcactctgcctgcaatttaagcctcaccacattgcggcgggagcaatttttcttgctgcgaagttccttaaagtgaaattaccatcagatggagagaaggtctggtggcaagaatttgatgtcacacctcgacaactagagggtgagagaactatctttatctttgaattaattttatgaaactgtttccactttttctgtttgacttgtatgccttattttgcatctgatgctaagagctactcccttatgtatactgcagatgttagcaaccaaatgcttgagctctatgagcaaaaccgtgttcctgcatctcaagtaagcgaagtcgaaagtagtgtaggtggaggatcagctcatcatgttgggtctaggccatcagcacgtctaactcatgaacattcaaattctgataatctcgggggctcgacaaaagctacacaaaaccggagcaatgataatgggagtggtgaggcaggtagtgtcatcaccgagcagaagggggaaagagatacagaaacgaaagatagcatgcatactgaaagtcatccagcccataagtctagatcgggagttgaggcacctggggaggataaaatagagaaagcaggtgcacattttccagaagatgataaatctagaattgttggtacagctgatgtcacggtcagccaatccccaaaagacataaaaatgtttagagataaggtgaaggccaaactagaggcgaagaaggtccaaggtgaaaagacgagaaagaaggatttggtggatgaggatgatttgatagaaagagaactggaagacgtggaattagctgttgaggatgacaaagatatacaaaacaaaagctccatgggtacggaacatggcgagattcttgatggaaacaacttggtggtcaataccgaggaaggtgaaatgatagatgatgtttcttcaacaatgcctagccggaagagaaaaatggaaagtccttgtgaaaaacagttaggagaaggaaagagacgacacgacaacagtgagaatgtggaagaaggtcagaagacaaacccaggaggaagtagtcatagttatggtgacagagagccaagaagacactcccaagagaggtag

SEQ ID NO: 139442 - DNA, 3405 bp, Arabidopsis thaliana landsberg
  unsure (1)..(3405): unsure at all n locations
ttcttcttggtcggtcacaatctgttctgcacgagcactgcacaatcacttggagtctgtgaatttcacatctgaaagaaatacaaactcccatagttttcaattttcacgatctccgaatttcacgactttgatacttggtttctttgcacattcacgtaagctccaattcttccttctcttcttttggcaattgattcacatcgaatagtgttgcgttgacgagttcttcgttacagatattgtgtattatggctgttaaaattgaatttgaattgttagtattagcaaagtaatacaaagtttgttcctttaactaatttaaccagcttctgttctcatgaacaagtttgtgccttagataagtcagattttttacactacttgatgtacagtaaatttacttgtctttctctttaggcgacgaagatgaggctgttgaaggttgctacgtgtaacttgaaccaatgggccatggatttcgagagcaacatgaagaacatcaaggcttcgatcgctgaggcaaaggctgctggtgctgttatcaggcttggacccgagctcgaggtcactggctatggttgcgaggatcacttcttggaactcgacactgtcactcatgcgtaagcttctatttttagttttctatttcgatgatgaatggcatgaatgacttggtactatcactttagatgatggaattaatttctttttcttctgaatttagttatcggaatcatgtttaaccgtttcttcttatgttcatgtgaatatcttctttcaggtgggagtgtttgaaggaattgctgcttggtgattggacggatgatattttgtgcagcataggaatgcctgtgattaaaggagcagagcgttataactgccaggttctctgtatgaacagaagaatcatcatgattcgaccgaaaatgtggctcgcaaacgatggaaactatagggagctacggtggttcacagcttggaagcagagagaagagctagaggaatttcagctccccattgaaatttcagaggctttggagcagaaatcagtcccttttggttatggttacatccagtttatcgacacgtgagtttggataaatgcttccatttcaacactgtcaatgattttgtctgcttaactgtatcagttatatttccttatcagggctgttgcagctgaagtctgtgaggaactgtttagtccacttcctcctcatgccgagctcgcattgaatggtgttgaagtatttatgaatgcaagtgggagtcatcatcaacttaggaaactagatattcgtctgaatgcttggatgggggctactcatgctcgtggtggggtgtatatgtacagtaatcaacagggatgcgatggtagccgcttatactacggtatgtttgtcaacccttaacattattgaaagtatcatttttgagtaaatcatatctacttttttgagtgagatttgttcatttgtaaccaagtgcagatggatgtgcatgtattgttgtaaacgggaatgttgttgctcaaggctcacaattctcgttgagagacgttgaggtcatcatttcacaagtggatcttgatgcggtatcccacagttaccctttggctttactttcttctgttttgtgatatataaatgaaaagttcttaggatcatcttgcttatttgtcttgagaaaggttgctagccttcgtggatctataagtagctttcaggaacaagcaagctgcaaggttaaagtatcttcagtagctgtgccctgtagacttacacagtccttcaacctgaaaatgacactaagcagtccgaagaaggttctccatccttgagtatttgatgttaagttaacatctaaaattttccactctaatatacattagtaatgtagatcatttaccactctccacaagaagaaatagcctttggtcccgcttgctggatgtgggactatttgagaagaagtggcgcttcaggatttttgcttcctctttctggcggagcagacagctcctccgtggcagctattgttggctgcatgtgccaacttgttgttaaaggtacactggcgcttttttctatgtatgttgaactgtgttttgtcttgttgaaatttcatgatattgagttctctcagagtatattttctttcttgtttagagattgcaaagggagatgagcaagtaaaagctgatgcgaaccgaattgggaattatgctaatgggcagtttcctactgatagcaaagagtttgccaaacgaatattttacactgtctttatgggttctgaaaacaggtgaattagttaataagagcaaagagaatatgatttttcgtcactgtgtggatttacagcagagatgaaacttttttccccatattgaaatcttaaatttgcagttctgaggagacaaaaaggcgttcaaagcagctggcagacgagattggtgcttggcatcttgatgtttgcatagatggtgttgtctctgcagttttatcattatttcaaacagttacaggcaagcgaccaaggtataaggtaaagtctgaatatacattacctaggcaaactgttagaaaaaatgaaatatgatcatctggagaagagaagaagaactaaaattgtgaaaatggttgttggttttgtttattaggttgatggaggatcaaatgctgagaaccttgggttgcagaacattcaagcccggatgagaatggtgttagcatttatgttagcgtctctcttgccttgggttcatagcaaaccaggcttttaccttgttctaggcagctccaacgttgatgaaggacttcgtggttacctgacaaaggtaatggagtaatcactttttggctgctacatctcaaatttcatagatggttaaaaaatattgttcattctcttggttgaaacagtatgattgcagctcagcagacataaatcctataggaagtatcagtaaaatggatttgaggttgttcttaaaatgggctgcaacgaatctcggatatccatccttggcagagatagaagctgctccaccaacagctgagcttgagcccattcgttctgactattctcaggtaataacaaaaatatttgagactctatatagttataaagtcaacgaagatgtcagttcagatatcttgagttttgaaacagctcgatgaagtcgacatggnnnnnnnnnnnnnnnnnnnnnnnnnctatggaaggatgaggaagatattccgttgtggaccagtatctatgttcaaggtttgattttctgaaaactagccacaaatgttactaaatcatatgatgcagtgaaactgaagctggtctgtgattctgcagaatctatgttacaagtggggaacaaagctaagcccagcaggagtaactaga

SEQ ID NO: 139443 - DNA, 3537 bp, Arabidopsis thaliana landsberg
  unsure (1)..(3537): unsure at all n locations
ttgatcttcaagttccaattccatacagtttcttgaatggacttgtcaaagacctgcaagcttataagatagtttcaatatccggtgaatgtggctgcgtcagacactcgcattattagcaaaattcagtgttctaaatatcaccttaattagtgttgtttgggttttctgtcctggtgcaattagccaaaacactaaaagcagagacgaggccagccatgccaacaacctgtgtccagtttcttgtgctaatggcaacagctgctcccgccacagctcctcctaccaaagcattcacccaatcattcttgcctcgatatcgttgaagcccacaatgtgtcatagtaaacacaccacttacaagacctgaaacaaaaatgaattcttgatgcatataccaaaatctaaagaagcaatcactacttgaagaatttagatctaagttaaagaagagcagagcaactaatccaaaaaaaattacaactaaaagaaatctgcattatatattattacatggcaagcaaaacagagaattatgatctttcaaaacaaaaaaaaagtatatgcagcattcttcttctagtgacaaagaagagaattatcttaagtccaaaattacagatttatacccaaattccatagtcattgaagattaatttggatggaaaaacaatagaggaagcaaattaccgcattgaaatccgaatctgccaatggatttcgccacaaaggaagcctgagaaacgccgcttaaacctggcgaagcaaatcagcaacaaagcacagattaatgaattgaaaagtgtaaaaactctctaaatcaaagctaatttcaatacctattttacgagcgtcacgaggtccggcgcataacccatataatccaccggcctgagcttcaacaaaaatctcagacatctatctatacacacactaacacaaacatgaatttcaattggatactagtgattaccgtcgcgacacggagaactgactcgacggttagggaagagcacggcacggcggagagcaattcttcctccatctctgcaaaattgaattaggacaaaacccttttgttttgttacctctccgtccgtacattgattaagaaaccaaatattcatttaaataccggttcaattcggttttgtcaaaatcgtacttgatatttaaaatcgatttctgatacacttgttagattgagacaatgagcaagggggcggcaataatagcttatgcaaatcccatctttcatattcgacatctaaagcttgaatctttcttgtggaacatcatcattcgtgccattgttcacaatgtttcgtcgcctcaacgacattctccgatctcagtctacctccgtatgcgcaaccatcgcgtctctcccgattttcatacctttccgtttcttctcccttctttccacaatccgcttcatcttcctcttgggcaacgaactcatgctcagattcttctttttggacttgacaaagacccatttgtccgaacttcactgctcaacatgtattcttcctgtggcgacttgagatcagctcagcgagttttcgatgactcgggctcgaaggatttaccggcctggaactctgtggtcaatgcttatgccaaagctgggttgatcgatgatgcgcggaaactgttcgacgaaatgcctgaaagaaacgtgatttcctggagctgcttgattaacggctacgttatgtgtgggaaatacaagaagcgcttgatttgttccgggagatgcaattacctaaaccaaacgaagcattcgtcagacccaacgagtttacaatgtcgactgtactctcggcttgtgggcgattgggtgcgctcgagcaagggaaatgggttcacgcttacatcgataagtaccacgttgagattgacattgtcttaggcacagnnnnnnnnnnnnnnnnnnnnnnnnnnnnnnnnnnnnnnnnnnnnnnnnnnnnnnnnnnnnnnnnnnnntccaagaaagatgtcaaagcttacagtgctatgatatgttgcttagcaatgtacggtctcacagatgagtgcttccaactgttctctgagatgaccacgagtgacaacataaacccaaactctgtgacatttgtgggcattctcggtgcttgtgtacatcgaggtctaataaacgaaggaaaatcttactttaaaatgatgattgaggaatttggtatcacgccatcaatccagcattatggttgtatggttgatctctacggaagatctggtttgatcaaagaagcagagagctttatagcatctatgcctatggagcctgatgtacttatttgggggtctctcttaagcggatcaagaatgcttggggatatcaagacttgtgaaggtgccctcaagcgactcatcgagctagatcctatgaacagtggagcatatgttcttctctctaacgtctatgccaaaacagggaggtggatggaagtcaagtgtatcagacacgaaatggaggcaatgcaaaactatttccctcttttccaactcttttcttaactgttgcacagtttctgaagtaaatacagattctctctacaggtaaagggcattaataaagttccgggatgtagcgtatgttgaagtagagggagtggttcacgagtttgttgtaggagacgaatctcaacaagagagcgaaaggatctatgctatgctcgatgagataatgcagaggctgagagaagctggatatgttacagacactaaggaggttttacttgatcttaacgagaaagataaagagatagctttgtcttaccacagtgagaaactggctattgcgttctgtttgatgaagacaaggcctggaactccagtgagaatcatcaagaacctcagaatctgtggagattgtcatcttgtaatgaagatgatctcgaagctttttagtagagaaattgttgtgagagattgtaatagatttcaccattttagagacgggtcttgctcttgcagagatttttggtgataacaattgcagcaatgtttgtgttggattgaataaacatattactgaattttggaggttttgaaataaaagaataaaataataaaagaactaaaatagccatatatatagtgtctgatcagaggacagtaaaattctctcactcatatatgttttttgtattaaagataatatccatcatttttgatggacaatgcacagtttatacatttagaaggcccttgaaatcagaggcggcatacatatatacatatagactcagtcgagaatttccagtcaaaaacataacatattgttttagcttacacgaaccaaagcctaattaagaactttgccggaagactgcacctgaaaatcagatcgagaagttaccagtgactaagaaagctcctccggcaaagcaagacggcaaaactctatttgtaacttttactttcttatctacaaaaaagacaacactgccaagagaaagagcaacaaaaggacatcagagttgagtttgagtaaatataagataactt

SEQ ID NO: 139444 - DNA, 1146 bp, Arabidopsis thaliana landsberg; identical to SEQ ID NO: 63853

SEQ ID NO: 139445 - DNA, 1096 bp, Arabidopsis thaliana landsberg
agggtgttttgtttgctaaaaaggatttcaacttaccacatcatcctttgattgagagtgttccaaatctgcaggttatcaagttgatgcagagtttcaaatctaaggaatatgtgagagagacctttgcttggatgcattactactggttcctcacaaatgaaggtattgactttctcaggacttaccttaatctcccatctgagattgttcctgctactttgaagaagcaacagaagcctcttggtcgaccttttggaggtggtggtgaccgtccccggtaatcaatttgaatcttcaattctcagtcttgttattgtatcatggttacttgttaagtgttgatatgtgacggtgttgatttggttttatacagtggccctcctcgtggtgatggagagaggaggtttggtgacagagatggataccgtggaggtcctaaatcaggtggagagtatggtgacaaggctggagcacctgctgattaccagcctggcttcagggtaccaaatctctcctttcttgtcaaactcttgtgaacacttttatatgttacgcattagtatcatgcttaattttgaggaaacttctgaagccactatctttcaacaacatgttgtgttcttaggttccctaaatcattttatgaactctatgtctgataagcaccttgtgtaaattgctttgctttaatctgttgtgcacttggcttccctaaatattcgatgctctgccactaggtctttctatcatgagtaatggtggtttcatgattgctagaatgcaatgcaattatgttggtgtgtaattaaatgttttggttatgtacagggtggagctggtgcagttaggcaagggtttggtcgtggagctggtggtttcggtggtggtgctgctggatctgatcttccttgaaaaggactttcttgtttctttttggtcttatttaaggttacatagtacctttgatttgagaacgaatgtgtcttttggaactttgtttctttctctaaaaccatctcacaatatgattgttttttacgttagaattttatgaagaaatgttggatcattacatgaatctttttacactgtc

SEQ ID NO: 139446 - DNA, 1065 bp, Arabidopsis thaliana landsberg
ttaaaaaaaagaacttcgtttctcttcaattccgttaccgtcactgtcaccgttcacctccgtttatctcatcctcaccgttcatcttcttcgatctaactcgccgtcgttcaccttataatggacaccgtcaacgattccttttcgccgggatcttcccgaccttcgccggcgacgctttctcgtgaagattgctggagcgaggaagcgaccttcacgctcatccaagcctggggtaatcgctacgtcgacctcagccgaggtaatctccgtcagaaacactggcaagaggtggctaacgccgttaacgaccgtcactacaacaccggtcgaaacgtttccgccgccaaatcgcagccgtatcgcaccgacgttcagtgtaaaaaccggatcgatactctgaagaagaagtacaaagtcgagaaggctagggtttcggaatccaatcccggtgcctacatcagcccttggcctttcttctccgctctcgatgaccttctccgggaaagctttccgacgtctagtaatcctgattcaactgataacatcccgcaccagaggctatcacttccgatgtccattaatccagttccggtcgctccacgatcggcgatccccagacgtccggcgacatcgccggcgattatacctcacgccggtgacgatttactcggatttcgcgggaatctcaacgcattcgcggcagccgcagcggcggcggcgtgtccggcgtctgaagatgactcggaaggttcaaggtctagatcgagcggtcgtagcgggagtaacaagaagcgggagaggaaaattgagaagaagcaaggctacaaggaagttgccgacgcaattgagaggcttggacagatatacgagagagtcgaggagaagaagaggaaggaaatggttgaattggagaagcagagaatgagattcgctaaggaattggaatgccataggatgcaactgttcacggagatgcaggtacgtcttcataagctccggcgtacctctggctccaaaggaccgacttcctccgcctccgccggtgagacctgaatcctttct

SEQ ID NO: 139447 - DNA, 846 bp, Arabidopsis thaliana landsberg
  unsure (1)..(846): unsure at all n locations
tatgcttcttgttatattttcaggggatacaaaagttctagctgcggtttatggacctaaagcaggaacgaaaaagacgannaatgctgagaaggcttgttttgaagtcatatgaaagcctaaatccgggcagattggttcgtaaatgcatttagtttaatcatgtctggatgttgttttgttgcttgagtatgcggtagaggtgattcttggtttttagattctgactgacttttactttgcataatgataggaaaagttgaaaaggagtatgagatgatattgaaaaggacgatacagagtatttgtgttttgactgttaatccaaataccaccacctcagtgataattcaggtgagtagctatttcattgttgtatatatcgatttatcaacttgagttgtatctgaacttttcattctttgattcctgtgtaggttgtgcatgatgatggttctgtatcctttttatgatccttgccttttggtaaacatttactgatactgtgtcaaacacatataatccagtataagcaatcttggttttagtatttgtagagtttttagcagtgaaagtttgtagtcccatgagctgggagtgtgaatatgttttagtggaataattggtgcattactttagaagacagtttttgctgctttttccttgattcaattctgtttagcttctaccatgtgcgataaatgcagcatgtgcagcgcttgtcgatgcaggaatccctatgaagcatctggctggtacatttacactcttctctaattgactttgtgtgttacttcttactgtttcatcagctttttgttttttcagttgctatatgctgttgcc

SEQ ID NO: 139448 - DNA, 551 bp, Arabidopsis thaliana landsberg
ctctctttctctctacaaacaaaataacgagaacttcaaaaatcaaatgggtctttgtgtatctgttaatcgaaacgagtacgtttcttcgtcgacgacggctaaaatcgtaacaattaacggcgatctccgtgaatacgatgtaccggtgttagcatctcaggttctggaatctgaatcgacgtcttcttcttcatcatcatcatcttcttcttattttctatgtaattccgattctctctactacgacgattttatcccagcgattgaatctgatgagattcttcaagcgaatcagatctatttcgtccttcccatctctaaacgacaataccgtctctctgcctcggatatggcggctctcgctgtaaaagccagcgtcgcgattgagaaagcagcggggaagaaaaatcgccgtcgtagaagcggaagaatctctccggttgtgacgttgaatcaggctaacgataatcggatcgccgccgtgaacaacagaattggaggcgacagacgaatatgatgatgcaaaaaggacagttccgaatagacga

SEQ ID NO: 139449 - DNA, 1242 bp, Arabidopsis thaliana landsberg
ggggccggatgggacgagggacggtacatcccgttgtgcaacacaaagatccaggaagcgaaagacaaccgtatccgatggggggtcgaggtggacgaaacgatgcgggagcaatagagaatttatatgcagctcaccgactagaaagtgaccccatggatctatgacttatactttataatataggcctaaaacatacaagtgatggggaacataccaaagctttagaatatgattatggggcataagaacgaaaccccaatttaccacaagcttttaataatatggctgtgatctgtcattacgtgcgactatctccactatagaaaaaaagaacgaacgctagtcaataaaatactagaaacacaaaaaaagggctttctacataagcatcgcctaaaacgatttttatcagctgtagcaaataactaaacttcatccatcgaaatatgaagtgaagactagatatgcctaaatactttcttttctatggataaaaaaagatttaattgatagaggaagcaccgtaaagatcaattggaaaggttttggaccgacacaacaagagctgtttatttatatcataatatgagataaatcttaggaatctacttatgtaatagagtaatccccgaaggtattgagcagcggtgtagcatcagatcctaaagacagtaagtctttttcttttttatgaagtatgaaaaagtctttttcaaagattctatataaatttttatatgaaagcgggatagttacctttcagaaaattctaatatctaataacagtggacatgcttttttttctgaaggtaggagaaaagataaaacttattatattaattaatatattaattaaatcaaaatgaaagtttgaaactcatgtaattactctcttttgtttaatccaagaaaaacaaaaaatctataagaaatctcattcaattagacattcaattagatataaagttcaaagtaggttaaagttaaaaaactggtacaccaaaacaaaagagttggttgtcgagccgtatgaggtaggaaactctcaagtacggttctcagggagggaattgatccgcctattccgaccgtggagaacaggccattcaacaaggagattctgaaatggcggaggcttggttcgctcaagccgctgagtattggaaacaggctataacgcttactcctggtaattatattgaagcacagaattggttgacgatcacgaggcgcttcgaa

SEQ ID NO: 139450 - DNA, 389 bp, Arabidopsis thaliana landsberg
acctccgtcgcaaggaacctgtaaagggccacaaatagtggagccaaactcttcttctgccttctccaataagacctgaaagattggatgtttgagataatccaagggtaaaacaaacctcctgccttctctggtatacacagcgaagtgtcctttcttacacttcctccacttctccatcaaatcggtgagtctaagcctcgagcaagatcttttcttcagagacatatagagagctttgatatgttaccaatataataccggtgtgtatacggttagtatgttactgtctgaactatacttgcctctctctccacatatatatactataaaatctgattagtgtatgtggtagttgtcttgcggctcaaaaagaggattaggaatgt

SEQ ID NO: 139451 - DNA, 1841 bp, Arabidopsis thaliana landsberg
ggatgtaagaagagaagtgcagataatgcatcacttgactggtcaactaaacattgtggagcttaaaggggcttatgaggataagcattccgtgcatttggttatggagctttgcgcaggtggagagttgttcgataggattattgctaaaggacattactcggagagagcagctgcttcgttgctaagaacgattgttcagattgtgcatacttgccattccatgggggtgattcacagggatttgaagccagagaactttctcttgctcaacaaagatgagaattctcctctcaaagctactgactttgggttgtcggttttctacaagccaggttttttcactggaatcatcaaaagcccattcctgctacttgaaccagcatcgttgtaaaccctgcgtgacaaataaaagaggtcatggttatactcatataaaatttgtttccgctgtgttacaggagaggtattcaaggatattgtggggagtgcttattacatcgcacctgaggttttgaaaagaaagtatggaccagaggcagatatttggagtattggtgtcatgttgtatatcctcttatgtggtgtcccgccattctgggctggtaaagatattccacagttttttctttatgtgtaccaaaagaataaacatatctagagatttttctatatatattcatgtcttgtgtaaattacctgatcacagagtcggagaacgggatattcaacgcaatccttaggggacatgttgatttctcaagtgatccatggccatccatctcgcctcaggcaaaggatcttgttaagaagatgctcaactctgatccaaagcaaagactaactgctgctcaagttctcagtaagcatctacaaaatatataaaaactgtaaaagcataacaatatattatctctaatgttatcttcctttgtaaagaccatccatggatcaaggaggatggagaggcaccagatgttcctcttgataatgcggtgatgtccaggctcaaacaattcaaagcaatgaacaatttcaagaaagttgcattacgggtaacaatcatatatcccttacccaatagaatatgactatcagtagagtatcctaacctagaaacctgaaaccattggacaggtgatagcaggctgcttatcagaggaagagatcatggggttgaaggagatgtttaaaggtatggatactgatagtagtggaacaattacactcgaggagttaagacaaggacttgctaagcaaggtacaaggttgtcagaatatgaagttcagcagttaatggaagctgtgagtccttcttgtacttgcaagagatttagctttagtcaaatgccgagcaacagagtagggaggggactcaccactaattttgtgtttttttgctctgtgtatctacaggctgatgctgatggtaatggaacaatagactatggcgagtttatcgcagccacaatgcatatcaacagacttgacagagaagaacatctttactcagccttccaacactttgacaaagacaacagtgggtaagtacttgacagtacagtttgttatataactgattccagactttaatcatgaatatgaagcttatgaaacaaaaatccacctcgctctctgttcccagatatatcacaatggaagagctagagcaagccctacgggagtttggcatgaatgatggcagagacattaaggagatcatttccgaggttgatggagacaatgatggtcggataaactatgatgaatttgtggcaatgatgagaaaaggaaacccggatccaatcccaaagaagcggcgtgaactttcattcaaatga

SEQ ID NO: 139452 - DNA, 2899 bp, Arabidopsis thaliana landsberg
atgcaagaaccgcgtcagaaatcaagcatgttacaattggttgttgtttccaatgtggatgtactctacttcaaaatccaaagtaatttcagggtttcaagagcacattggtgattcaaccacggcacacaaataccaagtaaggttcctaataagaagaccgaagaacccatacatcgagaagagaaaattactgtagaaggctaggaaacggaagaaaaattaagtgaaaattgactaccttgaggacgaattcaaagagcaatgtcgaaggagtgatcaatctcctggtactgcgagatagttcaccgatcggagatagattcaagaacagaagagtcaacttcaatttctaaacgcaaactcgaatttgagcgattgagctgaaatcagtagaagaattacgcgacattttgtgacaaggatcaaggaagaggagcaggtggacagctgctaaccgccacgaaataaaccgggtcgggttatcaaataatcgggtcaatatctgaaacgggtaaaccgaatatttctagatgctccaccggttaagtcagacatatccgtctgaattatacgttgtgtgaatgcgaatctcaaataacttgttcaatcattcagttagtatcttactttattactcggttaattattaaccataaataaaaataatgggagatagtgataatgacacaacgttaaaagatctaagtagttaagtagtttagatttgataatataatgggaagttagagataaccggtaaattagctatagtcggtcggttagcattccggttaacccatcaatggctcgtattcacactagtcgcgcgactaactaatagagaaaaagcttttgcgtgtttgttgttgtctccatcgctcgtttgtttcttcttcagccatatcggaaaaaacgatatccgacgagccattcggtgtttgttccgagaagctccgatcgatctgtgttagggtttttctttttccgccttatgaatctctctatcgcggtttcattagattcagtttaactcgagtgatgaaaccaatctccgtgctagaggtaaaattctgttaggttttctcttttttgtttttatgcttcgtaccgatcgatatgattcctggttcgttttgtttccaaatctgcagctctttgatcccgtggctggtaggatattacggcgtttgtagctctggtatggcttttgttgttcgtttggttctgattttgaaaattttcgaatttttaatcggaatctgatactagttcatcgttttattgttacagtcgtcgtggatagagttagaacgacgaaatcagccttggtttcctaactggtatttgttctttagcctatgttttcaatttttctcttccggttttttggtggtttgtgaaactacttaatcttcttgattacctaattaatcatatcattgtttacatcatttattttgatatttgtagttatttggcatttcagtatctgaatttttgcaacaatgtctgagctaaaagagcgcctgcttcctccaagacctgcttcagctatgaacctcagagatgcttctgtgactcggccttctgcttctggaagacctccccttcttggagttgatgtcttgggtctgaagaagcgtggacaaggcctacgctcttggattcgtgttgatacttctggtaatactcaggtcatggaggttgacaagttcactatgatgcgtaggtgtgacttacccgcccgtgatttaaggctgcttgatcccttattcgtgtatccctctactatcctaggccgagagaaggctattgttgtcaacttagagcagatccgttgtattattactgcagacgaagttctgcttctgaattcccttgacaactacgtgctgcgctatgttgttgagttgcagcagagactaaagactagtagtgtaggtgagatgtggcagcaggaaaattcccagttgagtaggaggaggagcaggagttttgacaatgcttttgagaattcatcccctgattatttacctttcgagtttagagctcttgaaatagcccttgaagctgcttgtacgtttctcgattcccaggttagtaacactttagcttcgattttgtttccccctcagaaaatatagactaatattgggcttggatttgactactacacgctaagttgatttaattttatccttctctataggcttcagagttggagattgaggcatacccgttattagatgagcttacctcaaagatcagtacactaaacttggagcgtgtgcgtagattaaagagcaggcttgtagcactgacaagaagagttcagaaggttcgggatgagatcgagcagctaatggatgatgatggagatatggcagaaatgtatctaacagagaagaagaggagaatggaaggatctatgtacggtgaccagtccttattgggttacaggtcaaatgatggtctatctgtttctgcaccggtgtctcctgtttcttctccacctgattcccgaagacttgataaaagcttgagcattgcgaggagtcggcatgacagtgcaaggagttctgaaggtgcagagaatatagaagagctagagatgttgctggaagcttactttgtcgtcattgatagtactctaaacaagttgacatcggtactttaatggctcctctcatttttacttttgatctttcttcgctagacagctttaatcatctgtgttcctctctttactttacagttaaaggagtacattgatgacactgaagatttcattaacattcaactggtaatacctcaaaattccatcatccacagctgatattaatccagattgagaatgcataagagtcatgctgaaaacctcttcaatatctgcagg

SEQ ID NO: 139453 - DNA, 5654 bp, Arabidopsis thaliana landsberg
tgtatcggccataggagaggactcagttccttcttcgaaagacatagaagtgaagatcttccccggacgtttcttcccgtcgggaaaagatcctccaagcaaaactctctggtacttaaactcaacgttcacgtctttcaccatctccagcctctcaatctctccaaccacggcctctttcccgctttcctcgatccatagaacaccgaagtcagtcggatacttcgtcgctgggttaatcctctcgatccaaccccaaccaccggatcggaccttcgattcgaggtaaattcgatgatctttcgccggcttatactgcttaaatcggattatatagttagtcttcgtttcattctcagactccaaacgagttacgttctctggattgagattttgttgctggggatggtaagtgctgggacggagccagaagagagaaacggagagaaatacgacgatgatacaggatctgtaaggatatgaagaagcttctccgagcaccttcatggcgatggttgaattaggggtttgatagcgagattcattcacatacgtccatgtcgtcgccgggggaaatttgcttcactcctatgtaactaatttgattttctgacctctgatgaacatactctgatggtggagcgacttttgaaccggcttgttggtttagcttaagcaaccggttcttaagttcggtataatcttttcaacaattcggtttattgttcagatctatgaattttggttcggtttgctttttttactttctttttcagttttatcgtcgccaaattagtcaaaggtcgtcaaagagaagagaccaacaccaaaaatacagtacagacacttcttcacttgggtcggagttgttttgaagattctaccgttggtgcatcttcatgtcttttccacttcaagagtttcaaatttactctgaattgagcaacgaatgtttccgatttccaatttaagatcaagatcgttggaatttatgtctttccagcttttttttttgttctcgtgaatgtgtcggcaggattagtttttgaagcttgttgttaaatacttgaacttgaaggttttgtgggtttgaatctgtatagttccttctgtcatggaggttagatctgagctccgaaaacagtcacgaagtggaaagaggaaatgggctattttagttgggattgtggctcttactcatatcttgttattactttcatatggtgacgccttaagatatctgttgcctgatggtagaagactgaaacttcccaatgagaacaatgcgttgttgatgactccatcacgaaacacacttgcggttaacgtttctgaggattctgcagtctcggggattcatgtcttggagaaaaatgggtatgtttcaggttttggtctaaggaatgagtctgaggatgatgaagggtttgttggaaatgttgattttgagagctttgaagatgtgaaagacagtatcatcatcaaagaagttgctggaagcagtgataatctttttccttcagagactactgtaatgcaaaaggagagtgtttcaacgagtaataatggttatcaggtgcaaaatgtgacggttcaaagtcagaagaacgtcaaaagctctattttaagtgggggctcctccattgctagtcctgcatctggaaatagttccttgcttgtttctaagaaagtaagtaagaagaagaaaatgcggtgtgatcttccaccaaaatctgtgacaacaatagatgagatgaatcggatattagcaaggcaccgtagaacttcacgagcaatggtatgtgtgcagctgtcatttctattttcttttcacctgtggaactttagttatgatgcaattaagagatatactacttccaatgtagcgaccgcgttggtcttcgaggagagatgaggagatattgactgcaaggaaggagatagagaatgctccggttgcaaaacttgaacgggagctctaccctccaatattccgtaatgtttccatgtttaaaaggtaaaagtgcagaacttagagctaattctgaattaaatttgctggtaatgaaaaagagtaatggtatatacacgaattgatgaatcctcagtagtatcattagtcctatgtggatgaaactttagcactactcctactgtaaaatccgcatcatatggtcctatgttgagataattttctgttcggaacttagtactgtgaagagagtaaaaaggaaaagaaagcctgagttcatattatatgtttagttcacaaattcgttctgtttggtagtgtcttcttataaaaggtaatcttgacatatccgattcagttatgtgcctcaggagttacgaacttatggaacggatactcaaagtttacgtatataaggaagggaaccgccccatctttcatactccgatactcaagggattgtatgcatcagagggatggttcatgaagttgatggaaggaaacaagcagtacactgtaaaggacccaagaaaggctcacttgtactatatgccatttagtgcacggatgctagaatacacactttatgtgcgtaattctcacaaccgcactaacctacgccagtttcttaaggaatatacggagcacatcagttccaagtaccctttcttcaatagaaccgatggagccgatcattttcttgttgcttgtcatgattgggtaggcatctgtttcattttttaaagttaactaatcattttttctataggtaacaattttctatgttgaatttggcttcactaacaggcaccatatgagactaggcaccacatggagcattgcattaaagctttatgcaatgcagacgtaaccgcaggctttaagattggaagagacatctcactccctgaaacatatgtcagagccgccaaaaatccgcttcgtgatttgggtggaaaaccgccgtctcagaggcggaccctggctttctatgctggaagcatgcacggttacttacgtcagattctgctacagcattggaaagacaaagacccggacatgaaaatcttcgggcgaatgccatttggtgtggcgagcaagatgaattacatcgagcagatgaaaagcagcaagtactgcatttgtcctaaagggtacgaagtcaacagcccgagggtggttgaatcgattttctatgagtgtgtccctgtgatcatctccgacaactttgtgccacctttcttcgaggttcttgattggagtgcgttctcggtcattgttgcggagaaagacatcccgaggttgaaagatatcttgttatcaataccagaagacaaatacgtgaagatgcaaatggcggtgagaaaggcgcaaaggcactttctgtggcatgctaaacctgagaaatatgatctgtttcatatggttttgcattctatttggtataacagagtgttccaagcaaagcgtagatgatgttactatggagtgctgatggtgaaagtttagacccaatgtgcttgtttgttgtgtgagtaatgaatagctacaaagttgactctacctttgtaaatattgactcataattttgttctaattcgacttgatgttgggcctattcataggttttcaggcccaccataacaaccctacaggcaacaatgttacaagtgtgcctgaaacgttgacgtttaagtttaagagaacttcgctttagagtttagaccagttccccacaaagctcgttgtcgtcatcgcgcgagcttgaaccaaaaaaatcatgaacagtgagaaggaagacgagccattggaagagatcggcgattcgaataatgttctcgatctcactagctatcagctccacagtctcgatacggtcgagttaccgccgaacctgattgagctggaccttacggcgaaccgtttgtcgggattggactcgaggatcgctcagctctccacgcttaagaagctttctctccgccaaaacctaattgatgattccgccgtcgaaccgttgtctcactgggacgccttgtccgatctcgaggtgattctcgactctctgatttatcttttgagtgattttgtaaatggtgaaatatctaggcatctgattttgtttttggccgtggaacgttatgattttggctaattgccttttgcatttcacttttgattttcactagaattgaaaattggcattgatagtctgagaggcatagttatttgtgggcagtggataaagaagagtgtttcttgctataatttatgcaggagttagttctcagagataacaagctagcaaaagtaccagatgtcagcatattcacgaagcttttggtttacgacatatctttcaatgaaatcacttctttggaaggaatatccaaggcctctagcacactgaaggaactctatgtgtctaaaaatgaagttaacaagattatggagattgaacacttacacaacttgcagattcttgaactggggtctaatagattgcgggtttgtccctccctcctctttgatatttttttattctctttccagtgcttcagcaatgaatttgaaagcattgaggtttcaggtgatggaaaatctggaaaacttcacaaaattagaagaactatggctcggaagaaaccgtatcaaagttgttaacctgtgtgggctcaaatgcataaaaaagattagcttgcagagcaatcgattgacctctatgaaaggatttgaggtgtgcttcatttacctttctgcagatatactcattcctcatgccagcatttttatttcttctgatgcttgaaatattatgtacccaggaatgtgttgctcttgaagagttatatttgagccataatggtatctccaaaatggaaggcttgagtgcattggtcaacctacgggtattggacgtgtcgaacaacaagcttacttcagttgatgacattcagaacctcacaaagtatttcacctttcccttgcttcagaccgatttttgtcttttggtgatttgttttctccatcctgactttaacttaacctataggttggaagatttgtggcttaatgacaaccagatagaatcactggaagcaatcacagaagctgttacaggatctaaagagaagcttaccactatctacctcgaaaataacccttgtgtaagtttaatcataatctttagtcacttttcatcaaagtcttgtcactcagtatcgtaggatctcctatctttggttttgcttttgctttttgatatggaatgtcaatttaatggtacacagagtgatcccattgctggtcttgttcaatgtgcatcgtaatttagatttttttttttccgtatatattgataatgcataagaaaccttgggtttttctataaagtttcttatgcatttaagtaaacttgagtaccacaacttggttgtagttttttgcataagtcaattcatttatttgggtgagtcccagtgtcttctataaattatcaatttctttggctcagaagatgtgaaaagtaattattttactgagagccattaaacgttatctaatataagtgtatcattttctgttgtccatctcctctcaggccaagtcttctgattatgttgctgcggtcagacaaatcttcccgaatgtggagcaaattgattctaacttatttgcttag

SEQ ID NO: 139454 - DNA, 5023 bp, Arabidopsis thaliana landsberg
atggcccactccgtttgtttcgaccccgccgtgacggcgaatctttccctctcagcgtttcacgcaacagtaagtaagttttggcggtaaaattgggtcacagatgggtacgtgtcgatttaatagtggttgaaagcgcgcgaatataattgtatacgtatgtgtatgtattctccgtgttgtttttcccgcgcgagatatatccttttttagggtttgccgcataatcagaccccattctagagagagaagagggaagtcaggtgaagatagagagagacactgagaggagggaaaatttgtacggttttcggagatctctgtgattcctctgaatttgtcgaattttttggaggaggcgttagaagtcgggcttcttaaaaatcagatcttctgctcagctttaatcggcgacgtctggtattgggatctgtgacacaaaaaggtaagatctttctctattgcctatcctttgatttgaaatcttatcctctaggtggtttatctgaaattttctattgatatttcgctattcgattgtaagttggtgagagaattctccaaaaacaaaaaagagaaaaactttgaatgaatatttaagataacatctgggtaaaatttttccggagtggtgggttttagattatgccccaatttctcttctttttttcccccaaattttgtctttctgccatgttttgggaaattgggagtttgttttctcatgtctgttagtgtgttcttccgaatgggttgggcatggttcctattgaatttcagtgtgattaaattaacaaatctctttgcttgaaaagtccctttttcttcggctttcagttagcagtttaattggaagtaaaattagcttgattttgcgtgattgcagctgcgttggagactatggaagaagttcagcctccagtgaccccgcccattgaaccaaatgggaaaagaagcgaagcctctctcttggacatatgcgagggtcactcttctctttgctgatctagctgcatttgattagctgaagataccatttgagttctctcggaaattttgaggactagctctaatccctgtagttgatttcttattgcagaaaagttctgtctcttgatgggagcacttgcgatgaagctttgaagttgtttacagaaaccaaacgaattttgtcagcaagcatgtctaacattggaagtggaacggtgaaatacatttttcctctaacttctcttttatcagttaactgtggtttcattatgactaaatccttttttcttcttcttattagcgggaagaagtagagaggttctggtttgcgtttattctctattcagtgaagaggcttagtgtgagaaaagaagcggatggtctgtcagtgtctggtgataatgagtttaatctatgtcagatactgagggctctgaagctaaagtaagtagtgttcaattcttccttccttgtcattcttaaattcatttgtagtgacgattttcctcttttctgtttatagtattgtggatttttttaaagagttacctcagtttgtggtcaaggctggatctgtactgggtgaactttacggcgcagactgggagaacagacttcaggttttgactaacatcttttaaatatacttctacttctattatatcattgttaaatatgcttctattaactaatttttacttactaggcaaaggaggtgcaggctaactttgtgcatcttagccttctaagcaagtgagtttagctcccttcctattttacatttatctttgttttgtgtaagaatagttattgacatagatttcatattttggacctgcaacttagaagcaaattttcttcctatgcaataatcagaatatgggccttgcaatattccttcaattttaaattaattaagatttagagttacagatttctggttttcatgtgattatattctgtgaattgttttaaggacatgttaaagtatgatgtttttggtacctttccttggtaacagatactacaaacgtgggttccgggaattctttttgacatatgatgcaaacgcagaaaagaactcagcaaactcttctacctatttgctggatagttatcgttttggatggctactctttttggcactccgaaaccatgcgtttagtcgatttaaagacctcgtgacatgctcaaatggcgtagtttctatattggttagtgactacctgtggagctctccctaatctttcattcattttagtcttgctgtacattattacgtgaaagatgcttcgtttaatataacgcaattgaagtataggctaactccttttcatgttatcaggctattttgatcatacatgttccttgtcggtttagaaatttcagcatccaagattcttctcgctttggtgagtgtttatcttttcttctatcccgataaccatggcaccatagaatgtttatcatctattttcatttatgtgatgaatctcagttaagaaaggtgacaaaggtgtagacttggttgcatcactttgcaagatatatgacgcctcagaagatgagttgaggatagtaattgacaaggcaaataatttggtagaaaccatactgaagaaaaagccatctccagcatctgagtgccaaactgacaagctagataatattgacccaggttggtctaaaatcattttccttcttcaattaaagaatcatgtgagttcattgaacagttgcctgattgttcttcgaatctatatggtgttttactgcagatggcttgacctactttgaggatttactggaagagacgtccatctcaactagcttaattacacttgaaaaggattactatgatggtaaaggcgaacttgatgagagggtattcatcaatgaagaggatagcttacttggatctggaagcttattgcaggagctgttaatattactggtgttaagaggaaaattgatgctttgagctcacctgcaaggacatttataagcccactttctcctcataagtcgcctgctgctaagacaaatggtattagcggtgctaccaagttggcagcaacaccagtgagcacagcaatgacaactgccaagtggctcaggactgtcatatccccgcttctgccaaaaccttctcctgggttggaacatttccttaaatcatgtgatagggatataacaaatgacgtcacacgaagagcacacataatattggaagctattttcccaaatagttcccttggtgcccaatgtggaggtggaagtttgcaagctgttgacctgatggatgacatatgggcagagcagcgcagattaaaagcttgtaagttatactacagagttggggaggcaatgtgtaaagcagaagctcagattttgcatgcaaataatctgaactctttattgacaaatgagaggttccatagatgcatgcttgcttgctcagctgaattggtactggctacccacaaaacaattacaatgttgttcccagctgttctggagaggactgggatcacagcctttgatctcagcaaggtaattgagagtttcatacgacatgaagattctctgcctagagagttgagacgacatctgaattcactggaggaacggcttctagagagtatggtatgggagaaaggctcttcaatgtacaattctctgattgttgccaggccatcgcttgcattggagataaatcagctcggtttactagctgaaccaatgccatctctggatgcaatcgcagcacttattaatttctctgacggagcaaatcatgcatcatctgtacaaaagcatgaaacttgtccaggtagttttatttgtttctgaattaaaccagttgtccaacctgctgttaatggtatgattttcttaccaaaaattgtcaaatttgctgccatataggacaaaatggggggattagatcgcccaaaagattatgtactgattaccgcagcattctagttgaacgcaattcctttacatcaccagtaaaggatcgtctgttggccttaggcaacgttaaatccaagatgctgccacctccgttgcagtctgcatttgccaggtacattttgagtaactatgagtagaaatggagagttagtttacctatctagttgtccctgtacttgttaagtaacctcttcggatttatgtctacagcccaacacggcccaacccaggaggtggaggagaaacttgtgcagaaactggaatcaatattttcttcacaaaggtaggtctgtgagatctttggatctactactaatcgtttggttagatgatgtactacaaaacacggtatgattcttcattttcggctgggaattgtgttaaatgtggtggctcttcccagattaataaattggctgctgtaagaatcaatggaatggtggaaagactacaactttcacagcaaataagggagagtgtgtattgtttcttccaacatgtacttgctcagcggacttctcttttattcagtcgacacattgaccagatcattctctgttgcttctacggagtggccaaggtgagtagagtgattcaaagggtttaactatatgtcatctggtttacaatggcttctcttacacttacactttttccatgaatcaccttgtagatatcccaaatgagcctgactttcagggaaatcatatacaactaccggaagcaaccacagtgtaaaccattagttttccgcagcgtttatgtggatgcgttacaatgtcgccgtcaaggggtatatatacactcttaaccttatgctgaaaagtttctttactcggtggagaagactaaatttgtgacaatgacttgaacagagaatagggccagatcatgttgacatcatcacattctacaatgaaatatttattcctgccgtaaagccgctgctggtggagctaggtcctgtaagaaacgaccgggctgtggaagccaataataagcctgaaggtagttaagaaaggccagatacttgttagatgtaagctttgtctat

SEQ ID NO: 139455 - DNA, 1984 bp, Arabidopsis thaliana landsberg; identical to SEQ ID NO: 8268

SEQ ID NO: 139456 - DNA, 2880 bp, Arabidopsis thaliana landsberg
cggtcaagatctcaaactacggcaccaccatcacctctttgtctgttcccgacaagaacggtttgttctcttcttcctcctttcaatgatgatctctgttttgtctccaattcctaatcctctgattatcatctttgtttttcttatttgaagggaaactgggggatgtagttctcggattcgactcggtggatccatatgtggtaatttctctcgaattcacctaatccttgaactgatctcgacatagattcaatcaatctgatcgaaactctaatcactgcctctggatctcatgaatagagtctgaatcataatttaagaaatgtatatggtcattcatgtaccttgttgaatgactttgtgatgaactatcaaaataagatggactttgtaacaatgttaatgaatatgtgtgttttatctatgaatatgattgttacagaaagggcttgcaccatactttgggtgcattgttggtcgtgtggcaaatcggatcaaggagggaaaattcagtctcaatggagttaactacactttgcctatcaacaagcctcctaatagtctccacggtctgtataaacaattctcttctctgtatactttctctataactttctgtgaactaaataggatttggaccgtaaaatgttactctatctgtacaggtggtaacaagggtttcgataagaagatatgggaagttgcagggcacaagagagacggcgaaaaacctttcatcactttcaaatatcacagtgccgatggagaagaaggtaatgacatatcctttctctagcatttgatttctgtgggattagattagctatataatgttttgcggttcccctccacaggttaccctggtgcggtttctgtcacggcgacatacactctcacgtcagccacgacgatgagacttgacatggaagctgttccagagaacaaagatactcccatcaacttagctcaacatacatactggaacttagcaggtcatgactcaggaaacattctggaccataagattcagatatgggggtctcatatcacgccggttgacgaatacacagttcctacaggagagatcttgcctgtaaagggaactcctttcgatttcactgaggagaagcggataggcgagtctattggagaggttggtatcggatacgatcataactacgtgttggactgtcctgatcaagagaaggaggggctgaaacacgcagcgaagctcagtgatgctgctagctcaagggtactgaacttgtggaccaatgtgccgggaatgcagttttataccgggaactatgtgaatggagtggttgggaaagggaatgcggtttacgggaaacatgcgggtgtgtgccttgagacgcagggattcccgaacgcgattaaccagtcgaatttcccgtctgttgtggttaaggctggtgagaagtacaatcacacgatgctgtttgagttttcagcttgagtttatagatggacgttttaggtgttagatgatgggaataaagggccggttcatttgattcactgggctggaaaaagagtgattttaattttatctctttgggggagaataataaaaccaaactgtttacattatattaaagttactttattttttcatatcttctaaacatttggcccatttgtgaaattgtgaattgtgcagcgaatgaatctcccattgttcacatgaacttggaaaaaaagagcaattagtgtatttgagtaattctgatggcaattatgtctacacgcatgtcttttgggcggtgagaaacacgcgccactaaagaagcaaaagcctatgggccccaaaaaatatcaaccatccatctctgtaatctcttcgtcctcccttaaatttttgtttcattatttttttcactagtaaccacggcttgtgttgtggcttaaacacagaaatggcttctttaccgttcggagtttcgaatctatgcagaaatcaggaggttctgtctgcgtctgtaaggcttcttccggttgggcgacaaaccacaggttctgttctcccccaataatcgttttcgataaaacttaaggatttcaagctgaagcgattgtaaaactctcctgtgtttgttgtgatgatgcaggattcggagctgcgaagaaagtcttatatagattcgagggacatagattgtcatcatcagtagaaaagggagagaaacagagaatgagatgtagagttagctcaaactctactgaaactgaagacgattctgccacaaaaaccaaggtctgcactccatctctttgaatttacatcataatctatcgtcgtagtagtcctgaagcaaactctgttgtgaaataatttggttatagacgacgccgtttggttacacgaggaaggatgttatattgataggagtgggagtgactgcacttggtatcgggctagagagtggacttgaggtaattctcattatctacatactgatgatatcaaatgaatctgttatctttttctttgttcttctgagtactcattttgtgataatgatatggtgcagtatgtgggagttgatccgttgcaagcggggaatgcagtacagctgatactggtgcttggtttgactttgggttggatttcgacttatatctttagagtcggtaacaaggagatgacttatgcccagcaacttcgtgactacgagtctcaagtcatgcaggtttctgctttttcgttaatctctttatcagggtttatctactttacctaacataagtttggtttggttggttggtaatgagcagaaacgattggagagcttatcggaggcagagttagaggcattgatggcacaggttgatgaagagaagaccaaggttgagtag

SEQ ID NO: 139457 - DNA, 1603 bp, Arabidopsis thaliana landsberg; identical to SEQ ID NO: 5926

SEQ ID NO: 139458 - DNA, 3780 bp, Arabidopsis thaliana landsberg
tccgtcagtgaagggtacaggtgaaattggagtggattatgtggctgagcctcttgacgcttgtcaaaatcttatgaataaaccagaacagagctccaatgaaacttctccttttgtgttgattgttagaggaggctgtagttttgaagagaaagttagaaaagctcagagagctggtttcaaagctgctattatctatgacaatgaagaccgtggaacattgatagcaagtatgaaaatttatgtcttgatcttgtgattctgttgtttctacattttgctgaaagttttgagatttgcagtggcaggtaactctggaggtataaggattcatgcggtctttgttacgaaagaaacgggagaagttttaaaggagtatgcgggtttccccgatacgaaagtttggttgatcccaagttttgagaactcggcgtggtctattatggcggtttcgtttatctcgctgcttgcaatgtcggctgttctcgctacttgtttctttgtgcgtaggcatcgaataagaaggcggacatctcggtcctctcgagtgcgtgagtttcacggtatgagccgccgcttggtgaaagcaatgccgagtcttatattcagttcgtttcatgaagataacactactgcattcacttgtgctatttgccttgaagactacactgttggagacaagctcaggctcttaccttgctgtcacagtgagtacattgcatacaaaatcctgtaactcagggcacatttgttagaacttagaactaactaacaatttctgattctgtttttgtgtgtatgttttcagagtttcatgctgcgtgtgttgactcatggttaacctcttggagaactttctgtccggtgtgcaaacgagatgcaagaacgagcacgggagagcctccagcttcagagagcacgccattgctctcatctgctgcatcgtctttcacttcttcctctctgcactcttcagtcagatcatctgcactattgattggtccttccttgggctcattaccaacttcaatctctttctctcccgcatacgcaagctcatcctatattagacaatcattccagtcttcctctaaccgtcgatcacctccaataagcgtaagtcgaagctcagtggatctcagacaacaagcagcttctccatctccatcaccatcacagagatcatacatttcccatatggcttctccacagtcactaggttacccaactatctcccctttcaacacgaggtacatgtcaccgtatagacctagcccgagcaatgcatcacctgcaatggctggatcatcgaattatccgttgaatccactgcgttacagtgaatcagctggaactttctctccatacgcctctgcaaactcgcttccagactgttagaaagtctacagaaccaaccactcttggttcaggtcatataagattatttcttttgcatttgagttttactacgaaacgtacttctggcgtttgtgtgtggtgtgtgtgtgtgtaacgatgcttttatagtcttttggttgagatgaaacatcatcggatttaggttagagagattttaacacttcgacaattacacaaactcggttcctttgtacaaagaaatatgagcttatgtatatacacgtctctttccttgttattactatctgatcactcttatctctatccgtttgcattgatacgatcctatctagtaaataggcccagtaggcctaattaaggtccagtaacataaactacaccattttagggactttgtaatttggtaagtgggaccagtagtggagaaactgatttgggctaaagtgaatgaagaaaactccatcccaccgttggccggtctattctcctccggcgtcgttgaggatctccggtggtttaaggaatcaatcacaccatgccaatgagatacctcaacgcaatggccgctctactaatgatgttctttactctcttgatcctctctttcacaggcattttagaattcccatctgcttcaacttcgatggagcattcaatagacccggaaccgaaattgtctgattcaacatcggatccattcagtgatgttcttgtagcttataaaaaatgggactttgaagtgggttgtgctcggtttagggagaatcataaagatgcgattttgggtaatgttagttcgggttctttacaagaatttggttgtggtaagcttaagatgaagcatgttaaggtattggttaaagggtggacttggattccggataatttggaaaatttgtattcttgtcgttgtgggatgacttgtttgtggactaaatcatcggttttggctgattcacctgatgctttgttgttcgagacaacaactcctccactacaggtaataaaattgcttgttgctaatcttgtcaaagtttgcgttttggaaagtagttatagatttggatgattgggacagattagatcacactgtctgttttttcttaccccaaattggatgtgatcttgtgatgtattcttcactctagcagatcttttagttctatgactcactaaaagatactttttcattgttgtctatatggttcaagaattttggtttgtaaagtggaaaatttcagagtttaattgtctacgtgagcttattgtaaaccagaagaagctttgtgtactgctattcttgttcttagtcaattcatttttgaaagttggacatagatatggataataaaggcaaactaaaatctcctatgttcttattttcccttcagtgcctgcttcactatagttttctttcaataattggatcccattgatgctgagtttcttggtttgtttccttagagacgtgttggagatccgctccgtgtgtacatggagctagaggccggaagaaaacgctcaggccgtgaagatatattcatcagctaccatgcgaaagacgatgtccaaacaacttacgccggttcgctctttcataataacagaaactatcacatctctccacataaaaacaatgtaagtaacgttttatacacccattccatactgttcttctttcatttcatcgttttttaattcggttgttaaacattgcacaggatgttctggtgtattggtcttcctcaagatgcctctctcacagagatcgtctagcaaagagcctactcgatttgattccccaccactcctttggtaagtgtcttaacaatgttggtggcttggactcagctctctctaggtatccagaatgtgtcgctgagcacaacgctgaagcaaaatggtacgatcacctccactgcgctatgtcacactacaaattcgtccttgcaatcgaaaacacagctgttgagtcatacgtgaccgagaagcttttctatgcgctcgactctggttctgttccaatctattttggggcctctaacgtgcaagactttgtccctccgcattccgtgatcgatggtagcaaattcggctcgatgcaggagttggctgcgtacgtgaagcggctcggtgatgatcctgtggcttactcagagtaccatgcgtggaggcggtgtggactaatggggaactacgggaaaacccgtgcggtgagtctcgatacattgccatgtcggttgtgcgaagagattagcagaagaggtgggaagaacgccggagtttgatgagccacatgtggtttcatttagtgtgggtttatgtaaatgtgatcctatgatctgtttctgttacatatgataacttttttgtcctatatagtctcagatcatcaagtaa

SEQ ID NO: 139459 - DNA, 2400 bp, Arabidopsis thaliana landsberg
ctggggcaacctcgtgtgctgccagtaacgtcaggcaggtaagcaagtctctgatcacatactaaaaagactttaagtgtacttgtaattctagtcgttatgttcctttgtgataggagttccttgtgaagaatgcagacgtgactgagctcatggcttttttgggccttttcggcgcaattattgctgccattcagatgtatccttcaaacaacaaggcaattatttttttatttatcttaaacttctatgaacattttccctgacttgttcatagaagcatatttgaacgtggtgcagtcagagctattcagtggtcaactgaggcggtaagcatgctgctacactccctttcaatctctgcaaatagaatgacttctttggaaaattaatttgtggttccagattttactttacattggaggcgcactcgggttatttctgttttacacattaatcacaatcttaatcaaggtatgtgacaaaactgatacaatacgatcaatactctcttttccatgttaatgtctctgaaactgtaacatcttttgtaatgtgacctctcagaataatggttcaacaatgttcaacctctcgttgctcacatcagacatgtgggctattttgatccgcacttttggttaccacgaaaaggtctgcagattatgtaaatcaaacatttaggaaaatcttgtaatttctgtctgtagaaatcagctcatgagatccaatggttatgtatgttaatgtcaggttgattggctctacttcttggcatttgctactacagctactggactgatcatatactcaatgtacagtcttttctaatctttcttcaagtagagtatctgttctgcactcacatgaagatcagtgttcttgacccattgttgatattttcaggaaagagaaagatgaggaggaacaaagaagtggagaagtggttagtgagaggaggaagctgttccatgaggaggatggtgactcgctccacagcaaccttatagatgcttccacctgaaacctaatcaaatcaaagcctctggtttttacttgtctataacattgactgtgacttgtgggatatatgattattatttttcacacttttgggttggaggagtccacaagtttgtacatttctctcccaaactttggtaactgtaaagaaggaaaaatgtatttgatacaaagattagtttcaaatggtgttagtgaagtaaataactgtacctcaataaaatataatactaattgactatctcaatcccaagaactaaaactcagagttgaaaagtcaaacggttcccaaaggcgtcacactctcttctctcttctctctctctgtgtacagctgaggatttaaagactacagcttcctacactctttcctctcactaactgactcagtgatgggtttcgatttaaaggagattaggacgaagaagacactgattggtcttggtttgggacagctcctctcacttcttgctacttctaatggctttacatcttctgagctcgccagaaaaggtttcaagtttcttcttttctggtttattaccattaccccagcggcttcatgatctctttatcaattggttgataaattcttgtaaattttaaaacttttttaggaattaatgttccaacatcacaatgctttctgaattatgtgttactggcaatcgtctatggaagtatcatgctgtatcgaagatccgacattaaggttactattgattttttcttcactctctgttacctctcacaggagtgtctatctatctttacatagaaagtattgttaacattgatcttcaatgcaggcgaaatggtattactatttcctccttgcttttgttgatgtggaggccaattttctcggtgagtcttgtgttgtttgctgataaagatcttcttttgtcaagtttttgtggcttgaacactgatgataagtactttgttattatcctgctttgggatgagttttatttattacgagattatgaaatcaatgactccattgctttgattattttacagtggtgaaggcttaccaatacacttcattgacaagtgtcatgctactggattgctgggcgatcccttgcgttttggtcttgacttggttttaccttaagacaaaatacagattgatgaagatcagtggtgtttttatctgtattgttggtgtttttatggtagtcttctcagacgtccatgcaggggatcgagctggtaatggtttttgaaagctcttactgattcatgactatgtttttaatcatggcttcattgaattttggtggtttttcaggaggaagtaatcctgttaaaggagattttcttgttttagctggagcaaccttatatgctgttagtcctaccagcgag

SEQ ID NO: 139460 - DNA, 2264 bp, Arabidopsis thaliana landsberg
atggagtttatcacccaaaaccaagctattacttctctgagtatgatcaacaccgacattgatcaacctaaggcttcacttcgaagccgatttctccttcatctaatcatatgcctcctcttcttcgtccctccctgctcaagccaagcctgggatggtgtagtgataacacaagctgattaccaaggtcttcaagcagttaaacaagaactgattgatccaagaggcttcttgagaagctggaacggttctggattcagtgcttgctctggaggctgggctggaataaaatgtgctcaaggtcaagtcatcgtcattcaacttccatggaagagtcttggaggtagaatctctgagaaaatcggacagcttcaagctcttcgtaagcttagtcttcatgacaacaaccttggaggttcgattccaatgtcattgggactcattcctaatcttagaggagttcagcttttcaacaaccgtctcactggctcaatccctgcttctctcggtgtatcacgtttccttcaaacgcttgatctcagcaataacttgctctctgagattattccaccgaatcttgctgactcttctaagcttcttaggcttaatctcagctttaattcactgtctggtcaaatcccagtgagtctctctcggtcttcttcccttcagtttcttgctcttgaccataacaacctctctggtccaatcttagatacttggggtagtaagtctcttaatctccgtgtcttatctcttgatcacaactctctctctggtccgttcccattttcactctgcaacttaactcagctgcaagatttttcctttagtcataataggatccgtggaaccctaccctctgagctaagcaaactcactaagcttagaaaaatggatattagtggtaacagtgttagtggccatatccctgaaaccctagggaacatttcttctcttatacatttggatttgtctcaaaacaaactcaccggagagattcctatttcgatttctgacctggaaagcctgaacttcttcaatgtctcttataacaacttatctggtcctgttcctactctcttgtcccaaaagttcaattcctcttcttttgtcgggaactcactgctttgcggatacagcgtttcgacaccatgtcctactcttccttcaccgtctcctgaaaaagaaaggaaaccatcccacaggaatctgagtaccaaagacatcatcctcattgcgtctggagcactcctcatagttatgcttatccttgtttgtgttctatgttgcttgctgaggaagaaagccaatgaaaccaaagccaagggcggagaggctggacctggagctgtagccgcaaagactgagaaaggaggggaagctgaagctggaggtgaaactggagggaagctggttcattttgatggaccaatggcgtttactgcagatgatcttttgtgtgcaacagcagagataatggggaaaagcacttatgggactgtgtacaaagctacacttgaagatggaagtcaagtagcagtgaagagattgagagaaaagatcaccaaaagtcaaaaagagtttgagaatgagattaacgtcttgggaagaatccgacatccgaatctccttgcactcagagcttattacttaggccctaaaggagagaagcttgtcgtcttcgattacatgtctagaggaagccttgccacgtttctccatggtaagtttgatactaaagtcttaaagttaaagacaattttgctttacaagtaccattttgtaactctgttttcatatttgaaattgcagcaagaggaccagatgtacatatcaattggcctacaaggatgagcttaataaagggaatggctcgaggcttgttctaccttcacacacacgcaaatatcatccacggaaacttaacatcaagcaatgtgcttttggatgagaacataaccgcgaagatctcagattacggtctctcaaggctaatgacagcagcagcaggatccagcgtgattgcaacagctggtgcgttaggttacagagcacctgagctctctaagctgaagaaagccaacacgaaaaccgatgtgtacagcctcggtgtgatcatattggaactgttgactgggaaatctccgagtgaggccttaaacggtgtggatttgcctcaatgggttgctactgcggttaaagaagagtggactaatgaggtttttgatttggagctgttgaatgatgtgaacacaatgggt

SEQ ID NO: 139461 - DNA, 1923 bp, Arabidopsis thaliana landsberg
gcaccgggcatgtgaaagtggcggcatctgacctcagggaacttggttcattcgaatatcatccttacttcaccaagcgacttgggtctatggccatggacagacacgataaggagaaggaaatggcttcagtgctactctctgcattgtatgctgatgttattttacctgatcaaattagggatggatttataagacttctcagatctgttgatgaccttgcggtggacatccttgatgctgttaatgtccttgcattgtttattgcacgggccatcgttgacgaaattctccctccggtttttctggttagatctaagaagattcttccagaatcttgcaaagggtttcaggttattgtaactgcagaaaagagctatctctcagctcctcaccatgcagaactagtggagaagaaatggggaggtagtactcacactacagtagaagaaacgaagaaaaagatatctgaaatcttgaaggaatacgtggaaaacggagacacttacgaagcttgtagatgcatcagggaattaggtgtctcgtttttccatcatgaggtcgtgaagagggctttggttctggcgatggattctccaaccgctgagtcacttgtactaaagctgttgaaggaaactgctgaagaaggactgatcagttcgagtcaaatggtgaagggattcttccgagtagcagagagtctcgatgaccttgctctagatatcccatctgccaaaaagctgtttgattcgatagttccaaaggctatttctggaggctggctcgatgattcatttaagataacctctgatcaagatggagaaaaatcgagtcaagacggaaagctaagacagtacaagaaggatacagtgaacataattcaggaatatttcttatcagatgacattcctgagctaatccgcagtcttcaagatttaggggcacctgaatataacccggtgtttctgaagaggctcataactcttgctctagacaggaaaaacagagaaaaggaaatggcttcggttcttctttctgctcttcacatggagctattctcaactgaagatttcataaacggtttcattatgctcctggaatcggcagaagacacagctttagatatcatggacgcatcaaacgaacttgctctgtttttagctagagctgtgattgacgacgtcttagctccacttaaccttgaagatatctcaaccaagctgcctccaaaatcaaccggaaccgaaacagtccgctcagccaggtctcttatctccgccagacacgcaggagagagactcctaagaagctggggaggtggaaccggctggatagtggaagatgcaaaggacaaaatctcgaaactcctagaagaatacgaaacaggaggagtaacatcagaagcttgtcaatgtatccgcgatctagggatgccttttttcaaccacgaagtagtgaagaaagctttggtgatggcaatggagaagcagaatgatcggttactgaatctgcttgaggagtgttttggtgaaggattgattacaactaaccaaatgacgaaagggtttggtcgtgttaacgacagcctcgatgacttgtcgcttgatataccgaacgcgaaagagaagtttgagctgtatgctagtcatgccatggacaatggttggatccttcccgagtttgggatttctgcaactcagtgattagtggttctcttatcagtttcttgtgtttgtgcttacgatactttcctcactatctacatatatgtatggattcagttagtagataaacatgagatgtttatatgttcatgtgtttctgtctggttgttgtgttttgtctttgtactgatatcttttagtgtgttctaatttctgatggatttttgttacattgaaaataagttattagcatggttaa

SEQ ID NO: 139462 - DNA, 2157 bp, Arabidopsis thaliana landsberg
aatgttttattgttttggaaaggataaaaggtgggaaaactgtagatcagatggataactattaagatcagacccaagcgtggaacatactccagaaaaaaagaactcgttgttaaattcattccactttggaaacaggtactctataatttactattttccaaactctattttatttattatgtttttcattttttcccatttatattcgttcaatttgtttttatgcactgtatcgtataataatgatatcatgtcgaccaagtaagtggagattcggtattataagacggcttaattacgattattctctctcttaaatactataaactttagcgaagcacatttttatggttggaaaatttgatttaaagtcgaaatggtaaaataaaaatactattttatcgtcgaatgagaaatagttatttcgttgtgggtcttcctcttaaccattggggtgttagactttttctcttttagttgagacaaactaaattgtacctcattttttttacacttcgtatattacataagcattaataggaacacagttgatataacacatgtgcatctgtacaacaacactttaaacaaaatacagtcacatatgtattgcaagttttcaacatgataaactagtaaacatgagaaaaaaaaaagcgaggatctgtttatttaaatttttaattattattactcaacgttaaacaagtatatgtgattcatagtagtgtccgctaaaataaatccaatattggaaatcggacaaggaacccaacgagagtagtacgaattagtcatcgtcactcattactgacattgctcgagcgatttctagtatatggttttattgtactgaataataatagatttctagaaaccatgattaggtcagcagtcatatcaacatggcaaatcaaatttagaacactattctattgattctcattgggccacgaggttctcttattccccggaaagatatttaattttatcaaggttgttccaaattgtgaatagaggattaatataatgcaatgaacagagggttaattattgattaatgcaatgcatgtaggtggtctctaatcgcgggtcatctaccagggagaacagacaacgaaataaaaaattattggaactctcatctcagccgtaaactccacaacttcattaggaagccatccatctctcaagacgtctccgccgtaatcatgacgaacgcttcttcagcgccaccgccgccgcaggcaaaacgcagacttgggagaacgagtaggtccgctatgaaaccaaaaatccacagaacaaaaactcgtaaaacgaggataacgtctgcaccaccggagcctaacgccgatgtagctggggctgataaagaagcattaatggtggagtcaagtggagccgaggctgagctaggacgaccatgtgactactatggagatgattgtaacaaaaatctcatgagcattaatggcgataatggagttttaacgtttgatgatgatatcatcgatcttttgttggacgagtcagatcctggccacttgtacacaaacacaacgtgcggtggtgatggggagttgcataacataagagactctgaaggagccagagggttctcggatacttggaaccaagggaatctcgactgtcttcttcagtcttgtccatcggtggagtcgtttctcaactacgaccaccaagttaacgatgcgtcgacggatgagtttatcgattgggattgtgtttggcaagaaggtagtgataataatctttggcatgagaaagagaatcccgactcaatggtctcgtggcttttagacggtgatgatgaggccacgatcgggaatagtaattgtgagaactttggagaaccgttagatcatgacgacgaaagcgctttggtcgcttggcttctgtcatgatgatattgattgatccgttatgtaatcttttttgtgcattcacagtttgaatctattccacgtcgtatcatatcataaagtttaggatctaaatattagtccattagttaaaattatctaatgcaataaaacccatgggatgtttggattgtacgtaaggttaaaatattgcagtcgttgctttagtggaagaattaaactaatatgatgtttttctttgtaacgt

SEQ ID NO: 139463 - DNA, 2784 bp, Arabidopsis thaliana landsberg
tttaggttggtaatttttcggacgataaccgattcggaatttacagatctttgcatcgataagcgctatacgtaatcgcaaactgcaagtaattggtctaacatgtcgagtgggtcgagtagtctctggaagtgcagaaattataagagacttgattgaaggaggaggatccatcttggtcattggatctcctggagttggcaaaacaactttaatcaggtacatcaatatgaacttataatgtgatgatctttctgttaaaactgtgattgataaatggtatatgacaagattggtttgttttgtacagagaaattgcacggatgttagctgatgaacacaggaaacgtgtagtgattgttgacacgtcaaatgagattggaggtgatggtgatgttcctcattctggaattggtcgtgccaggcggatgcaagttccaaatgtgaatttacagcacgatgtatgtctcgcaactttataaccttgtaataatatggtgtaggatggaatcaaaaggatcttgctgtattaacaagttctttatgcaggttatgattgaggcggttgagaatcatatgcctgagacaatcatcattgacgagataggaactgagcttgaagctttagctgctagcactattgctcaacgaggtgttcagcttgttgcaactgctcatgggatgactatagacaacataatcaaaaatccttctttgcagattcttattggtggaattgaggtaaaaccttagacaacaactttgcttcttattttgttctgttgtttatcttctctaaccttaatttgaatttattttgcccagagtgtgactcttggtgatgaagaagcaaggaaaagaaaagtgcagaagacaattcttgaaagaaaaggacctccgacattcacttgtgctgtagagatgatatcgagaactgagtgtcgtgttcatcaaagactagatgttaccgttgatgctatactagctggtaagttaaaacttaaaagacttcctctcccaataaagtgtaattgagttaacaaatggtaaaaccaaaccgaacaaacttctttgttattatagggaaatccgctccatttgagatccgtcaaattcgtggcgaagacgatgttcctcataagttagtgactcccattcctttggagaaccttgaagaggagcctgcaccattgctcaacagagatttcgtaagtgaattgctgtctgacgatgaagatgaagattttcttcccattcggtctaataaggccagaagtaacacatacacgagcccaagaagctcaccggttcatgtgtatacttacaatgtaaagaacctgatcttttattgcctagtttctaaatgttccttttcttatccttggaaaataatcttcatcttaaacaaccaaagatactgactatagatgtggtatcatctgattgttttctaggtccttgaagctgatctcctccaagtagctgaagttatgggtctagacgacgaaatagaagtgacagatgatgttggagaagcagatgtcattctagcctcaagttctgaattgaaacagaattcatcaatccgtcgtgttgccaaattacacaagctaccgatatttgtcattaaggtatccttctttttgcatggctgattatgattcagcgcattcctttgttttattaatttgaatcacttctttcgtcctgttattaccttgcagtcaactactatggctcagatggtgaaggcagtccgaatgatccttggaagggaatcatttggctcagcccctaaagccatagaaaaatcttctgttgatgatatcgagatcaaagatgatgctcctgagagcaaacccagtttagaagaactcgatgcccttgaggtaactctcatccccctcctgtaactattctcggaatttcccaatagagatggcttgttatctcagatcagtctctttgacctaccaactattagttcattaggattcctacatctcatgtaactactaatacagttcagtgactatagattagggagacttgcgagtataactactgataccagtttctgaaacgcaggaagtacgtctagcaatcgaatatattgtaatcccgggaggtgaaccagtggagcttcttcctagacgatcagatataatagttcggcagctagagctggtggagagttaccaactcgcagttgagaacctcggcactcaccttaatccgcgccttcagattcttcctcgccgatcaaccaagaagacgttgacatcttcatccccccaaaaatcagcagatggtagcatggggactacgggtactcgtcttcctttccttaaggattgacatgtctgacttcagcatatggactacagtacatactacataagttggggacactcttgaacattgtacattttactgtaagtcttggtaaataaactgtttatatcgttgatcatttctcatttgcaatttatgtgttaccaatgcaatgctctttcttatttacccgagggggtaactctgtaacattgagggtgagagtgtgcaatctgtagatatttccttacctcttaataaatagaaatttctcaaatattccacgtacacgcttgaaaatgtaattgaaatgatcgattcttatacacatacaaactctgtaccaaaacccacatcttctcaagatcgtaatacaaaaactaaaaccagaggtcaattttaacaacatttgcaaaaagcaacggaagtgaccaccacacaccggggaga

SEQ ID NO: 139464 - DNA, 747 bp, Arabidopsis thaliana landsberg
  unsure (1)..(747): unsure at all n locations
atgtctttgattgaaaactcatgtctagaaccagaatccaaaacagcaacattaatctgcggtcacttcttcgtccgttacggaatctgctgtaactgcagatcgacggtagacagagactacggccgagcattcgattatctcgtccatgggttacaattaagccataaagccgttgcggttacaaagagccttactacacaactcgcttgccttaacgagagaaagcttcatctagtccttgacttggaccacacgcttctccattctattatgatttcacggctttccgaaggagagaagtatctattgggagagtcagattttagggaagatctttggacacttgacagagagatgctgataaaacttcgaccttttgttcacgagtttctgaaagaagccaacgagattttctccatgtatgtctacacgatggggaatcgtgactacgctcaggctgtgctgaaatggattgatccgaagaaagtatactttggggatagagtcattaccagagacgagagtggtttttcgaagacgcttgatcttgtgttggctgatgagtgtggagttgtgattgtggatgacactcgtcatgtttggcctgatcatgagaggaatctgctacagatanccaagtacagttacttcagagattatagtcatgataaggagtcaaaatcttacgcagaggagaagagagacgagagtaggaaccagggatcattggcgaatgttttgaaa

SEQ ID NO: 139465 - DNA, 1850 bp, Arabidopsis thaliana landsberg
cgagttcgtcggtctcaggtgggcagtgattataacttcgtctccgtgtctgttcaagctcccattcttgtggccttcacgcttcaggaacaaagaccagtatctctctgaaagactacttctaggaaatttttgtctccatggtaagcaatctcttttcgcgcactcactttgatgatctccgttttcatttctaggttatacgattttcttctcgatcgcatttgttagggttttcaaaattaagactttgagtgtatttatctcgaattcagctgaacaatttcaaaatgcggcatcttcttatacatagatctagcgggttatgattgatctggtcgagcttatcgatttagagcgattgggtttattcacctgcttttgttggttttgtttggtttcctagtgttgaaacagcgattttatacgcgacacttaactcctgtatcatcaattttactgatttcgtgcttcaattttttgtatgcttttaaagtagatcatgtgttactttgagttaatttgccatttaccgtctttgttatatggatttgatgataggcacccgtgagggggattcttggcttgcaaagggcagtgtccatttggaaggaaagtaacagactgactccagctttgagatcattcagcactcaagctgcatccacttccaccactccacagcctcctccacctcctccgcctccggaaaagactcatttcggtggtctcaaggatgaagatcggatttttactaatctctatggtctgcatgacccatttctcaaaggcgcgatgaagagaggtgattggcataggaccaaagatttggtgctcaagggtactgattggattgtcaatgaaatgaagaaatctggacttcgtggacgtggtggtgctggtttcccttctggtcttaagtggtcctttatgcctaaagtttctgatggccgtccctcctatttggttgtcaatgctgatgagagtgagcctggaacttgtaaagatagggagatcatgcgtcatgaccctcacaaattgttggaagggtgtttgattgctggtgttggaatgagagctagtgctgcgtatatttacatcaggggtgaatatgtgaatgagcgtttgaatctagagaaggctagaagagaagcgtatgcagctggtctcttggggaagaatgcatgtggttctggttatgattttgaagtttatatccactttggtgctggtgcgtacatttgtggtgaagagactgcgcttcttgaaagccttgaagggaagcaaggaaaacctaggttgaagcctccgttccctgctaatgctggtttatatggttgtcccacaactgttaccaatgtggaaacagtggctgtttcgcctaccattttaaggcgtggacctgagtggttttctagtttcggtaggaagaataacgctgggacaaagctcttttgtatatcaggccatgtaaacaagccatgcacggtggaagaggagatgagtatacctctcaaggaactgattgagaggcattgtggaggtgttaggggtggatgggacaatctacttgctatcatccctggtggttcatctgttcctctgatccctaagaacatttgcgaggatgtgctgatggatttcgatgcgctcaaggctgtccaatcagggctaggaactgcatcagtcattgtgatggataaatcaaccgatgttgtggatgcaattgcaaggctatcttacttctacaagcatgaaagctgtgggcagagcactccttgcagagagggaacaggttggctttggatgatcatggggagactgaaagttggaaatgcaacagctggaag

SEQ ID NO: 139466 - DNA, 2059 bp, Arabidopsis thaliana landsberg
ccaaaatctccatttctctctcgctctcgctcaatctctctttacaatgtcgacagtttcttcagatcctgctcatgcgaagaaatcgagaaacagtagaaaagcgttaaagcaaaagaatgagatcgtcgagtcatcaccattgttgtcaccggtctcaggcaaggggaaagaatcgaagtcgtttgagaaagatctgatggagatgcaagcgatgttggagaagatgaagatcgagaaggagaaaactgaggatttgttgaaggagaaggacgagatcttgaggaagaaggaagttgaacaggaaaaacttaagacggagctgaagaaactgcagaagatgaaggaattcaagcctaacatggtacgattttatagatctggctctgattttggggatgattttttgataaggtttcgagatgattttaatctggttaatcttatgcgttatggagcttgttgatgattgattcgcttattaatggaccttgttgctaagttcatgttatgtgaaattgattcatgatgattttggggatggatatattcagaaaatctgattaatcttatgcgtttaggagcttgttgattgttgattcgcttattgatgaagattgaagctagttcaggttctgtgaaattgattaaagatgattgatggaagtttcgcttagatttgagactaatcatcattcacagatgttagattgatttctacgcatgtgtttaagatagagatgttaaatttggtgcaaaatcgatagattacttcaagtttatgtatcatttctatgttgtgataatgtttatttggtgattgattttgggagtattgttgttgcttccacagacttttgcttttagtcaatctttggcacaaactgaagaagaaaagaagggaaagaagaagaagaaggattgtgttgaaacaaagagaccatcgacaccatacattttgtggtgtaaggataattggaatgaagttaagaagcagaatccagctgctgatttcaaggagacttcgaatattcttggtgctaagtggaagactctgagtgtagaagagaagaagccttatgaggaaaagtatcaggcagataaagaagtttatattcaggttattacaaaggagaagcgtgagagggaagcaatgaagcttctggaggatgaccagaagcagagaactgcaatggaattgcttgatcagtatctcaactttgtccaggaagctgaacaggacaacaagaagaagaacaagtaaaaaccaaaagtcttagtgactatatcaatttgatcatcaatagtaaactaactagagctgtttatggtttgcaggaaggagaaggaccctctgaagccaaaacatcccgtatctgccttccttgtttatgcaaacgagaggagagctgctttacgcgaagaaaacaaaagcgtcgtggaggtaaatctaattacttaattcgttctccagatcagtttttgtcaaattgtgaagctaacttatggagtttaaatgtggttataggtcgcaaagatcactggagaggagtggaagaacttgtcagacaagaaaaaggcaccctacgagaaggtctgtttccatacacatatgcttgcatttcactgccattaaagacttaagactgaatgattgaggtattcttgtttaaataggtggcaaagaagaacaaggagacatacctgcaagcaatggaggaatacaagaggacaaaggaagaagaagccctgagtcagaagaaagaagaagaggaactcttgaaactccacaaacaagaagctcttcaaatgcttaagaagaaggagaaaactgataatctgatcaaggtaataactctctctcactcacacttaactcaccaaggtctatttcaactcagagactcacaggatcataattatttgtctcttgcagaaggagaaggcgaccaagaagaagaagaacgaaaacgttgaccctaacaacccaaccaagcctgcttcttcatactttctcaaaagaaatgaacttacttcaagttataatccgaattggtct

SEQ ID NO: 139467 - DNA, 1821 bp, Arabidopsis thaliana landsberg
  unsure (1)..(1821): unsure at all n locations
gttcaaaatcatttcttctctcttccgtcaaaattattattctctcgcagtcgtcaagagctgcttctacaacaatgcaggtgaacaataatattactctgatttttgagctacaaaagtttctgcttactaattttgttttctccgaattcgatgtagacgacgagaagtgttcaagtaaataatgtctcagatctagccacagagagagagattcacgagtttttctccttctcaggcgacatagaacacattgaaatccaaaagtaaacttcaaattttctccttctatactctcttctatgtttcatttcaactttaccttcaaatatttgtacttgcagagaatttggacagtctcgaatcgcatttgttacatttactgatcccaaagccctcgaaattgccttgttattatcggtatgtaattttcaccgacactttttatgaataaacattcatgtatgtgtatgtgcatttttgcttaggaatggttttagagagttttgtctttagtctttgtaacaaacacttgaactagttatgagactatttgtgcacaacagtaacagaatcgacatcttgccttgtagggtgcgacgattgtggaccagattgttacaataacacgagctgaaaactatgttcagaggcgtgagacacaggttttgtgttgttttgaaacaggtttttactcaagtccggtctatttgatgtcttagtttctgttcatgtaggaagtaagaatgttggacaacgcgatgcctcttggtcttcaagagagtactacacaggttaggagacgtgattttcatacagaaacttgtctatgtgtgatatagtatagtattaaacatgttgccttgtgcagactaaaacgaacatggatggtaatagtagagcatacgttagcaaagcacaagatgtggtggcaacggttttggcaaaagggtctgctcttggacaagatgcagtgaataaagccaaggctttcgacgaaaagcaccaatnnnnnnnnnnnnnnnnnnntaaagtttcatcttttgacaagcgagttggtcttactgagaagttatctgttggtatttctgctgttaatgagaaagttaaatctgttgatcaaaagcttcaagtctccgataaaactatggcagcaatatttgcagccgagaggaagttaaacgacacgggttcagctgtcaaatcaagcaggtataaatccttagacatccttcttggtaatagatatggcaggaatcaactttgtccatctttaactacttttctaccctgactttatgaatttgtttctttgtttgtgattatgcttccaaataggtacgtgactgctgaagctgcttggtttagtggcgcttttagtaaagtggcgagagtaggtcaggttgctggctcaaaaaccaaagagaagttcaatctagccgtctcaaatatgagttccaaggttagtcatcaaaccaaatctatatttctggacgcaacatttgttttggttaggtggcgacaatatgttatttttttaaccaaaactgacttagtactaaaactagtaatggttttgagtttcaatgattcttaatgatgattataatttgatgtagttacctacttctttatggctaaactgattaaactggcttacgcaggatacaccgattgctgtataataaagagcttggaatcaagtaagcgttgaagtcaggatcaacgaaagttgctatactagccttgtgtaaacaacatttttgtgatatagcttatcctcattcttttagtgtttcctcgtattctgggtgtgaagca

SEQ ID NO: 139468 - DNA, 2612 bp, Arabidopsis thaliana landsberg
tcgaagaggaagaataggtaaagcaaacctggtagttgtagttgtactttctttaaagctgaggagctaattgcaggaaccaaaacgtcagtcataaataattttgaatcgaaccaaaccccatccgagtttattcggtttcagtttatcctgaaggggtgttttttgtcttgtcggtcggagaacctcgcctatataaataaatgcttccaatttgaagagcagctaaaccctaaccctaaaatctccagagagagagacgatggatcgcatggcagttgcggaagagcaaatcgtattggagagggttaggagaaaaatcgaagaagtaaatgcatctggtcagtcgcagctctctcctattcaagaacatatcagtttcacccttctggtatatatatatatatatatatatatttctacaatcatttagtacaagtattgctatatcttgtaacaaactagggcagaaaagttaattagttttacttttgagtttcgctaaagatttatgcacctttgaatgatgatgaattgcagcaagcttatttcaaatgctcaaacgagtgctttgagaaaagaagaaagccagaagtgacaactaactgtgttgagctctgtcgtgttcccgttgctaaatctcaacagcaattcgatagcgatatggccaagtttcaggtacaaaaatagtccttaactgatcccattaagcttttgccatgtactgagaaacttgcatttggttaactaatgcaggataggatgaacagatctctcatggtatgtcaagacaaattcgaggctgcaaagctactgaatatgaacaggattgatgccgccaaagatatggagggttgcgtaaacgatgcagctgcagcattacttggcggctaagcaaccaacggtgtttattagggttcttaaaagtttttttgtatttctatacagttgatttggatttacttgtgctgagatagactctatcgtttaattaaaatcttaaaaccggatcaaaccggattctattttacccggtcttatgtccaaagtcgggtttagctagagataaaaggaaaaaatcaattttaaaaagtcaccatctcaatcgaatgggtctccttcccgtcgtcggaattacttcgccggcgctcatcacccacaaaaatcacgccaatccaaagatacagagacataatcaatctacctccgagaccactgtttcatggacttctcgcatcaatctcctcacgcgcaatggtcgattagcggaggcagcgaaggaattctccgatatgacactcgccggcgtagagcctaaccacatcactttcatagctctactctccgggtgtggtgattttacctccggaagtgaagccttgggcgatttgcttcatgggtatgcttgtaaacttggtcttgatagaaaccatgtcatggttggcaccgcaaatatcggcatgtactccaaacgcggccgttttaagaaggctagattggtttttgattacatggaagataaaaattcggttacttggaatacaatgatcgatgggtacatgagaagtggtcaagtcgataacgctgctaagatgttcgacaaaatgcctgaacgagacttgatttcttggacggctatgataaatggctttgttaagaaaggttatcaagaggaagctttgttatggttccgtgaaatgcagatttctggagtaaaaccagattacgttgctattattgctgctcttaacgcttgcacaaaccttggtgctctctcatttggattatgggtacatcgttatgttttgagtcaggatttcaagaacaatgtgagggtgagtaattcactgatcgatttgtattgtcgatgcgggtgtgtggagtttgctcgacaagtttttgacaacatggagaaacgaaccgtagtttcgtggaattcagtcattgttggttttgctgctaatggaaatgcacatgaatcattagtctacttcaggaaaatgcaagagaaaggctttaaacctgacgcagtcactttcactggggcgcttaccgcgtgtagccatgtaggtctagttgaagaaggtcttcgatattttcaaattatgaaatgtgattacagaatctcgcctcgaattgagcattatggatgcttagtggatttgtatagtcgggctgggagattggaagacgctttgaagttggtgcagagcatgccaatgaagccaaatgaagttgtgattggatcgttgcttgcagcttgcatcaatcatgggaacaataccgtcttatcagagaggctgatgaagcatcttaccgacctgaatgtgaaaagccattcaaattatgtgattctctcgaatatgtatgctgctgatggaaaatgggaaggagcaagtcagatgagaaggaagatgaagggtctcggtctaaaaaagcagcctgggtttagttcgatagagattgatgattgcatgcatgtgttcatggccggtgacaatgcccatgttgagaccacttatatccgcgaggtcctggagcttatttcttctgatttgcgattacagggctgtgtagttgaaacccttgctggtgatctcctcaatgcttga

SEQ ID NO: 139469 - DNA, 5978 bp, Arabidopsis thaliana landsberg
tctggtgttaagggctctactagctcttcaatgaggggactctcttccttttattcaataacattcagactcttcagtctctgctgcctacacctatgactagggaaccatttgtctccacaataacggcaaggattggagttccttacctctccagtgttcgtaataccactccctgaagcagggttagtatccatgtagggttccataggacgctttgacaacaccttgtcataagccctcacagtattttgaggttgtggaggttgtgtggttgcagtagaaggtcggttttgttgacggacttgatagttagtgttgtctctgtcctgagattcaatcattcgtgctatctctacaatgtccgtgaggtctactggtctgtatctcactacttgatctttcaagtgtttcctcaacccattgagaaaagcagattcaagtaaatctgcagtcacatgaggtaactcaacaatgagctcttcaaacctgcctctgtactcatcaacagtactcgtctgccaaatatttagcaaatgatccatagcagaacttctcctacttggcctaaacctaaccttaaacttatcctgaaaatccttccaagagtatatcttttccctatcattagaacatctccaccaagttattgaagctccagttaaacaagagattacctttgcaagtttttcctcttcacgaacattgtaggtttaaaaacactgctcgactctgaataaccaggcatctgggttaccaccttcatagttaggtaactccaagttggtaactgtcagatctgctcttaggggtagttgcgggtacacctgttctggaggtggggtgttaaagtgcacgtgttgtggcctagactgtgttaccggtgtaggacaagggcgcaggatgtctctgttctatctctcagcggtgggtaatggcgttcctggaaactgaggagaaggataggggcttaagaaggagagaggtgttgactctcttccatctcttgtttgaccatagatttgaaatctcaggagctgttgaaccccttctctaatcacagccatctctttctcttggttggtaacgccaactttgagaggtagagtaggcgaaggaatctcaacgggaggaggtgaactgagtcctggcgattcagaaccttgactcgggaccaacggtctttggatcttctggagccattgttagctctcaagaccaatgttaagcttgggagcttaatcgaactgaaacttaagaaataagacagggaaatagagaaatgcgcaggaaacggcggagagtaagatgagagaagaagtttatattgattgtaaatatttttggtaaagtaaccctaaagggaaactttcctttaaatagcaatcccccactaaaacccttaaatgtaagaccccttacaagttcaaaacgcaacactttgtcatgtgagacttattggaatagaggcaaagcctctagctcattcagagacttactgagacttagccacttttatataacacctttctgaagaagttctctaacttccttgcctttcttccgcatgtccttagtcttcttctcacacaagctagaggcaccttgagcctatcacattgttgtacagttaaacaagctaactgggtttaaaaagtacaaaatctcagatattatcttttttgatcggaagagaaaagccaccgttggaacagaggattctttcttcgagatggtatcgatttaagaaggagaaaattacaataaagctttcttcgagatggtatcgatttaagaaggagaaaattacaataaagctcagttatagaaggagttagaaaccctagctacttgtgtatggtttgagaaagttaatttcgaagggaagacaaagcctgacgaaaccctagctgttacaatctcttttgcagagagcatttgacaagccatatagagattccaatgcataaacgtagggttaattgtacaacctaaaccggtaaagattgattcagtcatgacagaaaaagagatgattgagtacttgggaagtcaggagaaggaatacaagcagaggattgagaaggctaggccttgtttgcttcggggatcgattcagcgagaggcaatgcttatgctaagagattaaggagtttaagtgcgaggcttttgcataaggttaacgaacgagttcttaaatggcacccagaccaagggtatagttttgctaatgttgtgagttttggtaacttgaacagtaaggaacttatttttgaagttatggaaggagacataactcagttgattattcagtttcaagataagcttggtaatgtagttgaaggtaacacacaaattcttgtcgtgcgcagggaattgcctaagcaggtatgtttctcaagttctgctatgtcagatatgtcattgttgatgtgatcatgatttagtataggatgatgacgaaagtgtagttatattatagattgatatgtcaggaaaaaattgacagacttttaacttgaacttgctatttaagtctgatggatgtaagaggtttaatcgcttcaatgaacccattgtacaaatgttttatattccagacatgtaatgatatatctcatttgttatgttagttttagtgatagtttctatgtttcgttgaacagcttcgccaaggctatgttttcaacattgaagctgggaaaaaagctctcagtaacatcaattcattggggctgttctctaacattgaagtcaatccacgcccagatgagaaaaatgaagggggcattattgttgagatcaagcttaaggagctagaacagaagtcagctgaagtcagtacagaatggagtattgttcctgggcgtggaggagctcccacattggtatgaatccttccttactgaaataagtacagattgtaaaatttgagaagttccattgagtttgattgttattgtttatatgcatcaggcttcattccagccaggtgggtctgttactttcgagcatcgaaaccttcagggtcttaataggtctctcatgggttcagtgaccactagcaacttcttgaatcctcaggtacattcgataagcttacatgattgatacatctctggttcaacttttcggttgataacatccatctatttctgtttctatgtgctaagcacaaaccttatgttacattttttcctcaggatgatctttcgtttaagcttgagtatgtgcacccgtatctggatggtgtttacaatcctcggaaccgaacattcaaaacaagctgcttcaacagccgcaaacttagcccagtattcactggaggacctggtgttgaggaagtgccaccaatttgggttgatcgagctggtgtgaaagctaatataactgaggtaagcttgccaatcctcagtgccataatcgacttatattgtcctacaaacacttaactgaaacatattttcatgcagaacttcacccgtcagagtaagtttacatatggacttgtgatggaggagataacaacccgagatgaaagcagtcatattgctgcaaatggtcagagactactacctagcggtggaatcagtgctgatggacctccaacaactctcagtggtaccggtgtcgatcgaatggcttttctacaagccaacatcacccgtgacaataccaaatttgttaatggggcagttgttggacagaggactgtctttcaggtttgctttcccaatgatcaaatgagattataatgatgagtcatctgtatattgtaagctttacacaatgtatttgcaaatcacaggttgatcagggattgggtattgggagcaaattcccgttcttcaaccgccaccagttaaccatgacaaaattcattcagttgcgggaagtagaacaaggggctggtaagtcacaccaccagttctagtcctccatgggcattacggaggctgcgttggcgaccttccaagctacgatgcttttgtcctcggtggtccgtactctgtccgtggctacaacatgggagagctcggtgctgctagaaacattgccgaggtaatacaacaaacactcaaaacaaaaacagtcttttctcctaaacccgaaaaatatgtgtgtctaatttggtttcatggattataggtcggtgctgagatcagaatacccgtgaagaacacacatgtctacgcttttgttgagcatggaaatgatttaggaagctcaaaggatgtgaagggaaaccctacagcagtctacaggagaacgggtcagggttcatcctatggtgcaggtgtgaaactcggtttggtccgagctgagtatgctgtagatcacaataatggaaccggtgctctgttcttccggtttggagagaggtattaaggtaatgtgagaagcaagctcatgttatccaccttagtcttttcatttactctgttgaggaactgctatttttctctttttttccttttcttttgtgttttttttttctacttctttttcaataattgcttaatgttagtgtttgatgacgttgctgagaatcgggaaagagtttgttcttcgtaatatgtctagactttggtaggaaaattttgaaactttcaagtttcaaaaaatcgtatgaatagttgacaaatgaaagtttatattgaaatcacgtatgcatctgagttcttctttaaatattaccaacaagggatagtgcaatagaatttaatcaaatgtcaacaccaaacatctacaaagtgaagtgtcaaaggctttcgaaaacttgaaattgttgacattaggaaacaaaacatatcttcaatcttctctatattttgaaatctttcaatttgattctgttgagatggtagatgctgtcacggagttcgttgtgggaaagatcggcaactatctcattgaagaagcatctatgttgattggagtcaaagacgatctagaggagctgaagacggagttgaggtgcatccatggttatctcaaggacgttgaagcgcgagaaagagaagatgaagcctcaaaagagtggtcaaaactggttttagatttcgcttatgacgtcgaggatgttttggacacttatcacttgaaactcgaagaaaggtcacaaaggcgaggcttgaggagattgaccaacaaaataggcaggaagatggatgcgtacaacatagttgatgatatcaaaatcctcaagagaagaatcttggatatcactcggaagagggagacttatggtataggaggcttgaaagagcctcaaggaggagggaatacttcaagtttgagagtgagacaacttcggcgtgctcgatctgttgatcaagaagaggttgtagttggtttggaagatgatgctaagattcttttggaaaagcttctttattatgaagataaaaatagatttattatctcgattttcggtatgggaggccttgggaagactgcacttgctaggaagctctacaactcaggagatgtgaaggaaagattcaaataccgtgcatggacttatgtttctcaagagtataaaactggagatatacttatgagaatcattagatctttgagaatgacttttggggaagagtcggaaaagatcagaaagtttgcagaggaagaattagaagtttaccttcacggtcttctagaagggaaaaaatatttggtggtggtggatgatatatgggagcgagaagcgtgggagagcttaaagagagcgttaccttgcaaccatgaaggaagtagagtcatcatcactacacgtattaaagccgtggctgaaggcgtagatgggagattctatgctcataagttaaggttcttgacgtttgaagaaagctgggagttgtttgaacaaagagcattcaggaatatacaaaggaaggatgaagatttgctgaaaaccggaaaagaaatggttcaaaaatgcagagggttaccactttgtatagttgttcttgcgg

SEQ ID NO: 139470 - DNA, 1595 bp, Arabidopsis thaliana landsberg
atcatcgaccatctcccaaaaaaccctcttttcatccctttttctgaagctctaaaatttttcagttccccgatcgccggaattttcgccggtgatgtaattttcccgcgccttttttgggaggtgaatttttttttcttctaaaagctcgagaagagtgaaaaccccagaaatgaccttgcgattcgtatggctccggctgttttcgctaccttaaacgaaccgtcgtaccaggaacaatgcggcgccgtttttatgaggaaatttacaaaccaatccgtcaccgaaaacaccaataaccttccgctcttcaaccctaaccctaaccctaatttcgaaaggagcaattcgagcaagcagtgcgatgactcgtcggaatttggaagctatgctacttttaatctcgctgggtacacctcaagtcagctcagggagctaaagaagcgctttacctcagagctcgagcagattcggatcctgagagaacggatcgagtcagggacgttcgagactcagcaaggttatactatcccagaggtacccgccgttcgatcagctccgttgaatagcttcaccggtgaaaagaatgaccttggaccgaagaagaagaaacagaagaaaaatgtgtcaggtctcaagcgaagcaatcaatttggtccgtcggatccggagtcggaaaaattattggccggtatgttgaatacctgtagtcagatcttggtgaagctaatgaagcataaatgggcgtgggtgttcaacactcctgttgatgtggttggtttagggcttcatgattatcatcaggttgtgaagaaacctatggatctgggtacagtgaaattgaatcttgataaaggattctacgtttcgccgattgattttgctactgatgtcagattgacattcgacaatgcaatgacgtataatccaaagggacaagatgtgtattttatggctgataagcttttggatcatttcgatggaatgttcaatcctgcttttaagaagtttgaggctcagcagcttaaactcactggttcttcatctcgtcctgaaccagacttcaaacctgacttcaagcaaagacagtggaatcagaatccgccaatggtggcgaatcctaggaaaggaaccgaacaaatatctattgcgaagaagcttgattcagtgaagccgccacaacctacattgcctcctcaattagtcgagccgtcacgcgttcaatctccttctcctcctccccctcctccggtgatacagcctgaacttccgcagcctcaaccaccacctccacagcttgaaattgaagtagaagcacctcctgatgtgagtgaagtgtcaaaaggaaggaaggggaagttgccgaagcctaaggctaaggatccaaataagaggttgatgacgatggaagagaagtcaaaacttggtatgaatctacaagacttacctcctgagaagcttggtcagttgcttcagattctcaggaagagaaacggacatttagctcaagatggggacgaaattgagctggatatagaagctgtcgacaatgagactctatgggagcttgatcgttttgtgacgaactacaaaaa

SEQ ID NO: 139471 - DNA, 833 bp, Arabidopsis thaliana landsberg
tattttcaaagctcttaacccaaaaaccctaagtcttttttttcttcaaattattggttatattaatgttttaagctatgatggatatgactcctacaataacaacaacaacaacaccaactcctaaatcacccgaacccgaatccgaaactccgacccggatccaaccggcgaaacccatttcctttagcaacggcatcatcaaacgccaccaccaccaccaccatcctctcctctttacttacaaagaatgtctcaaaaaccacgcggcggctttaggtggtcacgctctcgacggttgcggcgaattcatgccgtctccgtcgtcaatctcctccgatccaacttctctcaaatgtgctgcttgtggctgccaccgtaatttccaccgccgtgatccagataacaacaacgactcttcccaaatccctcctcctccttccaccgccgtagagtatcaacctcaccaccgtcatcatccaccaccaccaccacctcctccaccaccacgtagtcctaactcagcttctcctccaccaatctcttcctcttacatgctcttatctctctccggtactaataacaacaacaacaacttagcttctttctccgatcttaacttctccgccggaaacaaccaccaccaccaccaccaacatactcttcacggatctcgtaaaagattccgaacaaaattcagccagtttcagaaagagaagatgcatgaattcgccgaacgtgttggttggaagatgcaaaaacgtgacgaagacgatgttcgtgatttttgccggcagatcggagttgataaaagtggtctcgaaagtttggat

SEQ ID NO: 139472 - DNA, 1748 bp, Arabidopsis thaliana landsberg
ctagaggtttaacatatgttggaattgtagtggactatcattgctgatgttcttggtgcgaattctcggcatctatttgagctttatgcgcttaaacaaagtaatcattaccagaggtaatggtttcctgttctttcgtttgctctaatctcaaaatgtgtcaaccctctattttttcgtttctcaaatgtgacctagtgccgttgtgtcttatcagtttgatggggagtaaagcaggtacatttgaagatattgtggatgcatacttggcttatttacaagtaagctcatttaaagtgattgctttcaaattacgcacgaaagtcatcgttaattttatagtctatttccttgtttaggttgctgtggttaatcctgcaatggacaaagcgttgttgcggcttcaacggtatgccactgatgtacgaaaaggaagcattccgtatgaaaaattacgttttggtgcttcatggaggcatcctccgcaaactgaggatcctacacagaactctgagtgggctaaaattcagctgatggattttgtccaagctcttgtcaatacagaattcgcggtacctactcttctagacccttgatggaaataaagccaaagtgttcagttttaccttatcggacatgaaactaatgattatagcatcactaatagtgtacaagcatcaatgattctataggtaaattatttgggtgactatagccttgagatctttgaagacccttcagctatggcattggttgaggtaaaaacttctatcttttcttgatcagtagacactaatttcgagacccattttactaaaaactgattaattctgtttcaggttgggatactgtatactcagcgagatccatcttttttccggccaatatctcaaggcattaaaagatgccttgttagatggtcagcaaactttcttcccttctcctatggatctgctctttgaaactctgtttttttacttacgctcatgatttgcattacaggctcatccaagagcggatgcagatgagttattggagctcaacaaaatattggtggcagagaatcatcccgggtcgttattacaagcatttaatgcttggctacagaacataggcagtttcacacaggtagagacgattacacgctctgtttctagctctcttgcatcacattgctttagaggataatgaacttaggactttcgtaaactttcgattcaaaaacttatctgttcaagttgatgcgttagcatcgatgaatcctcaagtctcaacaaacgtacaatgttgctgttacttctactgataaaactaattatcccaagtttcacacatcaatgcaggttttgttttcacaggaacgtcgatgaaatctcggtatcttgtgcacgtacacatgtcggactcaggttttaccgtgaagtagaaaacataaaggggcgttgtttttgttgccgtcaaggtctgacttttagtaaaatcacattaagaagagacgtcggagggaaaaacctccagctacagaacggtgtaatcgtgtaagtgggaatacattgccatgagaacgtctttctcttcagacgctgtatataaagcgcatgttgctgtgtttatgtcgatttttttcaagtaaaattataagtcaaagaattcaattattcactgtattgtctacctttccaagccgaaaagtccaataaggttggtggtaaaattgaaaactcttggattggtacaattacaatttt

SEQ ID NO: 139473 - DNA, 1519 bp, Arabidopsis thaliana landsberg
gatgaatctttgaagaaaacagaaagtttacgtgtctattttgctgtggtaaggtctttatcacgggtggtgtatggaagataaaagtggaacttcccgaagcttatccatacaaatctccatctgttggatttgtcaacaagatttatcaccctaatgtcgatgaatctgaaggcgacaaccattccacagttttccctttttcactgcattacatgagctgcatatgtcgacattgtttagtgttgttttgcgtactcttatactcggttatgcgtttgcggcagctctggtgctgttagcttagatgttataaaccagacttggagcccaatgtttggtattatactaattttttcacttgttttgagtgcctgattgcatccatattgaagttgtgcttgttttgcagatcttataaatgtgttcgaatccttccttccgcaactgcttctatatccaaacccatcagatccatttaatggagaagccgcttctctgttgatgcgagaccgtgcagcctatgagctcaaagtgaaaggtaaactcactctcttcttcccatcttgcttattctctttttaacctataatattgacacttcacaatctttcacctttgaagaatattgtgagaaatatgcaaaaccagaggagattttaagtgatgatgatgatgatgatgatagcatgagcgaagatggttcggactctgatgatgatgacgacgacgaaatcgttgggaaagccgatccatgactgtttacaaatcaatctttctttgcactttcattactccatcttcaactttaaaccagtaatgctcattgcaaagaggagagaagctttcctctgtaaatttgtaaagacttatcattctttaggactattgaaatctctttttttaaaacagtagataaaatgtaacaatttgctatctcacaccaatgaaacattaatccatatctcattttgtttgtcttatcctccaatttttgtttttttatacataaacatatcggaagatgcatattgccgacaaaaggacattcctctaaagtttactataaaatttcggtattacgatctaaagagcaacataaacaagaaaaggaatcatagacctacagaattatttgattactaaggtcacagattcactgctaaattgctttcacattgaatataagcaaaagagccttaatcctctcaggaaccaacaagggtccctctataaatggctaggccgtcttttaccagaatctgtccttaacctcttcaccggatttgcccatcccacagaatcaccgaccgcaccgctgttgtttggatgagtgggttggtttggccaccgctgctgttgtgctagccttgtttcccttggaactccaccagacacaggacttctaagaccacgaccaatcattgctggaggtggtgaaactgggctgctggagccaccagttcgggttttcggaccagacttctctcggtctttcctctttttcttgcagattact

SEQ ID NO: 139474 - DNA, 929 bp, Arabidopsis thaliana landsberg
aatgattcggtgcttcgcgtggacaccactaataggtgctcccttaatcaccaccgtccatttcacatctccgccatctctcagaatcttcgcatctcgttcttccgcaccatcatcatcatcatcatcatcatcatcatcgacaattgcagcagcatctagaagatcaatatctctgtcaattatcgccgtcacgtcttccgtcgtctcctccttttgcttctcgtctccggcactagccgacttctctgaaatccctaattccggcggcgttaaagctctcgacctccgaatcggcgatggtgacgttcccattgaaggagatcaggttttgtgtttttgtatttttgtatagatttcagcaaatgaacgaaccatttgattcaattttgcaaagttttgaattttagattgaaatacattactatgggagattagctgcgaagcaaggatggagatttgattcaacatatgatcataaagatagtaatggtgaagctgttcctttcacattcgtccttggttctagcaaagtataaacctttatctctatatgcttctatctcaatcatgtgttgcataaagtccaagtttttgtgacatgggtcttgaaaaattatctgaatttgatttaaaggtgtgacctttgatacatttcttctttgaatagtgatgtaacaaactaagtggtttgaggtttttgaagttgataatacttcttctatgtctctatgatgatgttttgtgatgactgaaacattttgatgtgcaggtaattccggggattgaaacagctgtgaggtctatgaaagtaggcgggattcgtcgggtggttatacctccatctcagggataccagaatacatcacaggaaaatctccaacacaaacgtatgtgtgcacacacacctctttctcctttggcctttt

SEQ ID NO: 139475 - DNA, 1403 bp, Arabidopsis thaliana landsberg; identical to SEQ ID NO: 8229

SEQ ID NO: 139476 - DNA, 2082 bp, Arabidopsis thaliana landsberg
aaacacagcaaaaaaaaaaaaagcctagaggaatagaatcggtctctttctctataatctctctctctctgacttgtttgtgttttctcaaatcctctgataagaatcaatggcgaaggaattagcagagaaagctaaagaagcttttctagatgatgacttcgatgttgctgttgacttatactccaaagccattgacttggatcccaattgcgccgccttcttcgccgatcgtgctcaggccaacatcaaaatcgataacttcactggtataaatataactctcttccttaccgttaatatcatcgttaaagattgaaactttattagatgtattgcttcgttgacgcttttggagttctgggtcttgttcttttgtcgttactttaattcgatctgttgatagtggaacaaagttttgatttttgttattggtttggtttagttttagttttagggtttcttttgtgaggttgttgattcggataagaaaacttatttgagtaattgtaattgtagttactgtactttgattgaattgttgttgtttgatgatttgatttgatattttatctttttgtggtttctatgagcagaagctgttgtagatgcgaacaaagccattgagttggagccaacgttggcaaaagcctatctcagaaaggggtatgatattttcaccatctctctgtagtgaatgatttgatgttatgttcaaatttgattggaattataattctatcttctgattctttgctactgtgttcgcagcactgcttgtatgaagctagaagaatatagcactgctaaagcagttcctggaaaagggagcttttgttgcaccgaatgaaccaaagtttaagaagatgatagatgaatgcgatcttcgtattgcaggtatgttacatcaactccatagcttaagaaattagttactaaacgattttgggtatttgtctgcgcctagggctataattttgatatagtctttgtatctctgttcagaagaagagaaagatttggttcagccgatgccaccgagtttgccttcaagctctacaacaccactagcaacggaagctgatgctcctcctgttccaattcctgcagcacctgccaaaccgatgttcaggtagtctggttatctaacatgtaaattcttctttaatttccagaatcattttatactcataactttattgctcaacaggcacgagttctaccagaaaccagaagaagcggtggtgacaattttcgccaaaaaagtacctaaggagaacgtaactgtcgagtttggtgagcagattgtgagtatccttcaatcagagaattcatgacttttatctgaacttcagaaactatctctctttgtaatttaacactctgtattgatttgagatgtctatcttggctttattttggtgcagctgagtgttgtcattgatgttgctggagaggaagcttatcatctccagccgagattgttcgggaaggtatattttatttgacatatgtaattacggtgttttcacacacacttttactaaatccttcttcatgggtgtttttcagataataccagagaagtgcagatttgaagtattgtcgaccaaagttgagatccgtcttgcgaaagcagagataatcacctgggcctcccttgaatatggtaaagggcaaagtgttttgcccaaacccaatgtctcatcaggtttgtctcagaagataccagcttacgtttactattttattctgaaccacaatcgtaaaaccttaaacaaactgaacccaaagtggtctctctctcttctcatttgattttatgtgcatatgcagcgctgtcgcagagaccagtgtacccatcttctaagccagcaaaagactgggacaagttggaagctgaagtgaagaaacaggttccacaaacgctaacttctcatccttaacactagaggctttgctgtactttgttctttctgcttatcacttttgaatttcgcaggagaaggatgagaagcttgatggagatgcagctatgaacaaatttttcagcgacatatactcgagtgcagatgaagacat

SEQ ID NO: 139477 - DNA, 1073 bp, Arabidopsis thaliana landsberg
aaacaacccttaccacctcgcctcatgggatcccaaaactttttgttgctcttggtactgcctcgagtgcggcgaggctactgtcaaccaccgtgtcacttccctaatcatacaagacggcgagatctccggtcagatcccccctgaagtcggtgacttaccgtatcttacatcccttatcttccgcaaactcactaacctcactggtcacatccaacccactatcgccaagctcaagaacctcacttttctcagactaagctggaccaatctcaccggtccggttcctgagtttctgagtcagctcaagaatcttgagtacattgacctttccttcaatgacctctctggttccatacctagttccctctcttcattacgtaaactcgagtatcttgaacttagtaggaacaagcttacaggtgaataactctgtttttttttgtctctattagtcatatccattaatctcatggactaaactaaagtttaaacttccatataggtccgataccagagtcatttgggacgttttcaggaaaggtccctagtcttttcctatcacacaaccagctctctggtactataccaaagtcactaggcaatcccgacttttaccgcatcgatttatctcggaacaagcttcaaggcgatgcttcaatcttgtttggagctaaaaaaacaacatggatcgttgatatatcaagaaacatgttccagttcgatctctccaaggttaagctcgctaagacacttaataacttggacatgaatcacaatggcatcacagggagtattccggctgagtggagcaaagcttattttcagttactgaatgttagctataacagactgtgtggacgcatccccaaaggagagtatattcaaagatttgattcttattcctttttccacaacaagtgtttatgtggtgcacctcttcctagttgcaagtgaagattccagcaaaaccaagcattatctctgatataccaaataattaatcaagtctagtgacaattgtgtttttattttgaatgattaataaaagcatgaaccaatgttttagcttg

SEQ ID NO: 139478 - DNA, 6223 bp, Arabidopsis thaliana landsberg
  unsure (1)..(6223): unsure at all n locations
gttatgggtatcgctaagcngcgtcttcagaatatatatctgttctcacttgatctgtgtctcatatgtgggtactcttgaatctcagagcttgaagcacaaccnctaatggaggtttgtcgtagtctgtggtgacggagaatatataatctacacggctttggcttggagaaataggtcatttggttctggactggaatttgtttggtcatccgagggggagtgtgcggttagagaaagctcatcaaagattaaaatatttagcaaaaatttccaggtttctacatctttttctctctgatctaagccgttctgttcaaccctgtatctatggttgttggaagtattattgatactggtcatggagatagctatattcggatctggctcattcagaaaatacattttcaggaaaagaggagtatccgccctactttttcagctgagaagatctttggaggaaccttgttagctatgtgttcaagtgatttcatctgcttttatgattgggctgaatgtaggctgattcaacgtattgacgtcactgtaaaggtatcccagttaacttggctcagtttattgtaagaagtttacttcaagacatatttggaatagtggaaactaatatcattgccttcagtttgaggttttcctcgtttgtttcttctctaatttgtagtgttgctacataacgtttgcagaatctatattgggctgacagtggtgatttagtagccattgctagtgacacatcattctacatcttgaaattcaacgtgaggatcctgtccaacaaacactcttatgctgtgaatttctatatgcgattcatggattgtccaagtgctaacatggtgttcttgttatacagcgcgacttagttacctcacattttgatagcggaagacctactgaggaagaaggtgttgaggatgcttttgaggttctccatgaaaatgatgaacgtgttaggacaggtatatgggttggtgactgtttcatttacaacaactcttcctggaagcttaactactgtgttggaggcgaggtattgtgcatatatgttggttactctgatttggaagttgttatgaactggattctaatgatggttgctaacatcgtaatactaggtaaccacaatgtatcatttggaccgcccaatgtatttgttgggatatcttgcaagtcaaagtcgggttttcttggtagacaaagaattcaagtaagtgcttagatttgtgtgtttatataattgagattgttctagaagtttctgatgctgttcccctgttttgtggatgcagtgttatagggtacaccttgttgctaagcctgattgagtacaagactcttgtgatgcgaggcgatttggatagagccaatcaaattttacctacaattcctaaagagcagcataacaagtatgttataggttattttggtctaaattttttgcattcacttataattcattctttactactgcattttatctcttgttgcctgctatgtcctatgaatgtacttttgaagaatattgtggatatgttctgttagagatattgcccccctaccaataggtttttcactgttttgtgtgtatctcttttagtttgatctgaaaatgtttttaatattcagtgttgctcatttcttggaatctcggggaatgattgaagatgctttagaaattgcgacagatccagactacaaatttgatctggccatacaactgggtagacttgaaattgcaaaggtaatatcatatgtgatgcttaattgcttagacattactttactctactctttttggaagtagaattttttttcttatctttgttttccatgcttgtaggaaattgctgaagaagtacagagcgagtctaaatggaagcagttaggagagttagccatgtcctcggggaaggtacatcttctctataaaaatgttgcccaatgatttgtagtggaaaatagaaaaataactttctttgcaaatgctatatatcagtcagtttactactttacattgtatctataggagcaaattggtatatttagatcttacaatgccaatgagctttcttctagcttttgcggattcattgctgatatctactacttactaagtgattctcttgcatttgtgtgtgttctatcatgatagctgcaattggccgaggattgcatgaagtacgctatggatttgagtggtttgttactactatattcttctttgggagatgctgaaggggtgtcaaaacttgcatgccttgctaaggaacaggggaagaacaatgttgcctttctttgcttatttacgctgggtagattggaagattgtctgcagttattggtggagaggtatttcattactgttcacttggccgtttggaaaaatcaaatatgtgtcttttgttatctttatgacaagaaattatcttgacagtaaccggataccagaagctgctctgatggcacgttcttatcttccaagcaaagtttcggagatagtagctctatggagggaagatctcagcaaggttattttcgcatcttttttttgtttactgtgtcaatgagaaaattcatcatgtggctttaaattgcctttgacttgtcatcaggttaatccaaaagcagctgaatctttagctgatcctgaagagtactcaaatctttttgaggattggcaagttgctctttctgttgaagcgaacactgcagagacaaggtatccgagcacttattttctgctattcgcatttttcttccatggtcgttatggctttcgaactgtagttcaataattatatatgtacctagatatgattgtacggatgtgatggatgccttaggaaaagaacttcatacttgagccactcatttttcccatgattatgcattgagatgttcatactcaagcgtgttattatttaggccaacccaaaaaattgactcttatttatctacaggggagtttataccgctgcagaaaattatccatcccatgccgataaaccttccattacccttgtggaagcctttagaaacctgcaagttgaagcagaggaatcacttgaaaatggaaacatcgatcacgaggtaacttcttttggaagtgattcgtttgctaagaagcaaagagctttattttccacagtagtagttactgaattgttttttgaactttgtgcaggtagcagaagaaaacggtcatgtagagaatgaaggagatgaagaggaacaacaggaagaagaagtgaatgaagaagagggaattgttgatggagactctacggatggagctgtacttgttaatggaagtgagggtgaggaagagtggggtacgaataatgaaggaaacccatcagcctaataagcaagtcggtccaggatcaatgttgaatagtcgaaattttgtctctggtgattaaattgaaacctctcccccaaaaaagaaaaacattttgccgcttctaacatttctatatgattatatgtctcattacccttagtaacacaatctttgagttggcataaatatgggtttagttatacgagttaactttattataatctctgcatcaatgtggctaatacttggagacttgtaaaacccctccatctttgccaaaagtgaacttatcgtttttgttttgttttgcagtgcttacgccacatccctagctagatccagtagccggcaccgatactccaaggtaaagatctatcatccttattcatgagttcaaacctctatgaaactggaccatgaattaacttcaatcatatatttttggatccattttgtagcaggaatcgattcttggtggatggagagtataaagacgaagatgggattggtggattaaggaatttggtgttgtggttttttcaactaatgattgtggttttcatctgaaagagtatattataacacagtagagagttatacaaattttctgctttagatttcagctcaaaattacaaatttctggtgcatatataattctttggaagcctttatcactttaatttccactctttttgaataacttagttaaggattgtcctataaagttataacattagctatacaaatctgcaagaagtattttacaacaaatgagctacgacaatacaacatgttatatacaaaacgtaaacatcttattacatgcgatgactatcagcaacaatatcgatttggatataaatataacaaataatacaaaaatataaactcgatttattaccatttttccaatgtgctgacaagattcgttttctcttttatcactcccctcggcgatctctcttcttgctccggcagggtttttctgctgctccttgcttgtccgtaagttctccgaatcttcattttctcgctggtctcgttggccgaatctggatttttctaattcccttttcttctatatactcatctcactgctcgctgctctggttcttagggttttgtcatatttctgttgttggattttttttctacggctccttttgaacctccttgctagattatccttgtgtgcgtttctggaattagctgtttcttcagattcctgttttgtgtttgctgaattagtttggggtttttgatttcaaatttcttctgtactatcatatgatttgcgatcgcgtggtgaattgttaacatgtgctcatatatacgctcttgttgcctctagatttttgtctcgtgttcattatcaatttcaattgcagtagcatgttaacttaggtttccttgatttaaagaatcacacattgtctatggttggtaacttatgtgcgtacaaattgggcatcctattcctgtttggatggttacaggttagaactatgctttcaacatataagctcgggacttccttatccgcgagattgattctggttatttggttgttaacacaatcttgatgtatcttttttttgttgcatggtgttgtagggactctagcttgcctgtaactgttaagagattacaatgggggactccgataatgctataccattttccagaaagagaactgctctgaaagagctgtctcgtgacaatcctggtcttgatgatgatgatgaagacacttctgcactcgagagtggtaccttcaacactgctagtaaggaggtgttggcaagcagaagaattatcagagttaggcgcacagatcgatctgctactgcaccaccagcttctaatccatttactggaattcgtttggttccttttactgctcctgctccttctactgctgctgcagaaacgactaaacctctgtctgcgggaaaacaagagacactggctgatggaaggtctgatgctaccaaggaaactgatggtgacagtaaagaaaagagtgacgcaattgatgctgtaggaaaacaagagacacagggtgatgaaatatctgctaagaccaaggatattattgatggtggagagaaagagatgagtgaggcagttaattccgtagagggtggtggagctgtaaacaagaatgaagacgagattaagacaacgatggttactgaagttgctgctggggaagagactgtaaaagatgacaacaacaatagcaacactgttgagggaagtgactgtgttgtcaaggatacaggtggtaatcagactgagaaagaaggaaaagagtgcgatggaaatgaagacacagagaaaaatggagatagtggagccttgagctccttccaccagcactcaagtagcaaaaacgcattcacaggacttgctagcacagggttctctgcttcttcgttctcgttcggtttggttccacaagaaggttcgactgggtctggttctgaacagtcatccttcagttttggccaagcaaacaatggaaactcttccctgtttggtgcatccgttgctacttccattaccacgaagagcacggaaactactactgccttcccatcaaagcaagatgtttcagtggaaacaggagaagagaacgaaaaagcagccttcacagctgactcagtaatgttcgaatatcttgagggaggatggaaagagcgtgggaaaggagaactcaaggtgaatatatcaacgactgaaaacagaaaagccaggttagtaatgagatcaaaaggcaactacaggttgatcttaaacgcaagtctttaacaaaaaatgaaactggctaaaatggacaagaaaggaatcacatttgc

SEQ ID NO: 139479 - DNA, 3932 bp, Arabidopsis thaliana landsberg
  unsure (1)..(3932): unsure at all n locations
aaacctctacacaaacaaaaggtgcgttcttttgcgttgaaatggctcatatctcaaatcgtttgtttctctttgtgggtttcttgttgttaccatgtttaaggcaaactgtctgatctgctcagacatttagttgtttttcctcttcatcactctgcgctagttttgtttccgaattcttttgagacaatattggtttagtttcttcttactcgattcacactttacgacattggattcctataaagtgatttacttttctctgaaaacggcaactttgttgcttaagaatctctctgttcttcaggatttgcattaacgtctctcgtttcctgaaaggaattgatgatttacgccagtagaatttgaatattgtctatgtggcagatgtaaagaacaagttacaaagagatattcacaagaatccgtctggattcatgtgtgaatagacatatgagcaaactctgttcttgatctttatgctttcttttcataaggattcatgttttgtgattcttgtaggtcctactttgattaatttaatcacagggattagtaaacaagtctcagaccatagattaataagatccccaatggtgataaacaatctcaagacagtctttttggtaatacatacctttattctattgctaagatcacatgctagaatttggtctttactacttcttgaggtttatttatctctgtgatcttattgaaactgctgttaaactatctacttaatcatttgtctctattgctctcaggtcatagtccatcgttgaccaagatttgaatccaaggctttcccggagagtatatactagttatcaaaacactcataaaaagctctggcttgaccaaattttctacttaagcataacggtggagatctgtttttttgtgtgtggctatataacaaccttattgtctaggctgggattaaacaatggggggttgtgtgtcgactagtagtaagagtacgtgtagcagctggagcaatggagagaagcctgtgcgtcgaccatatctcgggattggttgttgtgtgagcaaaagggcgaagagaacgttttcagaccacattgtctcgttgcagaacttgacttctataccaaatcggatcaccagcagcagcaagagcaggagctcttgcattttcactcaacaaggacgcaagggtattaatcaggacgccatgattgtgtgggaagtgagttcttcagactctttctattgtatttctaacactatggtcaactataaagccggatttctttgttgctttgtaggattttatgtctgaagatgtgacattttgtggtgtatttgatggtcatggtccttatggccatcttgttgctcgtaaagtgagagatacattgcctgtgaagttacagtttttctttcagacgcttcagtcgaagcaaaactgttctaaaggaactcgattcagaagaaattcaagcaaatcagctgtccaagaagctgttaaagaaggatctgacgaggataaactgaaaggcttatggggagaagctttcttgaaatcttttaaagccatggataaggaactgcggtctcatcctaatctggactgtttttgtagtggcagcactggcgtaacaattcttaaacaggtacacttagagaacaaagagctctctttcagcttcaaccatgttttctttaatcatctcttttgattgttcaggggtctaatctcttcatgggaaacatcggggattctcgggccatccttggatcaaaagacagtaacgattctatggtggcaactcaactgacagttgatctgaagccggatttacctagtatgcttaacactttttcgaaatcttttttcctggcttgtatgcatttatctaataggatgttactgttttgtgggtctgataggggaagctgagaggatcaaacggtgtaaaggtcgagtatttgcgatggaagacgagccagaggtgccgcgagtctggctaccttatgatgatgcacctggattagccatggctagggcgtttggtgacttctgtctaaaagagtatggagtcatttcagtacctgagttcactcaccgtgttcttacagacagagatcaattcattgttcttgcctctgacggagtaagtaaacgagtgatcttattagcctatgagcctcaagacaaaggctttactgatttttgagctttattgaacaggtatgggatgtgttaagcaacgaagaagtggttgacattgtagcttcagccacaagccgggcatcagcggctaggaccttggtgaactcggctgcgcgtgaatggaaactgaagtacccgacttccaaaatggatgattgtgcagtggtatgtttgtttctggatgggaaaatggattctgagtcggattatgatgaacaaggcttctcttcagccacaaatgctgtagaatcagatgatggccaaagatcagaaccatgtctccaaagaaacttcacagttagatcatcatcagatcaagaaaacgagacttatggtaacgtgaatacagagactgatgcagaggatgaganaacggtaggagatcaaaactggttgggtctacaaggcgtcacacgtgtgaactcacttgtccagcttccgagattctctgaagagaaatcgaagacttgagattagcttttaatgttatttctgaggactgatcttgaagaatgttgtcatttttcgttgttatgcttgagcattgtgcgcagcttgatctgtatttgttttgctggtgtttcgtgtttgatgtatctgtattgcacaatggatttgcctcatcgattctctcttggaatccatgaatcaaatgtgtagatacattgcttttaggtatctctctaaacaaaaaaaaagtatatatgtgcttgtgttcttcatccacctcctgttagagtctatagaatctagaatctacatgctgatatcacctaatcctgacaagtatttgcaggcacaaattagcttagatgaacactctgaacaaacattcaaacgctcaagactaatttttgaagagagattcttggaaaaaaggaacacttggcaaaccttgcttgagtgagaactggagttcgtttcctctgatgcttgcgcctcagctttttcgttcgagtaacttccagaattcaaaatgaaaatcaggcaaccgatattagcaacacaaaacttctcttcatgatagccacaaagctaatatgtgcaacactttcaaatacattggataaaaaagattgaagttgaagaaggctcacgttgataatatagtgacccatatgagttcaatacaatctacccaaagaagcctttggtctacagggattacaccgtatgtaaccaagtgtgccaatggccagagtttccagcctgcctgcatagacaaaatcatgacataacctttagataaaatcaacagactaactttaagctttatatatgatcacgaagacacagggcaaggagagttaattacagtgagcattggcaaaaatgttgtcttgatttcgctgaaaatgtcagctggagattggaaacgcaagagccctaaaactgtaaagtagatactgttccaaattgcagaccatacggtttgatcaaatgcgacttttgcagggactacccaccattcttggaaaggaaagagagccttgtacaaagaaaagattttagctttcagcccgttgttaatacaacatatcttgacagagcaaagattgatttttacctcacagaattggtagtaatagtgagacagtgaaccatggagtgtgaatccaacaagacctgatctaagaacacgagttcgatcaaactcaaacagcggttttccttcgtaacactgcataaagttacagccaaaatggtcagagagaactcaaattaagaagct

SEQ ID NO: 139480 - DNA, 2303 bp, Arabidopsis thaliana landsberg
ccggcaagatctaatcgggtctgatctcgagcttccttcactaaccagagatcagaatcgtggtggtggttacgatctcgtcgatcgaatgccgtttctatacattcgtgtagctaaagcgaagcgagcgaagaacgatggaagcaatccggtttacgcgaagctcgtgatcggaacaaatggcgtgaaaaccagaagccaaaccggtaaagattgggatcaagtgtttgcttttgagaaagagagcttaaactcgacctcgcttgaagtttccgtttggagtgaagagaagattgagaaggaagataaaacaacgacgactactgagagttgtttaggaacggtgtcgtttgatcttcaagaggttcctaagagagtgcctccggatagtcctttggctcctcaatggtacacattggaatctgagaaatcaccggggaatgacgtcatgctcgctgtttggctcgggactcaagctgatgaagcgtttcaagaagcttggcaatctgattccggtgggttgattccggagacgagatccaaagtttacttatctccgaagctttggtatttgcgtctaacggtcatacaaacccaagatttgcagctaggtttgggatccgaagctaagtcaaagatccccaccactgagctttatgtgaaagctcagcttggacctcaagttttcaaaacggctaggacttcgattgggccgtcggcttcttcgtccggatccggtaacccgacttggaacgaggatctagttttcgtagcttccgagccgtttgagccgttcttgatagtgactgtggaagatataaccaacgggcaatcaattggtcagactaagatacatatgggaagtgttgagaggagaaatgatgaccggactgaaccgaaatcgaggtggtttaatctcgccggcgatgagaagaaaccgtactccgggagaatccacgtgaaagtttgtcttgaaggtgggtatcacgtgctagacgaagcagctcacgtgacgagcgatgtcagaccctctgctaaacagttagccaagccacctattggtttattggaagtgggtatccgtggagctactaatttacttcctgtgaaaaccagagacggtacacgtggcaccaccgatgcttatgtggttgctaaatatggaccgaaatggattcggactcgtacgatcctagacaggtttaatccgcggtggaacgagcagtacacatgggatgtttatgatccgtgcacggtccttactattggagttttcgacaatggaagatacaaacgggacgaatccggaaagcaagggagagatgttagggtcgggaaaatccgtgtacgtctctcgacactcgacatgaaccgcatataccttaattcctacaccttaaccgtgatcttaccaagcggagccaagaaaatgggagaagttgaaatcgcggttcgattctcttgtccatcttggctaagcattattcaagcctatgtcacaccaatgctacctaggatgcactatgtccgtccgcttggtccagctcaacaagacattttgcgtcacacggctatgcgtatcgtgacagcccggcttgcgcggtctgagcctccattaggtcaagaggtggttcaatacatgctagacacagacaatcatgtgtggagcatgaggagaagcaaagctaattggttccgtgtcatcacgttcttgtcacgggccgcaactatagcccgttggattcacgggattcgaacttgggttcacccaccaacaaccgttctcgttcacttgcttctcgtggccatcgtcttgtgtccacatttagtcctccccaaccgtattcatgtacgcgttcttgatcttagccttaagattccgttaccgtggcagagtcaaagtcaacagcgttgacccacgactatcttgcgttgactccgttgctcccgacgagcttgatgaagagtttgatggtttcccaacaacgagacaaccggaggtcgtacgtataaggtatgaccggttaagggcattggccggtcgggcacagactttattaggtgacgtggcggctcaaggggagcgtgttgaggcgttgttcaactggagagacccacgcgccacgtgtatattcgtagtgttctgtcttttcgcgtcgtttttgttctacatcgttccgtttaaagttttccttttgggctctggtttttactacattcgacatccgaggtttagagacgatatgccttccgttccggtcaactttttccggcgacttccttcaatgtcggaccagattctg

SEQ ID NO: 139481 - DNA, 3162 bp, Arabidopsis thaliana landsberg
acatacatatcgttttattgttgcagaggactatagattcatgtctctacttttttgattaatctagttccccatcatctctcttgacaagaattatacgggtgatcgcttgaactttggtttggctgctgaacaagcaaaatctgaaggttacaaagttgaggtactgctcgttattgctacttcacagttgagattttttgccagaagaataatagaatctcctttgtagactgtaattgttggagaggattgcgctttacccccgccacgtggcatcgctggacgcagagggttagcaggaacagttcttgtccataaggttctctcgtcctttcctccctttctctaaccacactctaaatcagtgtctttagtatgcagttactgttcgttgatattgtttttgttactgtatcttttcaaattgtgatgtctgagaccttgggctgctatattttgattgattgttttgtcttcacgagcttagaatcaataagaagttctgaacataaagcttcaagcatcagtttattttgtttgcttctgcttggcaaatggtaggttgcgggggcagcagcagctgctggtctttctctagaaaaagttgctgctgaggcaaaatgtgcgtcagagatggttggtaccatgggtgttgcattatccgtctgtacacttcctggacaggttacatcagatcgtcttggcgcacagaagatggaactcgggcttggaattgtatgttattttctatctttccgagtttgcacactaattcactttgcttcagtgttttggtttgtacgttgacatcttgtatcattttctctcagcatggagaacctggtgctgctgtggttgacgttgaacctgtggatgtggtggtgtcccatgttcttcagcaaatacttagtcctgtatgtacttatatgtgctatctttatggaagtgtcttgtttcctcagtcatatagatccaattatttttccatttctgcaggagaccaattatgttccaattactcgtggtaacagagtggttctcatggtcaatgggtaagccacactagatgtattttactatttaaacggaaatttgtctatttactccataatttgaactgcaccaaatgctgctgctgtgatatcaattttggttcaatgattctgtgtatttggttgttaggggagaacttagtttctccttttcgattttgcagtttgggaggcacacctttaatggaacttatgattgctgctggaaaagcagtccctaaactgcagttggaatttggacttgccgttgatagggtgtatacaggcttttttatgacttctcttgatatggcaggtgagtttctgtcgatttcttcatttagttaagtgttacatactcctgttatcattctgacgatgcttcttttcccaggattctcgatttcaatcatgaaggctgaccattcgattttagaccaattggatgctccaaccaaggctccaaattggccagttggcactgatggtctgtgagattgaacctgtttctgtttttccatgaattttttccttggaatatagtcttagatacaaaatttttgttgcattgcaggcaaccggccaccagcgaagattcctgttcctgttcctccttctcgatcaataaaaagcatggaggtatgcatcacaagtatgataaagataggttgtttagaggtatcaaggtttgttgataaatggttttggtaaatttcatgacaacttggcaataccagtctcaaagccgacctctagagctgagtaaagaaggtcaagttcttgaggcagctattcaagcagcagcaactgtgatcatcagccttaaggatagtttgaatgaatgggatggaaaagtaggcgatggtgattgtgggtcaacagtaagtcttgttttttagacgttgctacttgctactgtgcataattatattatgttcatttagtattattatcttacatgggtttgcatcaatattgtagatgtacagaggtgcaacagctattctggaggacatgaaaaactagtgagtccatttgatactctcacttccccatatacctctctttatgttgagttcttcagacttcacagagattcttgacaaaaaatttaaccatgtctctttttgtttctagttatccactcaatgatgctgcggaaacagtgaatgagattggtctatcaatcaaaagagccatggggggcacaagcggaataatgtaattcatgaaattattttacattttctttcgttatagacagctcatgcatttgggttttattggtaaagtgacattacgggctctcttgtgaaaacagttaccatctcctctgcaaggcagcatacgcggagctaaaagctaacgctcaatcagaaaccactcccaaacactgtaagatatacgttgcttgcattgtcgttagttagtattccaaaaggcacatcttggcctatgaatctgatttcttcttgtaatcagggtctgaagcactcaagtcatcaatctctgctgtcagcaaatatggtggagcaactgccggttatagaacgatgttagatgcgctcatcccagcttcaaaagttcttgaggaggtgacaaagagcaacttactttctttcacaatttagataattgcaacctgcgcaagtagtaatgagtttttgcttttgataagaacagaaactgagcgctggagaggatccaatatctgctttcattctatcaggcgaagcggcaactgccggagcggaatcaaccatacagatgcaagcacaggtgagtttagcataccattatttcggtctgccattgtttatgctataagtggttttcatattttgaaatgacggatgagattgtgtaaaacaggccgggagatcaagctatgtatcagctgagatttttgcatcaattccagatccaggtgcaatggctgcagcggcatggtacaatgcggcagcaagagccgtaaaggagcagtatgagggctcgtcatgatcccttctccggagtttcttcttttatttcccggatagacgaattgggattctggtgtatgtacgtttaaaagatgtctgactttgtgagggcgctctccgtttatgcaatttttttggtggtgcgt

SEQ ID NO: 139482 - DNA, 4854 bp, Arabidopsis thaliana landsberg
tttctaaatctcacatgtgtagatagcaaatgaaactgaaattgagcttctaatcactatttaaaccaaaatgtaacgttttccctctattttgactcatcaaatcctaatactctttcaaatgtgttattttcattttgaaacctcttaaacaagaccaacaacacagtatatagtcgaataagtttgcacaaaatacgttgaggagctaattctagtaagttaataaaattttgtattttatcatactttcaactttaccgtacataataatacattaggaacctttttttaagaaaaaaaaacgaaaaatactcataaacgttggaaatctaattatagactgtttagtagatgttgttcaaaaaaaaaaaaaaaaaaaaaaaaacctgtttagtagatttataatatttggttttatttcatatttttaaacatttccatagtatgtagcaaaactatatttttttttaattcagaaaatgttaatattcactgctctttttttttcttcaaaggaggaaaaagcctttatcatttggacggacaagcgctcgagaaactaatttaattcaaaaatacttttttttttgtttttctgtcatttcgaatctgtctctaatctcatagggttcaaaatttggtttctgctgttctctcgagaaaaaagtagagttcccgcattgttcagattctctaagattcattcatcaatctgacttttcccgggaaaattcactgactctgagtccaaacccgaatccagcgatgatgtcgaacttggtagagccatcgtggcgccttctggcagcgagcggcggagatacggttaagcttttcgacgtttctgccgattccggcgatccctgcgttttgagctatactccgtcacctggttgtgctgtcaactccgtcaagtggaatcatacgagtatgtattctccgattagtctcatttcctggtttcttttggttggtgagagtttaggaaagttgctgaagtagtgattccacttttgatcttaggtttctgtaatgattcagctgagttttagtatttaacaaatctggattttctgtgatctgctgttcaaaattgaggttctgtttaactttaggaatcgtaattgggaatgcaattagtcaatttctgctggaagcaaacaagtttcttggtgaaaatcgttgtgttttagatgctctttaattcaatctggtgaaaatcgttatttgttctcttttcttttccatttgttgaagttatgttatttggtatgcagatttagtggtggcgagtacgggagaagataagaagatatccctgtggcggaaaaatgggcagagtttaggaacagttccagttactgggaaggacggtggtgatagtgctgaggttatattcctttctctccactgattctaatttccatgtcttgcatctcttggatgatactatgtttgtgtcttgatgaattcaggaatgtttatcggctattagcttcagcaaaaaaggctccaggtacatttgttctggaggaactggtcaaattgttaagatatgggatctgcaaagaaagctttgtattaagaagttgaaaggtcatacaagtacaataacgggtgtgatgtacaattgcaaagatgagcatttggcttctgttagtgttggtggggatctaatagtccataaccttgcatctggagcaagggctaccgaactcaaagatccaaatgggcaggttgttcagtttgtacatgtatacttacatctatagaccagagcattggtcatcaaattaattgactttttaatcgattcaagacaccaggtattaaggttgcttgattattcaaggtctagtcgacacctcctagttactgcaggtgatgatggcactgtacatctgtgggacacaactggtcgtagcccgaaggtttactcttttacttattggtgttcatgtggaaaagactgtattttccattacattggctctcctgtcaattttgaaaagctattaggaacttttattttgatggtgttgtacaccttagtgggggaagggggggcagttgggaagccaattaacttttctctgctttcatttccacagatgtcctggttgaagcagcattcggcaccaactgctggtgtttgcttctctccatcaaacgaaaaggtatctgaatccttatcactcttgctacagatacgcaagaaagtcagaaaaaagtggttgcaattgattctgcaaacaatgtgcatgtcaccctcaattttgataagcctgtctaatgctcttgacatagagtttataaacatagtatctacctaacctacaatctagattatctaccgtaacagataattgctagtgtcgggatggacaaaaagctttacacttatgattctggatccagaagatcttcgtcctgcattgcctatgaggcacctttctcctctttggcgtttggggataatggctatattctggtagctggaaccagtaacggtagagtagtgttttacgacgtccgtggaaaaccgcagcctgttactgtcctgcacgctttcagtaattcagaggtaaatatttaacccactgcaatctatttagcatgtcctatctaacgaatctggttccatggatagttacattttgcgcttatcagtattagttgtttatttgttgtccctatcctggtttgtcagcggcttcatcaatttaatatctccaatagtagcagcgaatgtttttttcttttggtgtatattgttggggtcaactgactaatgatacataatactttggattgcaaagttaacagcatttgtttgtatcgatcaggatgtaacaagtttatcatggcaaacatcaaaaccagttattgtgaatgagaaaaattacacttctgagatggctcttcttggcagtactgtggaagattcagttgtcattccagatccacttccctcaacgacaccctcagcttcacagtccgctatggcaccaggttcccgtggagtatccgcgagtactgtaaatgcatcatcagttgaacaaacaccaaatagaaatcatctatggcctagtgggccactgggcagactgcatgcacttcgtgcaaatgacagttataatgatgatatgggtgttttttcacctattattgacgtatcatctgttgataagtgggctgatagtgaaggatataataataaggaccatttagtagttgacaacaagccgtcctctttgctatttccgtcatccaccaagggatattcgtttggagacaatggaaacaaggaacatccaatattcgattggaaaccaagctctacttcgaaacaggttcgtgtttcttcatcaagcaagtgcttgttttttttataaatcaatttcataacttcattacgtctcccaagtctctgctagtctgtttatttgtggttgtacagaatacactggctggacttaatttaacttgccttctataattctctttcgtatgtttcatcggtttcaaacgttttccattgtttacacaggatgacccgagggctgctttttcgtcttttggatctattacgccaacagcatcatccaaaagtgaagactctgccttgacacctccagaagcatggggtggtgataaattttctgagaagtttaaccaattggccaatgagaagttttctgataaatttagccacctgcatgcaccttcacgtctcgctgtttcaagcacaggtgctagtacatctggatcaatgttctctagctctcgagatttccccttgtcgcatggtcagacaaacctcgcaaacgctagcttagaattcccacggatcagagacttctcttcaacctttgagacatcctcaacacagacagacaacaacttgccttcaagcccattgtttacaaaaggcatcacagctcctggtaacattgattcgttgaggctatcaccaaattttactcgtaggttctcaacatatgctgagagaatcagcaccacttcttcctttagtgacggggcctctctcagtctgggtggctcacccaagataaagaaaacaggctcagaaacgagagaggaagttttaaatcatctgttggcaagaccagagacagtagttgcaacagaagcaggagctatgccgcttatgaatgtacgtaaaagtttcacaaaagcctgagagttcatattgtttggatatctgtaacttcactaacttttgcaaacctgtagcagggagggttgaagcaatctcaaacggatcaacagcaagtgatgggtagtagcaatttcacgcttcagctatttcaaagaacgctcgaaggaactctggattctttccaaaactcaattcatgacgacgtaaggaaccttcacattgagatcctcagacagttccacatgcacgaggtatcgtttgctcttactcgaatctcatccatgtcttctttaaatgactgaaactgtttcttttttaacagatggagatgtcgaaggtgttaagctcgattctggagaaccaagcggagcaaatgaaggagttaaagttgttgcgaaaagagaatcaagagctcagacaaaggctttaggggagaccgttgtgagttttttgtgtttaaatgatgtgtggatttatatctttctctttggtactcttcatgtgttcctctccccgatcgaatccgttttgatttcatattatgattgatccgtttgggttttggtagagatcttgtataatttgaaacactgcgtttcctaatctggaggaagcaaatcattaaccatgtcacaacgtttgccaacatgtttccttttctttttgtt

SEQ ID NO: 139483 - DNA, 1923 bp, Arabidopsis thaliana landsberg
tcaaccattggttttttttttcttcctttttgttccgattccagatttgaatcgtggatttgtgagtacttacaggtcaatgcagttgaaggtgaaaacattggaagatgaaagagagaagagcttgaaaactgagaattcagatctagatagaatcgcggagacgaaagagaaccacactgaatcgggcaacaactccggcgtaccggttactgagctgaaaaattctccagatccgaatgataatagtcctggaaccggatctgagaacacgaacagagctgttaaaatcgctgaaccagtggacgaagaaccgaaccggatcggcggagaagacaacgacgagaagccggcaagagaggattcgggtagaggaagttgcgagagcgtggcgaaggaatcggatagagcagaaccaaaaagagagggaaatgactcgcctgagttagttgagtcaatggacgagtcgaaaggagaggaagatacgaaagaaacgagtgatgggcagagctcggcgagcttcccgagaaaggagacggtagaccaagaccaaccggataacaaagatcaatctctcaccgtcaataagatcttcgttgaatctcagccgttgagtgatttcatcgagattcttcagtctcaccccattggctctcacttttcgcgccggctcgaaacccaggtaaaaaaaattatgacattgtcagcaattcaaattctgtcatttttgtaatcaaaaataattttctacattatgtttgattctataataaacaatcctttatttaagataatctgccgatggttaatttttcctttaaatgaaaaatgttctactgtatttattttagtatcatgattaattcatttttcaaaaggcttgtgtcttaaagcctgagtcttatttgtttgattgtgaagttgcaggaaacatccgactactataggataataaggcaacacatagactttgagatgattcgaagtcgtgtggaagagggttactacaaaactgccaggaccaagttttttcgggatttactgctactaatcaacaatgtgagagttttctatggcgagccatcgcctgagtttaatgcagcaaaacagctttaccaactcatcaagaaacagatgagtttcaagattcctaaacaaaccttaccaccaccaaaagaggatgccttggtgacgtctaaggaggaagtcaaagtctcttctcttaaaccaacactttcagtgcctattatagcttgtcggaaacgtagttccttggctgttagatctccagcgtcagtcactgaaactttgaagaaaaagactagagtagttccaacagttgatgagaagcaagtttcagaagaggaggaagggagaccctctgataaagatgagaaacctattgtttctaagaagatggctagaggagcagcaccctcaacagctaaaaaagtagggagcagaaacgttaagaccagtttgaatgctggtatctctaatagaggccgatctccaaacggtagctctgtgctgaagaaaagtgttcaacaaaagaagggtatcaacaccagtggtggctcaaaaaagcaaagtgctgctagttttcttaagagaatgaaaggggtttcatcatctgaaacagtcgtagagacagtgaaggctgaatcctctaatggaaagagaggagctgaacagaggaaaagtaatagtaagagtgagaaagtggatgcagtaaaactgcctgctggtcagaaacgattaactgggaaaaggccaacaattgaaaagggtagtcctacaaagaaaaacagtggtgtcgcctctaaaagaggcactgcttctctgatggcaaagcgggacagtgaaactagtgaaaaggaaacaggttcttctactcgtccgaagaagcgttcaaagaggtga

SEQ ID NO: 139484 - DNA, 4562 bp, Arabidopsis thaliana landsberg
agacttctttctagagaaaaagatcttcacaaatatgactgtgatgaatcaccgacacaagcaatgtcattttctcctcctccttctgatcactgtcttctccgccgcgttggatggtgtttcttccgaaacagacgtcggagggtttgactacggtgaagcattgtctaaaagcttactctactttgaagctcagagatcaggaagacttccgtacaaccagcgcgtgacttggcgtgatcactctggtctcaccgatggtcttgaacaaggggtttgttttctgttcaaaactcttgtcattttattttttaattaattttatttttgaattcaaactaatttcagtttactatcattagtttgaattttaataagagaattgaaatttattgtttgtattaatttataattaatacataaatttattgtagatttccatttaaagaaattattttctttggtttggaatgagacttgaaaaccttttgtgaattaagtattgaaattaattatttgttttattttgtgatgtgactttgattttaaatttttgattataaaggttgatttagtgggaggatatcacgacgccggcgaccatgttaaatttggacttccgatggcttttacggtgacaatgttgtcatggagtgtaatagagtacggtgactcactcgcttccaccggagagttatctcacgcgcttgaagccatcaagtggggaacagactacttcatcaaggcacacacaagcccaaatgtcttatgggccgaagttggcgacggtgacactgaccactactgttggcaaagaccggaggacatgacgacttcacggagagctttcaagatcgatgagaataatccgggatcagatatcgctggagaaactgcggcggctatggcggcagcttcgatcgttttccgttcaacaaatccacattactctcaccttctcttgcaccatgcccaacaagtacatacatactcattttaaatttaatttaatgttacagttggaacagacattttaatgtttttgggtaggacatttaaataagttatggttatggttttggttgtagttgtttgagtttggagacaagtacagaggaaaatacgatgagagtctaaaagttgtgaaaagttattatgcctcggtgagtgggtacatggacgagcttttatggggtgccacttggctttatcgagccaccgacaatgagcactatatgagttatgtggttgacatggctcaccaactaggtggcctttcttgggccatgtccgagtttagctgggacgtcaagttcgccggtgttcaactcctagcttccatggttagtacttacatattgttcaattttgtgtgtggtaaaagtgaaatatttatagcactaacctcttagtagtctaatttaagatttaagtagaatcttataattgccttatgtgcagtgacaatcgagtttaaatattctcacgtcgaattaccaaaagtaaggtattccccaccccgcgttacatatgtacaacaactattcaaatattttctctttgtatgcaaatgaaatactttataactaaatattagtactagcatttagaaaaaagtttagttatgaagcagaaacaaaactaaaggtcacgtgcttttgttcctctaagtctaagcggatacgtctctttaaatggttctgttttatggcacgtgattctaaacctacttgataaattagctatattctgattgacaaaaaagaagaagctatattcttatgtatgaactagtctacgaaatttacttgagttttaagcactaacaacacttgcctcatttttcagttgctaaaagaagaaaagcacaagcaacattctaaagtcctacaacaatacaaatcaaaggcggatcattacctatgctcaattctcaacaagaacatcaacggcacaaacgtccagcgaactcctgccggtttactctacgtccgacaatggaacaatatgcaatacgtatccacagcatctttcctcctaaccgtatattctgatcatctccgaaaatcaaacaccgatctcgagtgtcacgaaggaaccgtaactcctgacgagatgcttggctttgcgaaatctcaaatcgattacattttaggatcaaatccaatggaaacaagttatctagtcgggtacggtccaaaatacccgattagggttcatcatcgaggcgcgtctatcgcttcttttaaagagcacaaaggttttataggatgtactcaaggatatgataattggtatggacggtccgagccaaatccgagtgttttagtcggggctttggttggaggaccggatcaccaggatgattttgatgaccggaggggtaattacgttcaaacggaggcttgtacgtacaatactgctcctttggtcggtgtgtttgcgagacttatagagcttgaggagcaaaaacttgaagaagaagatgtgagcttggttgcaacttataagagatagtttttatttaatcaatacaaaaaaaagaaagaaaatgtggttttattttgcacccattttgccatttctatattgttagagtttttcttctcaactttttttttttgttttgtttttaaataaaaagtgtgtataaaatatcaattatcaatatagatttttgtcaattttattagttaagaagttcgaacggtctcttctttttgcctctgttttgcagtttacacttaccatttttacccctgccgtttttgtggattaattgcgttatacgacgtcctcttacactttcactccaaacgacgctgttttaagcaagaaactccatcgtcttcttggcaaaattctggatggaagaaagtagaagtcccgcccaaattggggacgaacacctttcaccaacggcgaaggctgatctgattgatagaatctgcgctgaacttggagtatgtgaagaagaagcactttgttaccttgatggattccactgggattttgattcggcgttggaggcttgccgcaaccaaacctctccgtttccgccgtccctcacagttgaatctacgccggtgaacgctaactccgcgtcgttgacaactccattaatgatcgatcctcttcggagttggaatccgccggatgaacaatcgagaaatgaaagtatcgcacgattttgctacgcggttgctggagttagtgtagaagaggcacgcgcttacctcgagcgaagcaattggaatataaacctagccgtcgacagtttcttggtcgagcgccgtgcaacgcctcttcaaaagaagtcgaatcctctacgattagattcaaaatcgcggtttctagattactcgaaaccactcagaatcgggagatcttcttctgagtatggatttgtttcgtatataagtgtttagggtttttctttctgattctggtgaatttctcgagtaagggtttttttgtgtgtaatttttagccattttcttacctttgacagctcgatggaagttgactcgacaggagaacagatccctgaagctataccacctctaatggcgtcatctcaagtcaatgtactgtaatcttctccttctctgcactctgtggttattgtcttgctgttttctctaattgtgtttgctaaatttagaatcttagtttcatttcttgatggacttctctgttttcttaagatagttaataagaatggaactcaatgttgacgcatacactgcttacattttctccattcagactcaagaaaaccaggaaagtactagtgtttggccgccgatgaaaacttgggttgatcgaatctgccatgaaaccaaagtgtctcgagaagaagcattctattaccttgagggatccaagtggaatttcagtcgggctgtggaggcttgtcgcagtaaaaccttgccggtggtttcggcgagccagaaatctgctgaggcgccgccgaattcgccagagcaaccgtctctactgaaaaatgaatggatctcttcattctgcgaggcggctagtacagcgactagagaggaggcaatctattgccttaaagtctgcaactgggatgtacatcgagccatcggcttttatatggaggacttctcagagcatcaaacgtcagtggcagtcaatatgagtttgaaggagaacagaaagctgcctctttcatccatcgaattaccttctcaatcgcagtttgaggcttcacttggttacttgaaagaaggaagcacttctaggtgatttgtccctttctccaagaagtatgaaatagtctcgtaaatgttgatttatatcaagttctaaatccttttcccgccatttgattacttgtacagtttgttggaggttgatccgaccgagttaaaaaggtcactcgaagaggctggtgaagaaaacgccgcagtagctattcctagaatgacatcgtctcaagtagatgtatgtaaccttctcttcctctgcactttctttctatggtcttgcttgttttctcggactgtgtttactaaagcctaagcgcaaaacataagccg

SEQ ID NO: 139485 - DNA, 306 bp, Arabidopsis thaliana landsberg
gtctctgcaagtctcatcagaagaggaagagaatcaatggcgagttgtttcagctacgtgtcttctcgtaacaaatgttaccaatacagcttctctcgtgctggtctccgatcatctacctccgatcttggcgacggcaccgtcttccactgttggatcccacttactcacatccacaccaagcccacgctcctcctccttcacgggatcggagctaacgctatgtggcagtgggaacagcttcatcgaccgttttatcccccgcttcaacgtctacgtaccggacctcatcttctttggcgactc

SEQ ID NO: 139486 - DNA, 1340 bp, Arabidopsis thaliana landsberg; identical to SEQ ID NO: 25460

SEQ ID NO: 139487 - DNA, 745 bp, Arabidopsis thaliana landsberg
ctacaacaacaaatacttttacgaaaaaagcttttaaaacttatctagtttcgtttgatacacatttgaagaaagaaatggcatccaaccaacagagctacaaagctggtgagaccagaggcaaggcccaggtaataagaatatatttttgtgtatgtgtatacgtaaaaccacattatataagctctaagatgatttgtctgtgtaataccaggagaagactggacaagctatgggaacgatgagggacaaggctgaggagggccgggacaagacttctcaaacggcccaaacagcccaacagaaggcccatgagacagcccagtcagctaaagataagacatctcaaactgcccaagcggctcagcagaaggcccatgaaacggcccagtcagcaaaagagaagacatctcaaactgcccaaacggcacagcaaaaggcccatgagacgacgcaagcagcaaaagaaaagacatctcaagctggcgacaaagctcgcgaggccaaggacaaggccgggagctacttatcggagacaggcgaagccataaagaacaaggctcaagacgctgctcagtatacaaaggagacggctcaaggtgcggcacagtacacaaaggagacggctgaagccggtagagacaagacgggtggattcttgagccagactggtgagcatgttaagcaaatggcaatgggtgcagctgatgcagtgaagcaggggatcctctggcctgcaggcatg

SEQ ID NO: 139488 - DNA, 1695 bp, Arabidopsis thaliana landsberg
aattgtaaggttgcttcctctgtttgctttatcattgatgattctgtttctcagtgtgtgtgtttttgatcatcagctctggaactagtcaaggccgtccaaagtttattcctttcactgatgaattaatggagtacacattgcaactgtttcgcactgcttttgccttcagaaacaggtatagtttaaatttgtgtttatgtttcccccacacacatttcacacttttctctgttccatccattgacatgaacagagaaactagtgatgttgttacttaccaccgactatgccttaacatgtgatgtttttcttcttgtacagagattttcccattgatgacactggcaaagctttgcaatttatcttcagcagcaagcagtacatatcaacgggaggtgtcccggttggaaccgcaaccacaaacgtgtaccgcaaccctaacttcaaagctgggatgaaatctataacgtctccttcctgtagtcccgacgaagttatctttagtcctgatgtccatcaagccttgtattgccatctcttatccggaattctcttcagagatcaagttcaatacgtctttgccgtctttgctcacggcctaattcacgcttttagaacctttgaacaggtttgggaagagattgttaccgatatcaaagatggtgtcttaagcaaccgtattactgtcccatcggtccgtactgcaatgtcgaagctgctcacacctaaccctgagctagctgagacgatccgcaccaaatgtatgagtttgagcaactggtacggattgattcccgcgctcttccccaacgcaaagtatgtttacgggatcatgactggctccatggagccgtatgtgccaaagctgagacattacgcgggtgatctacctcttgtgagccatgactacggtagctcggaaggatggattgctgctaatgttaccccaaggttatctccagaggaagctacatttgctgtgattccgaatctcggttatttcgagtttctccctgtatctgaaacaggggaaggagaggagaaaccggttggtttaactcaagtcaagattggagaagagtatgaagttgtcatcacaaattacgcaggtattaccgttgttttaaggctggaattagcgtagtatcggtctcgtaatggatgcttataattctcatttgatccacattgcacagggttgtatcgataccggcttggagatgtggtaaaggtcattggtttctacaacaacactccccaactaaaattcatatgcaggagaaacctgattctctcgatcaacatcgacaagaacaccgaaagagaccttcagctttcagtagaatcggctgcaaagagactctcagaagaaaagatcgaggtcatagacttctctagctacatcgatgtctcgacagatccaggacattacgctatcttctgggagatttcaggagaaacaaacgaagacgttcttcaagattgctgcaactgtttagaccgagcattcatcgatgcgggttacgttagttcccggaaatgcaagactattggagccttggagctgagagttgtcgcaaaaggaactctccggaagattcaagaacattttcttgggcttggttcatcggctgggccgtttaagatgccccagatgtgttgaagcccaagtaaatgctaaaggttctccca

SEQ ID NO: 139489 - DNA, 3224 bp, Arabidopsis thaliana landsberg
agatttagaaagaaacagagagcttgagagattcctctggctaaacccagatggagtttggatcttttcttgtgtccttagggacatcttttgttatcttcggcattctcatgcttctcttcacctggctttctcgcaaatctggaaatgctcccatttattacccgaatcggatccttaaagggctggagccatgggaaggcacctccttgactcgaaacccttttgcttggatgcgtgaagctttgacttcctctgaacaagatgtcgttaacttatccggcgtcgatactgctgtccactttgtcttcttgagcactggttcgatctcaatctctctctgttcatctctgttctctgttactttagtggttccaattcaagggtttggtggaattctgctgatttctgttggttttgatttgggtttgagatttaacctaataaagtttcgatctttagagacaattgggggaaaaaacgtttcaaaatggaaacttttttgtttgtaaattgctggctctgactattttgtttgctatgttatgttatctctgttttacttttagacattggtgattgaaattagaatcagtagatagaactttttgaagtctatatatacgagccagtgattttggtgaaggtaaagtgtttatgatgtcttgaaaattggcttttgtttgatgcagttctggggatatttgcttgttccagtcttcttctcctaccaactctactgcctctagccgctacagacaacaacataaagaacacaaagaatgcgacagataccacaagcaaaggaacttttagccaacttgataatctatcaatggctaacatcacagtaagtaaacacaacaataactccattctgcctattgattcattttcagtttttgatagtctaaagcaaaatgtgtatcctttcatttgaacagaaaaaaagttcgaggctgtgggcgttcctaggagctgtttactggatatctttggtcacatatttcttcttgtggaaagcttataagcatgtctcttcattgagagctcaagctctgatgtctgctgatgtaaaacccgagcaattcgctattcttgttagggatatgcctgcaccacctgacgggcagacacagaaagagtttattgattcttatttcagagaaatataccctgagacattctacagatcgcttgtcgcaacagaaaacagcaaggtatctacttgttctggcctaagaaagtcatatgttttaaggttttaggcatcataatgttaatatgttaacctttgctctttgttgtgttgtataggttaataaaatatgggaaaaattggaaggttacaagaagaagcttgcgcgagcagaagcaatattagcagcaactaataaccgtcccacgaacaaaaccggcttctgtgggctagtcggtaaacaagtagacagcattgagtattacactgagctaatcaacgagtctgtagccaaactggaaacagagcagaaagcggttcttgctgagaagcagcaaaccgcagcagtggttttcttcacaaccagggttgctgctgcatcagcagctcagtctctgcactgccagatggttgataaatggactgtgaccgaagctcctgagccacggcagctcctatggcagaatctcaacatcaagctcttcagcagaataatccggcaatacttcatctacttctttgttgcagtgaccattctgttttacatgataccaatcgcgttcgtctctgccatcaccactcttaagaatcttcagaggattattccgttcataaagccggttgtggagataaccgccataagaaccgttttggagtctttccttcctcagattgcgctcattgttttcttggccatgttgccgaagcttctcttgtttctctccaaagccgaggggattccttcacagagccatgccattagggctgcttcagggaagtacttttacttctcggtctttaatgtcttcattggtgttacccttgctgggactttgttcaacacagtgaaggatatcgcgaaaaatcccaaactcgacatgattattaaccttttggctactagcctccctaagagcgcaactttcttcctgacctacgttgctctcaagtgagattttggtcttcttgacttaaatagcatatgtattgttcgtttgttccctaaatcttatgttgatgattttttttcaggttctttatcggttatggccttgagctgtctcggatcatacctttgataatcttccacctgaaaaagaagtatctctgcaaaaccgaagcggaggtcaaagaagcttggtacccgggagacttaagctatgcgactagggttcccggagacatgctcatcctcacaatcacgttctgctattcagtcattgctcctcttatcctcatattcggcatcacctactttggtttaggctggctagtcctcaggaatcaggtcagactttctctctatttactatacccataaacacttaggttatcaaaaatgtgatcttgaactgttttatttcggggtatgacaggcgttgaaagtgtacgttccatcatacgagagctatggaagaatgtggccgcatattcaccagcgcatactagcagcgttgtttctattccaagtggtaatgtttggctacttaggagccaagacattcttctacacggcccttgtgatccctctcattatcacctctctcatcttcggatatgtgtgccgccagaaattctacggagggttcgaacacacagctctcgaggtagcttgccgtgagctgaagcagagtccagacctagaggagattttcagagcatacattccgcatagcttgagctctcacaaaccagaagaacacgagttcaaaggcgcaatgtctcgttatcaagatttcaacgcaatagcaggcgtttaaaatttgaatccaatccccaaattatctaatagatttgttttgctggttttttagaagcttttattgttatgtgtgtgaattttagggtttgtttaggattcttctttgtatgtgttccatggttgttgtaacttgtaactttgtaagctacttttaaacatcaacttgatttttcatcattaatattcttctactctgatgttctgatttctttagctgatgcaaattgtatttaaagtagtttcaaacatatatacattattgtc

SEQ ID NO: 139490 - DNA, 1678 bp, Arabidopsis thaliana landsberg
ttgctcctttgaaccaacttttgtgctatatatattaagattcatccaataaagctatgttttttatatgaaaattgagtaataaatgggttcatttgctacttgttacatcgtacgattcaagagtcggatcatgttttgatcttgtggttattcttaatggttgtatcgtttatcctgtggtaattagggttcatcgttatatcgtgtctccctcttggatcctttatcataagctaataggtccttccgtacgttataatttgttgatttcccattcatgaattcctttgattctttaatcttacagatgataggtttcaaatgggtttaattctagctttaaaaaaaaaaaaaaaaaaaccaaactagggttttcccttttagatcagtgtgtaagatatataacttgagttcttgtcgtaagaagaatcttaatttgtagaattgagctaatgatctcccatttttgttttaattgaatttgtagaattgaaagcacaatcgaacggtataatcgttgttacaactgctctctaagcaataataagcctgaagagactacacaggcaagtgtgtgtacgtactttgaataatttacaattattgtttctgataatgattctagctaactctcttttctcaaattctcctgttactatatatatgcatttcatataatctatatgctgcagagttggtgtcaggaggtgacaaagcttaaatccaaatacgaatctcttgttcgtactaacaggtctagtaattaagagttttctataaccccttgaaaatcaaatcgttattgtcatcttccattatatatgtatagttacaaatccatggttgttgataattgctaattataaaggaatttgcttggagaagatcttggagaaatgggtgtgaaggaactgcaagcgctcgagaggcagctcgaagccgctcttaccgcgactcgacagcgcaaggtcacatgatctagactggtcttgtttcatttaaaataatttcataactaaaacattcaactaaaatatgcagacacaagttatgatggaagaaatggaagaccttaggaaaaaggcaagttatataaaaatgtttcataccaaactgcaaaacgtatgtgcatatcaatcagtctatgtttgaaatggcaggagaggcaactaggagacataaacaaacaactcaagattaaggtttttatttctagacatcgcaaaattatattataacttctcatataattaattatgacatttggatcttaactaaacataaattttcaatagtttgaaacggaaggccatgctttcaaaacctttcaagacttatgggcaaactcggcggcatcggtggccggggatccaaacaattctgaatttccggtagagccttctcatcctaatgtattggattgcaacaccgaaccctttttacaaatagggtaagaatatatcatttttcccggcccttacaaataaatggatagaaataagatatgattataagacttgtttggtatttggattaggtttcaacaacattactacgtgcaaggtgaagggtcttcggtatcaaagagtaacgtggcaggtgagactaatttcgtccaaggttgggttctttgactaatatgttgattagcccacgatgccacggtcaggccaat

SEQ ID NO: 139491 - DNA, 5487 bp, Arabidopsis thaliana landsberg
atttgccgttgggggaaaaaacgataattatgcaaatgtttctaacacactacagtttccagaaaattaaaggttaaaaaaaaagttaaaaaaaaaggagagctatagaaatggtgatgcgatgttgggatttgtttataaagccaagagacgaagaagaagagttctcgatcatatacattctattcctttttcattttttctctttcgaatcatttcttcttcttcgtatatattcttctccaattcgttcgaattcagtggtgtcgatttttgggggtttctgtgaataaactttggattgcgtatgaaacgtttcatccacagattatgtaattgattgctccatcggtgcgtttgatgatcgattattctcgttttctttgattttggtgttgctctgatgatgatgatgatgatgagattatctcttgatttgattttatatgatcacacaaaatgttctctcctgtgcgatctctcgttcagctcgaaaccttttggttgatcttcaattttaggcggaatttgtggttttatgtacttagagatgtttgcttgaatcttatacactgagagcctgtgagaatcattttggtttatatatatttacatctttttacttcttttgaatcacatcatctgtttgttaatctgtgcattattgaagcttatgtactatgttcttcattgattctttagcttaagattggtcctagtttatatgatcatgatctgtttcatcatttttgttacttctacaaattttgttgtggacttgtagtagtgatgcagctcaataatctgctagctaagttttttggaatgtgttggatatgttgttgattcttcttctccatttttgttcatttcaggagactatcagctctgttttctctatcctcaacatatatgttgctccagaaatcggtcacataaattttatgtctcatctctttaatgtggacatcaatggatgaactgtggatgcctgtaacttatgcttagttctttattatctagatcaaattgattcagtggtaatccgtcttcttgaaaggatttggtaggtaattggttggagtagtgtatctcagattagtatcgatagagaaggtctttaagagctcatgtccaccagaaataataatccaatgtaagggtgaatctgtaacttcaatggctgtcctactatttttttctaggcaaagagcatgctcatgtcgtttgtaatcaccgaagtgatattgattggcttgtgggatggattctggctcaggtacataatttcacctcacagtttcatctatcttcctacgtttttgtttgaatgcataaatggagatcaacataatagacttcttgatgagaaagcatgtatacttgcaatgggaccatgtattgcttccaagtatctacttaagaaagattatcttaggtagaaggtgacagtccctagtgatcatctgatgagatatgagagagtatagcatcatcatattttctcttaacacgctccctgttatgctgtttacatcttttaatctattgtttcatattttctttccttgcagcggtcaggttgcctgggaagcgcattagctgtaatgaagaagtcttccaaattccttccagtatgtgaatattttagcttactgctgtgtgcttgctagatttgagagaaaatagtagtaatctttaattctatttctgaatctcttctataagttagaaatttgatacctggctttgcgtttgagaaaaaatcattgttttaggttaatacacttctccgccttttttatctgttacatattcatagtactcataaacagaattttcacacacatacaggtcataggctggtcaatgtggttctcggagtatctctttctggaaagaaattgggccaaggatgaaagcactctaaaggtatgggtttatagtatccttgtgcaactcatttagtttttgctcctgtgtaaaatgcttattagcacgtgcagctacctcgttcatgaggggattagcctaaaaatgcagaatcttcatttccagaccatgagttatgtgtgtttgtctaaatttacagtcaggtcttcagcgcttgagcgacttccctcgacctttctggttagccctttttgtggagggaactcgctttacagaagccaaacttaaagccgcacaagagtatgcagcctcctctgaattgcctatccctcgaaatgtgttgattcctcgcaccaaagtaagttgtaatatttttcttttgttcattcctggggcaacttgatatcttctctgtgtcctttaaaaagcaaaatgattgctatgatgatccaaaatctcaatgcatgggtagcctttatacgtttcattttcatcagatcgacttggtggttgttattgtgatttctgccctaattactagacttgcttgtatttttgtttcagggtttcgtgtcagctgttagtaatatgcgttcatttgtcccagcaatttatgatatgacagtgactattccaaaaacctctccaccacccacgatgctaagactattcaaaggacaaccttcagtggtaagcaagcaaaaatatgaataggtcgtatagcagttgaatcttgcactcttctcacaacaaatttcaaagtatgcactggcttggatcacatcaccatccaatttactgaaacgaacataactctttatatcacctttacttttataatgtgtaagaaaccgtaggactcatcccatcccaagcctttttcttttaaaacctcctgcgccattaacgcaaaccattgctgctggtttcaaggtgcatgttcacatcaagtgtcactcgatgaaagacttacctgaatcagatgacgcaattgcacagtggtgcagagatcagtttgtggctaaggtaaaaattatggatgtactggtatttccacgtttcagttattggcaataaaatatttggtcaagatttgatagagaaaagcttggaaaagctttcattttggtattctctcatctcgtctctgtgatacaggatgctctgttagacaaacacatagctgcagatactttccccggtcaacaagaacagaacattggccgtcccataaagtcccttgcggtgagtctataaaattcataacattctcttggttccatctataaactcacaaatctcttgatctttttctcaggtggttctatcatgggcatgcgtactaactcttggagcaataaagttcctacactgggcacaactcttttcttcatggaaaggtatcacgatatcggcgcttggtctaggtatcatcactctctgtatgcagatcctgatacgctcgtctcagtcagagcgttcgaccccagccaaagtcgtcccagccaagccaaaagacaatcaccactcagaatcatcctcccaaacagaaacggagaaggagaagtaaaaactggttctcacagatccaaacatcaaattcacaagaagaagaagcgcgtgtcagttttgttataagaaacataaaaaaaaaaaaagacatccaaatgaaaaatcccttaatattatcaactccgttttgttcagctactatattactactactactacgcagcctatgtctcttagtcgattgatgtatagggtcatgatcaaatcaacgatttaatccctatagtcccttgggattttttttctcaagtgcataggccttgtataactttctatttttagattggaatttgggattgatattagacattttccttttattattaaactgttttgttccttggttctcattgctagtgtagaatttattaggcacaaaacatgttattacaagacgttttagaagaaaaaacagaatttattcatgtacataaattatctgactagactaatcctactgggacttaattgtgattagacaaaaaaaaattcattttgagaagaaaaaacagaaacccgttcatggaattaactgagattagacaaattcaactacagtatgacggtgattacagggagaatatcgtaaaagaacaggttttattttcttccatttttgatagaacacatttttttttttttaatgagtgtataatataataaacacaatttttattttagttttctcaaccctaaaactaaaaccctttcacgccgattcaaaagaaaaaaaaaaccttcacaagtccggttgctcgcgccgcttttctctctgttttcaaactccgattaaagtcccgacttgtatcaattgataaaccctaattgtctccgttcttgctgaaacactaatctcgccgcacagtttacacagcctccagaagcgacaccgacgacgcaatggctcacgctcaaaccacagaggtgtgtttgagttttcaccgctctttattgtttcccatggtgttcgaccttggatggtttatcttatgttctcgagtttttccttttgaatccagggagcttcccaggtggtcgaatctgttagattcagtttcatgacagagcaagatgttcgaaagcatagtttcctgaaagttaccagtcctattttacacgataacgtgggcaatccttttcctggtggtctctatgatcttaaattaggtcctaaagatgataagcaagcgtaagttttcttccatatccttttaccatggcctgaattatcatgcctttctaagctcttaatagctcgcctttttcacgcaacttttataaagacctcctttttatacctgtctaggctttgaattgtcgattcttagttggaagtagctattcatacaccgatttgtttgcaagtagctattgatctttatttctctgataatcttgtttatgtttggtcttttttctttgcttaatctaaagcttttcttgtcctcttaatgcagttgcaattcatgtggtcagctcaaacttgcttgtccaggacattgtggtcatatcgagcttgtctttcctatttaccatcctttgctcttcaatcttcttttcaatttcttgcagagggcctgtttcttctgtcatcactttatggcaaaaccggaagatgtaagatatacatgagattaatttcattttgttgcgtctcattctgcacttactaattctaatgtgcttcatgctcctttttcttcttttcaatttaaggttgaaagagctgtttctcagctgaaactcatcattaaaggtgatatagtttccgcgaagcaattggagtccaacactcccactaagtctaagtctagtgatgaaagctgtgaatcagttgtaaccactgattcatccgaagaatgtgaagattctgacgtggaagatcagagatggacatctcttcagtttgctgaagtcactgctgtcttgaagaattttatgaggttgtcatcaaagtcgtgtagtagatgcaaaggaattaatcctaaactcgagaagcctatgttcggatgggttcgcatg

SEQ ID NO: 139492 - DNA, 2833 bp, Arabidopsis thaliana landsberg
gaccatatgagcgcgtgccttgactcttcctgttctcgttgattttgtatgtatacgcttgtaagtatttagaaatgttttgattcctagcctgtatcgatccaacggtcgagctagccgcatgcaacccgacgtgaattagataatgctcataatccgtagtaggtttgcgggaaattgttgtcaaggactcatgttggtttggtatagaggaacatccatcatataatcatttcgagtgtaattctacatttctacctaatattttaccaaagtcgttaactcaaccagggaatttttggttatccgaaaagaagagttttaaagatcccgaggtcgagtattagtaacgtggaagtgactatgaatttcgatacaaaaacttttgctacttaaaaacaaaaataaaataattaaacaaatcgagattaagaaagaaacaaatatccgtgaaaacaaaagaaacaccgacaccgttaggtgagtagaaaactctttcaaagcactaagtgttgatataatataatatcacaaaagcatcaatcagttgatcgcaaatagacatttgcgattctataatagaaatgaataaaggtatattagttactatatttgctataatgaacttcttatgaaaactaaaacaaatttttagtgatgcagtcgttatatatgcgcattacacctccaagaatactcaaatacatcgaccatgtgcatattatatcgttagagacttagagccatcgacacattttgtttgtttgtggtccttttgaatactacattttcaattaaatatgactataatattacagctatcaggcataatatatattgaaattgacacatacatatatatagttttatacagaactcatgacatttttattcttaaatagctccttctatataataatttatagagccttccacatctcctttgttcccttaacaaactctaaaccaaaaaaaaaaaaaaactatgggttacgacaggctcggtccatccggaccatcaaacccgaaccagaaggaccctgccacgtcactcccggaactacagaagaaaactaaaacgaagctgattctcttcactttggccgttttggtagttggagtagtctgcttcggtatctttgccggcatccgagccgtagactcgggtaaaaccgagccgaaactaacccgtaaaccgacccaagcaatctcccgaacctgtagcaaatccttatacccgaacctatgcatcgacacacttcttgactttccgggatctttaaccgccgacgagaacgagctcattcacatatcattcaacgcaacgcttcaaaaattcagcaaagctctttatacttcttcgacgatcacatacactcagatgcccccacgtgtacggtcagcttacgattcttgccttgagttacttgatgattcagtggacgcgctcacacgcgctctttcctccgtcgttgtcgtctccggagatgagtctcattccgatgtgatgacgtggcttagctctgcgatgactaaccacgacacttgcactgacggattcgatgaaattgaaggtcaaggaggagaagtgaaggatcaagtgatcggagcggttaaagatttgtcggagatggtgagtaattgtttggctatattcgccggaaaagttaaggatttatctggagttccggtggtgaataataggaagttacttgggactgaagaaacagaggaattaccgaattggttgaagagagaagacagagagcttcttggtactccaacgtcggcgattcaagctgatatcacggtgtcgaaagacggtagcggaacgtttaagacgatcgcggaggcgatcaagaaagccccggagcatagtagccgacgattcgtcatctacgttaaagcaggaagatacgaagaagagaatctgaaagttggtaggaagaagacaaacttgatgttcatcggggacggcaagggtaaaacggtcataaccggtgggaaaagtatcgccgatgatctaactacttttcacaccgccactttcggtatcaaaattgatctttttgttctgtttttcttttaaagattcttcattattgagttatttatgtatatttgttttattgtagctgcgactggtgctggatttatagtgagggacatgacgtttgagaattacgccggaccggctaagcatcaggccgtggcactccgtgttggtggagaccacgcggtggtttaccgttgcaacattatcggttaccaagacgcgctttacgtacattctaaccgacagtttttccgcgaatgcgaaatttatggaacggtcgattttatattcgggaatgcggctgtgatcttacagagttgtaacatttatgcgcgtaaaccaatggctcagcagaagattactattacggctcagaaccgaaaagatccgaatcagaatacggggatttcgattcatgcttgtaagctactagcaacaccggatcttgaagcctctaagggtagttatccgacgtatctcggccgtccgtggaagttgtattctagagttgtgtacatgatgtcggatatgggtgaccatattgacccgcgaggatggttggagtggaatggtccgtttgcattggactcgttgtactatggtgagtatatgaacaaagggttgggttcaggaattggtcaacgagtcaaatggcctggttatcatgttattacctcaacggtagaggctagtaagtttacggtggctcagttcatttctggttcttcgtggttgccatccaccggtgtgtccttcttctccgggttgtcacaatag

SEQ ID NO: 139493 - DNA, 1052 bp, Arabidopsis thaliana landsberg
tttgcatttcaccttcttttgtatatctctcttcctatatcattaacctgcgctggttaaagctcttcacctacgcacatcgccggcgatttatgatcatctgagtctttagggtatattcacaggctagagaaagagatcttaatcggaaaagtttatatggaggttatggttggttcgtcgtttggaatgggcatggcggcgtacgttagagatcatcgcggtgtttcggcgcaggataaggctgttcaaacggctctgttcttggctgatgaatcaggacgtggtggatcacagatcgggattggattaaggatgagtaataataataataagtcgccggaggaatcttcggatagttcgtcgtctatcggagaaagcagtgaaaacgaggaggaagaagaagaagacgacgccgtttcgtgccaacgaggaacacttgattcgtttagttcttctcttgaagactctcttcctattaagtaagtttgggtttggtttggtttgactcatgaatgtatctataattgtcttttactatgttcttgatctgaaaatttgatctttatacttttcttggcaagtctcatctgcgaatctgagtgttatggttttggttaaatcttgaaacccttaagttaaaatttatgatttgggattttgttatagttcaagttagttcttggttttgtatggtctgaatactgatgtttgttttgtttttgttaattttcaggagaggattatcgaatcattatgtcgggaaatcgaaatcgtttggtaatttaatggaagcagcgagtaaggcgaaggatttggagaaagttgagaatccatttcacaagaggaggagattggttattgctaataagttaaggaggagaggaagatctatgtcagcttcgaatttttactcgtggcaaaaccctaattcaatgcctttacttgcactccaagaacctaatgaagaggatcatcacattcacaatgatgattatgaggatgatgatggtgatggtgatgatcataggggggatcctactagagtcgac

SEQ ID NO: 139494 - DNA, 2927 bp, Arabidopsis thaliana landsberg; identical to SEQ ID NO: 7147

SEQ ID NO: 139495 - DNA, 1044 bp, Arabidopsis thaliana landsberg
ttttctgaatttgtggggtggggtccaaaactgaggcggctcaaaaactttggtttctccgtctttgccggataaatgcattcacatccacttcttaccaaaattaaataaatcaatatttaatttttttaaggccttcttgttttttcagatgaacactcttcagatgccttgtgccttattgatccagattctaagtacccaactttactctctagacctttttcatggcagccactcccacacacttctctgtctcccatgatcctttttcttccacgtctctccttaatctccaaactcaagcggtatgttgtcaattcttcttccccccctccctatcacactgtttcatctaattctgactattggttttcttaactctgttgcattttttatttcagatctttggtcccaatcacagtttaaagacaacccagttgagaattccagcttctttcaggtaatttcttggctttactaacttttcagtttggaattgggataacgatccgtaattatgatatagttgtgagagaatctatgataagaatcttagagaaatcacttggtgatgcattgtactttgttgaagaccctttttgtttgtacagcttatgtttttgtttcttaggtttctataagtagtgtgtcttttataagatttgaaaagaagagtcttttttgtgatgcttcaaatggcaaaatctcagtgaagatgtttttataataatcaaatgttcagatttagtatgtttttgtggtgtttgcagaagaaaagctacaaacttgcaagtgatggcttcaggaaagacacctggactgactcaggaagctaatggggttgcaattgatagacaaaacaacactgatgtatttgacgacattaaacagcggttcctggccttcaagaagcttaagtacatgtaagttgcagagtaccaccaattgtcatttttcaatggttaatagattacttatttcctttcttcttcacctgatgatattctcttgagcagggatgactttgaacactacaaaaat

SEQ ID NO: 139496 - DNA, 852 bp, Arabidopsis thaliana landsberg
tgaacattagagtgatttaccagatgggcgaatttgaatttgatgttggatctcataaaccataggattttaagtcctaacattctacctttatgatttggctttgtgcttgaaccccacagggcgttgagaccggttctctaggagatttcaaattggattgggattcaccggaaagccaagatattgttctgaagagacagtttgattcaggcgagaaggttgtggtctctgctttattgcaaccagaacctatagaactagaagatgatttagtgtttcctagggaagctcatgccaaagtttgtatcaaaaagcctggtctcagctctatcttgcagtttcattgccgggtttacgaatcaggatctggatcttctcatttcgacatcgagagcgcctactttatccgctcttttgtttctgctccttcttccacttatggagaccattttttcaggtgaagtaagctcataaatgataatctctcaacattttgtttaagttacttgaatcatatctgttttacttcatccaaacctcaaagcattgggtacacttcccattgttctttccctggagtaattgttctatatatattgaaaaagaagtagactattagaggttcatgtgtctgcatatgtttgatttcaatgaccagtgttattttctttgtttctttagccaagtagatcccaaactacacagtgcactggagcaatacctaatatctaagggggtcagtgaaggcttaactaatttccttttgtgtgacctaaacaagaaggagcaggatcaatacgttaactggttacgcaggcttgaatcaaatatgtcacattctccaaagcc

SEQ ID NO: 139497 - DNA, 2297 bp, Arabidopsis thaliana landsberg
gaacaacacgcgccagatcctttagttgtaaatccccatttttattttcttaaacccaaagaaagaaaaaaaagaagagaaacggccgaatcttcataaattccgccatctgttaagctcaatcgccgcctaaactccggcgactctctcggtagatctctcaatcctaactgttttcgtctatctctctgttgtatctaaaagcagcgacgccgatttgttcgttttccggcgggtacatatagtatgattatctctgtttaggtgtttttgatcagtttctcatgatatggattcgcattgcgtctctgtttgattcagattccgaaagttccgattgattcgataacttgtatttgttgtttgtttctgcatttgatagaagatatttggtgattgaggtgactcggaagagagtgagagagagagatggatgatagaggaggatcgttcgtagcagtgagaaggatttcacaaggtctagaacgaggaagtgtttatcattcttcttctggtaaatttcatcttcactttgtacgatgattctttctattttttttgcttcttctggaacaaacgcgttttctcatcattatacatctctatctctatttctctctctctctctctcccactttttccacgttttctctttctctctgtgtattcgctggcgattgcctttttatctgagatttagtgtcgcagatctacctttcgccatttgctttttcgttgctctttctcataaattcgtggagtttttgttatgtgtgttgatcttctttgtaagtcctatttttagtatttcccatacgaaattgtttgcgttgatttttctagttgagattagtcttcttccctgcagattccatttctctttttgactatattgctagtttgtttttccatggaagcatgttttgctaaaatcttttgttacttgcttcgattttgattgtcaataagttgaagctaatggatgatgtgttctggaatctttgatttttctttcatcgttctgtattttgacaagtctgatgcttaaatgacattgtatgcttctcacgtattagttatcgtatttgtaatataaaagtcagctaaaagatgtttgactagtcaccctcttgcattaagaaatcatttctttatcaaaaaacatcacaattctgattttaattttattgcagctgaggttgtagctggatcggcagcgtggttaggccgtggcctttcctgtgtttgtgttcagggtagagacggtgaccctcgtccttcatttgatctaacgcctgctcaggtaccattttcctcttttttaattggtttactttataatgattgcttgtttctcctctcatattagctgacttctggttagtatttttcaagtagtatatataacttgtatgatccttattgtcaatgcttgcagcaggaatgcctgcagaggttgcaaagccgcattcatgttgcttatgacagctcaatacctcagcatcaggtatgctttcctttatgggctgtgtttgtaaggactgctcacaactaacttgttccataaattagatggtcgctgtttcaagtttaccagctcttcagttttactgtatgctagcttcattggtcaaaactctacctgcgtttacataaatatattgtttgctatttcatatgtgtgtaggaagctctaaaggatctttggaaacttgcatttcctgaagaagagctacacggaattgtatctgatcagtggaaggaaatgggttggcagggaaaagatccatcgacagattttaggtaacgtctcatctcattgtcattatccttggattttcccacttcaattgactcacagtagagcatctggcaggggtggtggttttatttctctcgaaaacttgttgtacttcgctaggaaattcccggtacgcctttataataaccagttgcaaatgcttctcaaaactgtattttcgttaaaacattcaattccagtggcaccgtacttgtatccatcacatagtatttcgatcagttaataccatttcaatccagtctctcaattcctgatgccacttatttgtttcctgcagaaatctttccacggccttctgcgcaacaggttggcgatcgttctgtgtgggaatacccctttgctgttgctggcatcaatataacattcatgctcatccagatgcttgaccttgaagcaggtactaccacatttattatttccatgattacatagatattcctttgtgaactgttgttacatgcattaggcagcaatc

SEQ ID NO: 139498 - DNA, 2451 bp, Arabidopsis thaliana landsberg
ggtggaatagctggaaccattttagctgcaacatagatgaaaaaatgatcaaagaaactggtgaagtctcaattttaatttatcaatcatgaattattcttgcatgctcgtaacagctgatgctttggtttatcttaacacatcttgatgtttgtaacagctgatgctttggttaccactggcctctctaagcttggctacaactatgttaacatcggtaaggctctaactcataatatagattaaaaaaattctttgtatcactctgattcagagtctctgaagttgattaatgtttcatcagtgtgatagcttagaaataaataaataaaaatcattattgtgtttcacagtactgaaatcttggtttgttcttcagatgattgctgggctgaaatttctcgtgacagcaaggtattatcataattctttgtgtttcctggtttcatttcttgtttctgcagttttgctagattttatcttccttaactctgttttccagggaagtctggtgccaaagaagtcaactttcccttctggaattaaagcggttgcggattatgttcacagtaaaggccttaagcttgggatttactcagatgccgggtaaattactattgcttttgcaaattttcctacacttttttcctggtgatttgaacaagaatacacatttggcctcatatttgttttggttttcaggtatttcacttgcagtaaaaccatgccaggttctttaggctacgaggagcatgatgccaagacatttgcagaatgggtacgtccatgtcattctttttcatttcataaactggttactgacctgcttttcagacaatgtaacaatgcttgggctcaaattgcagggaattgattacttgaagtatgacaactgcaacagcgatggctctaaacctactgtcaggtataagtgaggacacctggtttagccataaaagttataatatacattcactgccaataatggatgatgatacaattcaggtatccagtgatgactcgagctctgatgaaatctggccgccccatctttcactcattgtgtgaatggtataaatcatgcatgttccctttcaaaaaaacaaataatatagttgtgttgatttgtctatagaagaattatgagttttaaattgacttcttatcaggggagatatgcatccagctctatggggatctccagtaggcaacagttggagaaccactaatgacattaaagatgcttggcttaggtaagtataaaagaaaaaagatggcgacatgtttctttaaaaattgctaatcttgacaaggtttttttttgcttgttacagtatgatctcaatagcagacatgaatgaagtctacgctgagcatgcaagacctggtggctggaacggtactgttattatctcagcaagagactactactactttaagcttgttgcagattttgtgaaggatgataatttcatgatgagtgggtgactttgctgttggttgcagacccggatatgcttgaagtgggaaatggagggatgacaaaagacgagtacatagtccatttcagcatatgggcaatctcaaaggtaagctatatattcccgaaatagagaaactctcttcaaacaacatatattaagtctgaaaccaatgatgtatatatatcactgcaggctcctcttctacttggttgtgacataagaaacatgaccaaagaaacaatggagattgtcgccaacaaggaagtcattgctattaatcaaggtacttgattactgtttagccatcatatgtcctctttgaaccatgtttgaatatatacttttaagaaaatagaaaccgtttcttgtagatccacatggtgttcaggccaagaaagttagaatggaaggcgatctcgaggttagattacatctaaaaacacctacatgtactactcgtctatagacataagctttaagaaaactatgttttggtaataaatcccgaaatggaatcaggtttgggcaggaccattgtcaggttacagagtagctttgcttatattgaaccgtggaccatcgcgaacttcgattactgctctttgggaggatattgagatccctgcaaatagcatcgttgaagccagagatctatgggaggtatactcataaatatacaattgtagatacacatacataaaccaaacaccataagaaaatcagatatttaactgatgaatgttttgttgtgatatgagaacagcacaagacattgaagcaaaagtttgtggggaacttgacagcaacagtggattctcatgcgtgtaagttgtatgttctcaaacctgttgcctgaaaatacatgtgtatagagagagttagtgtggctacgtcacgttgtattctccagttattctgtaaaaacaataagggttcgtctcaaattaaatctccacagatgttctcc

SEQ ID NO: 139499 - DNA, 992 bp, Arabidopsis thaliana landsberg
agcaaatcagctaacaaaatctcaatacttttagatttaagaataagagtagagatgaaaggtctataaaaaatttctatttttgcgtttgaaggtgacaatgaaaaagggtctttgccatatgaacatagaattgacattaggagtgcctcctgatggagcatacgaacttttcatcaatccaaccaacttaccattctttgttatagacaagtcagggcgacaacttctggttttcttcctatcattgtatgattcaaatgtggtattaattatagcaatacttgagagtgtgatttgtttcttataaaggcaaacaaatcaagaaagattttgaagaaagatggacctaggcagaccgtgaaggtgaagaaagctgtggcatgggacttcctttggttctctggatctctccccattaatttaattgtcaacgaaaacaaaaaagaccttgaagtaagaagcttctctacacccctaaaactaatgaacgttttgtcttgtattggtgaaacttaacttgggtttctcttgcttattgtggacaggcgaaatataaaaaagagaaaatgatgttcatgaaagtattcgagggtagctataaagtggagcctgtatacgtagattcagtacgcttatgcaagaacaagaagccgaagagtgtagatgaatacaagaaatgtagtggcggacaaggaaagattgcatcgaaagtgacaatggaccaatattttcagccatatcctccttttaatctaccgccattttcttggttcattcgtgatatcaccatcaagaataccaagagtgtgctagagagacttcaaagttggagtttcagtattcgaaatccgggtgtaatcatgtcaaccaacaaacatggaaaaacagaagtttctcctaaacagtaatcggaaagtcatttttgatttcgagtgcttagaagttagaatcaatcttataaaagtcgattatttactatcaaaaacaca

SEQ ID NO: 139500 - DNA, 3577 bp, Arabidopsis thaliana landsberg
ccccttccaacgtgtcgtgcatgctttgatgaacgatctcttgcgtttcacgctattggttatgctaaaggatccctcaaaccagcagtcattataacatcatcaggaactgccgtttcaaatcttctttcagcggtcagagttgtgcttatttatgcctcactaaattatcttgttagcttgttgcatgctacatactttgccaaacacatgtgttcccttacagggtttgtttaatgatttttgacaaataaaggttgttgaagccagtgaggatttcttaccactgctactacttaccgcagatcgtcctcctgaacttcagggagttggcgcaaatcaagcaataaatcaagtaaggtcgagataagacctttctttgaaactatacgtttgtatcccagttggatctgttggcgttttcctacaatttattttgttttttcatgtgtaacagataaaccactttggttcgttcgtcagattcttcttcaatcttcctcctccaaccgatcttattccagtccgaatggtccttacgactgtagactccgctctacattgggcaacaggatctgcttgtggaccagtacatctcaattgtccttttagagacccacttgacggtagtccaacaaattggtcatctaactgcttaaatggattagacatgtggatgtctaatgctgagccattcacaaaatattttcaagtacaaagccataaaagcgatggtgtaacaactggccaaattactgagatcttacaagtaatcaaagaggctaagaagggtcttcttcttattggtgcaatccatacagaggatgaaatttgggcttcgcttctgttggcgaaagagctgatgtggactgtagttgcagatgtcttgtctggtgtacggctgcgcaagctttttaaaccttttgttgagaagttgacgcatgtttttgttgatcatcttgatcatgccttattttcagactctgtcaggaatttgatagagtttgatgttgttatccaggtaaatatatcatccttttatttttgcttcatgcatctaagactaagtattgaagatgatagatagagttacacaggtactgttggatatcttgtagtacttctcaattgaaaaatttctttgggttaggaacgccttgaagaagtttcaattaggataaggaattggaactatgtaaagcatgactcgatctttcatatccatcgcatgttagggttcttttaacatatgcggacttcaaaccaataattcattgagtaaaaattagttatgttgatgtgtatctgactgagtttgtaaaacgaaatcatgaataggttggaagtcggataacaagtaaaagagtttctcagatgctagagaaatgctttccatttgcatacattttgggtgataagcatgcatgccgacatgacccatcacacctggtcactcacagggtccaaagcaacattgttcagtttgctgattgtgtgcttaaatctcgatttccatggaggagaagcaagttgcatggtcatctacaggcattggatggcgctgtatgtcctccagacaaccctttcccttaaaatcccttataagatcaaacatgaccgttttctgaaacatatgtatcgctgtagattgcaaaaagatcaatttaactcttactgcttttaatagttcattcttctatgcagattgcccgggaaatgtcatttcaaatatctgctgaaagctccctgactgaaccttacggtgcacatatgctttctaaagccctaacttctaaatctgctcttttcatcgggaatagaatgccaataaaggatgtggatatgtatggatgtagttcagaaaattcttctcatgtggtagatatgatgttgagtgcataactaccatgtcaatggatacaagtaactggaaatagaggagctagtggcattgatgggttgctcagctcggccactggctttgctgtaggatgcaagaagagagtaagattttaaatgattttttcccccttttatgcgtgaagaagtatcagaaccatttactcatgtgttttgtttacaaaataaaaaatcaaatttcctgattggtcaaacaccgtatatcaggtggtctgtgtggttggggacatctctttccttcatgatacaaatggattggcgattttgaagcagaggtagccctttcctctattttattgttgtagtttcactgttggtggatttcacacactgaacagatatgtcatggtttttaagtcaattaacgattaatttctggtgtttaatctgacttgttaggattgcaaggaaaccaatgacaattcttgtgataaacaaccgtggaggtggaatcttccgacttcttcctattgcaaagaaaacagagcctagcgtgttaaatcaatatttctatacagcacatgacatttccattgaaaacttgtgtttggcacatgggtaaaaaacatattcacattttttactttgttttcctttcccactttgctattatttaatgttttacatgttaagtttgttttatatacgcatgaccatagcacagatattgatagaaaatacaagaaaaagtaatccagttttggtagcttagtctatagtagcgtcagttctccatgatttacgatgtctttgattatctagggtcgtcatggtttacagtaagaaataactcagccaaattgctatatatgcagtgtgaggtatgttcacgttgggacgaaaagtgaacttgaggatgctctatttgtaccaagcgtggaggagatggattgcattgtggaggttgaaagctctataaacgctaacgcgattgttcataggttattttgggcttttgttttatttttgggttttacatgtcctcacttctggagcactttgttgacattgaatactcgcccacagcactttggagaggtttgctttccaatccgcagaaaattccctgggcattaggggctgggggttcttttcttcatccgatgatcaaaaatgtacttctttgccaagtctctggaatacaatattcgcagtacaggtaagaatccgtcagagactatatctgaatattaccgttttcttttctttttgtctaataaagactctatttgcagagtcaaactgtgtgacagacctaccatatgttctgatgaattctctcaattccatcgagaagggttcatactctccctgactttggaggatggaagcattggctatggagaggttgaataatttattctttttaatttttcatcagtaaatagtacattctcttacatttgtgttacttctcccaggtccccctgagaatcatgtttagcttgtattagacttacatgtgccactgagtatcatgctctcgtgttgtgtttcatgagcaggtggcacctctgaacagtaatgtagagaacttaatggatgttgaggggcagcttcagttagttcttcacctcatgaatgaagctaaatttagttacatgcttcctttgttaaatggctcgatttcttcctggatttggagtgaacttggaat

SEQ ID NO: 139501 - DNA, 3936 bp, Arabidopsis thaliana landsberg
atggggtatcagaatcatccttcgggaagtaactcgttccatggagagttcaagagatgtcactccaaaccgtctaaaggtgcggtggcgtccatgattaattctgaaattggtgcagttttggctgtgatgaggagaaatgtacggtggggtgttcgatatatagcagatgatgatcagttagagcattctcttatccattctttgaaagaattgcgtaagcagatattttcatggcaaagcaattggcaatatgttgaccctagattgtacatacagccctttttggatgttatattgtctgatgaaactggtgctccgattactggcgttgctttgtcatctgtttacaagatcttaaccctcgaagtttttactcttgaaactgtgaatgtgggagaggcaatgcatataatagttgatgctgtaaaaagctgtcgtttcgaggtaacggaccctgcctcagaggaagtggttttgatgaagatacttcaagttctactggcttgtgtaaagagtaaggcgtctaatggattgagtaatcaagacatttgcaccatcgtcaacacttgtttgcgtgttgttcatcaatcaagctccaaaagtgaattgttgcagcgtatagctcgccacacaatgcatgagttgattagatgtatcttctctcaacttccttttatcagccccttggctaatgaatgtgaattacatgtcgacaataaggtatatcaaattaatctttcctgccatcttttttaaatgtttgttgtacatgtttatgccctatagatagaagattgaacatgcacaaaattgttttgtgctctgctaagcatgttgatgaataacttgtaaggtgtattgtattgaccatcttgaagctttctaatgactaagcgtgcaaaaattaaagattgatcatcttaaaacttatgttgatgactaagttgtaaagtgtattgtattgaccatcttgtcaagactgtttgctcttcacaaatttctaacgctattctttcttatctaggtgggaacagtggactgggatccgaattctggagaaaaaagggttgaaaatggaaatattgctagcatatctgatactctcggcactgaaaaagatgatccaagttctgaaatggttattccagagacagatcttagaaatgatgaaaagaaaaccgaggtcagcgatgacttgaatgctgctgcaaatggtgaaaatgcaatgatggcgccttatggtataccatgcatggtagagatttttcatttcttgtgtaccctgttgaatgttggagaaaacggtgaagtcaattccagatccaacccaatagcgtttgatgaagatgttcctcttttcgctctgggtttaattaattctgctatagaacttggagggccttctttccgtgagcacccaaagctgttgactttgattcaggatgatttattctgtaacttgatgcagtttggtatgtccatgagccctctgattctttctacagtttgcagcatcgttcttaatctctacctgaatctccgtactgagcttaaggtacagcttgaagctttcttttcatatgtacttctgaggattgcacagagcaaacatggctcttcttagcagcaacaggaggttgctatggaggctctggttgatctttgcagacaacatactttcatagctgaagtgtttgcaaatttcgattgtgatataacttgcagtaatgtgtttgaagatgtttcaaacctgctatcaaagaatgccttcccagttaatgggcctttatctgctatgcatatacttgcattggatgggttaatttctatggttcagggaatggctgagagagtgggtgaagaattgccggcttcagatgttcctacacatgaagaacgatatgaagaattctggacagtgaaatgtgagaatttcggagatcctaatttttgggttccctttgtccgaaaggtcaagcatataaagaaaaagctgatgcttggggctgatcattttaaccgtgatcctaataaaggcttacagtatcttcaaggggtgcacttgttgcccgagaaacttgatccaaagagtgtggcatgtttcttcaggtatacatgtgggttagataagaatgttatgggagatttccttggaaatcatgaccagttctgtattcaggtgcttcatgagtttgccaagacgttcgacttccagaacatgaatcttgctacagccctgcgtctttttgtgggtacctttaaattgtctggcgaggcacagaagatacacagggtactggaggcgttttctgagagatactatgagcagtcaccacacatactgattgataaagatgctgccttcgtgttagcttactcgattatcttgctgaacacagatcagcacaacgcccaggtgaaaacaaggatgactgaagaagatttcatccgtaacaacaggacaataaatggaggcgcagaccttcctagagagtacctatctgagatttatcactcaatccgccacagtgagattcagatggacgaagataaaggaaccggcttccaactgatgacagccagtcgttggattagtgtgatttacaaatccaaagaaacgagtccctatatccaatgtgacgcagcatcccatctggaccgtgacatgttttatatcgtgtctggtcccactattgctgctacatcagtggtttttgagcaagcagagcaagaagatgttttgcggagatgtattgatgggttattggccattgcaaaactttcagcatattatcatttgaatagtgttttggatgatctggtcgtgtctctctgcaaattcacacccttcttcgccccattatctgctgatgaagctgttcttgttctaggagaagatgccagagccagaatggctactgaagctgttttcttgattgcaaataaatatggtgactatattagtgcgggctggaaaaacatactggaatgtgtcttgagcctcaacaaactccacattttaccagatcatatagctagtgatgcagcggatgacccagagctgtcaactagtaacttggagcaagaaaaaccttcggcaaatcccctgccagtcgtatcacagtcacaaccctcagcgatgcctcgaaaatcatctagttttattggtcggtttcttctgtcttttgattctgaggaaacaaagccattaccaagcgaggaagaattggcagcttataaacacgctcgtgggatagtgaaagattgtcatattgatagcatattctcagatagcaagtttctccaagctgagtctctgcagcagcttgttaactctcttataagagcatccgggaaagatgaagctagttcggtcttttgcctggagcttctgattgcagtaacgctgaacaaccgagacagaatcctactgatttggccaacagtttatgagcatatcttgggtatagttcaattaacattaacaccatgcacgcttgttgaaaaggctgtttttggtgtactgaagatttgccagagattattaccatacaaggaaaacctaacagatgaacttctgaaatcactccaactggttctcaagctgaaagcaaaagtggctgatgcatactgtgaacgcattgcacaagaagttgttcgtcttgtaaaagcaaacgcatctcacgttagatcccgtactggttggcgaacgattatatctctgctatcaatcacagctcggcatccagaagcttctgaagctggattcgaagccctccggtttataatgtcagaaggagctcacttgttaccatcaaactacgagctctgtttggatgcagccagtcactttgctgaatcccgagttggtgaagtcgatcggtctatctcagcaattgacttaatgtcaaactctgtgtttttacttgcaaa

SEQ ID NO: 139502 - DNA, 1123 bp, Arabidopsis thaliana landsberg
  unsure (1)..(1123): unsure at all n locations
atgctattaaacatttcttcttctccaatctctcatcgaaaccctcacttcctctccaatttcaacaaccccatctcttatttccctcgacgatccaaaacccatctctcaaaatctcattttttccccaagttcactcctttatccaaccaaagtctcaaaaacagagtcttgttcggaaacaagaggtacccagatggagaaaggtttgattttagatcaagagctatctctgggattgatttgggaagctttgaatctgttcttgaagctattgctgttctcacaacgatcatcgtcgtccatgaatcaggtcatttccttcggcttctctccaagggatccatgtgagtaaattcgcaattgggtttggtccgattctagctaagttcgattgcagcaatgttgagtattcgcttagggcttttcctttaggtgggtttgtnnnnnnnnnnnnnnnnnnnnnnnnnnnnnnnnnnnctgttgacgatgagaatcttcttaagagcagacccactctagatagatcaattgttgtttcagctgaaattatcgccaatgtgatcttggcttatgctataatctttgttcaagtgttatctgttggtttacctgtacaagaagcgtttcctggtgttcttgttcctggagttaagaccttttctgctgcttctcgtgatgggttgctttctggtgatgtaattctcgctgtggacggtactgagctgtctaaaaccgggcctgacgctgtttcgaagattgttgacattgttaaaagaaacccgaagagtaatgtggtgtttagaatcgaaagagggggtgaagatttcgatattcgggttacaccggataagaactttgatgggacggggaagatcggtgttcagttgtctccaaatgttagaatcactaaggtgagaccgaggaacattccggaaacgtttagatttgtgggaagggagtttatggggctatcttctaatgttttggacggtttaaaacaaacattctttaacttctctcagacagcaagtaaagtagcaggtcctgtggcaattattgcagtgggagcagaagtggcaagatcaaatatcgacgggctttccaattcgcagcgttctga

SEQ ID NO: 139503 - DNA, 3116 bp, Arabidopsis thaliana landsberg; identical to SEQ ID NO: 5226
  unsure (1)..(3116): unsure at all n locations

SEQ ID NO: 139504 - DNA, 893 bp, Arabidopsis thaliana landsberg
ttcagaatcttcagcatctttctgtagcaaacatcggtgtttcttctctggaacagtttcctagacttggtaatttacagaagctaatcttatctgataatcggatcactgttggtttagagtttcttgttgaagctgggcttgattcgttctgtgatttggatttatctaataaccggatccagtttgttgaggatctagctcctttggcggagttgaagcttgtgtctcttgatctgtatgagtgtcctgtgactaggcttaaggattatcgatctagggtttttgggttgattaaaactttgaagtatttagataagactgatgctgaagggaatgagaggcctgagtctgatgatgaagatgatgaggaagatgaagaggatgaagaagaagaagaggaaggtgatgaggaggatcctggaagtggggagattgatggagatgaaagagcagaggctcctcggatgagtaatggccatagtgaaagggtagatggtgttgttgatgttgatgaggatgaagagagtgatgctgaggatgatgagtcagagcaggctactggagtgaacgggacgagttatcgggctaatggattccgtcttgaagctgttaatggggaagaagtaagggaagatgatggggatgatagtgagtctggtgaggaggaagtaggggaagataatgatgtggttgaggttcatgagattgaagatagtgataatgaggaagatggggttgatgatgaagaagatgatgaagaggatgaggaggaagaggaagttgataatgctgatcgtggtcttggtgggtcagggagcacaagcaggttgatgaacgcaggagagattgatgggcatgaacaaggagatgacgatgaagatggtgatggc

SEQ ID NO: 139505 - DNA, 2204 bp, Arabidopsis thaliana landsberg
tccataacataagtcatgccatttatggctaactacaaggcatttgatcttctttcccttcacacatcattttaacattcttgtcattttctacagaatccgagaaaggaaagaatctgtgactgttctactgtgcggtactagtggctgtggcaaatctacactctccgcacttctggtatttttcatcacatgtattataatcgttttagattgacataagatgatgcttcactcttttgttttgttatattcaatatttggttaggtactgtttcacttcttttttccacaggctttacaatactggattctgttttccttacagggaagtaggcttgggattacaacggtggtctcaaccgactcaatccgtcacatgatgaggagtttcgttgatgaaaagcagaatcctttgctatgggcttcaacataccatgctggagagtaccttgaccctgtggcagttgctgagtcaaaagccagaagaagaagagccaaaaaaatggatagtattgaggacgaaaaagcgaaagcctctgaaggtgggaaggctaagaatactcaacagactgatgttggatcaaaaaaaaccacccctgtattgttaagtcccaagcaaatggctgtagaaggatttaaggctcaaagtgaaatggttattgacaatctcgataggctcattaccgcatgggaagaaaggaaagagtctgttattgttgaaggtgtccatttaagcctcaactttgtggtaagactcaatttgttctctttaacacatttcattttgaaagttgtaattctaacttctaacttgttttcagatgggactgatgaaaaagcatccttctatagttcctttcatggtatacatcgcaaacgaggagaaacatttggaacgatttgcagttagagctaagtacatgaccctggacccagagaaaaacaagtatgtaaaatatatacgtaacatccgaacaatacaggattacttgtgtaaacgagctgacaaacatctagtccccaagataaacaataccaatgtcgacaagagtgtggctgcgatccacgctacagtcttcagttgcctgcgtaggcgagaagcaggagagcatctctatgatgctactacaaatactgtctcagtgattgacgatgagtatagaaaccagtgtacagctaattcattgagctccaaaggaatgtttcagctgatccaaagaaaaggttcttctaggcatcttatggctcttctcaatactgatggcactttcgcaagaacttggcccgttactggtaaggtcgatgagagtggaaagccagtcttttgtaatgagatgatggaagaaaatggaatggagcacccggtctatggatacctacagaaagctgaaccggtgaatcttcagtttggtctatttgggatcagtgcttggcctagtgatggagccacgagccgcgctgggagtgtagatgactgtagagctgacatggctgaaaccagcagtcggtattactcttcttgctgcagctcgcctaggatgtctgaaggaacttctaaagaggtactgtaaaactattttctctgatgtgatttgtatgtggaaggttgtttgatgattctgtatcttctctgttaacagcttaaggaagatcagtcagtgcatgggagcgatgaagaagtcgaggatgatcctcccgagccagatacagattttagcgatgacgataacaagcgagaccatgacgaggtaaaatcttcttaatgatctttctactcatttatgtgttcatatgcaatgaagtggtaaccatgaggccttgtacgtctgcaggtgggttcggttgatgagcaatcaacaaagtcagatgaggagtacgatgatcttgcaatggaagacaaaagctactggacagatgaagaggaagagtcacgagatacgattgcaataatgtctgaaaaaaacaacaagcaagcaacaaaagaagacaagtacatacagaacttagacctttttctacggaccgcaaaccagcagcttgtcgagccacttcagctatgtgcatcactgctcacatgcgagaatgggaacacaagactctggttgggtaaagaaaagatgaggaaacgttctttaagcatctcggccattggaaaacatgggtcgggtttgggtgatgcgattctcttgggtgccccatga

SEQ ID NO: 139506 - DNA, 2904 bp, Arabidopsis thaliana landsberg
atccgacccgaaacgtatccttctctgaaacttcgattgagattcgcattcctctgttcttccaccatttaacaattattctcttttgtcttcgccaacttcttccgtttcttcatacttctccaggtacttcgtcgagttcctcgtgctttagattgtttttgcttttttcgaagatacgtgagagaagtgtttctcctgctctgtctcttctttgatcttatatcacgtgggatctgattttttagttgcggtattcacaagtctttcccaatttgaggatgttttgtctccgtgatttctgtgtttttgttttggaatattgatgattatagattcgaaattatgcagctttagatactaactaaatgacgaatcttttctcattattcgcttgttgaatcttccactgagctcatagataaggaattctctgttcattgttgcttttagagcttaattcatgttcctgagattcaaatttgcaacctttttcccacttatgtaagaaaaaatggcttttttatatattcttcattcatggctgtgttgattaggaatctctaatctctatgtctactgttagattaattgtttggtattgatactcaaattgcatatatttaggttcttgcattggttttttatagtatcttttctgcaactgagtctttgtatttaccaaaaaaagaaaaaaactcaatctttgtggggaacttaaaggtggcactgagtaatatttgaatctcaatgctgcaagtttgtcttgaggtttatctggaaaaaagatggaagtttgcggggatctgaaatctgataacttacagaaccgcccctgactccgcttaggattctgaggggcttgatgatcctgctggtgtttctgtctactgcttttatgtttctgctgtactttgcaccaatagctgctctaggtctacggcttctgagtgtgcaacaatctagaaaagttgtttcgttaatctttggtctctggttagctttgtggccttacctgtttgaaacggttaacgggacaactgtggtgttctctggagacatcattccggttgagaaacgtgttttgcttattgcaaatcacaggacggaggtggattggatgtatctgtggaatattgccttgagaaaaggctgtcttggctacatcaaatacgtgctcaagagcagcttgatgaaattacctatttttggttggggctttcatgttttggaatttatcccggtggagaggaagcgggaggtcgacgaacctgttttgcttcaaatgctttcatcttttaaggatcctcaagaacccttatggcttgctctattccctgaaggaaccgatttcacgtactatatgctccctatctgatttaactgctctagatatattagctaatacattattaatctgaatcttcgaagatatctttcagtttctctttggtaggatatttaacaccatgcgcatctgtcttgcaaatatcttaaaccagtcaccctcatttacaataatttgcctgctattgcatgaatgtttgaaatgctgctcttagtatatcttctttctattactgagaccttccttatttgatatgcagtgaagagaaatgcaagagaagccaaaagtttgcagctgaagttggtcttccagcactatcaaacgtacttctaccaaaaacaaggggttttggcgtttgcttagaagttcttcataactctttggatgcaggtatggttcatgaaattttgttacaaatgttggtgtacatatagtagtatctcaagccacatgttatgcaaacacttatgtgttttgacgacattatgatggcgtgcatatcttctatttttccaatgacccatgtgggacctcatgaccacaattaactgaacaaggcatttccttttattgcaatgcagtatatgatttgactatcgcatataaacctcgctgcccatctttcatggacaatgtattcgggacggatccttcagaagtacatatccacgttcggcgagttctactaaaggagattccagcaaacgaggcaaaatcttctgcttggttaatggattcatttaagttgaaggacaaactgctatccgatttcaatgctcaggggaaattccccaatcaaagaccagaagaagaactctctgttctcaagtgcattgcaacatttgcaggggtaatatctttgacagtagtgttcatatatctgaccttgtattcacatagctgtttcaaagtatatgcttgtctaagcggcacatatttaacttttgctacatattacaagttccaaccctcacctagctgttttagagaagattcttgtaaagttaaaaaccattaactttgttgtaaatacaattctttctttgtatacaaagaaataatattacaggcagaaaatatctctgggatgcctttttcattgtaagttctttgatcttcagttagttaaaattgtattccatgttgttctcttgaaagttgaaactcacatagatagtttgtgtagtctttagtcacattttggttatgtcaaattgtttgagtcttgcaagtgccactgttagcacttttcattcaaaactgtcacggagcaaacagaatttggaaggaaaagttgatatgttggaactgtagaactcttgtgtttattgagttagaaacaacaacaggtcactaaaccatcttgtcaaaaggtgttcttacttctgaatcagtcaagtaaaggaagtttccatctgagcaaaactttgtcggtgatcgacaaagcatagtagaacccactttgtcccaaaagaatgttaccttctttttgcaggtgatgaaaaagagagtaagaaggccgttgctcagcaccctttcactgatacattggatca

SEQ ID NO: 139507 - DNA, 1026 bp, Arabidopsis thaliana landsberg
  unsure (1)..(1026): unsure at all n locations
atgaaattcagacaaaaaagattcaagattgaagcaactgcttctcagatatctgtcgttgacaacactttcttgtctccgtctccttccaagaacaaaccacatgaatctaagaagaaatcaagtatgttgcttttgtccttgtgtcatgagtgtatatatatcaagagaagagaaacattgaatcaagtttttatgtttttgtttagatgaagcagctttgatattgattaggcatggagaatcgttatggaatgagaagaatttgttcacgggttgtgttgatgtgccattgactcagaaaggtgttggagaagctattgaagctgggaagaagattagtaacattcctgtagatttgattttcacttcttctttaatccgtgctcagatgactgcaatgcttgccatgactcagcatcgtcgcaagaaggttacaaaatgatctaaatggtttatagctctttgtcatgaaactgctctattttgacttgtgtaaatttatcttaggttccaatcatcttgcacaacgagagtgtaaaggcgaaaacttggagtcatgttttcagcgaagaaactagaaaacaatctatcccggttatagcggcttggcaactgaatgagagaatgtaaaccaaatgtcaattttcttgtgtttgtttcttatgtacacaaactctttaaaaatgttgatttgaagtttccatcttttgagttaggtatggagagttgcagggtttgaacaagaaagaaacagcggaaagatacgggacacaacaagttcacgaatggcgcaggagttacgaaattcctcctccgaaaggcgagagcttggagatgtgtgctgagagagcagtggcttattttgaagacaatgtatgaatgagagattcttttgttttttcccttattaatgttgtcgtttatactgatgtctaatcttttatgcagatcanaccagagcttgcatctggaaacaatgtaatgatggctgctcacgggaacctcatgagatctatcatatgt

SEQ ID NO: 139508 - DNA, 3350 bp, Arabidopsis thaliana landsberg
aaagaagctcgaatctctgctctcctcattgatgatggattaaagctagacaagaaacatgatattgaatggcatagaaactttgttccattcgttggtagagtgttgcgtatcgaaactcttgccgagcaaatcctcgaagaggagtgtcctggtggttatttctatggttctgagagtactgaaccgcctgtttgggatttagattctttcaccaaaacctttgttgaaagattaaattcatatccttttatctttgcttttttaatacacgcttaatgattgtgactatactcagtagtattggttaaccttgactacttcggtcacgcttgttccagagattgttgctttgaaaactattgctgcatatcgtagcggtttggatattgatacttatgtgagtaaagaagttgctgagaatggccttgttgaagtcttgcgaggtaagatggttgtgcttggtctatcaagaagtaacatagttgttgtctgatcaccttaaaatctaatattgctgcagctggaaagcctgtccgcataggaaacaagggcttgattgactacatccttaccattagtttggaggtcgctgtgcgtcgcgacttgcccttgcagattcacaccgggtatgcaagatttgatcaactatatgattgatgttagtaaagtctgatctttttatcaaacaaaccttacacagaaacagaaactcatgctcagaggtttgtagtaatgaaaattctccttttcttttgttgtttgagccagttttggtgacaaggatttggatttgaggttgtcgaatcctcttcaccttagaacccttcttgaagacaaaagatttggaaagtgtcgtatagttcttcttcatgcagcttatccattctcaaaggaagcatcctttctgtcttcagtttatcctcaggtttttcttcatcccatttcaattatctgtaaaatcatgcctagtcattaacttattttcttgttccttaaggtttaccttgatttcggcttggcggttccaaagcttagtgtccatggtatggtttcttcagttaaagagctccttgacttagcatcaataaagaaggtaaaatttattttacttgcattatctttgttattgttcatgagtaaccataagatattattgcaggttatgttcagcactgatgggtatgcatctcctgagacctactatttaggttagctcaagtttctacctcttttctatagtttgtaacatacttatatatgttccaatcctgtttctaagctttggcacttgaaatcgtcttgcttcagtcttgaacatagctcgctgttttttgcaggtgcaaagaaagcacgtgaggttatcttcttagttctgagtgatgcttgtgccagtggtgatctctcactcatggaagctattgatgcagctaaagacatattctcacgaaattctattggattttataagcttaatatagacacagattcttctagtccacaaaatataatatctcccaaattgaagataaaggagcctgatgttcaagaagatagtagttcttttgtacgcattatttgggttgatacatctggacaacaaagatgccgtgtgagttttttttttttggtttcttctaaagaaaaaacctctgtttcccacctcaacgatttttccttagaagcacaaaaacttaactagaattctgtttattgtattgtttcaggctgttcaagcgcagcgttttaacagaagtgtgaagaagaacggcgttggtctgacctttgcatcaatggggatgacttcatttactgatggaccagcagaagagtctaaattgacaggtgtgggtgagattagacttgtttcagatctatcaaccaagcagacaataccttggtactttactcgtgttcattctctttggagttaattttacagatgtttctttcttaattgtttccgtatcatattttatcattaggacgaagcaagagagcatggttttagctgatatgcaattgaagcctggtgaagcatgggagtactgtccacgagagaccttaagaagggtcgcaaaagttctcaaagatgaatttgacttggtaagaaatctccatatagccattctacgaaaacttttatttgctttttggttgcttaagctcaaatcttccttggcttttaggtaatgaacgctggttttgagaatgagttttatctcctcaagaacgttgtgcggtatgcgactatatatttcttgaataccggtttctttgttcaatccaatcattttcacaatcttaacactttttctgtccattttttaaaagggaagggaaagaagagtatatgccttttgactttggtccttactgtgccacatcctcattcgatgctgcatctccgatcttccatgatattgtacccgcactcgagtccttgaacatcgaagttgaacaggttacaaataattcaaaaatccctgataatgatcagtctgcaacatgcttcttgacatgtatgaaattttttcatagtttcatgctgaatccgggaaaggtcagtttgaagtatctctcggtcacaccattgcatcccatgctgccgacaacttggtctacacacgtgaagttataagatcggttgcaaggaaacagggattgctcgcaacctttgttccaaagtatgtcagtctctcccaccaaattattcgttgtaactgcaaatttttaacatatgtgttttttcttcaggtatgattattgtgacattggttctggatcacatgtgcatctaagtctttggaaaaacggcgaaaatgtcttcccggcatctaataactcatcttctcatggaatctcttccgttggagaagagttcatggccggagttctatttcatcttccatcaatcttagctattatagctccactcccaaacaggtaactcgaaaaccgcacttttcgagtaatttcctcaattgttattaaaagttgtgtgtgtcacttaaatttccagctacgaccgaatccaacctaatacatggagtggagcattccaatgctggggcaaagaaaaccgcgaagcggcgttaagagcagcttctccaccaggaactcctgatggtttagttcctaactataaatagagtcttttgatggctctgcaaatcctcaccttggtttggctgttataatggctcctggtattgatggtctccggcgacatcttcaacttcctactccaataggtaactaaaaacttatgttcttcattctcatatatatgtagtgttaatataaagcttgatcttgagttgttcggatggaacagatataaatccggc

SEQ ID NO: 139509 - DNA, 2151 bp, Arabidopsis thaliana landsberg
atggtgagacgtttcctctcttctcacaaatctctcatcactgttttctggatcgccactttcgcttccttattcatctggcaattcggcggcgtttccacaaatctctactccggtttctcccttttctggtcgtcgtcttcaacaaccaccaccgtcttctccggtggattccccaagctcagacctgtagttttcaatctaacagacttcggtgctgtcggcgatggtgtcacaatcaacactgaagctttcgagaaagctatttataagatctctaagcttgctaagaaaggaggtggtcaacttaatgttcctcctggtcgttggctcactgctccgtttaatctcactagttatatgactcttttcctctctgagaacgctgagattcttgctcttcaggttttgtttcctctgatttgaaattgtgatctatgtgtttgggatctgtttagggttttgatgcagagtttgttatttggttcactattgaattaagattgggttttgatgttgaaacgtttttaggatgaaaagtattggtctttgcttcctcctttaccttcatatggatatggaagagagcatcatggacctcgttatggaagtttcattcatggacagaatcttagagatgttgttgttacaggttagttgattggtttgtgaattttgcttctggggactattcttgtgtttgcaatgtaactcttcttgtgtttgcattgtccttgttgagctttttaggcagtagctgaaatgagggcttttcatgtagtaagactattcagaatgtttaagctctagttgtaaaggttttatgtctctcttagctgcttgaattgactaagttttggtattagatgatcaaagttgaattgactcaacttatgtggctaatagtattttctttctttgccaaacctgggagtttaatctgtcaactgtatgattgatggctaattgatgatggaaaacagggaataatggtagcaacaacgggcagggacaaacgtggtggaagaagtatcgccaggagctgcttaaccacacgagaggaccactggtgcagataatgtggtcaagtgacattgtttttgccaatatcactttgcgtgattctccattttggacgcttcacccatatgactgcaaaaatgtcacaatcaccaatatgaccattttggcgcctgtgttcgaagccccaaacactgatggtatcgatccgggtaagtaattctgactttggctggatgttgcaactcagatatttaacaaaggaattagatacctaagctcatgtgatgcaaataataaccgaacagaaacagtcaagatggctagagctagtgtaattagtagtgatacctctaggcctctaagctattagatcaatgaaacaaaatggagaaacaatcttagttccctacctgcaactgggattctagcgactagtatatgtagacttcaggaatttcagatgcttaagagcgacacagctcctttcattgtatctgaccattgcatataaccatatggtacctaatggtacataacatataaccttattgataaaaatcaggtcagagtatgggcttggacgatctgtaaacattacttggctttaatggtggctaatatctttttgttgtgcatcagattcgtgtgaggacatgttaatcgagaactcttacatcagcgttggggatgatggaatcgcaataaagagcggttgggaccagtatggaactacatatggaaaaccttcaaagaacatactcatccgcaacctcatcatccgctccatggttaggtaagagagaattgctttccctaatcaatgttgatctaataatcaacgtgtacctaaagcctctgtgcaaaaacagcgctggtatatcaataggaagtgagatgtctggtggtgtctcgaatatcacagtcgagaatattctgatttggagctcccggcgtggagttaggattaaaaccgcaccaggacgaggtgggtatgtccgggatataacattccggaatgtcacattggatgagttgagagttggtattgtcattaaaacagactacaacgagcacccagatggtggattcaatccccaagcctttccgatactcgagaacataaaaaac

SEQ ID NO: 139510 - DNA, 4921 bp, Arabidopsis thaliana landsberg
ataatcttcttacaaaacagaactccggcgttatcaacggtggagataactctctttattcaaatccaacggttcatattcgaagtcgttgttcccagtaaacctcgcgttcatgacccaaaaagaagattagataaacccaaaaatgtgttgcaatgtcttcctttgatttcctcaatttctagggtttcgaaagaaaaaataatgacttcaatcgaattgctaagtccattgattcacgataagtttcgattctcaacttgttgtagtactagtagtttattgtatttgcatgcttcgagctttttccgagatcgatcttttggttttcgtcagaatccgaatcgattcgtctccaattcatcgattcaacttcctcaatcagttccagggtcgataaaccaggaaaggtttaatctttggcaagggttttcgaggaagaagagtactagtagtagtagaacgattgtgaattgtcaagaaggtgatcagaaagctagctcaagtgaaggagaaggaaagaccaataaggataaaggacggaagcaaggtaagaatgagttatggtggtctaaagggaagaaatggcaatggaaaccgataattcaagcgcaggagattggtgtaatgttactacaattgggtattgttatgtttgttgtgcgattgctccgacccggaatcccgttaccgggttcggagcctcggacacagacgacgtttatgagtgtaccgtatagtgatttcttgagtaaagttaataatgatgaggttcagaaagtggaggtggatggttttcatgttttgtttaagttgaaagatgatgggaatttgcaagagagtgaaactagtagtagtagtattaagctctctgagtcgtctgagactatgcttagaagtgtggctccgactaaaagagttgtgtattccactactaggccgagggatatcaaaacaccgtatgagaaaatgcttgagaataatgtggaattcgggtcgcctgataagcgctctggtggctttttcaactctggattggtaagaccgtgaattataatggcttgttggctttaggaaacacttagattgaaaaggtttcttcttttcttgttttttgtttttgtttcagatagttctgttctacattgcagtgcttgcagggcttctccaccgatttcctgttaacttttcccaggtttgcatattcatgataccgtaatgtggttgtttaagttaaggccatgtgcacttttcttaaaagctgtgaggtatacacagagtacaacgggacagctgaggacccgcaagtctggtggtcctggtgggggaaaagtttctggtgatggtgaaacaatcacttttgcagatgttgctggtgttgatgaagcaaaggaagagctggaagagattgtggtaggttcatttatccttatatatgctctgcactttgctgaaatgattgtcaaatgtttctgtaattgctttgtgttcatgctcttgttaatttctcttacacttggtttaactgttgcaggaatttctcaagaatcctgataggtatgttcgtctaggtgctcgtcctcctcgtggtgtcctactggtgagtttaataatgtagttacaacttatggccatttcttaggtggtttatgcgcaatgtttggttactatctttagaatttatggctttatttccctgttttggtaggtcggtcttcctggaacagggaaaacccttcttgcaaaagctgttgctggggaatctgatgttccattcataagttgctctgcaagtgagtttgtagagctgtatgttggcatgggtgcctcacgcgtaagggatctatttgcacgagccaagaaggaggctccgtcaattatatttatagatgaggtgtgaatacaaaatcagtgttagattacctgctactttgtatcgatgtaaatctttacaaatgtatttgtgtttctttcaatttcagatagatgctgtcgcgaaaagccgtgatggtaaattcagaatgtcagcaatgatgaaaggaacaaaccttgaatcaattgctcactgtaagtttgtaattatgcacttttcctgccagagttgctttcttgatctttgcattatccatttatatgttgggaactgttttacaggagatggatggttttgacagtagctctgcagttattgttcttggagctaccaatcgagctgatgtcttagaccctgccctgcgtcggcctgggagatttgatcgtgttgttacggttagtagaatatctggctctgtatgatcatgcaatgtaatacattgtcaaagctatctgacatttaatttcaggtggaatcacctgacaaagttggaagagaatccattttgaaagtgcatgtttcaaagaaagagcttcctttgggagatgatgtcaacctagctagcattgcctcaatgacaaccggttttactgggtaaaaatttgtattttattcttgaccgaaagtttcttacctgcttttttctgtatatttcgttaacttttatgtttggtttttatagggcagaccttgcaaacctggttaatgaggctgctttgctagcgggaaggaagagcaagatgactgttgataagattgacttcattcatgctgccgagcgatctatagcggtattgtcttattctttctgagtctctatcgtacctctcatcagaatttgtttccttacattgcatcgtttgcttcagggcatagagaagaaaacagctaggttaaaaggtagtgagaaagctgtggttgcaaggcatgaagctgggcatgctgttgttggtacagctgttgcaagtcttctttctggacagtcccgtgttgaggtaaagcagtgagaaccgcatgttgcttgatactcattttttacatgtgttaatgctctgctaatacatattgtatttttagaaattaagcatattaccaagatcaggaggggcattgggctttacatacattcccccaacgcatgaagacagatatttgctctttattgatgaactacatggccgcttggtaactcttcttggaggtcgtgcagctgaagaggttgtttactcggggcgtatatcaacaggtgcacttgatgatatcaggagagcaaccgacatggcctataaggcagtagctgaatatggtctcaacgagaaaatcggacccgtctctgtggctacgctttctgctggtgggattgatgactctgggggatcaccatggggaagagatcaggtaactctattctacctaaacttcttgttggtctttttcaaaatggaaagcaaacttaacatgtcatgctgaatttacaggggcatctggttgaccttgttcaaagagaggtgacaaatttgttgcaatctgctctggatgttgcgttgactgttgttcgcgctaatccagatgtattagaagggctcggtgctcaactggaaggtaacacatgacacctctggatactaaaactataattactgaaacaaaacataagaccagtattctaaagaacggctagtttgggcttataatctctgagatgggctggttcattccaatggtatcaaaacaacatggcatgatatggtcactagactcacatgttgatggtcttatatcgtaatttttatagctcctaaagtagttgactctgtttgaaaacatgtgattggtttcagatgaagagaaagtagaaggtgaagagttgcagaaatggttaaatagagtagtaccctcagaggaacttgcagtgttcatcaaaggaaaacaaactgctttacttccagcacaagctagctccagttaacatctacaaagcctataaaatggaaagatgtatgcatcgatgatgattctgcctcacttagaagaatcaaaaagctaaaaggagctgcgaatcctgggcaacgatgacttagtatgtatagaagaaaaaaaaagcttttacttggtatcaaacagagcatgtgttgttgtatttgctacctttttctgcaaagttattggcaattgtattgttgttccacttgtatatatacagagaccatttatgttaatatacaacttcgtatggggaaagatgattccatcaagtccaaaatgccaaaaccatgcacgatcttgtctgatcaagtatgataagatgtgagattttaagaacgtgaagcttttcatattgtattctcaatgaacgaagaattaataattagagttagaaatgcagattacagagattacacaatttgatctcatttcttggcaaagaggcccaggccaccgaagccaccgtccttctttggattcctgtgtgttaattttcgtgtggctttagttacaaagggattagattgtcagcgaatctgagccgttggatcgttttgacatgagctttccataagtgtcttatcctttgtttctctcatttttcacatatgtatcagacatttaatcaagcacatatctacgtgttgattatgttgatgatgctgagattatgttgatttagagaatgattagtattgctgatgatggtacacgttagtaaacatatgaatgtggaactgccacgaaagagggagcagagttttgggctttcttttggttatgtatttgcattcttgttgtaacaaattctcttataatattaaaagcattgtgaaagaaaccaaatatattccacatagtctatgcttgaagaattttttttcatactataattttctattacttaagtttgtgtaatttttgaaaagagaaaattgatattttttaggattgggtgatctgaaatttgactacaaaaattttcttggacacagacacacagtcacacaaataagctaattactaaaattttatcttaagttgcattcactttgcaaatta

SEQ ID NO: 139511 - DNA, 3393 bp, Arabidopsis thaliana landsberg; identical to SEQ ID NO: 31498

SEQ ID NO: 139512 - DNA, 1700 bp, Arabidopsis thaliana landsberg
  unsure (1)..(1700): unsure at all n locations
cgaattctcgacactaagaatttctctggggtttctctcctcaaactcgatctgattcttttgttctagggttttcactcaattggatctttctcaatctcctctctctcaatttgattattttgttctccgtgatggttgctggaaaggggaaatcaagtagaggccgtggtgggagaaccgaaggaggtgagagaactggtgggagaaccggaggaggtgagagaaccgaatgaggatcgtcatctcatgcctccaacccttattcttcgaacgcgactaattcagtgactcaatcatctagagcaacgcttccttctcagtacccagcgaggtcacaaacaccgactcctatttctttgccatcaccgcaagtcgctcaacaacatcctcttaattatcaacagccgcctccttatcaacatctgcatccttatcaagtatgattgattaccaacttgttttatgtttggtctttgtttctaaagggattttatctaagcttaactttcttatcagattcctcagcatcaaattcctccttatcatattccccaacctcaaatgcctcctcatgaaaaccctaatgttgactctgatgctgacaacgaaccaccgatggactatgacgagatggtcgagtatatgttgggtctgcctggccgagagcatcttccacgtcttagtcggacccgaattccaggcgttgagactatatggtatgagatgtagttgcttagattatgaagcttttgttgtgttgagagcatctctaaatgttatatcgtcattattttaggttctagcttgataaatttgatggaccttactatcattaatgtatatttgttttgatgtaataggtttggcagagacaaagggaaattgtctaggactattgctggaatatttcgggccaaatttgatggaccttactttagttggaaggtgactcctataagcattcaacagcgatatttctgagcatttgcggtaatgttgattcagctttgaatctttgatagttatgctgaattgaatcagcatctgttatactaattcatacaaatatgtgtaggggaagttcaagtgggatatcggacttaccgagctagggagagaaggattcttggtgatcgcaaagaaaaggcttaaagggattgttagccaagcaaaaaaatagtggtgtaaggccgtattggattgtcaaggaactgtggacagagatgtggatttactggaacactccggctgctatgggaaaaagctcaaatgcatcacagtgtagaaacagtgatcgtggtggccttggagtccacaaacacgtatcaggacaaaaatcattcatgcaagttcaccaagagctggtatagtctttcacttttatttcaaattttgcacttagaacactgatgttgttatctctcatcagtgattttaatgatgtctatgtatcattataggaggaagaattggggcgtcgtgtgtctnnnnnnnnnnnnnnnnnnnnnnnnnnnnnnnnnnnnnnnnnnnnnnnnnnnnnngctaaagccaaataagtagctgaggtctatgggaagagcatagaagagagaatttctttaatggaagaggatggtgtagcaaattcagataattccaatcagtagtcaactcagcgggaactcaacattgacgaaatgattgacatctttctcaag

SEQ ID NO: 139513 - DNA, 2756 bp, Arabidopsis thaliana landsberg
cagggttgaacttagaaggtcaatatcttcttgaaatcaagagcaagtttgtttatgctaagcagaatttgagaaactggaattcaaatgattctgtaccttgtggatggactggcgtgatgtgcagcaactattcgagtgatccagaggttttgtccttgaatctgtcttcgatggttctctcgggtaagctatcaccaagcataggtggattggttcatctgaagcagctggatctgtcatataatgggttgtcagggaaaattcctaaggaaattggcaactgttcaagcttggagattctgaaactaaacaataaccagtttgatggtgagatacctgtggaaataggtaagcttgtgtctttggagaatctgatcatatacaacaacagaatctcagggtctctccctgtggagattgggaaccttttgtctctctctcaactggtgacttacagtaacaacatcagtggacaattgccccgttccatcggcaacctcaagagactgacaagcttccgagccggtcagaacatgatctctggaagtttgccttctgagattggtggatgtgagagcttggtcatgcttggtcttgcacagaaccagttgagtggtgaattaccaaaagagattggaatgctcaagaaactttcacaggtgattctttgggaaaatgagttctcagggtttatccccagggagattagcaactgcacaagtttagaaacccttgctctctacaagaaccagcttgtcgggccaatcccgaaagagctcggggaccttcagtcgctggagtttctctacctttacagaaacgggttgaatggaacgattccaagagagattgggaatctctcatatgcaattgagatagatttctcggaaaacgctttgaccggagagatacctttggagttagggaacatagaggggcttgagcttctttatctttttgagaaccaactcacaggtaccatccctgtggagctttctactttgaagaatctatcaaagcttgatctctccatcaatgctttaacgggtcctattcccctgggatttcagtatctaagaggactcttcatgctgcagctgtttcagaactcccttagcgggaccatacctccaaaacttggctggtatagcgatctctgggttcttgatatgtccgataaccatctcagtggaagaattccaagctacctctgccttcactccaatatgatcatcttgaacttgggtacaaacaacctctctggcaacattcctactggaatcaccacttgcaaaactctggtccaacttcgtctagccagaaacaacctcgttggtcggttcccatccaacctgtgtaaacaggttaatgtcacagccatcgagttgggacagaacagattccgtggttccatccctagggaggtcgggaactgcagtgccctacaaaggctgcagctagcagacaatggcttcacgggggagctacctagagagattggcatgctttcacagcttgggaccttgaatatctcatccaataagcttactggagaggtcccttctgaaatcttcaactgcaagatgcttcagcgactagacatgtgttgcaacaatttctctggaaccttaccaagtgaggtaggttccctctaccagcttgagcttctgaagctctcaaacaataatctttcgggtacaatacctgtggctctagggaacttatctcgcttgaccgaactacaaatgggtggaaacttgttcaacggtagcattccacgggagttgggcagtctgacgggtttgcaaatagcattgaacctcagttacaacaagcttaccggagaaataccacctgagctcagtaatcttgttatgcttgagttcctgctcctcaacaacaacaatttgtctggggaaataccaagctcttttgctaatctctccagcttgcttggttacaacttctcatacaacagcttaactggtcctattccacttctccgtaacatatccatgtctagcttcatcggtaatgaagggctttgcggtccgccgctcaaccagtgtatccaaacacagcctttcgcgccttctcagtcaaccgggaagcccggaggaatgcgttcgagtaaaatcatagccattactgcagctgtgattggcggggtctctctcatgctgattgctctcattgtctacctcatgagacgcccagtgagaacagtcgcttcttctgctcaagatggccaaccatcggaaatgtctttggacatatacttccctccaaaggaaggattcacgttccaagatttagttgcagccactgataatttcgacgagagctttgtagttgggagaggagcttgtggaaccgtctacaaagcggttcttccagccgggtacactctagctgtcaagaagctggcatcaaaccatgaaggcggcaacaacaacaatgtggataatagctttagagcagagattctaactcttgggaatatcaggcaccgtaacatcgtcaagctacatggattctgcaatcaccaaggatcaaatctgcttctgtatgagtacatgcccaagggaagccttggagaaatacttcatgatccttcatgcaacttggattggtctaagagatttaaaatcgctttaggtgcggctcagggtctcgcctatttgcaccatgattgcaagccgagaatcttccaccggaacataaaatcaaacaatatactgcttgacgacaag

SEQ ID NO: 139514 - DNA, 1082 bp, Arabidopsis thaliana landsberg
aaaatggcagaagaagcggatacgaacatcgagatctggaagattaagaaactaatcaagggacttgaatcagctagaggtaatggaacgagtatgatctctcttattatgcctcctcgtgatcaagtatctcgtgtcacaaagatgcttggtgatgaatatggaactgcttcaaacattaagagtcgagtcaatcgtcaatctgttttgtctgccattacttctgctcaacaaaggttgaagctttacaacaaggttcctactaatggtcttgttctctataccggcaccattgttaatgatgacggtaaagagaagaaggtgacgtttgatttcgagccctttaggccgattaatgcttccttgtacctttgtgacaacaagttccatactgaggcattgaacgagcttcttgagtctgatgacaagtttggtttcattgttatggatggtaatgggacactgtttggaactttgagtgggaatactagagaggttcttcataagtttactgttgatctcccgaagaagcacggaagaggaggacagtctgcacttcgttttgcccgtcttaggatggagaagagacacaattatgttaggaaaaccgctgagcttgctacacagttttacatcaatccagctacgagtcagcctaatgtctctggtctgatccttgctggttcagctgatttcaaaactgagctcagtcaatcagagttgtttgatcctcgtcttcaagctaagatattgaatgttgttgatgtttcttacggaggtgaaaacggtttcaaccaagcgattgagctgtctgctgagattctatccaatgtgaagttcatacaggagaagaaactgattgggaagtactttgaggagataagtcaagataccgggaaatacgttttcggtgtggaggatactctaaaggctctagaaatgggtgctatcgaaacccttatcgtgtgggagaatctggacataaacaggtatgagctaaagaacagaacgacaggagaaatggtggtgaaacactttggaaagatcaagagtctgatacaagcaacttccatgattcagag

SEQ ID NO: 139515 - DNA, 1888 bp, Arabidopsis thaliana landsberg
atgagactttctgtagttgcaagggcagcatgttgccatcccgtgtttgtggactcgttccccaagctgaaagtctggtataggcagcaccaaagatgcatagcagccacattatctggacttacacatggatctcccgttcatcagacagttgaagcacttctcaacatgacgttcggaaaggtcagaggcagtcagactttaaatccagtaaattcgggcacaagcagttcatcaggagctgcaagtgaagatagcaatataagacctgagtttcctgcttgggatatcctcaaagccgttccatatgttgtcgatgctgctttaaccgcttgtactcatggaaggctttcgcctcgtcagttagctacaggtttgttttgttttgctggatcagattcctaattgtgttgtcatgtgcgataacatccgtctatatgacctttggcaactctgaatgccaatgagagatgtttgactgtgttgatcagttgttatatcagatgcatttcttacagtaaagtgaatttatttacagaataacaagtgtttttctttcagggctgaaagacttagcagattttctcccggcatcattagcaacgatagtaagctatttctcagctgaggtgagtagaggtgtttggaagccagtattcatgaacggcgtggattggccaagtccagctacaaatctatccactgttgaggaatatataacgaagattcttgcaacaacaggcgtcgatatccctagccttgctccaggtaaaactattcaacgtgtttaaaatgccgagtctgtttgtttggcttaccatctctgtagtctgtaccatcctctctttataataagctttttacctgtcctgatttgatgtgttaaagttaaagttgtcttttgaacttatggttgacttcttgctgtggtattgcaggagggagttctccggcaacgcttcctttacctctagccgcatttgttagtctaaccattacttacaaaattgacaaagcctcagagcggtttctcaacctggctggcccagctctggagtgcttggctgcaggctgcccttggccttgcatgcccattgtagcttcattatggacccaaaaggcgaaacgttggtttgacttccttgttttctctgcctctcgcaccgtcttccttcacaaccaagacgctgtgattcagctcctcagaaactgcttcagtgccactctgggtttgaatgctgcccccatgtcaaatgatggtggcgttggagctcttcttggccatggattcggctctcatttctatggagggatctctcctgtagcaccagggattctttatctccgtatgtatcgtgctctcagagatactgtctccgtatcggaagagattctctctctgctgatacattcggtggaggatatagcccagaacaggctctcaaagaagaagctggaaaagctgaagacagtgaagaacggatcaagatacggccaaagttctctagcaacagcaatgactcaagtgaagcttgatgcttcgctgagtgcctcgttggtatggctaaccggtggcttaggtgtggtccacgttctcatcaaagaaacgatcccatcttggtttctatcaactgacaaatcagaccgagaacaaggaccatcggatctagttgcagagctaagaggtcatgcccttgcctactttgtggtcctatgtggagcacttacttggggcgtggattcaagatcatctgcatccaaacgccgccgccaagcaatcttgggaagccacttggagttcatcgcgagtgccttagatgggaaaatatcagtgggatgtgaaacagcaacttggcgaacatatatttccggtttggtgagtctactc

SEQ ID NO: 139516 - DNA, 703 bp, Arabidopsis thaliana landsberg
gccaaacctctcttagattcttcttcttcctcgcaggtgagaatttctccgtagtatcctaatctcctttcactgtattgctaattaacgcatcggaataatctaggtttcgatttcagaattagttatctcgttgtgtcttttgttgattatatattattgttgaatgtgatcaattattcttgatgaatctcttaattcgaggttctattgctcatctgattagtttttttgtttgtttacttgctcagatcgatttttttttgaagctaaatctcaaaaatggagaacgacgcaggtcaggtcacagagctctacattccaaggaaatggtatatatcagctctctttgttctctgtgtaacgtttgattaaaatcttaagctaattgtcttaattaagtagcctaagctgattctattgttgtgtaatggtaatttgtttagctcggcaacaaacagaatgatcacatcaaaggatcatgcttcagttcagcttaacattggtcatcttgatgctaatggtctctacactggccaattcaccacttttgctctctgcggatttgtccgtgctcaggtttgtgaatttccactctgctaattactttataatcatctccacagttgttaatacaaagttcatgattgtatatgtatattgacattatgattgcatctgcagggagacgcagacagtggcg

SEQ ID NO: 139517 - DNA, 1123 bp, Arabidopsis thaliana landsberg
ggtttttcttgtggtaaaagtaaagatgggagatcatttagtgttggtggttgatcggttatcaagcgattctggtcttgggacggttaaccgtgcagagccaaaagctgactcggttaacgaagatgttgcacttgaatctgtatcgttatctgcaggagctgatttatgtgagagcaaatttgtacagtgtaggatttgtcatgatgaagatgaagataccaagatggatacgccttgttcttgttctggaacattaaaggttctgtctttaggttactgttgttttccacaaacaggatcatttctgatttttgattcatattgtcatcaacttttttgcagtttgcacatcataattgcgtccagagatggtgcaatgagaaaggtgatacggtatgcgaaatttgtcgtcaggtataaattctatagcacaacgtaatcatatagtctctgttttgatgaaattgtctcaccaaaccttgttcaaattgcagcaatataaacctggttacacagctccacgacaattgtttcactacacaggcatttctatgaacttcgggtacttttgttcgtcttgctttggtatcctcctttcttcctctgcacaatgtagaaatcttactgagaatcattatctttgttggaaacatcccagtagtgattggggaatcgagggactagatcttcgtaatccttatttcctaacctggggggatgcggatgatgatcatgatctttactcatttcatagccccacaagcttgatttgttgccgtctaattgccttgctagtatgtttcttctctctgtgttcttgagaacatgtatatcgaaaattctgctttgaacacaatgatttgttcatctttcgtgtgcagttcgtccttctgctcttcctgcgccattctcttccagttttactaggtggagtcgatgatttctcgataactttgctcatggtaagctcgataagcaattgcacaaacatacatatatcctctcttttcctgatttagagaaagaattttgttgttcttttgcagttaccattagtgagaacattaggcatcttgttgattgcttatgtatttttcaagtcattcattgttatacaacg

SEQ ID NO: 139518 - DNA, 2125 bp, Arabidopsis thaliana landsberg
ttcctcaggtattgctctcttcgttttgtgtgtgacatctacttttccatgctttttattagagatgttcttgcgtaattataggtggtggttctcactctcataccactgtctgagagaatactgaaatggattatacttagtcaatatgtaccaagaatcattcgtatgtatccgctttataaagaagtgacaagagcctttggtacggtagcagaatcaaagtgggttggagctgctttaaacttattcctttacatgctgcacagttatgtaagtctttgctcttaatcccacttcccacccactgttgttgttgttgatggatggctactatgcatataggtgtttggggctttttggtacttgagttcaatagaaaggaaaagcaaatgttggcgtcaagcgtgtgctaggacatccgactgcaatctcacggtcacggatctgctttgtaaacgagctggcagtgacaacattcgattccttaacacctcatgcccattaatcgacccttcccaaatcacaaactccacagacttcgactttggtatgtatattgatgcgttgaagtcaggggtcctagaggtgaaaccaaaggattttcccaggaaattcgtctattgcttttggtggggtctacgtaatattaggtaataaattgtattatgctaaactctctgccgtgagatctgacgactgacccatagtaagacatatatcaatccatttgttagattaatccactctacagtgctttgggccaaaacctggagacaagcaactctgcaggggagattttctttgctatcatcatatgtgtctctggtttactcttgtttgctgtgctcattggaaatgttcaggtaatatgaaatgagattgagatactagagtttgatctcagaaagcgattcttaatagtttggtaatcacagaagtacttgcaatcatctactactagagtagatgaaatggaggagaaaaggagagacacagaaaaatggatgtcctaccgggtgataccagagtatttgaaggaacgcattaggagatttgaagattacaaatggcgagaaaccaagggcaccgaagaggaagctcttcttcgtagtcttccaaaagacctcagactcgaaaccaaacgctatctttacttggatatgttaaagcgtgtaagcgagctcccttttcgtcatttatccgtgtatcgcaagaaatataatagttgtcaacttatagctttttcacctctcaggttccatggcttaacatcatggatgatggttggctactagaagctgtgtgcgaccgggtgaagtctgtgttctattcagcgaacagcttcatagtgagagaggggcacccagttgaggagatgctgattgtaacgagaggcaagctgaaaagtacaaccggatctaatgaaatggttggcggcaacaattgttgtgacctccaagctggtgacatatgtggagaacttctcttcaatggttctcgccttcccacctcaaccagaaccgtaatgactcagactgaagttgaaggtttcattctcttgcctgatgatatcaagtttatagcttctcatttaaatgtctttcaaagacaaaaactccaacgaacattcaggcaagcttcgaaaccaaagtagcagctgagatttttttactaccttaaacaagctgcaatgcaagacttaaacaaaccatattttcaggttatactcacagcaatggcgctcatgggcagcattcttcattcaagcggcatggaggaaacattgcaaaaggaagctttctaagacaagagacaacgagaatattccacaaggcacgcaactcaatcttgcatcaacgctctacgtgtccagatttgtgtccaaagctttgcaaaatcgacgaaaagatacagcagattgttccagctctcctgatatgtcacctccggtacctcataaaccagccgatctcgagtttgcaaaggctgaagcatagtgtatctttgaaggaaaatgactctctacacaaacaaggtagtgaagactccatgtaagctcaaaacatgccctacaacgtaactttccagttattgtcaaataattgactcatcaccacgtcct

SEQ ID NO: 139519 - DNA, 2501 bp, Arabidopsis thaliana landsberg
attttaaattcaatttggggattattattttttgtagatcgggttttttttttccgtatgtcgaaaaccagactggaatgagaaacgaagactgcgtccaggtatgtgactcgcttcggttatttacggataagccctcacttaaatgtcatatttacgaatataccgtagctgatgacagatgggaatgagggtgttacagtaattgcgtaaaacgagaccagaccagcctgtcctaactccaaaccaaaaagagattcttcgaaaatgttttttatctttaaatttctattaagataagaaaataaatattttactttttccaaagtcgtcgtctctctccaagttttgtgaatccaccgttcaacgtgacgatgaagaaagagaagaagccgacccgtcgttcaaatcatccttcgttcctcaacaacattaaccccaaacctaaggttagggttttacctttatctcttcaatttcttcattcctctcatcgattcgcgacaacatgtctctaccggattctctcccatcttcttcttcttctccgcctgtgacccgtgaagaaaccggctttcatcgctttgaacatcacggcaacgattccggttttgatcatcgtgatcgtccaccgtggaatcgttctgagtacgattatcgccatggaagcgttgttgcatctgagaacgtcaggaacaattccacttctgaagacccttggtcttgcgttgtcgtcgttgctaccttctgtatctttggtaagttcgtatttttcaatctatgctttatttttgttgttcttgttgttgatatatgtcttgtcgtcgttgaattttaaatcagtgtcgatgactttgattctggggctttatggaacaacgaatgtctggttgggaccaaactcttcgtttcttattaagccaacttcagtgttcgtccaaaatgtcattgtatgttctctcctctcatgcatttagaatccaccattgttgaaccttctgatatcaaagtttctatctttgccgattttctcaaggtggaagaattagggaacaagggatctggtttgatactgtatggattgaaccaagccccacagcttgatgttctgactaaatggtccgaagttcactatctagctgtgcctaatgattcttacaaggttagctctttacttgtgttatctagaaatggctattgaaacggggactgatactttttgttttgctacattttgcagtattggatacagtatttgaacaaggggtcacgcgtaaaagtttcatacaacgttgaatctgtgggttcttccttataccttgtgatagcccaaggtatgctagagaagaatccttttttaattataattagtttagtaatttagatagatgcttcatagtggccacttaaattatcatcttcatcacaagagtttattcgccaaatctttagtttggtgatgttttagtatccactgagacaaattgctggaacggtcaccttcattgttgttttctgtctttaataaccatatgaatgagaagatgttttgcaaaagaatgttcattatgccagtctgatccctcccctgatttgatgttgagatttcatcatattctggtattcacaggctgttaagaaagaatagttgttttgtaattcagcttttttatgcgtttataattgaaggtgtggatgggctctctgagtgggtacaagatccgacgcgtccagacactacactgtcgtggcatataatctctggcaagtgtccaaggtttttaacatgatggatttttattctgaatatttatgtgttcactcacgccctacttattttatttgtgacagatagtggttatattgagcaggacataactaagtcgtcgagttattatgttgcagtaggcaacgtatacctgaatgaagtgaaggtaaatgctgaagcagcttatgatgatatatgttaaaacttaaactcttagggtaactttttgaaaagttttactgcagtatatcgcccctttctaatcccaagtagcgctctttttgtctgattatacaccattctcacacaatatctatgttcaggcgacgattgacattcaagttgagggggtattgtatgatactacaaatgcttattacaattgctctttccctaacgacaagtgcactctaagtgttccattatttggaactaatgctgctgtactaacctcaccaggtccaaagctggtatgtaccctatttcttgtctttccattttattcttcttaacaagctattcatagagcaatacaaaatagttcacattgttatgtatattcgagaataaaacttacgaaccagtttggatccaactcttttcttgttgttcagaacaattctaagaatgagttctgcgcaaaactctcatatgaaccaagtggattgcatacatagtttgcatgggtaatgttctttttattatataacatgaggcatataaaccgattttt

SEQ ID NO: 139520 - DNA, 1130 bp, Arabidopsis thaliana landsberg
tgtttttcagtatttaagcggtttagtttatttaattggaaggttctgaaatgggaagatgtggaagtaggggaaccaaaggagggtgagatacgtgtgaagaacaaggctatcgggcttaactttattgatgtttacttcaggaaaggtgtttacaagccagcttctatgcccttcacaccaggtctggacattactagaacctaatgagagaacggaaaatatttttttttcttttctgaactaatggtccatttctgatcataggtatggaggctgttggagaggtggttgctgctgggacgggactgactggcagaatgatcggtgatctcgttgcttatgctggaaatccgatgggtgcgtatgctgaggaacaaatccttccagcggataaagtggttcctgttccttcatctattgatcctatcgttgcagcatcaatcatgctcaagggtatgactgcacagtttctccttcgccgttgcttcaaggttagttttcattcctatttctaggaagttattaataagaagaccaagagcaggatttgtgtcttcttgcctgttgaacagagtagagttttgttatattggtcgcgtttttcaaagatctattcactatatgactcaagtcctatttgtatttggaaaggtcgaacctgggcacacaatccttgttcatgctgcagctggtggagttgggtctctgttgtgtcaatgggcaaatgcgcttggagccactgtgattggaactgtctcgaccaatgagaaagcggctcaagccaaagaagatggatgccaccatgttattatgtacaagaacgaggattttgtttctcgagtcaatgacattacatcgggtaaaggagtaaatgttgtttatgactctgtgggaaaagacacctttaaggtattgtcacaaagagccagactgtttatgttctttagctggtttttcagatttcttataatgaatttttttataaatttccagggatcgttagcatgtttgaagagccgaggatacatggtgagctttggacaattcctaagatctccagatccggttccattaattgatcttgctaaaatgtggtcttcttgacaagacctttcatgattgcactt

SEQ ID NO: 139521 - DNA, 1169 bp, Arabidopsis thaliana landsberg
ttacttagccctgcagagataagtgatctgttttcagatatccgttttgttcgattgccaacaataaagtaagttgttcacttcttagatagataaacattacttactactcttgggaagcagaagagatttaaaacaagtttctgtgtaggaacttgctaatgggtgacaaactctctggctgctgggcgacaatgggagtgataacagagaaaggacaacccaaaacaagctccattggccaggcttatggtatatggaagatcggtagcttaaatgaaaacaatgtctccttgttcttgtttggtgatgcttacaaaaagaatcagacagaaaaggcaggaacggttttcggtctgtttaattgctcacttcgcaaggacaatggggtaagtatatagcatcagcttttcctgtgagtagccggatggcttaacttaatctcctttttaaaaaatttatgtttgtggcagggacgtgagttctcattgagtgtcaactctgctaaacaaatggttagactgggggtttcagctgattatggagtctgcacagcaaagcggaaagatggaacaacgtgtacatctgttgtaaacaagtaagtgtaccttagcgaggcatctctctttgtattgtttcctgaatgttgagttacaactttgaatttggtttcaggcgccaaggagcattctgcaagattcataaactggtacattttggtaatactttggtcttgttttctggcgtcgatgcaatgaaccatgtttttcactaactatgaatttttcacagaatgcatcagacaaatttgctacaatgagaactgaactcaaaggagggtatgctaatcctacctagtcgtgttcataggttggtcataccacgagttggaaattttcatgattcttgggatgtttttctaattcaggaacttgagaacagcgttcagagatctaaaatcgcaagggatttacacagttgagccaccagcagatagaagcggaaacaaaaagaccactcagcctgttcgagtgctatcagtggaaggtctccgaaaggctctaaggttggaaactctcaacaagttttttacttttaacataacgaacggaacccgcttctcagattctaaagccaattgtgattatgcagtggcgcggataaagtga

SEQ ID NO: 139522 - DNA, 1099 bp, Arabidopsis thaliana landsberg
tggaatcagaaacaaagcttaaaaatctcagctaatgaatgtttgcttttactggttttgttctcctttgtgatatatacctgagttttcatgaaaatggtaactttcaggacctcacttcaatccattaaatcgagttcacgggccaccgaacgaggaagagcgtcatgctggcgatttgggtaacattcttgcaggatcaaacggtatataatgtttttctcacctctatatatggttttgtgtcctttgaagaatgatgctagtaatttttggatgtgccttgttttcaggtgttgctgaaatcttaatcaaagacaaacatgtatatgatcttcttttttcacttcttcaatcatttaatgtttggcaaaataaacattacatttttcggttcttagattgttcatatatctctcggacgtttcaccatttatctcatcttctctttgaattcacagataccgcttagtgggcagtattccatactcgggagggcggttgttgtgcatgcggatcctgatgaccttgggaaaggtagaaacttcttttagcctttggatatccatatggtccaatgtcacaatatgcaaattgagttgtcgaagtttaagagtaatatcacaaaagcaatcactgtagtttcatgtagttgtcatcaggtaccaagcattagttcttagattcgtgatgtgctttatcgatgttaaagagcgatgatctctttgcgatgttactgtgcaggagggcacaagcttagcaaatcaactggaaacgcaggctcgagagttggatgtggtaatgcttacaaggctaagatttctaaaaaacagaacaccgttttctcttattttctagtttccattgtgtgaagtaattcactcgaggctttgatgttgaaccaggtatcatcggacttcaatcatctgcggatgctaaactatagcttttgagatcaacggacagagccacactcagtttttcatcagtagatgtacattagagatcatcgtacgaagtgacattgaatattgacatcctgttactttttaagacatgagttataatgtaaaccagaacgtaatttccagttttcatt

SEQ ID NO: 139523 - DNA, 1652 bp, Arabidopsis thaliana landsberg
gttaaaagtcgtatatgtgattgattactgtaaattttatacttgttcaaggtcttttaaggttttggaagatggatataatctcacagttgcaagaacaagtgaatacgattgctgctatcactttcaatgcttttgggacactgcaaagagatgcaccaccagtccagctttcacctaattatcctgaaccacccgctacaactacggctgtcgatgatgctacgccttttcctgagcaacctaagcagctcagtgctggtttagttaaggctgctaaacagtttgatgctttggttgctgcacttcctttgtcagaaggtggtgaagatgctcagctcaaaagaatcgctgaactccaggtcaaacaagtcacaccgatatgtcgagttcttgaatccgattacttctatttgtctaaccgctttgtcctgttttttcttcaggtggaaaatgatcttgttggtcaagaactccaaaagcaactagaggctgcaggtaaaaaacgatcttaggttttcacttcattgttggtgtgtcttatctgtctgtaactggagcagattcattatgcacttcaaatttcaatttgtatactttcttgttgatacacgcactatggttagatgttatctttagtggttctagaatttggaatttttgttttcccttgcaactgcctctgacgattgagctgatgttaatggtgtgaccttgtttgtgacagagaaggagctaaagcaagtacaagagctgtttggacaagctgctgacaattgcctgaacatgaagaaacctgaatgaaatgcttgtttaccttttgtcgagctgatttagaaactatatgatttggttcagcaacacttatcttttaggttcataaggaatatctattctaagttggttcaccaaaaaattgttgtagaagcaattacaagaatgttagttagctcacaacaacagaaccattattttgaccttacacttttttgacctgtctgattacaatctcagagaatccactttatcattttcacaattacaggccatgattgacacatcatgtttgattctccgggcagtgttggtcaaattactatgatggtcaaattactatgaactctggtatctgtcacattcaatccaagttgctgaaaagaaatgaccagtccataagttgtggtccaaaaccggatcttgattgtgtatttgtactcaagcatgtgaagatatcctaactcttcatccttctttcgctctctcacaagacttgtatagagtccaacaatcttttgtctgcgtgatgaagctttaggatgaaaagaaaactttagccagtcccatcaatattataaattaacaattgtataaatttaccaatatatatatttatataaatattatatgtaaaatatttagtgaaatatgactctactattgtttttctttaatttttattatttttttgtaaagttcaattctaatacttttgctatgtgaaaaaaaaaaaatacaatttttgttttctacttataatcggattaagaaagattattgattataaagaaaagatcacttttaaaattaaatttttgtaagaaattataaaatttgtaaaatctctttataaattgataattattaatttatcc

SEQ ID NO: 139524 - DNA, 1558 bp, Arabidopsis thaliana landsberg
gtctctctctctctgataaaatcttaaacccacctcgagatcatagtcttcatcaattagccataaaaaagcacaatgctttcttcaatcaaaccatcttcgtcttccttctccaccgctatctccggcagcgtaaggcggtcaattcctacgacgctcaatttttctcctttacccatcatcaaaaactgccataaccaaagctttcactctaatgttgtctcccatcaaaagcctctacacatttcatctgcttcgaatttcaaacgtgaggtcaaagtcgaagcttacgaggcagatcgatcccgtccactggacatcaacatcgagcttcccgatgaacaatccgcgcagaaactgaaaatcggaatctacttcgcaacttggtgggcacttaacgttgtcttcaacatctacaacaagaaagtcctcaatgcttttccttacccgtggcttacttcgacgttgtctctcgcttgtggttctttgatgatgcttgtctcttgggctattagaatcgcagatgctcctaaaactgatctcgagttctggaaaactctgttcccggtaagtaattagggtttattgtgtgtagttgttgcctcaaaagtttcaatcttttttttttacgattgagagctcagtttctggaatactctgtttttccggtacgaattcatgatttactctgttttctggtaaaaagtcatgatttactctgttttacggtaagaattttagattctctgttttcatgtaagtatttatatcttctctgttttcatgtaagaatttagtgtactttcgagcatgaaactgatcttgagatctgtctttcggtaatggtttaggtattttcatgatgttgttgcttgatggatttataattttgtttgttgtctgataatgaaagagtgtgttttgatcgatgttcctgtttttttcttattcttcaaggtcgctgtagcacacacgataggacacgttgcagcaacagtgagtatgtcaaaagtagcagtttccttcacacacatcattaaaactggtgaaccagctttcagtgtcttagtctcaagattcttcatgggagagactttccctcttcctgtctatctctctctcttaccaatcatcggaggctgcgctctcgcggccatcaccgagcttaacttcaacatcactggtaaaactcacaatcctagaatattggtttcacatggtgacatttctttgatttatggtcttatgtgaaactttgtggatttttttttgtagggtttatgggggcaatgatatcgaatttggcatttgtgtttcggaatatcttttcgaagaaagggatgaaagggaagtcagtgagcggaatgaactactacgcttgcttatcgatgatgtctcttgtgatcctcactccatttgctattgccgtggaaggtcctcaaatgtgggctgctggttggcaaaatgcggtttctcaagtcggaccaaacttagactggtataatctaaaaaccaaatcaataatctttaattgtttgttaagttttataaactccaa

SEQ ID NO: 139525 - DNA, 1321 bp, Arabidopsis thaliana landsberg
gaagaaacttcacatcagcatcagaatctctctttctctctctctccttcttcacaagcaaaaaaacaccaaaccatttttctttcttcattgtgccgacacttctttcccctctctctctctctctccaccgccatggattcctcctatggcgccacaaagttccttctcctcctcttcctcaccacctccattgcgaccgcattacccgataacaaaccagtaccgggtcaaataaactcaaactccgtcctcgtagctctcctcgattctcgttacactgaactcgccgagctagttgagaaggctcttcttctccaaaccctcgaagacgccgttggtcgtcacaatattactattttcgccccacgcaatgaagcactcgagcgtgaccttgacccggattttaaacggttcttgctccaaccaggtaacctcaaatctctccaaacgcttctcttgtctcacattatccccaaacgagtcgggtcaaaccaatggcctgaggagaattcgggtcgggtcaaacacgtcacgttagggcatgaccaagtgctgcatttgagtaaactcaaaggaacaaatggaaagagattggtgaattccgctgtaattacccgacccgatgatttaacccgacccgacgggttgatccacggaatcgaacggcttttaatccctcgttccgttcaagaagatttcaaccgacggagaaatctccgatcaatctccgccgtattacccgaaggagctccggaaatcgacccgagaaccaaccgtctcaagaaatctgccaccgccgtctcagtacccgccggatctccaccagtgcttccgattgaatccgctatggctccaggtccatcgctagctccggctccggctccaggacctggaggtgcacataaacatttcaacggcgatgctcaggtcaaagatttcatccacacattgttacattacggtggatacaacgaaatggcggatattctcgtgaatctgacgtcacttgcgacggagatgggtcgattggtgtcagaaggttacgtcctcaccgtgttagctccgaacgatgaagctatggggaaattaacgactgatcagcttagcgagcccggagctccggagcaaattatgtattaccacattattccagagtatcagacggaggaaagcatgtataattctgttaggagatttgggaaggtgaagtatgaaacgctgcgttttcctcacaaggttggggctaaagaagctgatggctcggttaaattcggttctggtgaccggtcggcttatttgtttgatccggatatcttta

SEQ ID NO: 139526 - DNA, 904 bp, Arabidopsis thaliana landsberg
cttattttcgctttagcttctcagctttggtttgatgggaatatatatgattgtcctgtgtaggatgcagccttccctggaatgaagaatgttgatcttccgcggtttgctgtgagttttaatctcacatatgtttttttttcagtttggtgttttcttttctttgtttcctagactttagctttctctcttgatcgctagaccttagatacgggcaaaggttcagtgaccattgaactcttcaagaatactgctcccaatgtggttgaccagttcatgaaattctggtaagcaaatctttttctggtccacaacatgtttgcctttttttacttaattcttgcctaaactctgtcttgtgcagtcaagatgggtatttcaaaggtttcttattcagtcgagttgtaaagcattttgtgattcaagccggtgactctgcggagttcgatgctgtcaaagattgggcactcgacagaaagaacattgataccaggttggtacacacatgaattgataggaaggaaatgtgtaaaaaagaagctcggattaagctgattatggaaactctttctgtatctgtcttgatcagtttgaaacatgaagaattcatggtgggaactcctaaagctaaaaacgagcaaggaggattcgagttcttcattgtgtctgctcagatcaaagatctgaacgagaaattgactgtctttggtcgagtttctaaaggacaagacgttgttcaggagatcgaagaggttgagacagatgatcagtatcaaccaaagtcgccaatagagatcatgtccgtcactttgcttcaagacatgtaaaagcttttttacttcttgtctctctctcttgtatgaaactcaagtgatttttcttgtgaatttgaaacccttttatc

SEQ ID NO: 139527 - DNA, 2073 bp, Arabidopsis thaliana landsberg
agtagctgctcctcttcttcttcgtcttcttcctcctgctcaggctgctcccggaaacactagactagaaaaccctaattctctcgatacttatatataagagacttcacatttcacccaatgccattttcgtctatatatattattctggcccacactttaagcccactaaataggcccatcacaaataggcccataattttattagcccatatatttttgtagtgatgacgtcagctctcctccaataattttttgattttttcccatagccgacgacggtagaggaaacttgtcaatggacctaaaaaacggtgacgtttcgtaaaaggtagatgaaagtttgaacaagtagctaagctctctctctgcacaagcttccagaaaaaatcaaatcaaaagagagagagatccacaaaattggattgaatcgtcgccggattttccaagagtagagagcttagtttgtctcgcgttgcgtctagatttactgaatatggaggcggagaagtggaacagcgacggtggtgaatacacgtcggaggacgaaggtacagaagattaccgacgcggcggttaccacgccgttcggatcggtgactcattcaaaaccggccggtacgttgtccagagcaaactcggttggggccatttctctactgtttggctctcctgggatactcaatcctctgtacgcatctatctctctctctcgccacacgaattgcttgaaatgctttagagattaatttttcgttgctttgtttgtgtgattttcttactcgtatatcgaatgtacagagatatgtggctttgaaggtgcaaaagagtgctcagcattatactgaagcagccatggatgagataacaatattgcaacagattgcagagggagacactgatgataccaaatgtgttgtgaagcttttggatcatttcaaacactcaggtccgaatggtcagcatgtatgtatggtttttgagtatttgggagataatctgttaacgttgattaagtattctgattaccgtggcttacctattcctatggttaaggagatttgttatcatatgttggttggtttagactacttgcataaacagctttcgattatacatactgatttgaagcctgagaatgttttgttaccgtcaactattgatccgtctaaagatccgaggaagtctggagctccccttgttctccccactgataaggataatacagttgttgactccaatggtgattttgtcaagaatcaaaagacaggaagtcatagaaaggcaaagctttcggctcagggacatgcagagaataagggcaatacggaatctgataaagttcgtggagtgggatcaccggttaatggaaaacaatgtgctgcagaaaaatcggttgaagaagattgtccttctacttctgacgcaattgaattagatggtagcgagaaaggaaagcagggtggtaagaaagggagtcgatcaagtcgaaggcaccttgtggcatctgctgacctcaagtgtaaacttgttgactttggtaatgcgtgttggacatacaaacagttcacaagcgacattcaaacgagacagtataggtgtccagaagtaatccttggatctaaatactctacatctgcagatctctggtcattcgcgtgcatatgttttgaacttgtcactggagatgtgctatttgatccccatagtggcgacaattatgatagagatgaggtatgcttaagttccctgctgtcttttggctgtgtgcatttgtggtttttacatattttggctttctcttctcttgttttgtgggatcttagcgtggatttgcttcaattttctattgtgggagtttggaaatctaattggcttttctgttaacaggatcacttggctctgatgatggagcttcttgggatgatgccacgcaaggtaatagaatcatcagcagataggtttatcattttactaagaaatttatttcgatgattcataattcccaacactttctctgttgtgttttgcagatagcattgggtggccgctactccagagatttctttaaca

SEQ ID NO: 139528 - DNA, 2143 bp, Arabidopsis thaliana landsberg
ttgggaacaaaatgtcacaagtactgatttagtgatctctatggctttttcttgtagtggcgcaactgaccactaagatcaagcatctatcctcggttctacataaaaaggtaaactttcaatcttttttttttaatctgaagctaccagctccgggtttctactgtaacctgaccttgcatctttataaccttaggacaagcattcgcggaaaggacttatagcaatggtgcagagacggaagaagctgttgaagtatatgagaagaacggactgggattcttactgcctttcactgtcaaaactcggccttcgtgacaacccggattacaagttttgaaatttttgtgcaagggacatcatagaattgtgatctcagtactctctttttgttctttttcattatggcaaaagagataatgtgggtctctcttatcaatcatattggggaggaaagttgttctactagagattatgattgcaggctgtttaggcgaaaagagaataaagctgtgggatactttcgttgacattgtctttattactttgaatgtgataataaacttacttctccaacttatctttctcaatgcatctatcttttactgccactttatcctttttaacctttagggttggtgcatgttaaacatgaaaagtgaacacctacggaacagaaactgaggtgattcggaggaaagaggtgcacggaatcgttagtagtcttttatcaatggctttacttttggccttttaccaaattaggattcaaatttcgaaagtcagcgatggtttattagagtagagggagtgaaccgttacttcaacccggttaatattgggattcaaatttctaaagtcagcgatggtttattagagtagagagagtgaaccgttacttcaacccggtaaacataaaaaagggataaagcaattgaatttgaaacgacacttgagagtttatttattacatcttcttcgacttcctctcctaagaagtaagaacagtcactcatggcgttttatctactcagaccaaaacaaaagttcgacttgaacccatttctgatccgtattttctcaacatcctcatcaagcctaccctctcaattaccgtcgaacttctttactaagaaacctctcttccaccgggcgagggattcaggcaatgtttttgaccggtttgctattaatcgatatcggagagagaaacctgtaagtttactccttcttaactcgtcaagcattctactttgtcaaagcgattagtctaaaacgagatcttccatagactatgtttgcatgttttgttaccattaagaaatgtggtaaaactggaaaagtctgatactttgtgcatagttctaggatgaaatacaaagcgaggttttaataacagagcagccaaaggaagaaaaaaggaggagacctggaagacccaagaagaaacaactagtagagaagaaaccaccattggacgaaaagaaaagcagagctgcaagtatagcaaggaaaacttttactgcttttggtagctctctacaaaatgcactaaagaatcatcctgattacatatgcagtgtgacgcatgcaatggatgttttaaatggtctacctagagtgaagaagtggttgcctttataccgtgcttccatggaccatctgatggctgatgtagctcaccgccaagcctttttaacagtctctgatcctgaggatatgattcgctacttgaggtataagacccaaaaaatgaagagggagtgattgctatttgccttggtgacttgttttcatgttttttgtcttcactttttgttactactctttgctttgatttgcaatgtagtagtgctggttacttctatcattgaataagaagatggctgaacatttgaaaaaaaaatcaacgcaagcttgcctttggcttgacaattttattacaacgagagtgacaaatataaactcaaagaaaggttaacccctgtttctccattcaaactattatgctgataccttttttcttcacaaatggctcaaataatcagtctagtcaatgtgtcatcatctcttccattggcacggtatgctatagaaagcaactcagaagaatcctgggagactacgcatccatgacgcataa

SEQ ID NO: 139529 - DNA, 1435 bp, Arabidopsis thaliana landsberg
  unsure (1)..(1435): unsure at all n locations
accaggtggattttactatggaaagatcaagtttcctcccgagtatccttacaagccaccagggattacgtatgttccaatggttcctccaaattcagtctcaacattactcttacctcagtttttgtccagttttttaatgaaccaaatctttttctgtttgcctcagaatgactacaccaaatggtcgattcatgacacagaagaaaatttgtttatctatgagtgattgtaaggacaatctgcactttctgttcattatttcgtatcaattaacttgtctaatatcgaaataagttgacatggcatttacagttcatccagaaagctggaatccgatgtggtctgtatcaaggtatagattctttctttacttttggaagatgacaatcgatatacccgttgataaccaactttttttcatgaatgcagcatacttacaggacttctctcatttatggtaagctcactgtaggttctacatatttatggacatcttgtttgaaaattcttcttatattgtaatggtttattagcttagatatgaatattcaaaaaggaagtctattttttcttttctgatctcaagctttctctaaacgttttccttgcggcgcagatggataccagtccgacaactggaagtgttaacactactgtaattgagaaacaacggttggctaagtcatctctcgctttcaatgtaaaacgtaagattttcccatcatcaaaaaatttcaaattctggattcatatagaagctaagtttagttatctgtggttaggatagtcataaaagctggttagataacgaatataggaatgaatgcagtcctnnnnnnnnnnnnnnnnnnnnnnnnnnntgaatccaatgttcttacttgtgacagcccagcatttcgaaagctatttccagagtatgtagagaagtacaaccagcagcaactagctgagcaagctaccacacaactgacaacaccagagtctcctcaaaagagcgataccaaagtcgagtcagagaaaaccatcgatccaacaaagggagattcagaaggtggcttgaaggagaggaaaaagaacaataaacagggattgccagcgtggataatactgttgctagtgtcggttttcggtgtggtaatggcgttgcctctgcttcaactgtgatttctatgcaacaaacctcgacctggttttcgtataatctctccttgtgtctctctctcttcagcatcaagagtagtctccttttgtctagtgctcttcgtctgaatttactcatttagcacctcatggtttgtgcttgtaaaagcagataacataagtttggtttcacaattacatacatattgtagcttcgttggaactactttgtatagtatatatgaattgaggataatggtttggatttgaaaaatagaaccgtatggttttc

SEQ ID NO: 139530 - DNA, 2975 bp, Arabidopsis thaliana landsberg
aaaggaatgggtatggatgcttttagagttagtctgtcaagtgcgattagttcgtcgagccatggttctggtcatgatgatggagacacattgggagacgttttcatgtggggagaaggaataggcgaaggtgttttgggtggtggaaaccacagagttggaagttcgttggagatcaaaatggattccttactgccaaaagctttagagtctactatagtacttgatgtccagaatattgcttgcggtggacaacatgctgtccttgtgacaaaacaaggagaaagtttttcttggggagaggaatctgaaggtaggcttggccatggtgtggattccaatgttcaacatccaaagctcattgatgccctcaataccacaaatattgagcttgtagcatgtggtgaataccatagttgtgcagtttctctatcgggggatttgtatacctggggtaaaggagattttggtattctgggacatggaaatgaagtcagtcactggtccccaaaagagtaaattttctgatggaagggatacatgtatcatccatcgcttgtggccttaccacacagctgttgtgacttccgctgggcagttgtttacttttggtgatgggacctttggtgttttgggccatggagacaggaaaagtgttttcatacctagagaggtagactccttgaaaggtcttcgcactgttcgggcagcctgtggtgtatggcacacagccgcagttgtagaagtcatggttgggagctcgagctctagtaactgctcttcaggaaagctctttacatggggtgatggtgacaagagtcgtctttggtcatggtgacaaagaaccaaaacttgtgcctacctgtgttgcagctcttgtagaacctaatttttgtcaagttgcgtgtggacatagcctaacagttgcacttacaacatcgggccacgtctatactatgggcagtcctgtttatggtcagcttggaaacccacatgcagatggaaaggttccaacccgtgtcgacggcaaacttcacaagagttttgtcgaagagattgcttgcggtgcttatcatgttgcagttttaacttcaaggactgaggtttacacttggggaaaaggatcaaatggtagactaggccatggggatgcagatgatcgaaattcccccacattggttgagtcgctgaaggataaacaggtgaaaagtattgcatgtggttctaacttcaccgcagctgtctgtcttcacaagtgggcatcagggatggaccagtccatgtgttcaggttgccgtcagcctttcaatttcaagagaaagcggcacaattgctataactgtggacttgtgttttgccattcttgcagtaataaaaagtccctgaaggcttgtatggcaccaaaccctaacaaaccatatcgagtgtgtgataggtgtttcaacaaattgaaaaaggccatggaaacggatccatcatctcattcttctttgagtcgaagagaaagtgtcaaccaaggatcagatgcaattgcacagagatgagaagttggatactagatccgacggacagctagctagattctcattgttggagcccatgaggcaagtggacagtcgatccaagaaaaataagaaatatgaattcaatagtagtcgtgtctcaccaataccgagtgggggctcgcaccggggttcactaaacataaccaagtcttttaatccaactttcggatcatcaaagaaattcttctcagcttcagttcctggttcccgaattgcgtcccgggcaacttcaccaatatcaagacgtcctagcccacctcggtcaacaacgccaactcccactctttcaggactaactacaccaaaaattgtcgtggatgataccaagagaagcaatgataacctaagccaagaggtggttatgctaagatctcaagtaagctgctttccacgctttaattcttgttccttactcctgtgtatttaggaaaaaaaacatagctggtgagattgtgctattttgtttcattaacatatcgtttcattctttgcaatttgactccttttgcgaactcagtagtaaatgatttcacaggttgaaaatcttacacggaaggcacaacttcaagaagttgaactggaaagaacaaccaaacagctaaaggaggcactagcaattgctagtgaagaatcagcgagatgcaaggcagcaaaagaagtgatcaaatcacttaccgctcaagtaaattccaaagtttcctctctgctgttaaaatgaatgaaaatgctctatgcaacttactgattttctcaataaaacatgcagttgaaagacatggctgaaagactacctgttggatcagctcggactgtcaagtctccgtctctcaattcatttggttccagtcctgattacgctgccccttcttctaacaccttaaaccgtccaaacagtcgagaaactgattctgatagcctaaccaccgtcccaatgttttcaaatgggaccagcacacctgttttcgatagtggaagttaccgacagcaagctaatcatgctgctgaagcgataaatagaatcagcacacgatcaaaagaaagtgaaccccgtaacgaaaatgaatgggttgaacaagatgaacctggtgtgtacatcactctcacagccttagctggaggtgcaagggatctcaaacgtgtccgtttcatgtaccaaaatgcttttttttttgttttatagtcttagctggaatgtttggatgctcctttttattggttatgaaatgagcttaatccgaggatgtctttgatggcagccggaagcggtttagtgagaaacaagcagaagaatggtgggcagagaacagaggaagttttttctaacaatacaatgtacgcatagtagttgatagagccagtgtgggtgtaggaagtgaagacttgggtcattaatattcttcgctaacccct

SEQ ID NO: 139531 - DNA, 2884 bp, Arabidopsis thaliana landsberg
atgtatcggcttgtctccaacgttgcttccaaagctaggtagatctattcgattttttggttttctttgtgtatatgatttcaatgctgctttattttctgtgaatttgtttctgattggatcctcgggatcggaaagttgcgagaacctgttaagaattgtttaaaatatgtatgagttaaagttctgattttccgaatttcgattaaattgaatttaatctttctctgccctcgtaggctgtggcatcttctatttcctttgtatatctgaaagttagttcatttattgatgagatttatctttctttgtttcaacaggattgccagaaatacaagccaggttcatattctttattttgtatctagtttgtggtttggtcgttcttgggtatgtattgatgtggatttttgtattgttagattggaagtaggctcaattctactaggaattatgcagcaaaagacataaggttcggtgttgcagctcgggctttgatgcttaggggtgtcgaggatacttgctgatgcagttaaagtcactatgggacctaaggtaatcaaattatgtttcagatagtttctgttcaagagattaggatccttaacagggaggagaatgtgatgctctattgacaaggatcaacagttgtctgtttagttatcccacagtgtaaaacccgctttctaaatttcttttatcttttaagggtcgtaatgtcatcatcgaacaaagttggggtgcaccaaaggtgacaaaagatggtgtcactgttgccaagagcattgagtttaaggacagaattaagaacgttggtgccagtcttgtcaaacaggttgctaacgccacaaatgatgtagctggtgatggtaagggttccctttcaatgcattaaagtattttttctgttttttcctttttggtaattgggtagtcagcctcccatctactgcatattatttgttttattttttttgtatctgacaaaacattggtatgcaatacaggaacaacatgtgtacagtccttactcgagctatcttcactgaaggttgtaaatcagttgccgctggaatgaatgcaatggacctaagacgtggtatcaaattagctgttgatactgttgtgacgaacttgcagagccgagcacgcatgatcagcacttctgaagaaatcgcccaagttggaacaatatcagctaatggagatagagaaattggtgaactgattgcaaaggctatggaaactgtaggcaaagagggagtgatcaccattcaagtgagtcgaatttgatccctaaatgtcaaattattttgcttattccttaagatgatcaatgttatcaacttatcatctcttgattcaggatggcaagaccttgtttaatgagctggaagttgttgagggtatgaagattgacaggggatacatctccccgtacttcataactaacccgaaaacacaaaaatgtgtaaggattcccaccttgttactttatctatttaaggaatttcgcatttgatttgctctgaatgaatatgtgttgcaggaactagaagatcctctcattcttatccacgagaagaaaatttccaatataaacgcaatggtgaaagtattagaactggccctcaaggtataaacaatttggcgatttcttcagtgtcaatagtgtctgatattcattaagttactttgatctgaagatctaattttattttcactgccatttttcagaagcaaaggccgctgctgatcgttgctgaggatgtggagagcgatgctcttgccaccctaattctgaacaaacttcgtgctaatatcaaggtttttcttttcagccttttgttatatgcctttttcttacaacgtcttagtaaaaatttaatttgattggattgatgtacatggtattgctttataggtctgtgctgtgaaggcccctggttttggagagaaccgaaaggccaatttacatgatctagctgccctcactggagcccaggcatgcccatgtttctttttataataactgccaagaccatcacacccacactaatcgcatgagccataatgtgtctttggtgatttcactttgtaggtaataacagaagagttgggtatgaatctagacaacattgacctcagtatgtttggaaactgcaagaaggttcgtttggtccaattccttctgctttctctctttctcccttgtaccttctgatacatttatataacttggttttcatttgttaacaggtaacggtatccaaagatgatactgttgttctcgatggggctggtgacacccaagcaaccggggaacgatgtgaacaggttagaatgttttaaacttttttatcatatagtggttcagtgtcatatacctttacccttttttccaactggtagttttaatatgttttgaatttttattaaaccacgcagatacgatccatggttgaagcaagcacttctgattatgacaaggagaagttgcaagaaaggttggctaagctttcgggtggtgttgctgtactaaaggtaatgtacacctcttgtgaacatcagactaataggctattaatgcattattagtttattactaatgtcgagattactcatatgggtttttagattggaggagcaagtgagacagaagttagcgaaaagaaagatagagtaacggatgctctaaatgccactaaagcagccgtagaggagggtattgttccaggtataatctatcccaaatctaaaacaaaatttggttccttaagaaaattgcgtgagaagacccttctattactttgtgtgtattacaggtgaaggtaatgctcttttgtatgcttcgaaagaacttagaagctttcccggctggctt

SEQ ID NO: 139532 - DNA, 1392 bp, Arabidopsis thaliana landsberg
atgtcaaacttctctgtttaacccaatctacaacatctcaccagtcgatggtttggttcatcaatccatgaaaccaacgatacagtccgttgatagttctctcacattcaacagcgacaacaacgtcgattttcttcgtcctgtgtcgtcgagaaaacgttctagagaagaatccgttgttctaaacccttccgcttatatgcaaattcagaaaaatcccaccgatcctcttatgttccttggccaagacttgtcttctaacgttcaacaacatcatttcgatatcgatcgtttgatctctaatcacgtaagttcttatctaatatgttttgagtatattttttgttaatttttctggtttacataaattgatgggttcttcaacaattccattattaggttgagagaatgagaatggagattgaagagaagagaaaaacacaagggagaaggatagtggaagccgtcgaacaaggtttgatgaagacactaagagccaaagacgatgagataaatcacatcgggaaactaaacctctttctcgaagagaaggttaagtctttgtgcgtagagaatcagatatggcgtgacgtggcacagtctaatgaagccaccgtaaacgcccttcgttctaacttgcaacaagttctcgcagtcgtggagcgtaaccggagggaggagccctccacggtggctgacgacgcacagtcttgttgcggtagcaacgacgaaggtgatagcgaggaagaacggcggaagttagcgggagaggcgcaggatacgaaaaagatgtgtagggtagggatgagtatgtgtagaagctgtgggaaaggagaagcaagtgtgttactgttaccgtgcagacacatgtgtctatgttctgtgtgtggctcttcactcaacacttgtcctatatgtaaatctccaaagaccgctagtctacatgttaatctttcctcttagacctaaccaataccagtaaaatgtaaatgcccccaaaaaaagtaaatagtagacaaaagtttcttggttaaaaactgttcattctttttttctttggatggtgatgatgatgatggaacacgaatctttgacatatgtgtcagatctttaaatttcgtaaggggttcacgagggacctctgttgctaaaaatcgtgggttaggtttatacccactttcaatgtcatttcccatctttgtatgaattttcaccaaaaaaagtggaaaagttttgtgtggttcaactactagtcttttaacatagtagtagtaggggtataacgtcgcttttcacaagcttgaatttttctttaacatatacttttgcccaatcgttttttttttttgttgtgtttttctagaaaatgatatattcgatacaaagactaaa

SEQ ID NO: 139533 - DNA, 1473 bp, Arabidopsis thaliana landsberg
atgtgtgttctcatattcgttgggaacaatggcgagacctacttcaatactggagcattagtctctggtgttcaaaactttcccatgagcagaggtccagtggtgggtattctcaagggttttgctgggctaggtggtgcgatcatctctcagatatatacaatgatccactcatctaacccggcttctctcattctcatggtagctgttacgcctgcagttgtcgttgtttgcctcatgttcttcaacagacctgttggtggtcacaagcagatccgtcccactgatggagccagctttactttcatatacggtgtctgtcttctacttgctgcctatctcatgtccgttatgcttattcaagatctggtcgttgttagccacaacgtaatcactgtgttcaccattgtgttgtttgtcattcttgttgtcccaatcttggttccaatcatgacaagtttcttcacggagacaaacgagcctgatgacacaatagaagaacctcttgtcccaaaacgagaagaccaagaaccaggactgcaaacacctgatctaatcttgagtgaagtggaagatgagaagccaaaagatgtagatttgcttcctgcctcagagagacataagagaattgcgcatttgcaagcacagctaatgcaggcagctgcagaaggggcggttcgggtgaatagacggagagggccgcatagaggggaagatttcactctaacgcaggcactggtgaaagccgacttctggctcattttcttctccttgctgcttggttctggttcgggtttgacagtaattgacaatcttggtcagatgagtcagtctcttggttatgataacactcacgtgcttgtgtctatgattagcatttggaactttcttggacggatcggtggcggttatttctccgagctcgttgtcaggtttgatatctcagaaagccaaaaatcctctgttttgtgctctgttctgatcttgatttgaatgatgtgcagggactacgcgtatccaagaccagtagcaatggctgtggctcagctaataatgtctgtgggacacatattctttgcgtacggatggcccggagcgatgtacattggcacactgttgattggactcggatacggtgcacactgggctattgtcccagctactgcctctgagctctttggtctaaagaagtttggagcgttatacaatttcctgacattggcaaacccggctggatccctcgtgttctcgggtatgatcgcgagtagcatatacgaccgggaagcagaaaggcaagctcacggctccgtgtttgatccagatgacgcccttagatgcaatggttctatctgtttcttcttgacatcactcataatgtctggattctgcatcatcgcttgcatgttgagtatgattcttgtgcgtcgtaccaagtctgtctacactcatctctatggcaagacccgcacctaa

SEQ ID NO: 139534 - DNA, 565 bp, Arabidopsis thaliana landsberg; identical to SEQ ID NO: 22175
  unsure (1)..(565): unsure at all n locations

SEQ ID NO: 139535 - DNA, 1935 bp, Arabidopsis thaliana landsberg
atggggggcaagagttttcttgtaacccaagaaagaaaaagtttgcgtaacttgagaaacaacataatgacagagaaggatcttcttttcgacacgatacttgctcgaagctttatcagaaacgagccgaagagacttggctatggagctttcattgcctctcttctctttgtcttcactctttgcactgtctttaaaccttacctcagccctctaccaatcggtatgtcccttaccacgttttccaaaacgtcagagaacgcagaagcactcattaataataacgtttatctttctttgttcagtggagatgcaattatcagtggacgctggtctcagaatgctgagaataacagaaccgcaagcattaaggagcagcaacgatgaaacatccgcagattcagataaactcattatcccaacgaatcaagataatgttacatcaagtgaaattattactcagagcctaacaagttctgaggatcataaactcaacgacacaagcatgccaaagaattatcttgattcgtttaattatactaccaacactacaatctccaaagaagaagttatttcaggtcaatatacttcaaattattctctacaattgtcttcaagttgttatggtttttagtcaatttattgatattttgtcttgaaattgttatggtttagtcaatttattgataattttgtcttttgggtgaattttcagatgaaaataaattggagaaaactatgaaacctatatgcaccaagctagcaagaacagagttctgtgaattaaacggcgacgtaagagtccacggtaagtccgcgactgtttctgctgcgatcacgtttgcgttttcgggaaattccacgtggcatataagaccttacgcgcgaaaaggtgacacggtggcaatgaagcgcgtgcgagaatggacggtgaaattggaacaaaacgctgaccaattagaaaacgctaatttctcgcgttgcgttaggaatcacagcgttccggcgatgattttctctctcggaggctactcgatgaacaatttccacgatttcaccgatatagtgattcctctgtacacgacggcgcgtcgattcaacggagaagtacagtttctcgtgacgaacaagagtccatcgtggatcaacaaatttaaggaattagtgaggaaactctctaattacgaagtgatttacatcgacgaagaagacgaaacgcattgtttcagcagcgtcaccgtcggtctcactcgccaccgtgagtatttcaaagagttgacgatcgatccttcgaattcggagtattcaatgtccgatttccggagttttctaagagacacctactcgttgagaaacgacgccgtggctacgagacagatccggcggcggaggccacggattctgattttggctagaggcagatcgcgagcgttcgtaaacaccggcgaaatcgcgagagcggcgagacagatcggattcaaagtcgtggtggcggaagcgaacaccggaatcgtgaaattcgcgcaaacggtgaattcctgcgacgtgatgctcggcgttcacggcgcggggctgacgaacatggtgttcttgccggagaacgcggtggtgattcaggttcttccgatcggtggattcgagtggcttgcgaaaacggattttgagaaaccttcggagggaatgaatctgaggtacttggagtacaagatcgcggtggaggagagcacgctggtgaagaagtacggacgcgaccacgaaatcgtgagagatccatcggcggttgcaaaacacgggtgggaaatgttcaaatcggtttatttggtacaacagaacgtgagtattgatataaaccggttcaagccggttcttgtcaaggctcttgagttattgtagagagcctagaggcagtcgatgtaaatcatatatttaccgcat

SEQ ID NO: 139536 - DNA, 1599 bp, Arabidopsis thaliana landsberg
ggtccactttcttattatagagttaatgaatttgaaaaagatgttgattttttttttttgattatggcagtttatggtgtttgcgtgctctgattctcgagtttgtccatctcacatcttgaatttccaacctggtgaggcttttgttgtcaaaaacatagccaatatggttccaccttttgaccaggttcattaccaagccatttcattcttgtttttgtctgagatcaaataactaacaccaaagtggttttgataatttatcagaagagacactctggagttggccccgccattgaatacgcagttgtacatctcaaggtacatgaacaaaatatccctatttttaaggatagacacttagattgaattaataaataagcaaactttgttagtattcttataagttatcacttatcagtaatcatccaaagtttggctcttttcatagtgctcattattttaagtcgttgttatgcatttttgcttgcacatggttcttactaaaagttgatgtctagtcactctgttatttggacccatttcatccacctaaaccctgttctccttttccttttagccactaggattatcttttttgaatcatttttggataatgttcgatattagaaatgggtcttaatgcatcaacttgcaactacttttttattcagagtcaacagttcactttttttaatagtatcaatttatttgtaggtggagaacattttggtgataggccatagctgctgtggtggtattaagggactcatgtccattgaagatgatgctgccccaactcaaaggtaattactaactcattaatcttgatttagcctgagttgtgaatcaagattgttcgatatatgactttcttgtgggataagtttgagtctttgagatgataagattaatcgatctctaacacgatggaaatcctctaaacaatggcagtgacttcattgaaaattgggtgaagataggcgcatcagcgaggaacaagatcaaggaggaacataaagacttgagctacgatgatcaatgcaacaagtgtgagaaggtaataataactatctttgctctgtttacttatgttcttgagaaatggcttatcaataaatgtgttatcttgtgcaggaagctgtgaacgtatcgcttggaaacttgctttcgtacccattcgtgagagctgaggtggtgaagaacacacttgcaataagaggaggtcactacaatttcgtcaaaggaacgtttgatctctgggagctcgatttcaagaccactcctgcttttgccttctcttaagaaagaaagctaccggaacatataaaactcttttgagataaaaaaagacactttgactcatctttcttcattctctcatgttgatgattcctctccaacttctttgatttctttttgttaattcaaaacttcaactttgctgcttctatttcaaaagctcaaacaataaagctgtaaccaacgtttgaaacttctatatttgtctaattgatgtttgaacgaagatttgaactttccttctttctctctttttccagattatatgtgtatgttaattgttaaaacttcttggca

SEQ ID NO: 139537 - DNA, 3772 bp, Arabidopsis thaliana landsberg; identical to SEQ ID NO: 5276

SEQ ID NO: 139538 - DNA, 4048 bp, Arabidopsis thaliana landsberg; identical to SEQ ID NO: 4002
  unsure (1)..(4048): unsure at all n locations

SEQ ID NO: 139539 - DNA, 2076 bp, Arabidopsis thaliana landsberg
tatttgcactctttcaagttcacaaggtaattagatgaagttttctgcaggtctcttggactagagcagtgtcttcttttgttattagtttccatcttctgtcatttccttgttttatattccaaaaagagaaggtaagagaagggtagaacaatcaccgattcacagtttcaagtttttatttatgagcagttttggttagatgattattttgaagctctatctcaaatagagtcatgagaattgtatttggtatcagagtagtctaacttagatcaacttttgactagttgtttgtttccattgaacctactttcaacccaattttattcacaagatctgcatttctctgcacccacaatgttttacattgcttatataatttgtacattgatcaggtgaatctgatcttactttctggtccacctctaagcacttttaaatggagaagaaaagccagcatggtacatatgaatcaatgatgactcatcatccgatcctctgtatcattgctttatctgtacttttcatagcaatcgacccctttcacatgagtccaatcgggggtcgtgagttcaaacccgtgaagcatgaggttgctccatataaggaagtcatgggaagctggcctagagacaaccttagtcgactgggtaatcatgggaaactggagttcgtggaccaagtctttggtccagagtcattagagtttgatagtttaggtcgtggtccatacacagggttggctgatggaagagtggttagatggatgggtgaagcaatcggatgggagacattttcggtggtaacatcaaaatggtaagagattacatattcatcacttcttttttgtgcagagagttttgtttcagtttttcttattgatgtgtgttcatgagaattaggtcagaggaagcttgtgtgagaggtgtggattcaacaacaaacaagcaatggaagcacgagaagctgtgtgggaggcctcttggactgagatttcataaagagacaggaaatttgtatattgcagacgcttactatggtctacttgtggttggtcctgaaggagggattgctacgcctttagctactcatgtggaaggaaagcctatactctttgccaatgaccttgacatccatagaaatggctccatcttcttcactgacaccagcaaaagatatgacagagcgtaagacaactctcttattcttgctttgtatgtcaattcctaccgtaaattgtatgatatagaaattatacttgtattttgtaggaatcatttctttatattactggaaggagaatcaacaggaaggcttctaagatatgacccacctaccaaaacaacacacattgtgctggagggtttggcttttcccaatggaattcaactctctaaagaccaatctttcctcctcttcaccgaaacaaccaattgcaggtatgaccctcaactttgtgtttatatagctgtatctatcattcatttctcttcatcattatgtgtatgacagattggtgaagtactggctggagggtccaaagatgggtgaagtcgaggtggtggcagatctcccgggattcccagacaatgtaagaataaatgaagagggtcagttttgggttgcaattgattgttgcagaacaccggcacaagaggttcttacaaacaacccttggataagaagcatctactttcggttgccaataccgatgaagctgcttgcgaaaacgatggggatgagaatgtacactgtgatatcgagattcgacgaggaaggtaaagtcctggaggtgctcgaggatagacaagggaaggtaatgaagcttgtgagtgaagtgagggaagttcaagggaagctttggattggaacagtggctcataaccacattgccactctaccttatcctttgacaatgaatcaatgaaggactttgttgtgtagttcctgaactaaatcatctctctgtaacttaattatcttcgttttgattcaagttcctttggaccggtttgtcttttgttgatattatgtgtgaccttagattcctcatgaaattctctttctttcttt

SEQ ID NO: 139540 - DNA, 5380 bp, Arabidopsis thaliana landsberg; identical to SEQ ID NO: 36615
  unsure (1)..(5380): unsure at all n locations

SEQ ID NO: 139541 - DNA, 1269 bp, Arabidopsis thaliana landsberg
aagcgcgaggatgtgttcatcacgtccatactatggtattctgcgtcactatggttcaaacgctttaatagtcttttgctaatcagttgtcaagtctatgtagcttctaacctggtgactagctcatatgataggtgtacttaccatgatcctcaagaagtgcctgaggcacttaacagaactctacaggatctgcagcttgactacgtcgatctgtatctcgtaagtaatatatttgaaaacgttgttttgtttgtctatgtgcttttctcttcagcataatatcaatccattttggtacttcagacttattgatgtggttttaactaccaatattatcactgcaatttttaaaagtctcaaggctagtgtgatatattgttcaaacatctaaactccttttacttgatttcttataccgatttgtggaaccatttcgattgactaatagttgttttgattcttttgaagattcactggcctgttagcctcaagaaaggatctactggctttaaaccagagaacattttgccaactgatattcctagcacatggaaagcaatggaatcactctttgattcaggcaaggcccgtgctattggtgtaagtaatttctcctcaaagaaactcgcagatctcttggtggtggctcgtgttcctcccgctgttaaccaggtggagtgtcacccttcatggcaacaaaacgtgctcagggatttctgcaaatctaaaggcgttcatctctcagtatgtagagcaaacatgtctatatcctttatgaaaaaactaacaaaagatctcggaaattaaacatgacttgatatttttttaggggtactctcctttgggttctccaggaacaacgtggctaacgagcgatgttttgaagaaccctattcttggtggtgttgctgagaagctcggcaagactcctgcacaggttgcattacgctggggtctccaaatgggtcaaagtgttcttccaaaaagcacccatgaagacaggatcaaacagaatttcgatgttttcaactggtccatacccgaagacatgttatccaagttttctgatattgaacatgcagtaattttccacacattgtagtccaaatgggtcaaagggcgtcctttgttttgctcaaaacacttgggttatcgaaattgtagacgtgtgttttcaatgttgcagggcaggttggtgcgaggcatgtcattattcattagatgagtccttataagagtcttgaagaactctgggacggtgagata

SEQ ID NO: 139542 - DNA, 883 bp, Arabidopsis thaliana landsberg
gatagcttaacggtcgtaggaatctccttctgcaccgcgttggtctgcgaagccatctcatggatcttaatctaccgtaccagctcatacaaatccttgaaatactccattgacaaggccacgaagaaactcgagacaatgaagacagagaatccatcgtcaaagctatccataaagaaatcaaagacgaagaagatcgatcgcgttgaaaccagcttaaaggaatcgagccgagatctgtcactcttcaagttcaaatccggcgccgttgtggcactggttctcttcgtcgtcttcggattgctcaattcactattcgaaggtaaagtcgtcgcgaagcttcctttccatccgatcacgatagtgaagaagatgagtcacaggggactgaaaggtgatgatccgacggattgttccatggcttttctctatctgctgtgttcaattagtatcagaaccaatctacagaaatttctagggttttctccgccgcgaggagctgctggtgctggtggtttgttccccatgcctgatcctaagaccaactgatcactcctttgaggttttttttttttgtttttgttgagatttttggaacaattttcatataaacacacagttacaagtttttgcaatcatctgatgattttggtattctgattcgatctaagcaagttaaattaaaagagacataatagttcttctctcttaattgaatctttctttacaaaattatcaacaaagttataaaagaaagtcccaataaccgaagaaatcgagacttacaaggcaaagtaccaaacacaaactctctggaatcactgcacaaacatatcctacttatgttgtcttcttttctctcaaatctcaaaatgaaccttcc

SEQ ID NO: 139543 - DNA, 3428 bp, Arabidopsis thaliana landsberg
ggagcttcaagatctcaagagaccactcgacccccacgtcgagtagatgacatcacaacttcacctcaccactcgaccacgaggtcgagcgtcttcatctccatcacctgaccaacactcaaccacatcactcgacccccaggtcgagtgacttcatctccatcttttgaccaccactcgaccacatcactcgaccccctggtcgagtgacttcatctccatcttctgaccaccactcgatcacgccactcgatccggcggtcgagtgtccttatcccgttgccagaccactactcgacctcatcactctaccttgaagtcgagtaacaccatcacaccactcgactgcatactcgatgacaagcttcagagccttcttcattccgcactcaaccagacactcgagcacaaggaagaaaagaagtcactcgatctctcactcgaccacatgggtcgagtacagttcttaatccgtcccaatactttgtcgttttgagtattagggtttcggaaaatttggctataagtagcatgtacttcacatttttgcagacgagaagtttttatctagttttatttccacagaccttgtgtgctagaccttttgtaatccggatttctctttatctattcagtattcagtattcagcttttgttcttgattttcgtttgttgttgttcattctgttatcatcctgttgttacgctgttgttatcatgtcttcaacctgttcaacgtttatgctttttgttatgatgtctgagtagtgaataggtttctgaggatgggttagagtaatgtagaattctcagtatgctaggtgatttagtattggtggatagatcccttctggattagttgttcttaatgcctattgctttctgatcaactggaatttgagcccagacatttccgcgcccaaaaggtgttcgatgaaatgtctgaaccactaattccagagatgcgtgaccctgtaccaaggtattggttgcaaggagcgttttggctttaacttgttgattcgtaatgcctgttaggttagctctcgtcaatggtgattgagtctgggactaggttagcttgagagtctctgttgcggtggcacttagatttggttaacgaacttgttgtctagggttaatttattgagcatgtcaatcacctgtaaactgaggaaacgaaactactcaattaccccatccttaggaattctttgtctgattgattttattgtttactctactgctgtttactgcatcctgtcacctgttgcttagtttctgcaattctttactgttactcgacctgatactcgaccacccagttgtctggcaacagactgtgcagtcgagtatctttgtttcattttctgtctgttactcgacctgtcactcgacctcacccagggctctgcaaagagctgtgttggtcgagtgttttactgtttctgtttgattttctgtttcctgcttgttcacttaggattgctagaacacaccaaaacctgttattgcttggcttgacttagtgacttctgatcacatcttgattgttagcatcacacccatttggattgacaacctaaaatactacaacgacatgattggtgttttaggataattgactgaaaaacctattatcaatttggcgccgttgccaattgggtgtttgtttgttacatttgagatttcagacttgcttagatcaagttctttttcaattttctttttagttactaactgtgtgtttttcttgttgtcttcttgatccaggtacacctctactgtatgcgaactcgatcaacaggcaaccagaacctccttttcaacgacaatatcaaccgcacagcccgcgaaatcagaaaaaggagaaccacagtcaaccctgtacctcagcaaccactcgttatggctgaagaacagaatcagcaaaatggccatgccaacattggtgctggagatgcaccacgtgatcaccgtcagaggaagggaatcgcacctcctgctatccagaataacaacttcgagattaagagtggtctcatctcgatgattcaggggaacaaattccatggtttgccaatggaggatccactcgaccaccttgatgaattcgataggctctgcaacctaacgaagatcaatggtgtcagtgaagacggattcaagctccgtttgttcccattttccttgggtgacaaagcacatatctgggagaagaatctgccccatgacttaatcaccacctgggatgattgtaagaaggcttttctgtcaaagttcttctccaatgccagaactgcaagactcagaaatgagatttgtggtttctcacacaagcaaaatgaaagcttctatgaagcttgggagcgctttaagggttatcaaaccaaatgccctcatcacggatttaagcaagcttctcttctcattatactttacaaaggcgtcttgcctaaatgtgaggttcagttcaattccccttcattgtctgcttgtcaccgcctccaatgggaatttcctgaacaagtatgtcgaagaaggatgggagtgataagtaggttttttaggcctacttatatgctgaatgtgaggttcaattcaattctccttaaacactaacatgtggatgcagctatagggggtattaatccagtccactgttattgctagcaatcaagatgtgtacacaagcaactaagtcaagccagattataatgatggttggtttctagtacaatcctaggtcaggattcaaataggtaaaatgagaacttaagagccatactcgatcattgggtcgagtagaaccaacatgtgacaatattaagaaataaaatgcaatcaataggggatacaaataacaggtaaataaaagtgcaatcagggggtgaatacaaataaatctaaaaaggatagaagtcctaaggatggattcattgataagggaaactctagagttcatcaggtggctaactggtgaaaggcagaaaccctagacgataggttcaaaaaccgggtcaatccactctcgtgaaagagacccccataactctaccacttcctaatctcaactctcgttaatgaaacatagcagagcagggtttaagcaataatttaccaaagtcaatatgcagtctatccaatctcttgggctagagtctacaaatctctcgaattcgtagatcaggcatccatttgaacatcttttggatgctggatacctatggtcgaatttccacattagccagcgaaaaccgcataggggccaacgaatctagaagggatctaacctaatcttaaccacctgactaaccgagagattaccctaatctaattcatcctcaagaaccctaatcactactcaagcaacataagtaagaacacaaacccagaaattactgaaatcatgtcacaatgtagatcta

SEQ ID NO: 139544 - DNA, 514 bp, Arabidopsis thaliana landsberg
  unsure (1)..(514): unsure at all n locations
atatcaaacgtcaccaatttttttatatattactatgagtaaagaaccaagtaagcactttaacaaaccacaaacaaatttaaaatacaacatattaataatcaaaaggaaattaaaggtacaaaatacaaatcatcaaacgggggtatgcgtaattaaacaaacaaaaacacaccacaatgaaacaactaattacaacaatcttataataaaatatacatcatcaatcacatgaagtgatgatagttcaaggactcgaagtagttgcagaaggcgggggagagaagaacggaatggatgggagactagtcggcagagagggaatggatgggagattagttggaagagaaggaatggatggaatattagtcggaagagaaggaattgttgttggaaatgaannnnnnnnnnnnnnnnnnnnnnnnnncgtgggaatggtggcaagatttcgttgtggcaaagctgatggcatatagaaatggagacattgcagtgggcattgtggggagagttg

SEQ ID NO: 139545 - DNA, 1124 bp, Arabidopsis thaliana landsberg
ttgaactacatcctcacattcgcactgatccacgcaggccagaactgtacaagctctgctggtctcagtgtctcggggccagacagcaatgcggtcttttcttacagacaaaactacagtaaggtttcatggcagagctacagtcataacttgggtagttgggggaatggtgagcctattaacttagttcttgaaagtcaggcaatagattctgattctgatacaaactccacatgttggcctatcattgacacattgcttatcaagactgttggtgtaacattggtccaagacagtggtaagttacttctcctcccttctgcttttttttttgatcccgagagtgctaatgctgaactcatagctcaatatggaacatgatgaaagcaggtctggtttatataagttgatgtcttgtaaatctagctgcatagactcatattctgattttgttggtgtaggtaacctcttaatcaatggtggatttgagtctggacctggtttcttgcccaactcaaccgatggagttctgattgacgcggttccaagcctgattcaatcaccattaaggcagtggtctgtcataggaacagtcagatacatagactcggagcacttccatgtcccagaaggcaaagctgcaatagaaattctgtctaacacagctccatctggcatacagacagcaacaaaaggcacaagtgaaggttcaagatacaacctcacatttaccttaggcgatgctaacgatgcgtgcagaggacatttcgtggtgggtgctcaagctggctccgtaactcaaaacttcacattggagagtaatgggactggctctggtgagaagtttgggttagtgtttgaagcagacaaagatgcagcacagataagtttcaccagctactcagttacaatgacaaaagagaatgttgtttgtggtcctgtgattgatgaagtgatggtacatcctcttggtggaacagcctcagtaaaacccacttggctgctacttattttcgctttgttgtatgttgcagttctctgattgaaactgtttgggagagaggtcataaagaagatatttttgcaaggagatgtgataatcattctagcttcatgatttatat

SEQ ID NO: 139546 - DNA, 1840 bp, Arabidopsis thaliana landsberg
ccttaccaacgaaagtaaagtctaagaaaggctacaaaattgtagtcgaagaatctgatgaatgctttcaagtgcatgacaaataatttgttccattctattttaagcaggtaagtggcgacattaaaacaagtaagacctcaactgtggacaacgcggttcaagatgttcccaagaagaacaaagacaaagatggtaacgatggtactactgtgcacagcatgcaaaactacccttggcatttccacgcagatattgtgaacgggaatatagcaaaatgccctcaaaatcatccctcaggtatggtatctcaagacttcatgtttcatcctatgagagaagaaactcacgggcacgcaaatcttcaagctacaacagcatctgctactactacagcttctcatcaagcgtttccagcttgtcattcacaggatgattaccgttcgtttctccagatatcatctactttctccaatcttattatgtcaactctcctacagaatcctgcagctcatgctgcagctacattcgctgcttcggtctggccttatgcgagtgtcgggaattctggtgattcatcaaccccaatgagctcttctcctccaagtataactgccattgccgctgctacagtagctgctgcaactgcttggtgggcttctcatggacttcttcctgtatgcgctccagctccaataacatgtgttccattctcaactgttgcagttccaactccagcaatgactgaaatggataccgttgaaaatactcaaccgtttgagaaacaaaacacagctctgcaagatcaaaacttggcttcgaaatctccagcttcatcatctgatgattcagatgagactggagtaaccaagctaaatgccgactcaaaaaccaatgatgataaaattgaggaggttgttgttactgccgctgtgcatgactcaaacactgcccagaagaaaaatcttgtggaccgctcatcctgtggctcaaatacaccttcagggagtgacgcagaaactgatgcattagataaaatggagaaagataaagaggatgtgaaggagacagatgagaatcagccagatgttattgagttaaataaccgtaagattaaaatgagagacaacaacagcaacaacaatgcaactactgattcgtggaaggaagtctccgaagaggtaaaacaaaaaccaatgattcatggatattgcagagttcttctgggaactaacactatcaaaatattttcagggtcgtatagcgtttcaggctctctttgcaagagaaagattgcctcaaagcttttcgcctcctcaagtggcagagaatgtgaatagaaaacaaagtgacacgtcaatgccattggctcctaatttaaaagccaggattcttgtgctgcagaccaagaaggagtagtaatgatcggtgttggaacatgcaagagtcttaaaacgagacagacaggatttaagccatacaagagatgttcaatggaagtgaaagagagccaagttgggaacataaacaatcaaagtgatgaaaaagtctgcaaaaggcttcgattggaaggagaagcttctacatgacagacttggaggtaaaaaaaaaacatccacatttttatcaatatctttaaatctagtgttagtagtttgcttctccaatctttatgaaagagacttttaattttccttccgaacatttctttggtcatgtcaggttctgtaccatattaccccatgtcttgtctcttgtctctgtttgtgtatgctacttgtggtctatatgtcatctgctactactgttaattaaccattaagcaatggatttgtcttta

SEQ ID NO: 139547 - DNA, 2800 bp, Arabidopsis thaliana landsberg
  unsure (1)..(2800): unsure at all n locations
aaatatcacacgaattgttttattagaagtcccacacgatcatcatcaaagtagtttgttacgatcctgagaggctaatgaacaaactttgctacaaaggaggcggttctatcaagtccatcgtgatccttgagccaccccaaccgcctcaaccccagcctcaaccacctcatttgcctactgccccagccccagccccagcccaagcccaagccccagctcttgttcggccggctccggttcctgttcttgtttcgtcttccgctcctcaaccgatgccgatgtggcagccgtatcattgtgggccgtattacgaggcccaacagtaccaatgttatggaaggcccgtttacgagagctggggaggtggacgacaatgttgccacgaagatatgaactctcaaggatgctccatcatgtgaaacactgaaccaagtctcctcctactcatatatagactatagtatataccagcaaataaataactacacgaagttatttttaattgccttcgtcttaccaggatttctatttcgagtcctcgtctatgtatgtgaacactacagggttttgtttcttgtgtatatcacgttttggttctaatacaacttttatttgctcttcttttcttggtagtaaaatacaaatagtaagatttttcgcataaaaatatagtttctgttagaaaataaaagtatattagcacgaaagaatggaaactaaaaactctgagaccggcctctccaatgagtgacatgagtcgatgaatactcaactattatgtttttacagtttacttatccacagatgacactgtttctttctactgtgaaaagagcagccgtggtgcttacacctccacacgacaccgtttaaacggaaactaaaaacgacgtgacgttcttgtctgaaacacttaaacgacgctatagtgtactgtaactccagagaaggccttatctttctccaattctcaaaaccctctttaacactcttcctctaagctttttaaatcaatggcttccacttccacacttcttcttccatctctctcctctaagaatcttcacatcgcagtcccaataagaaccaatagcttcgttcgtcgaacaacaaagttctcaacaaaatgttcgtcgaatccagagtcaaaggatcaattcatcaatctcacaccagcacctgaatcaatcaacacaacaagcgcagagaaattcccaatagagaaacgaagaagatcagagatcatacgagacagaacacaaagaggaatcgagaaaccagagccaccaaacttcgaaatcggttggaaaagaacaaaagagataaacttggagaaacctaaaggttatgtaataatggatttcttagaaaagttcgaagctttaatggcgagagagtttggatcaaaggagcttttagctaaagctggtgagattgttgcagagagagctagagaagaagctgaggttttgagagatgaaggtaaagttgaagagagaatggttacagagctttttagggttttgaaattgatggagatggatttagctatggttaaagcttctgttaaagatgaaactttgagtcagaggattgaacaagctagagnnnnnnnnnnnnnnnnnnnnnntgttgctaattctttctaattccttcttcttctacttgcaaattgagtcaaaagtctatgaattttgtttatagttttacacaaaacagagcttcttcatctgtaaaagatcttatttttttggttctgtaatcatctctggatcattcatctgttactttaatggtagaagaaggattgaagatgagagtctcatgtgaagaatcaaaacaaagattcatgcttttggttttgcaatttgtgaggaagcttaagggtttttgggaggaaaaaacttaattagttgagaaaattttacttccactagtttcatatttcaagatatttcaccaagactcaagctttattgtacaccacacattaaaaatgcaaagtttaatcattttaacaaaagcttcacaagcagcagtagacagcaacaatggtggcagtcagattctacgctgtagagatgtcgctaccatgtttatgtccatgcccatcatcgccgatttctctttcattgtgttctccgagattcaatcttcttaacacaacaagcaggagactaggtttgtctagaaactgtagaactctgcgaatcagttgttcatcttcatctactgtcactgaccaaactcaacaatcgtcttttaatgatgctgagttgaaactcattgacgctttgatcggaattcaaggccgtggcaaatctgcttctcctaaacagctcaatgtgtgtaaaaactttaaactttctttaattttccgtcgtgtttatgatttgagagattctctgttgtaggatgttgaatctgctgtgaaagttcttgaaggtttagaaggcattcaaaatcctgtatgaaatgttttcttgtgaatccttttatcttcaaattaccaaattctgttatgttttgttctttgactcatttggttgtcttttggggaatgttgtttaaatgtttagacagattctgacctaatcgaacgtcgttggcgattgatgttcaccacaagacctgtaactgcatctccaatccaagtcagttcttctcacacattcatcatcatatctccattttttctagatgattgtaatttgtgtgtaagaagaagagcaatggaaggatttgtctctgcagagaacatttacaggagttgatgtgttcactgtgtttcaagatg

SEQ ID NO: 139548 - DNA, 1319 bp, Arabidopsis thaliana landsberg
tttactctctctctcttactcataatggcctcattctctcttccccactccgccacctactttccttcccactctgaaacctcacttaaacctcactccgccgcttccttcaccgtccgttgcacctccgcctctcccgccgttcctccacaaactccacagaaaccccgtcgttctcccgatgagaacattcgagacgaagctcgtcgccgtcctcatcaactccaaaacctctccgcacgttacgtccctttcaacgctccaccttcttcaacagaatcctactccctcgacgagatcgtctaccgttcacaatccggtgctctcctcgacgtccagcatgatttcgccgccttgaaacgctacgacggagaattctggcgtaaccttttcgattctcgcgtcggtaaaacaaattggccgtacggatcaggcgtgtggtcgaagaaagagtgggtactccccgagatcgacgatgacgacatcgtctctgcttttgaaggaaactcaaatctcttctgggctgagagatttggtaaacagtatctgcaaatgaacgatctttgggtgaaacattgtggaatcagccacactggctcctttaaagatctgggcatgagtgttctcgtttctcaggtgaatcatctttcataaagtttacaactgtataaacatcttcaataaagtttacaactttatgttatttttttgtttctcaggtgaatcgtctccggaaaatgaacaaaccagtcatcggagttggttgcgcttctactggagatacctccgctgctctctctgcttactgtgcttccgctggaatcccctcgattgtcttcttacctgcggataaaatctccatggctcagcttgtgcagccgattgcaaacggagcgtttgtgcttagtattgacactgattttgacggatgtatgcatttgatcagagaagttacggcggagcttcctatttacttggcgaactctctcaacagcctccgtctcgaaggtcaaaagacggcggcgattgagattctgcagcagtttaattggcaagttcctgattgggtcattgttcctggaggcaatcttggtaacatctatgcgttttacaaagggtttcatatgtgtaaagagttaggtcttgttgatcgtatccctaggcttgtttgtgctcaagctgctaatgcaaatccactttacttgcattacaaatctgggtttaaagaagatttcaatccattaaaagcaaacactacatttgcttctgctattcagattggtgaccctgtttcgattgatagagctgtgtatgcgttg

SEQ ID NO: 139549 - DNA, 4632 bp, Arabidopsis thaliana landsberg
atgcaaccacatgctcaagctgttggctacatgccgcaataccatgctcacgctgttgtatacagtcaacaaggtgtgacgcaaggttctgtaccaagggctcctgggacaactgattgtaatgctgcaaaccaggcatattctgcaacaggagattggaatgcagtgcatcagtcttattaccctcagacagcagatgcaaccacaacctattatcaaacatcttaaaacgttaaagcaaagtgttgctactctggtatgccaaagaggattctgttaagtctcgtgtatttaaagcattgtttcggttcaggtgagaaacgatttgctgaaaacctatttgcattggtattgcaggatctgagaaacttgtgcgtgatgggtgcggaagcatggactcgaactggtgcactcagtggaaaagaaggtcaaggacataaaactagagtctccagctccgtttactgtaagtttaaaagttctatgttacggtttgatcatattcatttctgagctgcgcatgaggaaattcctcaaaccatcaaaacttctttaagtcccgtttcaggagtgcaatctgaaatgcaattctgattgggatttaaagttaataaaacatattataactctgttatcattacttatgctaaaacatttcttttagtatggtcatgtttaatacttgggatttgctattaagaatactaccttcaaaaaggttcatcttaaacactctctcaaacgaaacctagggaccaagaatatgcttattggctctaagattaagtggcctaaaccctaagccatatctattggtagacaaaaaagaaaagaaaagactcctaagtctcccactatgtatgtttgagcacttgcactgcaattcacatgttctttgttttttctctttctctttcaaaaaaactttttatctatttctttcttctccaataaaaaagattttaaaagacacctatctcactctttccacctactttgttttgtttgctacagaatttacttaaggctctggtcttgccctcttgtttctttttttttgggtcaagggtcccgtatgtttacagctttgttggttgtgtcacagatcatcaaaatattattgacgaaggaaaaaatactgaaattgggaaaaacatgatcagatccaactctctgaattgtctcgaggtctttttaattggaattgaaaaatgcaaattttcctgataaatttggagttaacgttggcttctttcaatagatgtctattatattatctttatccactttttgaaagttatagtccccatctatcatcatttactgatatgatctgtgggatttttttctacaaaatttctgagttgtgtgaaccttacgatttgtgttaaagataaacaaagtatgacctccatggtaataaactactaattatctttgtaaaatgttctcacgtgaaactctctcactatttcctattgctcactttatgtccccatagcaacaacgacttgtactcgtctgaaaatttctcaaatttcatgtaaataataataataaaaaaattattacaattcttcgctaaaagcatcacagatccagttggcaaaaagaattatatatatactattagtgcattgcaaataaaattattaaagaccaactgtttgtcatataaaatattataaaggatttcatagataatatgtatttgatataacaattataatcgataacaatattctgatattgtaagctggaaagattatgtcacagaagttaattgctctaattaaatatgtctgaggttaatctgatattgaccaacacgtcgtttactacaataaatacaaaaaaaaaagagagcgaatttctcagaaaacagcttaacgtttcttggatatttcgtaagtcaatattaatcaaatgaaaacaaacaaaaaaaacctatataagaaggagacgctgtaaaacagagcgagtcaattaaaagaaaagaaaaagcgcgacttagacaagtgggtcccatttactgctctcccagattatcattttcttctgaatcttcttcttcttccgaaattcctcacaaaaaaatgtttgtctctgttgttcgatccaggtacttttgaatccgcagttttttttgttgggaaatcaaaaattatggggaattgttgctccgatgtcgcctccggtgctggtgctacagccggcgttggtggaagtgcttcctccgccgctctcggtgcgactaacgacgcccttgattactatctcaagtccaaaggtttcaacggactcttctctcagatagaggttccttcactatcatctatctctcgtgttttttctctacttccgccaaaaaacgtttaacaatgatatatgtgtgcttcgtttgaaagaagaaaactgcgaaattcgattttccctgtatattctgaggattcatgtttgatactgttttttgttgatgcagctatcgttttcagcttcgaatttgcgagaccgcgacgtgcttccaaggttactttgttattcaaaattgaattagtcttcatagctggtcattttagttaatgacaaactttttgttttttgtttttttgcagagtgatcctatggttgttgtatatcaaaaagaaaaagatgcaacactttcagaagttttccgcagtgaagttgttttgaactctttagctccgaaatggattaagaaatttatagtcgcttatcatttcgagactgtgcagacattggtgtaagtttcttattatcttgtgtgacttgaggaaagagatgaacctttacctgactctttgtgttggtttctttatactcaggtttcgtgtgtatgatgttgacaccaaatttcaaaattcaagagaggaggtaattgtttatttactgcctgcattttcatttgatctgatgttcacttttctcaatatgttaatacttttcagatgcttaagcttgacgaacagcagtttcttggtgaggcaacatgtgcattgtctgaggtatcatttttgacattgacaatatatgtgcacttgtttttgctggttctctgagaggcacatcagaaattttgttttattgcctagcttataagagagagagagagagaatactttatatttaacttttcaaccacgcagataatcacaaaatcaactaggacgagcacattagaactcaagcgcaaagatggctttgctccacaggctcagcctcaccacggaaagcttatcatccatgctgaggagtcccttgcttctaagatttcaacagagatagtatttagatgttcgaatttggaatctaaggatcttttttcaaaaagtgtaagttttgttgtttattctctttaccattttaataaaattctagttctgacatcaatataacactttttttttgttgtggctcaactttaggacccctttttggtggtatcaaagattgtagagcatggaactccaattcccgtgtctaaaactgaagtccggaagaatgatcttaaccctatttggaagccagtctttctaagtgttcaacaagtgggaagtaaggtaaaccaaccaaaggggtttattatatctgagttttgtctgaccaggaagatgtattagtttctcttttgtaatcttgcaggacagcccactggtaatagagtgcttagacttcaatggcaatggcaatcacgatctgatagggttagtcacaaaatctcagttccttgcattcttttttggttgagatatgaaaatgatttgctgaagctgagatgattcttgtatcttattggttttgccagaaaagttcagaaatcactgtcagacttagaaaagcttcatttggctggccaaggaatcaatttagccttacctactggtgttggacataaacatgaagatagggtatagaccttcaacaacaagaggtttttacacaatttaaaatgcgagaattctgataacatttagcattatttcaggtattaaagagccagcttttcgttgacaagtttactgaaaccgtccagcatacattcctagaatacttggcttcgggatttgaattgaacttcatggttgcaattgatttcacaggtaaaaagatctgaaaagtgcagagtttttctagactctctctctctctctttaaactaatccaatttgtcccttcttccatcagcttcaaatggaaatcctcgcctgccagattccttgcattacattgatcctacaggacgattaaatgcctaccagagagtaagaactcgatctattcaagttaatttgcagaagctggtgactgtgtgtgatctttcttctttctattcaggcaatagttgaagttggagaagtgttgcagttctatgactcggacaaacgctttcccgcatggggttttggagctcgtccaatcgacatcccggtctcacattgctttaacctcaacggaagcagtacttattgcgaggtcttgcaacaaatcctactcacattgaactaacttttgtatcaaaatttctcaattaatctttgttatttgattggttctcaggtagacggaattcaaggaatcatgaatgcctacaatggcgctctcttcatgtct

SEQ ID NO: 139550 - DNA, 2077 bp, Arabidopsis thaliana landsberg
ccaatagcagaatgagaaaaaaatgtcctcttgcttaatttggttttgtagagattttgatggttttggtagcttgtgtacttttactttttaattgaacactatcagttccatctctatgttgctggattcttaaaagactgaaatttagtagcttgtgtacttttactttttaattgaacactatcagttccatctctatgttgctggattcttaaaagactgaaatttaggagttacttgggttcctgtactaatgagaaaaacgtctgtagcttaatttggtgttgtagattttcatggatttggtagccttgtttactgttacttattattgaacactatcagttccatctatgtgttgtttgattgattctgaaaggacttaaatttgtgtgttactttactacgacttagttagctgcgtctttgatttatctccttttaaggaagtcaggagaagaattgctctatatcgtgaatggcatgcggtaattattatggtttgttcctttttatggcagaaaaaggaagctgactgatcattggaggaggtttgtacagcctactttaatgtggcgttgcaaatggattgaactcaaatacaaagaacttcagaaccaagcacagaagtacgacaaagaagttgaagaatattaccaagccaagaagttggagttagaaaatgtcaaatcagaagaacttggagtaaaggctttacctcctcttccatgttatactcagaaaacccgactcatgaagaggaaaacgagaaagcgagttgaagagaccgctgatgttacatcctatgcatcaaaccataatctcttctcttattatggtatggaactagtttggtgttcttgtctttctggtcgtgattaatgttcatctaccattacttgtctaataatttcttatcttattgtttctgatctttgtatagattgtcggaaatctttggccgatattgctcttaatgacaactcccgcaacctaggtatggtgttctaaaatctcaactatgatatgatattactccttttgaaaactttgatcttataaaatattttctgtcttgggtcatcagataagaagaataagagcgccaaggatgagacagctttctctgaagagacaccgcctctcgagtttagagaaggcgatgcgtacttggaacagatacttttgaaaattgaagcagcaaagtcagaagcccgtaacttgaagatccgagtagacaaggttttgagtgaaaatccaagtatattccctctggctaacacagtgaatccacttggagctgctgatgtatacaccagctcagaacaacaaaagcccctgctggctatcaaaaacgaagatgagaaatcgatcatctctgaagaaaaaccggtgaaatctgcttcagtttcatctcatcacgtctcacctgaagacgacgagacaacagatattttactggctgagattctagcatcaaagcgaagggaagggaaatctattattcccgataagaatctagtgaagacagaacaagcttcaattgaggaaggtccatcaagacctgtaagttttccgctaactcagtgtaactttgctaaacccttttggtctcatatgcctttctaacacaatgcaggtaaggaaaagaacaccgcgcaatcgtgaaatcattacgaaggaagagagtaacccaaagaggcgtcgggtttcaagagagaagccaaagtctaatgctgtgatggcttctaggttttccaacaggaagagaaagcgaggaaaacgaaggtcaggctctgccgggttacgaagaagatcctgaagaaggtttggaaactttcaagaaaccaatcggatcttgtgttaaaaagtaaaaattgttcattctaagatattcttaactcttaagcctttaaagtacaaagaaatatttatagtggctgtgttttgattcttcatgtcaacaatatattcaaactacatgaagtttatgtatttgtgactctaaatcaacttttgaactttaacttctataatctagagtgtatatatttttctctattttatattatca

SEQ ID NO: 139551 - DNA, 3882 bp, Arabidopsis thaliana landsberg
agctttgggccaccgagagaaaccattttctgagagcacactttcgttgacttctctttaaccaatgtctttaaccacagtccctacgctcgcaatcagatccggaccatccggtcatcactcgatgccggttcttggttttggaaccgccgcttctccgctaccggaaccaacgatgctgaaagagacggtgattgaggctatcaagcttggttatcgccatttcgacacctctccaaggtaccaaacggaggagccgatcggcgaagctttatcggaggcggtttcactcggcttagttcgatctcgatctgaattctttgtcactaccaagctttggtgtgctgatgcaaatggtggtctcgtcgtaccggcgatcaaacggagtttgaagtaagatttttagattccttactgattttcacatgaaattagaatgaacggtttcaatcactgagagtaggtgtcactattagactgtatatatgatagtccggttttgtgattccggttaagttaaattgtgattgtatatggtttagttggtttagcgtagatgtatacaaacatacttgtaaacacttttacgattgagaaatacagaaaactatttcacatatctctatggatcatgttctctatcagtcaccgtgtcaattttcatgattgaatattattttgggagtgacataacttaatgtaatgtaaaccatctatgtaacaaatatggttttgcagaaaccttaaactggactatcttgatctttatataattcattggccggttagctcgaaacctggtaaatacaagtttcctattgatgaagatgattttttgccaatggatttcgaagtagtgtggtctgaaatggaggagtgtcagagactcgggcttgcaaaatgcataggagtaagcaatttttcatgtaagaagcttcaacacatactctctatcgcgacaatcccgcctagcgtcaatcaagtaaacactacttttttttactctttgatttatttttcagcaaacaattccaattcaccctttttttcttttatggatgaatgtcaacaaggtggagatgagtccaatatggcaacaaagaaaactaagggagctttgtagttccaacgacattgttgtcacagcgtactcggtgttgggatctagaggagctttttggggaactcccaaaattatggaatctgatgttctcaaagaaatagcagaagcaaaggaaaaaacagtggcccaggtactttcaaaagttttcttaaacgatatcaaacaagaaaaatacaaaaaacaattggtgacatttatatgaacttttacaacaacaaaaaaaaaaaaagtggggacgtttatcagttattatcaatttatcaccatcaatagtcagtcactatcttggtaacatgaatctcaacagaaaaatttgagatgtattcatcagctatatccatggagttcaaatactattaaaatttgacaatttcggtttttggactacaaggatttaaagctcatatttggagttgtaattacaggtgagtatgagatgggcttatgaacaaggagtgagcatggtagtgaagagctttaccaaagagagattagaagagaatctcaagatatttgattggtctttgacagaggatgagacacagagaatttcaactgagattcctcagttcagaaacgtccacggagaggtttatacctctaagaaaggtcccataaaatctgttgccgagatgtgggacggggagatctgatcactttgtgtgaaaatagcctagtgaaacggcaaaattatcattcgtcacaatgattttcttgtcattctctctaataatgaataatgaataatgaataaggactatctcaaacataaacgatttgtcatttagacacagcgtagtacggaagtggagtagaacttggctaataagattggattctaataatacattttttaaaatactaagaggttatgggtctaaaccctaaatttgaaatgggacaaaactaagggcatttgctccttattaatcatttttaaattagaatcacaatacacaaaccaccaaaaatatttaacagcgggagaggggagaactttcaacacctcgctttctactatcttgtgttccaaggaacatgttgctctattgtccatatcaacgaagttccgaacaaagccataaaacactaataattgagatttttaacaagtacacactattagaaagtaactcaatgaaaatgacaatggattgaatccatccaaaacctagtccaataccgatggataaattcaaagccaccggggaacttggacacgacaccgacattagacaaatgattggaggtgcgtttcacctcttgtagcaggttatgggttacacgtgacatcctccttttatttttgttttgttttttgttggccactcgtgacatgtttttttttctttacttgtttttggtggctagtggctacgaagtagtgagtataagtttagccaatgagaaacgattttctcgtagcaaactttctttgactttttggcgcttcttttcaccaatgtcagctcttacgttccctatcggatccgttcatcacttgatgccggttctagctcttggaactgctgcgtctcctccacccgaaccaatagtgttgaaacggacggtgttggaagccatcaagctcggttatcgtcacttcgacacctctcctaggtaccagacggaggaaccgcttggtgaagctttggcggaggcggtttctctcgggttaatccaatctcgatcagaactcttcgtcacttataagctatggtgtgccgatgctcatggtggccttgttgtaccggcgatccaacggagtttggagtaagatttgagttccttattatatagaaaaggatagcaaatgagatttgtggttacatgaaagatttaaatagacttttgaactctagatggttaaactcaaatatatacttaggggtgtgcatggatactccaaaatttcatgatattcgagtttggattcgttgatatatattcgtactcgttggtatcaaaattggcgaaataatattttaagaacgaaaacattattataactaataacacaatggtgttaaaaaaacacaataaaaaacttaagtatatacgaaaaaatatcatttaatttttttaattttcttttcataaagattttgggacattagtcattaatgtataacatctttacatcgtatatatgaacgcttaggccgtatcttagaacaatgcttaatcttaatcatcattttcatatcatgttttgtagaactcttaaattggactatctcgatctctacctaatccactggccggttagctcgaaacctggtaaatacaagttccctatagaagaagatgactttttgccaatggattatgaaacagtttggtctgagatggaagagtgtcagagactcggagttgcaaagtgtataggagtaagcaacttctcatgcaagaaactccaacacatcctttcaatagcaaaaatcccacctagtgtcaatcaagtatatttaaaattctctcttatttaatttatcaaataagttcaaccttttttttataagaaaatattggattggtgaaataatttgaaacatttgtttgtggataatgtgaaaaaggtggagatgagtccagtatggcaacagagaaaactgagggagttatgtaagtcgaaaggcattgttgtgacagcttattcggtgttgggatcgagaggagcgttttggggaactcacaaaatcatggagtctgatgttctcaaagaaattgctgaggcaaagggaaaaacagtagctcag

SEQ ID NO: 139552 - DNA, 3717 bp, Arabidopsis thaliana landsberg
gtggcggactttggtgtgtctgctcagctaacgcggacaatatcaagaaggaaggtgcttactctattatgccaatgatcactgttgattctaattcttgttattggttcattttcttctgtgaatatatcttttacatccccgtaatatatgcttagggctggtaatgaaatttctggcctctttgtttagattttgcttcttgcattgtgaggtctattgattttttaattggttaaattttctagggactaggatactcctgaatagtccaacgcactagtacttattttttttttccaattattattcaacctatctgcagcttcagttccagtttcttatctacagccttatatagtagaatcatgtctatgtttcagctatgggataatttatatgctatgttgaaaagataatcttatcaatttgaacaacatctcatctttacttctctgctgatggtttgcaattttcactcattcatctgggttgcgtgcgctgatatgttaaagaatgacagacttttgtaggaaccccattttggatggcaccagaagttattcagaactcagaagggtataatgagaaggtatctcgcctatatactgagcttcacttctcctagcttgacatgtgtgtttgtagaggctatacttgtttccttagcatatctaatattttttgccttctttttctgttgctgggattgttgtcatttaggcagatatttggtcgctcggaataacagttattgagatggcaaaaggagaacctcccctagctgaccttcatcccatgagagtgctttttatcattcctcgagaaactccaccacaggtttcacatattttcattttaaacatgataaaagttatactggtcactgtgctttgcctcagcagaattttaccttttctgggcagttagatgagcatttttcccgtcaagtaaaggagtttgtttcattatgcctgaagaaggcccctgccgaggtacttgcaatgcaatccttgtaatctttgctttctttattggcagcagtggcatttcaagatctcttattcaagtcttatactttcagagaccaagtgccaaagaacttattaaacacagatttattaagaatgctaggaaaagtccgaaacttcttgagaggataaggtttgatactttttctcttcaacagctttggcatgtgatttcaattatgactttcctaattcagttgtatgtcaaaagtaacatttagatggtttcccgtatgtttgttttgatcttttatatgccaaaagaaaatccagaataagcacgattgttattctgtccttttttcctctttaaagagagcggccaaagtaccaagtaaaagaagatgaagagactcctaggaatggggccaaagctccagttgaatcaactggtactgttaggatagctagagatgaaagaagccaaggcgcgcctggatataggttggatgaatgctctgcgctttggttttcttatgatgctcggttgaataaaatctttattaactcgtagctacagatttcaggggaataccgtcaaaaatgctggatgggactttaccgctggggggtcacagagtattggaacagttcgtgctttaaaacctcctcaagcaagggagaggcgccaagaagtttctcctaatcggatttcgcaaagaacaacaagacctagtggtaatcaatggtcatctgcgactgggagtacaatttctgaagcttctgaaggaggttttgtcagaagacacccttttcagaatgaccatgaagatggcttccacgaagaggtaagatcctttgcctcttgtgtgcgagatgcagtctgtcttatttgacacaaaatttcttgctgttactattaccctgaaataatcttctaaagcatgtcacgatatgtatgtttcatgttacttgggtaatcatttacagttagggaacttggttaagtttcacgtgtaggattactatattgtaactccttatatctgtgtattcttaagaatgagaacaagataaaaatatgtttaccttgtccttccgaatccaggacgattcatcgctcagtggatcgggaactgttgtcataagaaccccaagaagttctcaatcatcttcagtattccgtgaaccaagctctggggtatgaaatttctggcaccttcttaacatcttatacagaaattaattaggcctggtgtattataaatgactccatttctactttgtagtctagcggcaggtatgcagcttttgatgatgcttcagcaagtggaactgttgttgtccgtggacagtacgatgactctggatcacctcgaaccccgaaatctagactagggattcaagagagaacttcgagtgcatcagaagatagcaacgcaaatctcgcggaggtttatatatcccctttaatcattttattatctttaagggttatctcgttgaattgccttcattcttcaatatatctttatattgctttagatatcttctgttcatctggatttatcatcggattcttacacttgaatttaattcataattcaggcaaaattagcacttgaagcaggtttcagaagagggaatgctagggaaagacttggtaatgggaaggttaacaaaagaagagagcaagcaacagataattctgattacttgaggttagtgtgtttatgtatactaaggcttctgctggtcacaaggagttgtctggttatttctgacatgaaagctgttaccttgcagaaattcccgcgatcattctgataaacaaagaccagtcatgagatcacaacaagtgagtgatgatgaagaagatgactccaaattggcatcattgtctgcatcattgtcactattgctatacccatcctaaaagaggtaagctataaactacgctcacattttccatcttacttctctcaatgagttatgagtcatcttcaatttagagaaaaaaaagtttcggtcttgagttagaagctgcaaataatgtaggctgttgggggtgacgactcaaaaggaactgttggacatagagtttcgagatccttagttaaaatggaacgcgaaaagcctggttcttctgaagcttttattgccaaactgatcgaacagttgggaaggtaagtgtaactataaaagaacatatacacacacttgtgtatacagtatcagtctgttttatattggcaatactgggtttgatctaatgaacctcgaaaatggtcatacagtacaaaggaagtgtcagtgaaagaagtgcaagacatggcgatccgtgtgttcgctaagacaatgaacaatgatgcagagaacaaaagaaagcaagctagcaaagaatttagttctaatgcaaactttagtccacttgcaagattcttattctcaaggtttgactgatgtgattagcattaaacatttctcctgaaacgaaaactgagtaataacttacaatgtttatttaattttctgtgttttgcagatggctaggtcaaacatcgcgtgatcttaaccaaagttgagaaacgcacagaagacagaacataagaatgttgtttgtgtgtctcttacattgatttgatgcattgaattttggtatttatgtgtataatttttcttcagaaaaagggtgtatttataaaattttaagttttcttattttttaattggcattttctacctt

SEQ ID NO: 139553 - DNA, 1871 bp, Arabidopsis thaliana landsberg
ccacaatgttttctcaggttgcttcttatgagttcacgactttgacatgcattcctggtgttatcacatatcgtggagctaaaatccaggtatggtatctacatctatgcgtctgtgttaatctgttatttgtgggggaaaaatgataattcttggatagtgtttcctctgtcttggtaattgttgaaacacaatgaaatccttggctacatatgccatgtcctagcttgtaattatcttttctcgagtcttacttctatattaaacatgtatcttgcttgatcttttaatgacttcttggtacttagtttaagtcaggaaacgacctgtaattattcattggacactgatgctaatactcttttttatgtccccttctatgtgtttgcagttattagatcttcctggtattattgagggtgctaaagatggaaaaggtagaggaagacaggtaagtcgagtctaaatctcttgagtattttatattttgaccctctttgatcatctttcacactttactatttccaggttataagtacggctaggacatgcaactgcatcttaatagttcttgatgccataaaaccaattactcacaagcgtctcattgaaaaagagctcgaaggattcggaataaggtatagattgtttatataacaacctttatacactgtatatttgatcgtttctggtagatagtctgactcgatcatggactgttgctatgtaggttgaacaaggagccaccaaatttaacatttaggaaaaaagacaaaggtggtatcaatctaacttctacagtcgctgtcacacaccttgaccttgacaccgtcaaggcgatttgcggtgagtacaggatgcacaatgctgacatcaccctgcgctacgatgcaaccgctgatgacctcattgatgtcatcgagggcagtcggatttatatgccctgtatctatgctgtcaacaagatcgattcaatcacacttgaggaacttgaaattttggacaaacttcctcattactgtcctgtcaggtaaatgttgttaaattaccggcaggatttgcgataaacttgtttacttttgccattaagatataaatttatttatcttgcagtgcgcatctggagtggaatcttgatggacttctggacaagatatgggaatacttggatctaactcgaatctacacaaaaccaaaggcaatgaatccggattatgatgatcccgtaatcttatcatccaagaagagaacagtagaggacttctgcatccggattcacaaagacatgcttaaacaattcaagtagtaagtaattaaaatccttaacatttttcttttctctgttatatggttcttgctcaaaagcatcgctcatgaatacttaactaatgatctcctgatacagcgctctggtttggggttcaagtgccaaacacaagccacaaagagttggaaaggttagttcttctagcaaatcaaacaaaagttaatctggtaaatcgatattgcaatatccctgactaactaactattgctgtctcgacatcgtattttatccttcaggaacacgagcttgaggacgaggatgttgttcagatcgttaaaaagatatgatttttgcagataatggagagcagtcaagagaccaaccaaagtagccataatgagatctcctataggaaggtcaggatttcttttggtttctcagctttatctttcttttgtaattgtattattatatccagacgaaatctgtgtctacacccttttttatgtcttattagatacttttgtcttcttccaataatactattaagcatgtgattgatgttgtcggaacacctcctattatctccagtatgggtttgcct

SEQ ID NO: 139554 - DNA, 1084 bp, Arabidopsis thaliana landsberg
  unsure (1)..(1084): unsure at all n locations
gaagagtggatnggaggagcgaagacgctacggcgacattgatcgaagcttggggagatcgatacgtcaatctcaaccggggaaatctccggcaaaacgattggaaagaagtcgccgacgccgtcaattcaagccacgggaatggccggccaaagaccgatgtacagtgcaaaaaccggatcgatacgttgaagaagaagtacaaaactgaaaaggcgaaacctttatcgaattggtgcttctttgatagactcgatttcttaatcggtccggttatgaagaaatcgtccggtgctgttgttaaatcggcgttgatgaaccctaatttgaatcctactggatctaaatcaactggtagctctctcgatgacgatgatgatgatgatgatgacgacgaagaagatgatgatgatgcgggtgattggggatttgtggtgaggaagcatcgtaaagttgaagatgtagattcgagtgaaggatcagcctttagggagctagcgagatcgattctgaagttaggggaagcgtttgagagaatcgaggggaagaagcaacagatgatgattgaattggagaaacagagaatggaagttgcaaaggagcttgagttacaacgaatgaatatgttgatggagatgcaattggagcttgagaaatctaaacttgggaaacgaagagctgcttcaggtaaagttttcatttttatgtgtgttttgttgtgattgatgagtttactgaaacttcagttgtgctttgtttgttgtataggtaagaagaagtaggattgtagattgtggaggagttactgatgtgaagcaaggagcaatggttggatctaaagctcatacgatttggagaagatgttattattattgatctttaggttttcttaagttatagcgcgatgctttttttcttcttcttctttttcattctcttttttagcattgtagagttacattggtagtagcaatgcgaattaccaaaagaactctcatagtatctgacatatcaagatgtacttttgtgaagtatcaatgtatgatggtttgtgtatcagtgtctgcagttccaaattgtgctc

SEQ ID NO: 139555 - DNA, 3218 bp, Arabidopsis thaliana landsberg
  unsure (1)..(3218): unsure at all n locations
aaagtattaaaactaatcatgcacataattgattctgtttttctgtgtcttactatctattggtctttgacaactctaacacaatcacgtgaacaaatcctatttcattaactaatcaatgggatccaaagacagctaattagatatttcattaccaaccaaatgcataatcatttcaatcatttgaataatcgaacgcgtttttatgttaaataattttctatcgaagatgtggccgtctctgataaaaaagacaaaggaaggaggcatcgatgtgatccaaacgtacgttttctggaacctccatgagcctaagcttggacaggtccgttccatttatgatttctcaatatgaattttaaaatttttcattttcttcatatggtaggaaaattatagaatatataattacttccaataaaatgaatattgcagtatgattttagtggaagaaacgatgacttgaagaatattgatgaagttctatcacaacgtctgtatgtctgtctgcgtattggactctttatcgaagccgagtggaattacgggtactaatcaactgaccaaaattattgtttgtcaacgtatatttaacattgaaatgattttgacgaccggtttgattaaccaggggattgccattttggttacgggacgtacccggtatggtataccgaaccgacaatgagcccttcaagttccacatgcaaaaattcaccgctaagatcgtagatttgatgaaatctgagggcttatatnnnnnnnnnnnnnnnnnnnnnnnnnnnnnnnnnnnntttaatcttttcaatcttattcgtcaaattcaatgtcaccaaaccgaaccaaatcctttgcattaaatacattaaccggatcattgcttagacaaataagtttcttatttgggttcttttgtaagatcgagaacgagtatgcaaacgtggagggggctttccatgagaaaggagcatcgtacatcaagtgggcaggtcaaatggcggtcgggcttaagaccggagtgccatggatcatgtgcaagtcgcccgacgctcctgatcccgtggttcgtaccggttacttatctaagatcaatcatcaatgactcaatgcttcttatacttcttagagatcgaatattttcatctgtagatcaatacctgcaacgggatgaaatgcggcgagacttttcctggaccaaactcacccaataagccgaaaatgtggactgaggattggacttcattgtaagggttttacttgattgtctatttcgataggtttcttgtttaaaaagttaactatgtttattttatttttttgtgatgaaaaagctttcaggtttatggaaaagagccttatattagatctgctgaggatattgctttccatgccgctcttttcgttgcaaaaaatggaagttacatcaactattacatggtaaataacaacatctttatcaaatattagtcgcattatatgatcatcaataactcaccaccttgtttcaatacagtaccatggtggaacaaactttggaaggacttcatcttcgtatttcattacaggatactatgatcaagctcctctcgacgaatacggtttggtctaaatgcatgttctctgtttgaaagaacctgataatttgattctgattttgttttgtgtgtttcaggtcttttaagacagcctaagtacggtcatttgaaggagcttcacgctgcgataaaatcctctgcaaatcctctgcttaaggaaagcaaacgattctctccttgggaccaatgcaacaagcttttgtctttgaagacgcgaacaatggatgcgtggcgttgtgtggtaaacaatgacgctaaagccagtcaaatacaattcagaaacaatgcgtatagcttgagtcccaagtcaattggtattcttcagaactgcaaaaacctaatttatgaaactgcaaaagtaagtctttttgcgaccttacagatcatactaatagtaatcaacaactattcaagcattttaaccgcttaattaataaaggtgaatgtgaagatgaatacgagagttacaacgccggttcannnnnnnnnnnnnnnnnnnnnnnggaatttgtttagagaaacaatccctgcattcccaggcacatctttgaagacaaatgctttgttggaacacactaatttgacaaaggacaaaactgattatctttggtacacttcaaggtaaaatattatagacattacacattacatttctaatgttcatttatcttttctaacgcaagtttggctcttccaatgtaagctttaagctggattcaccctgcacgaacccgtctatctacacagaatcatcaggacatgttgtccacgtgttcgtcaacaatgcactagcaggtacataagtattgagagtaacaacggggaagaaaaatgtgttcacaaactctgcttcggtgttgattttgacggtccattgcacttagtttgcaagatacacatactttactctctagtatagcttaactaccaaataattcaatattcatatttatgaacatattaaaagcgtgttgttgtaggatctggacatggaagcagagacataagggtagttaaactacaagctccggttagcttaatcaatggacaaaacaatatatcgatcctcagcggcatggttggtctaccggtaagacgtttactgatactagaaccctgtttattaagtgagtagatagaatcataacatttttttcaaccttaataataaaaggactctggagcttacatggagaggagatcttatggactaaccaaagtacaaattagctgtggcgggacaaaacccatcgatttgagtagatctcaatggggttactcggtaatatgatgaataagcctttcattttatgagtgatggaagattgtgttgatacataacctagtatgtatatgtgttgtgaaggtgggtttgcttggagagaaagttaggttatatcaatggaagaatttaaatagagtgaagtggagtatgaataaagctggactaattaagaaccgccccctcgcttggtacaaggtatgcctatttacatatgtaaataagtactatatgtgtaatttatgaatagtatcggtgacgaatgtgaatatgcagacaacgtttgatgggccgaatggagatgggcccgtgggcctacacatgtcaagtatgggtaaagg

SEQ ID NO: 139556 - DNA, 1688 bp, Arabidopsis thaliana landsberg
cacatatccccgaatattctccctgtatcaaacaaacctcagcctattcctatatttaccattctaccctttcccaagtaaaatccgaataaatctaaacatcaagaagattcggttttaggtacgcgacggcccgacctcgattagacaccaatcctctttctctgccctttaaaacttccaacttaaaaacgtcaaagttttatcctttctctctcattttagatccaaaactcttctctgtctctctcaagatttatgttttcgtaactgtaactcatagcaaaaacgagtctaagatctgttcataatgatgatgtttaagagcggtgacatggattacatccagaaaatgaagagatgtcacgaatatgtagaagctctagaagaagaacaaaaaaagattcaagtctttcaacgtgagctccctttatgtttagaacttgtaacccaaggtaatgttattacacatcctcttttgatatatatattcttcgttttcacgatcgcttccagtttcttaattgtttacatatcattcttgtagctatcgagtcatgtcggaaggagttatcggaatcttcagaacatgttggcggccagtcagaatgttctgagcggacaactagtgaatgcggcggtgccgtgtttgaagagtttatgccaatcaagtggagttctgcttcatctgatgaaaccgataaagatgaagaagctgagaaaactgagatgatgaccaatgaaaataacgatggtgataagaagaaatcggattggcttagatctgttcaattatggaaccaatcaccagatccacaacctaataataagaaaccgatggtaattgaagtcaaacgcagcgctggtgcgtttcaaccgtttcaaaaggagaaacctaaggctgcagattctcaaccactttattaaagcaattactccgacgtcgacgacgacaactagttccacggcggaaaccgtcgggggtggaaatgagtttgaggagcagaaacaatctcattcgaataggaagcaaagacgttgctggtcaccggagttacaccgcagattcttgcacgcgcttcaacaacttggtggatcacatggtaaatatattaaatcctttgattgtttgagaatcataattttacgagaagtatatatttaatttttgttcattgtcaaatatgcagttgctacgcctaagcagattagagatcttatgaaggtcgatggtttaactaatgacgaagttaaaagtcatttacaggtaacaaaacataatcattttatgttctcactacaacatagattcatagttctataatttttatcaactttcttgatttttatagaaatatagattgcatacaagaagaccagctactccggtagtaaggaccggtggtgaaaatccacaacaacggcagtttatggtgatggaaggcatttgggtaccttcacacgatacaactaataatagagtttacgctcctgtggcgacacaaccgccgcaatcttcaacgtcgggagagagaagcaatcggggttgcaaatctcccgcaacatcttctactactacacacacaccacaccttcttcctctttcataaatatatagttaccgatttgtatgaaaatttgttttcttctttatatatttgttttgtaaccacagaatgttcgttcta

SEQ ID NO: 139557 - DNA, 5396 bp, Arabidopsis thaliana landsberg
  unsure (1)..(5396): unsure at all n locations
gacctttacaagatgggaagtgttctttggtctctctgttttagccttgacaatgcctttctcagctggagttactaatctacgagatggtaataatctttctctgcaaagttttttttatttggattttgctttgactctccttcttttggtttagtgaacactctagattttttttagacttgtgtctagtgaaaatgacttacatcagttttagggtaaactaggtaagcaatatagctgtttgggaagctccagattggcaaagttctatgattttgaggctacctcaaaaaccctaaaaagtttaggtttttgacacataagctcttgttagggttttagttcaagaccaagaaatttgttcttattgttcttcattaaatggttatcataagaaagattctttaatctctagaaattttactttttgatgtgtttgtctgttgtttaataacttctgcagtttcggcgattaataacttgtatatcactttgggagcaccatctctacatcattggcttgcttttggaggagacccttgtggagaaaagtggcaaggtgtggtgtgtgactcctcaaacatcacagaaatgtatacttcctcttctgctcttgtaactctttgttatggtttgctttgagtcaccaattcaggttctaaccacgtgaattattgttgttggctgcagaaagatacctggcatgaaggtaggtggaggcttaagtgatactctggctgatttttcatctatccaagtcatgtaagcaaagcttcntgtcttgttttctttcatcttcatcttttgtatgaggcttcttgctatgtgaagaacatgcaagatgttgttaccattgactataaggtttggttataatcttaaattgctttgtgatactttttctctcttctttgtttgagtggacagggacttcagtagcaatcatatttcagggacaattccgcaggctttgccttcttccatccgaaacctgtgcgtttgagaattgactatgtgtatggcaatacttatgtttccaacagttaaaagacacttcatgtttggtttcattttcttgtttcagatctctctcaagcaatcgcttcactgggaacattccctttacattgtcctttctatccgatttgtctgaactgtaagtctttattaatgtagataccgtttcttgcatctgcggtttttcctctgtttgaagcagactctttcttttcccttcaggtcattgggaagcaatcttctatcaggagagataccagattactttcagcagctatcaaaactgacaaaactgtatatttcctcctcactaagtctcattttgtatcctcccatcagcgtctttcatttatacattaagtttctaatgcagggacttatcgtctaacatactggaggggcatttaccttcttccatgggagacttagcttctcttaagatattgtaagtgcacatatatgaaaccgtatacaaacattgttatcattgcttttatatgtgatgtggtcggactgtaggtatttgcaggacaacaagctcacaggaacacttgatgttatagaggatcttttcttaaccgatttgtaatcgtttttcaccttgcatactctttgttcttgactctccaaccattaagccaacttcagtatctcactatggcttttcatatttttgattcaggaatgtagaaaacaacttattctcgggacctataccgccaaatctattgaaaattccaaacttcaagtaagtattactaaaagaaaacttgaatgttttttttttccttttctttagccattcatgttacattgtcattataaccgcagaaaagatggaactccgttcaatacatcgattataacaccaccgcctccgcctgtggttgatcctcctcccgctactcaccgtgctcctcctgttccccgtatccctcctgtttctggtgttcccccagcaccttttgctccttttgctccactgcaaccacaacaacatccaccaccatcaccacctctggtctggtcaccaccttcttctgataatggaggaggagatccctggaactctgtgtcagggcaacctaccttgcaaatatcacctccttcaggttcaggatcaggaaaattctggtccactcaaagaatcattctagtagtttcttcagtggccataattgttcttgtatccggtttgtgtgttacactttggagatgttgcagaagtaaaatatataaccgatattacagtggagctcgtaaagatttacaacgaccatacttcaataagcctccatctcaaccaacccccactatgggaaaaggtacactgattcttttccttccaagaaaagaaaagaaacttgtgctttggctcattacctaacggcaaactgctgtggtgttttcttttgttgcagtttctcgggagcctatggttaagcctttcgatggatatggagctggagacaggaaatatgggtatccaatgccacagcgggctgaagagagccggagagcaatgcctcctacttcatattataataaggatgttaatacacctcaaaagccgctgcaacaaccaccgaggcagttccagtccaatgatactgcttcaaagagagcggctcatttccccccgggcttgaattcctcatcttctgctactgttttcaccattgcttcacttcagcaatacacaaataatttctcagaagagaatataatcggggaagggtcgattggtaatgtctacagagctgagcttcgtcatggaaaggtgtgacactttcctcttatttgtcatttggtcttacagtattttatgctgtgcattcttatttacgtcttgacacgttgtgatctatagtttcttgcggtgaagaagctgagcaataccatcaacagaacacagagtgacggcgaattcctcaatctagtctccaatgtgttgaagcttaaacgcggtcatatattggagcttcttggttactgtaacgagtttggtcaaaggctacttgtgtatgagtactgtcctaatggatcacttcaagatgcactacatttggatcgcaagttgcacaagaagctcacttggaatgtacgtataaatattgcattaggagcttcaaaggcattgcagtaagttaaagaacctcaacatgttacgccaatctatatttggaacatataggatcttagagtttggtttcaggtttcttcatgaggtatgtcaaccgccggttgttcaccagaatttcaagtcttccaaggttcttcttgatggaaagctctcagtacgtgttgcagacagcggtttggcttatatgttaccaccacgcccaacgagtcaggtaaatttgtcatcttattttgaagatcccaaacataagagtgagtgttgtaaaggatatgatgtttgcttataaaattgtagatggcgggttatgccgctcctgaggttgattatggaagctacacttgtcagagcgacgtatttagccttggggttgtaatgttagaactgctcactggacgcagaccatttgacaggttagctactctaaagagacaactaatagaagccataaaagagtctgaactcaaaagtcaacatgttcacttatgtttcttatgcaaaatcactgtactacactatctcaagacaaaaccctgtttttttttgcaggacaaggccgaggggacatcaaacactagctcagtgggcgattcctcggcttcatgacatcgatgcgttgacaagaatggttgatccgtcattacacggagcgtatccaatgaaatcattgtcacgttttgcagatatcatatcacgttcactgcaggtaaacttaacttcattcatcacttaactagatgagaaagcaatgtcaaacacgtgacatcagaatattaactaacccttttgacttctgtgcatgcttatctttgtctgtagatggaaccaggatttagaccgccgatatcagaaatagtccaagatcttcaacatatgatctaagatacacaaccttggactaagacgcagaagcaatagtttattgtcagattcttgttctttgtcctttgatgaatgaaagtatttcttttgtattataataacactttatgtatgttgctggctgtatgaaatgagctatgggatcatcattatgtaaccccaatcccattaccggctcaaacattattcaccaacctgatcatgtatttagattctattttctgaaaaggataaacattttttgaatcaaaagacattaaaattcaagaacaaaaggttgtacttaacagtagtgtaaaagagaaggtaacttgttcaactagcactgtagacaacaaaacctaaacttcaaatcaatctgctccacagagggcatgtgattgatgctttagagtcgtttctctgaaagaaagctcccgaaagccgtagtcaaggcagtggatgtcacgaatgaggctcttagtaaacctatggcctggattagtgtcagattcaaaaaaaaatatcaggaaagaatagtaatatagatatacatgtgttttgccaatgttgatttcatgctcaaaaatatcgtccaagttcacatcaaacttcttctttccgcaaatagtaagatcatctgagacaatgtatgttgcccctctcttaactaacccattgctaccatgaggtgtcgactgagaactaccgtcactgtttaaataactgaccccaagcaacggtttctgcaaactatattgccaaggaagcatacatgtgttagtagatgcatctgtgcctcccctagagctcaagtccttcaagcttctacaaaagttgccaatgcatactaggtcgatattgcttccagtgatttcccatacagactccaaagggatagcaaggaaaatgaaaagtagatccacaaaaagtcgtgtccgctttcagcgtcaagaaccttcatgtcctggttcctagcaaacagagtgagtccctgcttcacctccatcttgcgcgggtagctttggcatgtcatgccaacgtgtcataccacaagagctatgcttcttcatcatcatcaaattgtggaatctctgatctatttatgccattacgttttcgcactctccgatctatttatgaaatttttgaatccaggttctatctctgcttcattgcttgctctcttcggaaactcctttcactgatgtctttttgaaattgggccatctaatttttttgcatataggatgatcactacttgccttaattgctcaaatggctatagacaatgtatattcttactgatggaaaaatataaacgagaattagatgagggatctagagaattatgggggtgttaaatagcaagcta

SEQ ID NO: 139558 - DNA, 497 bp, Arabidopsis thaliana landsberg
aaccaaagatctctcttcaaagcttccaccatgtttctccgatcactcaatctctgtacaatactactcttcctagcgatttcatcacaagtttctcaatctctccacttcgaattgcaatctggtcgaacaaaatgtatatcggaagacataaaaagcaattcaatgaccgtcgggaagtacaccgtcgttaaccctaacgaagctcatccttctcctcaatctcacaagatctccatcagagtactactctcttaaaaatccgagattttcataactttgattattattgattgttgatttgaaaacatgaatttacgcaggtgacatcgagttacgggaacacgtatcatcacgcggaagatgtagaatcgggacaattcgcgttcacggcggtggagtctggagattacatggcttgttacacagctgttgatcataaacctgaggttacattgagtattgatttcgattggagaactggtgttcaatctaaa

SEQ ID NO: 139559 - DNA, 4045 bp, Arabidopsis thaliana landsberg
  unsure (1)..(4045): unsure at all n locations
ttcgtctgaatttacttgaaagcagaggcttatccatggattacgaatctctctgtcttcccaattaaccaaagtagtgatttttcttaaagagtaagaaaaaacccaggtcaattcgatcttcttctccgtgcgagagaaattttcattacaagaagaaacaagacaagaattcgagtttttcttatcgggtcgggtcagatccagatagaaccgggtcttcgtattgccacgtgtgaaacggttgaggatattttcacccactatataattggttgttataagtacgtaagctaaaaagagattcacgagggaaataattgcgcgttttggtccagtgtttaaggagagagagcaggtatatgaaaataacacttacacatggatgcttttaagtcctatcacatgcggcatatcggcaacaaaatctttttcatgttcgttcatttccaagttattcaatatgaacgattccaaaattttgtcgttgatttgattatagttgacctggaaaagatactatgatactaacgaacatcatctctgttggtctagtacatgtatttaggagtggacacaaaatggattttttttgacttttttggtgctctgtccggattcaacatatatctagttttgtgtatcattttgattcattatggaataattggttacaagttacaacttcataatgaacaatttattataagacgtcgtcgactctactgatctcacctcacgtatgattaagcacaatattggtgtatgtttcttttttctagtgttgagatgtctttcatacaaatcccatgaatatgcatgtctcttgttctctcaatctctgctaacacaatttacgacctctatgttatattaccataaaaacattacaagagaaagaagaaaaatttaattagttttcaaattaataaaaatttagacgttttaagaaaataataataatttacaggtcataaaaaaactgattgaagaaaatatatttccagctctaaaacccaattcctaaatctatattcatttagaaaatatatatacatttggtatttaatattcttaaatggagtaagataataaatttatattgtaatattaaataccaaatatatatattttggtgtctttttaattaataaaaaaataacaaagacacttattctaaattaagaagagtcaattaacgaaataataaggaatgaaattctcaattatgaaaaacacctgtcacgaaagtagacgggaaaaaaatcgcacgatagataattgcatcggtgctcagtgctctgtttatctcgttatataataatgttagagaaattggatgtgaatgcaatggggcggtttaatgtgaattgatgagtagacacaacaagagtttggtttggtaatggtagcaacaagccaagagcactaactaccgacaaccactcgcgtccacatttgaattttcctcaattccaccactcacgctttttagctctttctcaatctttcatggcggattatctctctctctctcacttctccttctcgtgtgattctgattctcctctctaagatccgtatctctcttactctcccttctcaagctcacttcaatcaaccatggctgtttcactaccattgtttcaatttatactctttcttcttcttcttcttctttcaagaacggtttatgcatacttaatcggagtcggaagctatgacatcactggtcnnnnnnnnnnnnnnnnnnnnnnnnnnnnnncaaactcagatcaaatcgcttccggtattcatttccggttacgagctcgtgccttcatcgtcgctgagcctcaaggtaaccgcgtcgtgtgtgtcaatctcgacgcttgtatggcttctcaaatcgtaccaatcaaagttcttgagcgtctcaaagcaaggtatgaatatttaattagctaaagatttaatctttgagtagagtgttagtggaatcagtgattaatccatgagaatggatagctaattttttaaaagttcaataggtatggtgagctttacacagagaagaatgtagcaataagtggaattcacactcatgctggaccaggaggatatcttcaatacgtcacatatattgtgacgtctcttggatttgttcgtcaatcttttgacgttgttgttaacggcattgagcaaagcattgtccaagcacacgaaagcctacgtcctggttctgcttttgttaacaaaggtaaagaagttacaatcttttctttgtcaatctcctttattgatgtttttgtgtttgttgagccattttgtgtgatgatttgttaataggggatcttttggatgctggtgtgaatcgaagtccgagttcttatctgaacaatcctgcagctgagaggagtaaatataagtatgatgttgataaggaaatgactcttgttaagtttgttgattctcagttgggacctactggtagttttaactggtttgctactcatgggacttccatgagtcggactaactcgttgattagtggagataacaaaggcgctgcagctcggtttatggaggattggtttgagaatggacagaagaattctgttagctctagaaacatccctcggagagtatcaaccattgtttctgatttcagtagaaaccgtgagtcatatcctttccttgagttacctaatgtagcaattctctacattgcagttgcagagagactgatgtggaaagttatggttttgttttactttgtttcagagagtagacttttggatattgcggctacttataagtcatctagaggacattctgtggataagtcccttgatgttaaaacccgagtaagaaacggttcgaagcgtaaatttgtctctgccttctgtcaatcaaactgtggtgatgtgagtccaaatactcttggtaccttttgcattgacactggactgccttgtgatttcaatcacagtacctgcaatggacagaacgagttgtgctatggccgtggtccggggtatgtatatacgtttactgcttcatgatttcttatgttttttctctgcatctaattctatcttttgtacattttgttgtagctaccctgatgaatttgagagtacacgtatcattggagaaaagcaattcaaaatggctgtggaactttttaacaaagctacagagaagctgcaggggaaaattggttaccaacatgcgtatctagatttctcgaatcttgatgtcacagttcctaaagcaggcggtggctctgagacggttaagacatgtccagctgcaatggggtttggttttgctgctggaacaactgatggtccaggtgcttttgatttcaaacaaggagatgatcaggtaattaagcaaaaagcttttcaatacatcctctttttatatctctgtgaatcattctctaatgtgctttcttatgtaaagggtaatgtgttttggagactagtgaggaatgtgttaagaactcctggtccagaacaggtccaatgccaaaaaccaaaacccattttacttgacactggtgagatgaaagaaccatatgactgggcggtgagtagctccattctctgtttccttataactgatccaagatttgacatcttactgttttgactaagagttcattgcatgaattgtgcagccttcaattcttccgattcagatacttcgcattggccaattagtcatcctcagtgttcccggaggtacatcaataagactctctcttccttattcaaaacttcggttttacggtttgcttttgttcagtttttgaatctattattggatccagagttcacaacaatggctggaagacgtctccgtgacgctatcaagtcttttctcatttcttcggaccccaaggaattcagcaacaacatgcatgtcgtaatcgcaggtctcaccaacacctattctcagtacatcgccactttcgaagagtacgaggttcaaagatacgaggtttgtaaaacacactatctttcttgattcagctttggctatatgtcacgctact

SEQ ID NO: 139560 - DNA, 843 bp, Arabidopsis thaliana landsberg
caccatggtttcacatcatatctttctcttcctttttcttccaaatcctccaacattcgttgatcaatggctgaagttatgctaccgaggaagatggagattctcaaccattcttcaaagtttggatcaccggatcctcttcatgttcttgccgtcgacgacagtcacgttgatcgtaaattcatcgagcgtttgctcagagtatcttcttgcaaaggtaattattactcatattttgaaaaatcagtctctgaattcgggcaagttatctgagtaaaaagctctgttttggttgttcagttactgttgttgatagtgcaacaagagctctccaataccttggtttggatgttgaggaaaaatcagtcggttttgaggtataaaacaatttccaagagaaaacaaaattttgccgtagctctcaagcaatatgttaaatcgtgatttgtgcttcaggatttgaaggttaatttaattatgactgattactcaatgcccggtatgactggatatgaactcttgaagaagatcaaagtaagcaaacaaacatataatgatataattagtcaatggaatttgagttttatgtttatctaatccttttttacgtgattttccacaggaatcctcagcttttagagaagtaccggtggtaattatgtcctccgagaacattttgcctcgtattgataggtataaaacttcatcataatcttaagtcaaactatagtaaatttggtgaatatctttgtcttagatgatccaaaacagaattagataaaacaaaaagggaaaaaatcacaaagtaaagttcctgctcatatggttaaaagttaatttcct

SEQ ID NO: 139561 - DNA, 2670 bp, Arabidopsis thaliana landsberg
gtagtggtggtggcattaataatggcgtaagtggaagaaaggaacctagccgttagatcttctcaatcgctacaaacattcattgttcaccgatcgattctctctctttcttcttccccattgctccttccttcgtacccctctctctgtcttttgaggtttccgggtcgggttggtgagaaaactccagcggcttaacggatcttccactggtagttttctgttcctcacaaggaaatcgaaaatttgataaagcgaaagtgaaaaaggcgtgtgttttctttgtaaaggctccaacttttttgatgaacagcttgtgcttgttgtgaaggttgttactttttgtgtattggaatttgggttttttctttatgttctgaggaggagaaaggaggaagctttcttgaattggattcaaatttgagctcatatggtgagtttctagggttttgtttgtgattcctggaagaatctgattccttttctattagggttggagagaagtaaagcagaaaagcttttttgttttggagcttagtgagtgttgtggataaacaatggaagattactccaagtatactcatagtcctgctcatttagctgttgtgcttcgggatcatgctgctcttaggcgaattgtttcggatcttcctcggttagctaaggctggtgaagttactactgaggctgagtctatggagtctgagtctcgtgctgattctgtttcagctgtcattgatcgccgtgatgttcctggtcgtgaaactccattgcatctcgctgttcgtcttagagatcctgtctctgctgagattttgatgtctgctggtgccgattggagtctacagaacgagaatggttggagtgcgttacaagaagcggtttgcacaagagaagaggccatcgctatgataattgctcggcattaccagcctcttgcttgggctaaatggtgtaggagacttcctcggatcattgcgtcagcatctcggatccgtgatttttacatggagatcacttttcattttgagagctcggtcattccgtttattggccgcattgctccttccgatacttacaggatatggaaacgtggttcaaatctccgtgctgatatgactcttgctggttttgatgggtttaaaatccaacggtcagatcaaacatttctctttctaggggatggttactcgtctgaagatggtaaaatgtccctatctccgggctcgttgattgttctttcgcataaggaaaaagaaatgacaaatgctttggaaggagctggtgcgcaaccaacagatgctgaggttgctcatgaagtggctttgatgtctcagactaatatgtatagacctggaatcgatgtaactcaagctgagctggtttctcatttgaattggagacggcaagagagaaccgagatggttgggaattggaaagcaaaagtttacgatatgcttcatgtgatggtgagtgtcaaatctagacgggttcccggtgcaatgactgatgaagagctctttgcggttgatgaagagcgaactgctgtaacaaatggtgcagagaccgacggctttgaagacgtactaacacctgaggaaagactccaattgaattccgcgcttcagactggaaattccgatgccattgaagatgaagagtgtgaagttactgatcaacaggaaaacggagctctcaaggataagaagggctggtttggttggaataagaaaggctcaaacactgaagatacaaagctcaagaaaggctcaaagtctgcgccagaagacgggaaccagaaagggaaaagccagaaatcttcgatggtatctgatcatgcaaatgaggatcatggagacgcaaagaaaggaaaggagaagaagaagaagaagaaaggtgttgccggagatgaggttaagcgtgagagtgaatacaagaaaggcctaagcccggtcttgtggttaacaccggactttcctctaacgacagacgagcttttaccgctccttgacatattagctaacaaggttaaagccgttaggagactcagagagcttctcgcaactaaacttccgctaggcacattccctgtaaaggtataaatctttttcgattcgtaaattgtatgttactgatatgattgaatcactctctagggtttattcttatcggtaatttatgtgcagctcgccattcccattattcctacggttcgagttgttgttactttcaccaaatttgaagaacttcaggcagctgaggaggagttctcaacacctccttctagtccggtatttcatgatgcaaagtcgtcttcttcagagaactcatcaccatcatggatctcatggatgagaagtggcaaatcaagtggcaatgatagtaaccgttacaaagacgaggctgaccctttcttgataccttcagattacaaatggatcgattcagctgagaagaaacgtcgaatgaaagctaagaaagctaagagcaggaggaagaaacaagcggctacagaagccgctggtgctagtgactcgggtacccgttcaaatcatgtagccgaagaatgatgagtccggagtaactgaatcattgccttcaggctctgctttggctggattcaaaaaaaatcactaaatgagccatcattgcggccttgagaaaaggctt

SEQ ID NO: 139562 - DNA, 4048 bp, Arabidopsis thaliana landsberg
acttattcatggaggtcaaggaagagaaactgatggaggagaagcaacgattgccggagaagacgatccctgtgttcaccgttctgaaaaacggcgctattctcaagaatatcttcgttgtgaacagtcgcgatttctcgtcgccggagagaaacggttccactgtaagcgatgatgacggtgaagtagaagagattctcgtcgtcggtcgtcatccagattgtgatattcttcttacgcaccctagcattagcagattccacttagaaatccgctcgatctcttctcgtcagaaactcttcgtcacggatctatcctctggtatgaatcatctctaactcatgtttatattcctctcgcgagattgttgttactgtggaattggatctcgattatatgtgtttctgattgttgattggattgtgttttttcgatttagtgcatgggacttgggttagggatcttagaatcgagccacatggttgtgttgaggttgaagaaggtgatacgattaggattggtggttcaacaaggatctataggcttcactggattccgttgagccgtgcgtatgatttagacaatctgtttgtttcaccacttgatgcgtctacggtgttggagcaagaagaagagaatagaatgcttgaagcagaaaatctagaggtagcacaacatcaggttcgatctttgatgttttctcatatttagctgtccttattttgctttaattctatacttatctgatgttgtttgcttagcctgatagtgtaatctgcctttactgcagtcactagagaatactacatcaggtgatgagggagttctgcatctagatgtcacgtcagaaggaactggatcatcagttcctagtgaggatgaggatacgtatgttacgacaagggagatgtctatgccagttgcgtctccaagtgttttgacgctagttagagattctgtcgagacacaaaagctacaattcaatgaagatttgcagacttcaccaaagtgggacttggatgttatagaatctgtagcagagaagctaagtggcagctttgtccctagtacgcagcagagtggtggcgacgtggagggattaggttgttctgaactttttgatgctgcagaggcggatgaatgtgatgtcagaggagatggaggcttgcatctgaatgtgatatcagaaaagatggagtcatcagtgcctaatatgattgaagcagaaaatctagaggttgcacaacatcaggttcgggcttctctcatatgtttctggcttttagtgtttgagacattgttttaagtccctcgctgcagtgatcatttgttgttagtttagttgtccatattttatttatctgatgttatttgcttagtctgaaagtgtaaactgatttcgatgcagtcactagcgaatactgcattaggtgatgatgaagatctacatctggatgtgacgtcagaaggaactggatcatcagtccctagtgaagatgaggatacatatattacgacaatggagatttcggttccacttgcatctccaaatgttttgacactagctagagattctatcaagacgcaaaagctacaatccactcaagattttcagacaccgacaatgtgggacttagatgttgtagaagctgcagcagagaagccaagtagcagctgcgttctaggtaagaagctgagtggtggctatgtggaagaattaggttgttttgaactttttgttgctgcagaggctgataaatgcgatgtcagaggagatggaagtttacatctgaatgagatatcagagaggatggaatcatcaatgtctaataaggaggaggatccatttctagctgcaaaggagacttcatcgcttccactctcaacagatttcattaatccagaaacactatggctcgtggaagatgttcaggcttcaccagagttttgcacaagtagtgtaaaagccaacgctgaaaatccaagtagtggctgctccccaagtacggagcagattgatggctgctttgaaacctcaggttgttctgcatttgacttggctgcagaggttgagagtcttagccttcatcaagaagtcagtgaagaaactgaatttgtcacaaaggaagtaatgggagtatcttctgaaccactaggtaaagctgatattcggagtcacgaagagaatggagaaagtgaggactcaaggcaagttattgaagtatctgctgaaccagtcgctaaagctgatattcagagtcacgaagagaatggagaaactgagggctcaaggcaagttattgaagtatctcccaagtccttctctgaagctgagccaactatagaaattttaactggagaagcacaaggcatcataggttctgaattccctagtgaacttgcagtagagactgaaagtgagaacctactacatcaaaagagcataggagaaacaaagaatgatattcagagtcacgaagagaatggagaaactgagggctcaaggcaagttattgaagtatctcccaagtccttctctgaagctgagccaactttagaaactgaggattcaaggcagcaagcccgaggcctcgtaggttctgattctgaattccagagtgaagttgccatgaagaccgaatgtgagaacttactaaatcaaaaacgcaatggagaaaccaaggtcagttcaaggcaagccagtccagtatctgattgtttgtccactccaaaagatcgtctttcaagtatcaatacagatgatattcaaagtctctgctcgagttcgcagccaccttccgagagtgaagtgaatcctgccactgaccaggatcaagaatcaggaataatcagtgagactgaaaaacccaaaacagaattgttaattggttctgggagatctgaaaaatattacagcctaagcgaaatagagggtgaagaaaatactgacattggaagactctctaggtgtccgattccttcggccttggctgcaaaaacatctgaggatacaaaattgattgaagaactgtcttcttctgattctggaagtcaagaaaaccagaccccggaaacacatgctgttagagatgatgtattgtgtgatatggatagctcaagtacatgcaacatttggtctaggagggggaaagctgcttctgttcttaagatacggaccaacaagagtcaaggaaagcaaaaacaaactgggagacaaccaaaagacaagttgcatagaaaacaggctctaagtgacaagtctatttctctgactattcatcatggtgcagagattctggaaccagagatctttactcctgacaaggagaacctcaccccaagttctcatatgttgaaaagattacaagatattggtgacgtgaaagatagcaagagctctttaaagctttcaggaaaatcatgctcgtcattggttcattccagtattgctgttcttgcttcagaggcattcacagaaccagaaatctttaccccagataaggagaatcttaccccaagctctcacatgctaaaacgtttgcgagaatttggtgatattaaggatacaaaaggctcctcctctaaagcaacacgtaaaccattctttgatattcgtatggaagaaaacgtgatggtggaacaggaaccagaagatctacacagcctgggcagcaaatctaagctgaagcatgagcctctggcaccaaagaagaaagctgagcgggcgccttttcaacctctacttgaaaaatcttctttccaaagtcagtcatacactgaggcttcttcaactgcatcagcaaggaataatatttctaggggcattcgttcctcttctgtaagtcattatgattttcctctattgagtctttgtgcagttcttatactaacaattagtttactgtgttttagaatctttctgatgcaaagagcaagatgaagtggaccattgttttggatacttcttcactcctcgacaaagagtctaggaagccactgcagttactacaaggtctcaaggggacacatctggtcgtcccaagaactg

SEQ ID NO: 139563 - DNA, 1616 bp, Arabidopsis thaliana landsberg
atgatgaattcggcgtttcgaaacgttcacatcactgcgtctcgtttgataaaccctaagcccttttcttcttcgattctccattttcttcctctctgttctggcgacgcttctcctcgccgttccaatcctctccggcatagaaactcggtgtctccttcatcttcctttcccttctgttcgacttcttccttttcttctttctacattcctatggcgggaggagatggtcaggtgtctcattcgcttgagaagcagttcgagagtttccgtgttcaattagaagaatctgcagctttgagagagcagattcgtgctgtggttatggagattgagtctgctactaggcttattcaagctaatcttcttctcgttcatcaatcgcgtcctattcctggtaaatgattagtctttaggttaaaaattgcatcttttagctaaatgtttgaaatggcttgatgggttcagaacttggtgatgaagttctctatgaagggaagtaactaaaaatgaagaacttgttgagaaaagaatgaatattgaattacacatagcctttgttcttttaagaaattcattggaagtgtttggttgttactaatatagattgctcgttttgttgatggatcagaggttatcgagaaagctaaggaaaaaatcgttgatttgaagcagtattatggtcggcttgctgaaattcttgaggagtgtcctggacaatactataggtaagtttgaaagctatgtgtagttagattttctttatttgcaatggttttttgttaaaaggtttttgtaatgtaggtaccatggagactggagaagtgaaacacaggcagtggtctcccagcttgcttttatgcactggctagaaactggaactcttctcgtgcataccgaagctgaagaaaaacttgggtgtatgtctctggatctcaatttactattttccttacttccaaatactgaaatacatatcatggcctagtggttgcactataaataaaaccttattttgttttgctagttctctcacaaacttttgtatagaaacttccttcccacaataggtaacaactgagctggcagtaggcaatcaatttgaaatccgttcatgactccaacatactatacgtgtaatcctgtgaccctccttttgcctgacctgtctcagttggaaaaactaaatgaacgagttttctacttttctcaataatcagattcagtttgccactagtcttcttctcttatcagtatgttaattagtctaccttttcttgctcgttgttattgattttgtccttaggctttgtttcagtctgcattttatccactgtagtgtcaaccatttagctaagatttgattttttcacctcaatagagttattagttgccgtttcccatgaactcagttattctcccttaggatggatggatgataattggaaggttggtttttcattaccttggtgtagaatagatatttgcccaagtgtcgttttgtttcaaatctgggttttgttatcttgtcaaatcaattgtctttgagtaaaataaacagaacaagttgttggtcaattcatctgccattatggctcttctaattccacttcatt

SEQ ID NO: 139564 - DNA, 5651 bp, Arabidopsis thaliana landsberg
atgatgaagcattcatttaacaaattccttcccaacgacatggactggcgagatctttttgacatggtgagcaaacgtaaatttgtttctgcattttgattgtaaatctgttgtttttcagagagtagtttgcattagactttactgtttttgaattcatgtttccacataggtgatagtttctgcgaggaaaccagagttcttccagatgtcgcaccctctatatgaggttgtgactggagagggtttgatgcgtccatgcttcaaggctgaaacaggtaatttctcattgtttctactgaatttaagctgataactttacggtggagaaagctaaaaaaaatttcctctcactgtttgtctcctataggaggtttgtactcaggaggaagtgctcaaatgatagagagttcactcaacgttcatggagatgagattttgtatgttggtgaccacatctacactgatgtcagcgtatccaaagtccatctcaggtggcgaactgcgctgatttgccgtgaactggaagaagaggtttggataaattatactctgaactatatcaatagatgacagaacttgaagggttttcgttcgttgaagtaacataaaaaccctgattttctcttgtttctttgcagtatatggctctaattggcagtcgtggtcaccgagaagagctaatagagcttataaatcaaaaagaggttgttggggatctctttaaccaacttcggcttgctcttcaaagacgaagcaaaggccgtcctgctcaggtttgtttatctccttacaagctctagagtctatcttctctccctgtgtggaacacaatgtgtatgaacagataaatagatagagatttgtgacggaaattgcttataaagatatccgtttctcttttccttctagactctcgctgctaccaacttggatgatcaagaactgacagagaccatgcaaaagcttcttattgtaatgcaaagactagatgacaagattggtctaatgctggaaacagatggcgagctctttaacaaaaggtaaaaagaaaaagacaaacaaatgtagtaagattactcaagattcacagaaagggatatgtctgagccataattcttgggctgttttgcaggtggggcttcctctcacgcgcgggtttgtgggataaaagccacttgatgagacaaatcgaaaagtatttatgcctcttctctgcatttccgagtaactcataagctcaaaccaagctcacatttaaactacacttactttcttcaaaattggtttcaggtatgcggatatatacacatcaagagtctccaacttcctcaactacacacccttcatgtatttccgctcacaagagcaggtaaaaagcttaaatcagattatcagtatagatacaaacgaaatctgaggcagattctaattaaactcactcatgttttttctctcctctgcagtcactggctcacgattctccgcttccagatgcgggtatagaaaactagcggttgtgaccaaagttgaggcaacttgtgtgttgtaatatttttagatgaaaaaactgtggatagaagaaatgtaacaatagaaattcttaagctcaaaagtctactttatgtataaaatgtgtattcttattctctgaattgaagttaaagctggccttggttggtatgttgctgttgtttttatttactgtcttatcttttttaagctttttcaggctgacatcagaggcagattgtgcaaatgactacttttagagaaacattatactttgagattttgtgaattctgatgactgttatatcaaccactagacactagacagtgcagacttctatataaacaatcgattcgttgtgagcacacaattcattacttcaattgcaagagaattaataagaaatctctcaatctctttattattcatatctcgatctttcgcagataacaaatttgtgatattactatacgaaacatctaagacctatgatgcagaaaacgcaccgttttccttacgtcaaagtttgaaacatacggactcttctctgtcgttcttattcgctcttctggattttgtttctccaagcaaaaaaaactccgactttcaacgaaaactcagtgcctcgtccctctctttcaaaaaggtactctttttttatcacccagcttagtttttagtgttcaattttggatcttagggttccgtaattttaagattctcgaaacatctttttgccttgcgttagctgaggattagaatcccaatttgagttggatacctaaaagtcagattcttttttgttgtaaatttgaaggtttttggttatggcgacgaagaaagtgatagctatatgtcagtcaggaggagagtttgtaactaataaagatggctcattagcttattctggtggtgatgcttatgccatagacatcgatcaggacacttgtatgagcgatttcaaatccgaattagctgaaaatttcgggtttagttgggagaatatgacactcaagtacttcctccctggaaacaagaaaaccttaattactatctctaaggataaagatttccaacgcatggttagcttttccgcagacgcaccaaatgtcgaaatcttcgtcttacccgaagaagccgaagcaaggaatgtctccaacatgccagctagtaggtgtgtgttctagttctaagacctaacggtttatcgacattgtttatgattgtaatgactgatgtgtggatttctgtatttgacagatcaagtaggacaactgcatcagaagcagtggtacctgtagtgtctgcaggagatattgttgtgggagatgatatgatagcaaatgattttcagattgaaatgggtataatgcctgaagaaagcagccctttgccgtgtaattttgttttgactgatgagaaacaacatataaaagctgcacagcagtgggaaaacgctattacgggtgttgatcaaaggttcaatagctttactgagttccgagatgcgttgcacaagtactcgatcgcacatgggtttacttacaagtacaagaagaacgatagccatcgtgtttcagtcaaatgcaaagctcaaggttgtccatggcgtatcactgcatcgaggctttcgactacgcagctgatttgcattaagaaaatgaatacgaggcacacgtgtgagagagcggttgtgaaagctggttaccgtgcaagtagaggttgggttggaagtatcataaaggagaagttgaaagcttttccagattacaaaccgaaggatattgcagaggatatcaaaagagagtatgggattcaactgaattactcgcaggcatggagagctaaagagattgctagagagcagcttcaaggttcttataaaaaggcatatagtcaacttccttctttctgcgagaagatcagggagacaaatcctggaagtattgccattttcatgacaaaagaagattcgagtttccatcggcttttcatatcgttctatgcatcaatatctgggtttagacaaggttgtcgtcctctccttttccttgacaccgccgacttaaactctaagtaccaaggggttatgcttgttgctacagctcctgatgccgaagatggaatatttccagtagcttttgcagttgtggatgctgagacagaagataactgggtttggtttttggagcacctcaaattggcactggccgatccccggacaatcacatttgttgcagattttcaaaacggtctgaagactgcattacctctggtatttgaaaagcaacaccatcatgcctattgtctgcgccacctcgctgagaaattaaacatggacttgcaggctcagttttctcatgaagcaagacggtttatactcaatgatttctatgctgctgcttatgcgacacaacctgatgcatattaccgttccttggaaaatataaaaagcatttcccctgatgcttatacttgggttatcgaaagtgaaccacaccattgggcaaatgcgctgttccaaggagagagatataacaggatgaactcaaactttgggaaagatttctacagctgggtttctgaagcacatgagtttcccattacccaaatgattgacgaatttcgagcaaagatgatgcaatctatttataccaggcaggttgaatcccgggaatgggtcacaactctaacaccatctaacgaagagaagctacagaaagaaatagaacttgcgcaattacttcaggtttcatcgccagaagggagcttattccaggttaatggaggagaatcttcggtcagtatagttgatatcaatcagtgtgattgtgactgcaagacctggcggctaactgggttaccttgtagccatgcaattgccgtgattggatgcatagagaaaagcccgtatgagtattgctctacgtacttaacagttgagagtcaccggttaatgtatgcagagtcgattcaacctgtcccaaacatggacaggatgatgctggatgatccgccggaggggttagtttgcgtgactcctccacccacaaggaggacaccgggaagaccaaagataaagaaggttgagccgttggacatgatgaaacgtcagctacagtgtagcaagtgcaagggactaggacataacaagaaaacatgcaaagctacttagttgttaggatgttttggttagtttaaagtagtagatgattttggatctcttctcttcttgtgtgatgaagaataaagatctcgttcgttttcagatcaaagcgagcttttttttcttcgcagaacttgttggttgatgtatgacattcacattcgaactttttgatctatgaaattggtttaagaattaataaatgtaacttacaatcctatcccataatcatagtaaaaattacgaaaatgccaccgtttcattactccttttggcggctttaactcttctccctctcagagagttcggaaactctcagcagaaaaaccctaaaattcttaagcttcgtttacacacacatacagagactgtatctgtacattcgcatcgttttgtaaaaatggaggtatcttctgtgaaaaagcttgagcagctggagtactctttagagtcagtcactgatctctcttcgtcttccgtttcgtcgtcctctccagctgtagctacgttttcctacgttgatggagtcacggagctccgatttctgcaatcggattcgacccattgtttcaattttgatctcgcttccgctcaggtgaatgtcgattcacatgcttatgttactgttccgctggttcttatcggttttgattattttttcccatctcgtttaaaacgtttgtttttgctacatgaagatgacgaaactctgttatttttctgtaactaatctgagattgaagatggttttcatactaatttttacaattgacgatatattttaattctgaaagtttgaattttggtaaaacttgttttgcttatgttttataatcttattgggtcttgttgtatctgagaatgcgtgcattgatcgtattatatctttgtcaatgtttttcccctcagttattcaagttggggccagtccatttcatctgtgtatctgatggttcaagttcttcaaaggag

SEQ ID NO: 139565 - DNA, 3856 bp, Arabidopsis thaliana landsberg
cggtggctttcttctacgtggctctccgatctctcttgctcttcatcgtccgtcatagaaccttcttcatctcttcccgctccaatccaatggctaagattcattctactctctccttgcccacaacgacttctctcctccaccgtcgatgtcctcttcctcctcatcctcttcttcttcgctatccaaaaactctgttcttcatcgtcttcaagaaccaacggtgaagctgacatcactaaacctctactcggaagaagaacacgaaccagaacaaccggtttgttcaaaacgacagtcgtggtaaccattgtcctgtcgtattgctctctcgtgctctgcgtttcggcttttttcaccactcggacgaaattaaagctcgttgatactctgttttggctaatccacgccgatgctaacgtcgtcatcgccgttttagttctccacctaaaaagattcgcatctccgtctcatccgttaacgttacgaatctactgggttttcaatttcgtcgtcacaactctcttcaccgtctccggaattctccatcttctctccgacgatcccgccgccgcgagtctaagagcagacgacgtcgcttcgttcatctccttccctttaaccgccgttctactcctcgtctccatcaaaggatccaccggagttgtagtaaccaccagcaacgtcacagctccggcgaaatcaaacgacgtcgttgtagagaaatccgaaaacgtttcactatacgcatcagcatcgtttatatcgaaaactttctggttatggatgaatccgttactaagaaaaggctacaaatctccattaaacctcgaccaagttccgactctatcaccggagcacagagcagagaagctcgcgacgctcttcgaatcgaaatggcccaaacctcaagagaactcgagaaaccccgtccgtacaactctaatcagatgtttctggaaagagatcgcattcacggcggttctagccatcatccgtctcagtgtcatctacgtcggaccagttctcatccaaagcttcgtcgatttcacttccggcaaaagatcatcgccgtcacagggttactacctcgttcttatcctcctaatagccaaattcgtcgaagtgttatctactcatcagttcaatttcaattcacagaagctagggatgcttataagatccactctcataacagctctctacaagaaaggtttaaagctaaccggctctgctcgtcagaatcacggcgttggtcaaatcgttaattacatggccgttgatgctcagcaactttctgatatgatgcttcagctacacgcaatctggctcatgccgttgcaagtagctgtggctattgtgcttctttataacactcttggaccttctgtggtcactactgttatcggtttaaccggaatcttcgtgtttattctcttgggaacgaaacgaaacaataggtatcaattcagtttgatgatgaatcgtgattcacggatgaaagcaactaatgagatgcttaattacatgagagtgatcaagtttcaagcttgggaagatcatttcaacgagaggattctcaagtttagagaaatggagtttggttggctatctaagtttctttattcgattgccggtaacattatcgtgctttggagcacaccggtgttgatctcggcgctaactttcacaaccgtggttttcttgggtgtcaagcttgatgcaggaacggttttcaccacaacgacgattttcaagattcttcaagaaccgataaggacgtttccgcagtctatgatctctctttcgcaggctatgatctctctcggaagactcgatgcttacatgatgagcagggagctatcggaagagactgtggaaaggagtcaagggtgtgatgggaatgtcgctgtggagatcaaagatggaagctttagttgggatgatgaagatgacgagcctgcaattgaaaacatcaactttgaagttaagaaaggagagctcgctgcgattgttgggaccgttggttcagggaagtcttcattgttagcttcagttcttggcgaaatgcacaaactttcaggcaaggttcgggtttgtgggacaactgcttatgtagcgcaaacttcgtggattcaaaatggaacggttcaagacaatatcttgtttggtcttcctatgaatagaagcaagtacaatgaagttctcaaggtttgttgtttagaaaaagatatgcagattatggagtttggagaccagactgagatcggagaacgcggaattaaccttagtggagggcagaagcagaggatacaacttgcgcgagcggtttatcaggaatcagatgtgtatttacttgatgatgtctttagcgcggtggatgctcataccggttcagacatattcaaggtgagcacttaaattatcagttaagttcatcaaagtcaaaagctgaatcttgtttctttgtgattatgtttctgcagaaatgtgtaaggggagcattaaaaggaaagactatcttgctagtaactcatcaagtagacttccttcacaacgttgatcgcatcttggtacggttagatggaagtaaagattaaaacttgttgagtggtttgctaatgagtggttccattttacaggttatgcgagatggaatgattgtgcagtcaggaaaatacgacgaattagtgagctcggggttagactttggggaattggtagcagcgcacgagacatcaatggagctagttgaagctggctcggcatcagccactgcagcaaatgtgccaatggcatcaccaataacacagagaagtatttcaatagagtctccccgtcaaccaaaatcaccaaaagtacatagaactacttcaatggagtctccaagagtacttagaactacttcgatggagtctcctcgtttaagcgagctaaacgatgaaagcatcaagtcgtttctcggctccaacataccagaagatggatcaagactgatcaaagaagaagaaagagaagtaggacaagtgagctttcaagtttacaaactctactcaacagaagcttatggctggtggggaatgatacttgttgtcttcttctctgtggcttggcaagcctctttaatggccagcgattattggcttgcctatgaaacatcagccaaaaacgaggtttcattcgacgctacagtcttcatccgcgtctatgtcattatcgctgctgtttctattgttcttgtgtgcctccgggcattttatgtcactcacttaggcctcaagactgctcagatcttcttcaaacagattctcaacagtctcgtgcatgcaccaatgtcattcttcgacaccacgccatcgggaagaattctcagtcgggttagtagataactttctccatttaaaatctagaaaaccagggagatttcaacttaaagatagtaatctctataatatgtttttgcaggcatctactgatcagaccaatgtggatatctttatcccgttcatgataggactagtggccacaatgtatactactcttctcagcatcttcatagtaacatgtcaatacgcttggcctactgttttcttcataattccgcttggatggcttaacatttggtaccgggtaagtggctaaaagagattatattatttgtttctgattatattattaaaagagattatatcattctgctgtttctactgttttcttcatctgattgagtttttggatccaacagggatattacctcgcatcatctcgggaaataactcgtcctgactcaatcaccaaggctccagtaataaaaaatttctccgagagaatagccggagagatgacaatcagagcg

SEQ ID NO: 139566 - DNA, 865 bp, Arabidopsis thaliana landsberg
tgatttagagatggcggcttctttatcgagcagacttataaaaggaatcgctaatctcaaagctgttcgttctagcagattggttagattctctcataacccttttactcaattttgatgtatctaatgtttgctcaataaagttttctcttttcccatcttgaatcacttaaaaattgctcctttatataacatttgaggttctgattcttttgttagttgaaccggattagatagttacgtgagcgtatggttttgaattatgtgaaaatgaatttgtttccaatagaagatggtattgatgatcatttgatagttgaatttaacatggagaagaatgatgtggtttttgtttgcagacgtctgcatcagtctaccaaaatgggatgatgagattttcctcaacagtgccaagtgattcagatacacatgatgatttcaagcctacacaaaaagtccctcccgattctacggactcacttaaagatatcgttgagaatgtacactccagcttctctagatttgaagttgaatgtttctttgttaggtgtttgctaatgctgttttagctttggtggttgtgtaggatgtgaaggataatcctgttatgatctacatgaaaggtgtccctgaatctcctcagtgtgggtttagctcactagccgtcagagttttgcagcaatatagtaagttttgttgaaatgttgattgaaactgaagaagccttctgtgaattttctttactattggcgttaggctctgtgttctgatctactatcttgtgatatccttctttagatgttcctatcagttctagaaacattctagaagaccaagagttgaaaaacgctgtgaaatccttcag

SEQ ID NO: 139567 - DNA, 586 bp, Arabidopsis thaliana landsberg; identical to SEQ ID NO: 63715
  unsure (1)..(586): unsure at all n locations

SEQ ID NO: 139568 - DNA, 2899 bp, Arabidopsis thaliana landsberg
  unsure (1)..(2899): unsure at all n locations
cgaactcgacgatcatctgaagcgtcagagatcacttctaactcgtctcggtgataagttggcagacaagggtgagaaaatccgaaacagaatcggagagctcgagtacgagaagcagcgaaggatgttccaacaacggaccaaaatggttttgtcttttttttttttacttactctgcaattgcatcattctgttactcaaatgaaagtttttgtgatctctgtatttgtagctgaagctaattgttcagtggaatttagagtttgatgatgtgtggaagataatgtagtatgtatttaggaggatcagtggttgagtgtctcgattggttcaagattctgctaaagcttctccattgttttacattttcacttgtttagtatagttctgattttgtttggtatctttttttccttatggatgtataatactctgtctctgtttagacaaaatgatatgaattgatctgatacagtgccatgtgactttaccttgttttagcaggatgcagacaacggatgtcagattctcgagaaaccaaaaagctcaggtatcttgttgcaagtttgtcctagttaattttggtgttgagtgcaaaattttgtgtctaacatgtaaagtgtttgcagatgtgtttatgcgagcgagtacagcctcaaaagacacctctggacaagggacttcgggatcgaaagacgtgtctcggtcaacatttgctgctcattttagtgacaatctcaaagtatggtgttttttacattctctatttttgtaacccttttaggtggctgcttcttaatagtccttgtttaacagatgggacctcaaccagtgaaactagttaatgacaaactacaagatttgggacgtggaagctggataagcaaagctaatagagactcaataatagagaaaaataatgtgtggcggtcgctgccaagattaagcaagtgtaaggtcagtttaaagaacttttattctgagtctaaggatcctaaaggggatcgaagacccaatgaagcttatggtaagggaaagccaaatgaatcttccccttatttacttgtcnnnnnnnnnnnnnnnnnnnnnnnnnaagtcattggttatgaaactcccaggtccatatcttttctccctgatactgcttcataggagaatttagtgtattgacatatgattagtgtattgacatatggttcataagagaatttagtgtattgacatatgatttgctctttctctcacaggcattggagtttaaaagcatcgccactacagagttcaagctgcaggaaggtatgtcttcttatgccatacaattgtacttaattaacatagaaggacctcagcaccctttctgacacttttgttatagaaatcagatgataaagtgattaatttggatgaagatgaacctctgtctccaatggtagtagaggaagcatgtgaacttcctgaagggtaaaaacagagttattattgtttatcttcattaagtgtctgaatcacttttgtgttggagataacttaattttgatgacatctgcaggttaccagaagatatttactacccatcaaggtaggtagaaaaactatcatgttgtttacttattgtaatcgtcaataagatatatgacctttttttcactttatctagtgatcaaagtgatgggcgagaccttgttcaagtatctcttaaagatctgaaatgcctttcacctggggaatatcttacatcgccagttataaatttctacatcaggtgacttctaagtaccgactgggatacttgcattatatgtctcgtgttatagctttgtaataatttctgcttctgtttgactaggtacgtgcaacatcacgtgttttcagctgataagactgctgctaattgtcatttcttcaatacgtttttctacaagaagctcacagaagctgtttcatacaaggtgattgctttccctggtttctataaagataattattagttctcagagctcattatattttgtttgcatttaaaaaaaattcaagtcctcaagatgctttatgtttcattgttctattatagaaggttgagtaaatatttcatttgcaactgtaacaagaattgagaaaaaaaatgataatactacctcttttatgaatcttgtgatttaacattatttttcttctggcgactcatgtgttgttcggtctctttgtcttgtcctttcactatgattagggtaatgacagggatgcatattttgtgaagttcaggcggtggtggaagggttttgatctattctgtaaatcatatatatttataccaatacatgaagagtaagtaatttactgactgtttattattgaatcccatgaatgcatttttttggcatgaagagtaatttttgtcatctaagcttagaggattatgcaaaaagatggtatcttagatcagagttatcacatctcagtctgctctttctaatggagaaatgttctcagcatcaattgttagattggttaatgttttctttccctcttgaatgtttcagtcttcactggagcttagtcataatttgcatcccagacaaggaggacgaatcgggattgactataattcacttggattcattgggacttcacccaagaaatttgattttcaataatgtcaaaaggtgagacccaaggaatccgtatcattgatgctgattgcataaagtttctcagtgtcaagagtctaagaccatcttaactatattctatttgtggttttaattacaagttattgttgcagatttctgagagaggaatggaactatctaaatcaagatgctccattggatttaccaatttcagcaaaagtatggagagaccttcccaatatgatcaacgaagctgaagtgcaggcta

SEQ ID NO: 139569 - DNA, 1318 bp, Arabidopsis thaliana landsberg
gaggaagaagagccaagtgttactggaaggttacgttgagactgcttcttcttcctcggtggatgatcaaaaggacgatctgacgagatccaagagtttgacggatgacgacctcgaagatcttagaggttgtttagatctagggtttggttttagctacgacgagatccctgagctctgcaacactttacctgctttggagctttgctattcaatgagccagaagttcttagacgataagcaaaataaatcaccggaaacttcgtcggtggaagattgtccgtcgcctccactggtcaccgccactccgattgccaattggaagatctctagtcccggtaaatatctcatctttccatcgattgattcggtaatctaagttcaatcctagttcaaagtttgttgctttagtgttaaacaagaatgtggaatataccgttttcgttacagaggccacaaatctgactttgagaattgagatggcaataattggaaaattgggatatgaagtctgaatgttttcaattttgttgttggttacaggtgataatccggatgatgtgaaagctaggctcaaatactgggcacaagccgttgcctgtactgtccaattgtgcagctgaatgaatcattgtcacgtctgaaccaggaatactagcgaatgagcaatatctcaagcattggtagcggaggaggagatttcagaaagtggcattggaaggtctaaaattgaactgaatatcaacaatggttctcacttaattccatgtatgtgtactagtagttagtagtatctagtctaatgattttatgaacggaaataaaagatatcacttgaataaaaccatcaaattctttctcatttccctgctggtctcagcatcgacagctttaacatctgacatcttaatagctcgattcttctccttatgcagtagtgagagcattcacttcacttaactggtcatgattccgctgaggtaactaatctaactgtgtctattaagtattaacggagtgtgatgcaattataccattctgtgaacggattatgtgttaagctactgtgtaaagcttattacatgtgagatatgaaagctggagattgttgtccttgtgcagtgctgagagactttgtgtttatgagagctatcactaactggttatggacctccacttgctgaggtaactaatcttaacttggtaactaaatctacaaccctctttatgaaggtactgacattactactgtcctctgacagtctttaactcattccatttttgtgagtgtgtgttgaatctacaaaccttgtggcta

SEQ ID NO: 139570 - DNA, 1032 bp, Arabidopsis thaliana landsberg
ctcccctgtctaggtcaattcccgttgttaaaatgttgtttttagatatttgttatctaaacctcggttactatgcgtagtattgggctgttccatccgtttcacacattgatatttgtctgagctcgtctgtgatgaacttctgaacccaatatacttgttgaaaacaacatttctttcatctcctctgtcttgtcttgcactagacatagataacattttgaattttgcagcagaattcttcattaactctgcgattgtaactttacaaagtaaccatttggtagatggataccatgtaatatggttatcgaaaatagtctaactttgtgtacttaatctgtaatgttactgaacttattattgtagttgttattatatctttgttaacaacatctgagaaaatgctggttttgtttatgctatgatagataccgagcaatcacaagcgcttattacagaggagctgttggtgctttgcttatttacgacgtgacaaggcacgcaacatttgagaatgcagcaagatggctaagggaactaagaggacacacagacccaaacatagtggtgatgcttatagggaacaagtgcgatctgcgtcacttggtggcagtcaaaacagaagaggctaaagcctttgctgagagagaatccctctatttcatggagacttcagctctagacgcaaccaatgttgaaaacgcattcacggaagtgctcactcagatccacaagatagtgagcaaaagaagtgttgatggaggaggagagtcggctgatttaccgggaaaaggagagacgataaacgttaaagaagacggatcggttcttaagagaatgggttgctgctctaactagagtggggggattgtagatttggcttgatttggttagggtgagacaacaaatgataatctctttgggtcttgcaatcaaaaaagaaataagaaacgattacttttaaaatcatgtgtatgctttggtaactttggcctgtaaggtcctttaaaatttaagtacatgattggt

SEQ ID NO: 139571 - DNA, 1545 bp, Arabidopsis thaliana landsberg
cacattctctccttcctcatcatcgttactctcgtgtttatctctccgacgtaaccatggatagcgatactctctcaggattattggaaaacgtcgccaaaaaattccccgatcgccgagctctctccgtttctggaaaattcaatctcactcacgcgcgtcttcacgatctaatcgaacgcgccgcttcacgccttgtctccgacgctggaatcaaacccggcgatgtcgttgctctcaccttccctaacaccgtcgaggtattttaagaggttttcatatatttcgatttaaaagcttcgtttctggttttgttttgcgtgctgaagaatcacatgggaagcagaatttatgaatatctgtaaatcgcttcttaattgagaaattttgatttccggattcagatgatttttttggatgaatttggttttgattttttttttttgttttcagtttgttataatgtttttagcggtgataagagctagagccacggcggcgccgttgaacgcagcgtacacggcggaggaatttgagttttacctctccgattcagattcaaagctattgttaacctctaaagaaggaaacgcaccggctcaagaagcagcttcaaagctgaaaatctctcacgtcaccgctacgctgcttgacgctggctcggaccttgtactatccgttgcggattcagattccgtcgttgactcagcgacggaactcgttaatcacccggacgacggtgctctcttcctccacacttctggcactacgagccgtccaaagggtgtaccgcttacgcagctcaatctagcttcatccgtcaagaacattaaagctgtgtacaagcttactgagtctgattctacggtgattgttctccctctgttccatgttcatggattgttagctgggttgcttagctcgcttggagctggtgctgctgtaactcttccagctgctggtagattctcagcaacaacattttggccagatatgaagaagtataacgctacatggtatactgctgtgccgaccattcatcagatcatattggaccgccacgcgagccaccctgagacggaatatcctaaactccggttcatcaggagttgcagtgcttctttggctccggtaatgctcttgtttccagtcaattgttgaggcgtttgtaatgcacagtgttttgtaaaacgttggattgctttggctttcaataacttaatgacttattttgtcttggtttttgttaggtgatattgtccaggcttgaggaagcgtttggagcaccggtgctcgaggcctatgcaatgacagaggcaacacatttgatgagctcaaaccccttaccagaggaaggtccacacaagcctgggtctgttgggaaaccggtaggtcaagaaatggcgatccttaatgagaaaggcgagatccaagagccaaataacaaaggagaggtttgtataagaggtccaaatgtgaccaagggttacaagaataacccagaagccaacaaggcaggtttcgagtttgggtggttccacactg

SEQ ID NO: 139572 - DNA, 1691 bp, Arabidopsis thaliana landsberg
tgctctcagttattctttgtaatccttgaatcattgatgatgatttgttgttattatctctttgagaagtgacctaccacttttgttatatggaataaaagaatacaaaacatatgtacctcttgtcttaatgtcttgttttgtgatttatcaaacttccgtccaaagtggaacatgattaaagttaggtttcaattgattggataaggacaaagactggttgttgtgtcacatttcctctctctctcagattttacaggcaaatcgatttcactcgaagactggttgttgtgtaattgtgttcgtcgtctcaggttttcaatatctgtctctttgaggtaaaagtttcgatttttacgtttcttgatcatcttattgaactgggtttgatctaaagttaggtttttttagaatttttaatttttgatctttttatcgtctgggttcgtacggaaatagaaaaaagctgcaaactttgttcttaatgttgataaagttattaactttatgttaaacttgttgagatctggattcgtttttgtcatttgagtatagagtgttgtctgattgttctaaatctggctggtgttttagattgttaataggatagagtcactgtgacactgtcagtgtcctgtaatctaatatatctgacagaaacagctttttgttttcagttgtattgatgggttctgaaggaccaacgggtgtgacgattcatatcacagggttcaagaagttccatggagtagctgagaatcctacagagaaaatggctaacaatttgaaagaatatttggctaagaattgtgtttcgaaagatgtgaatcttggaagttgtactgtgcttgagactgctggtcaaggagctcttgcttctctctatcagttgctacaatccgcggttaacacaaaagagtcagagtcgttgaccggaaaaaccatatgggttagttagttagttaagccaagtgatttctgatttgattctatatgatgaagtttctctgaagttattgtgatgtctcttttaggttcactttggagttaatagtggcgctacaaaatttgcaattgagcaacaagctgtgaatgaagcgacttttcgttgtcctgatgaattgggttggaaacctcaggtttttgttcactcccctttggttgtttttgtttgataagttgtttagttccatgaaacattcttgtggtctgcagaatttgccaattgttccctctgatggtccaatctcaactgtaagaaaggtatgttgactttgtctcctgattctgcagagttggccattcttgtttttgtgttgaatcttgtttatgatttgcagactaatcttcctgttgaagagataacaaaggcgttggagaagaatggctttgaagtgataacatcagatgatgcaggtcgatttgtgtgtaactatgtctattaccattctctgagatttgcagagcagaataagaccagatcactctttgttcacgttcctcttttcgttgccgtggatgaagaaacccaaatgagattcactgtttctctgctggaggtactcgcttctatttgcaagtaatgttatcccaaatgtggctattcttattcatgaaatgtgcatcatggaccgattgtctccccacgggaaaaattcgcttatcaataaatggaatataagttcacttct

SEQ ID NO: 139573 - DNA, 1876 bp, Arabidopsis thaliana landsberg
gatatggctttaatcaacaagatctttaacatccttcttcctattgtcacggtttcgtttcttttagtgttcatgccattttcaatattcttcaagctcctccagttcataaggggatgcaaagagtccgagaaagtcaacggaaaagtcgtcatcatcaccggatcttcctcaggaattggcgaggttagtttgtttgtaatcctagaaaagcttggtctattttttataaattggttagttatttggtaaaaaacaaaagcaatttgaagttgatttaatggtgtagcacctagcgtatgagtatgctcgtagaggagcatacttgactctagtagctcggagagaggatcgtctccaggtggtggctgaccggtgcaggaagcttggttcaccagacgttgctgtggtacgcggtgatgtctcagtcatcaaagactgtaaacgttttgttcaagaaaccatctctcggtttggaagatgtgagttagtcactattattcgaataactaatattgctacttgcttaaagaacataaaaaatataacaaaatttatatcagtggatcacttggtgaacaatgctggaattgcggaggccaaatttttcgaggactattctgaaatttcggatgttcttcccattgtggtatacatttttagatttaattcatagtgaagtcttttttacaatatatgaaccttggcaaaatttgcagaacactaacttttggggaccggtttacgcgacacatttcgctataccgcatctcaagaaaacaaaaggaaagatcatagcggttgcatcacctgctggatggtctggagtaccaaggatgagcatatatgctgtaaatgcttcttcttctttttctttctcttgttctctaaattaaccaagcgtaacatattaacataatgaatgtaacatttgtttcaggcaagcaaagcagctatgataaacttctacgagactcttaggatcgagcttcatccagaagttggtgtgacaatcgtgtttcctggtctaatcgaaaacggaaatactaatccggaccttttagctgaggtattttactatcatcatttttcattttagtctgtccaagttttatgactgaagtctcttttgcagaaacaagactggtcgcaagttgtgaccatcgaatcagcagcggaatgcgccaaagcggtagttaacggaatctgcagaggcaaaacctttggggcaaaacccgccgtgggttcgtgtcctgttctgcctagtgctatatgccctgagcttctgatctcttagcctgaaaggaattaaccagttgtgttgtttaataattgcatcatagagataaaaatctgaaatacaacatgatggccatctagtttttctagatctgttcagttttttttttttttttggttttaggaaatgttcaaccgatttttttttttctttttgtcttttttcatgtcgtgttttaaatagaaaataaaataatcaataatcaatcattgatccaaattacacatcgaagtgtttttataacagttttaacatgttcagtgtaactcaaactagtataaatttgttggaaaaaatccagatcaaaacagacaatatcatactaattggaaatttgactttgctcactcatgcaaaccgcaaaaattttgtttaccaatctcaactattagacaaatataacttttgttcgaattcagtttaaaatatttcagtatggttggattctcttctgtttcgatacacacatgtttagtattaggcaactcacttattcttaaagacacatagttaatatacatagtcaaaggtaccattaacaaaaacaaacctacattttcacccatttctttgata

SEQ ID NO: 139574 - DNA, 2932 bp, Arabidopsis thaliana landsberg; identical to SEQ ID NO: 29991

SEQ ID NO: 139575 - DNA, 2269 bp, Arabidopsis thaliana landsberg
atggagagtggcgatgagagtccggtggttctaattacgggatgttctcagggaggaattggtcacgcgctggcccgtgagttcactgagaagggatgtcgagtggtggcgacgagtcgatcacggagtacgatgacggatctggagcaagattcgaggttattcgtgaaggagcttgatgtgcaatcggaccagaatgtgagtaaggttttgtcggaggttattgataagttcggtaagatcgacgttcttgttaataacgccggagttcagtgtatcggacctttggcggagattccaatttcagccatggattacaccttcaacaccaatgtttttggtaataaagatttgatttttagtttcaattattacatttattggagcttcaacagttctgttttttttgcttattagtgaatcattggaatttacaatccatttcaaatgttgattctgtggacattcaaggaactcaaatacgtgttgatcatgtgtgttgcgtttgggctgttaggagagttttgaagaagtgaatttttcaatgcaggttccatgaggatgactcaagctgttgtaccacacatggtgtctaagaaaaagggaaagattgtcaacgttggaagtatcactgttatggcacctggtccatgggctggtgtctatacagctaccaaagctgctattcatgctcttaccgatactctgaggtttgcttttaccgttttcagatttggttccactgttttaacttatcaaacgccgctatttgtgtcgtttgaataatcttcctatgtcgcatgctgatatatattctgtttgttctgtcaatggagatttgatggtagtaaactaaaaattgttgaaatggtctaatctaattttaaggtgtgatcaaacttgagtatcattatttctgaggactaaagtctgatgttgggttaggttgatgattcttgatgttcatgacaagtgtagttgttcaaattatccagcaccggatggttttggtttgtcaattgttttgtaatgtttcctgcttaacgtcaggttggagcttcgtccgtttgggattgatgtcatcaatgttgtcccgggaggaataagaacaaacatagcaaactcagctgtggcaactttcaacaaaatgcctgagctgaaactatacaagccttatgaagaagctatcagagaaagggcgtttatatcacagaggatgaatccaactcctgcagaaacatttgccagagacactgtagccgcagtgctgaagaagaatccacccgcttggttctcgtcaggcaggtattcaaccctcatggcagtcatgtatcatatgcccttatggctcaaagattttttccagaagcaggttttaatgaagaagtgataatcaggttggggtttaagacagaatgtaccttaaacacgaatgtaaaagctttgttcaaattgttaattgaatctcttatgtctccatgtttgagtcagttcggttcttaaggtatagaagtatacatacaggaaggaaggagatagagagtgaacaggagaaaattattacattatgttgtagaaacttgtggtacaaatatctgtaacgggaaaaggtgaggattctacaaccagaggaacagtagttctactttgatttgacccaacaatgtaacatcgaaaccgcattcgagcagataaaaagggtcagaactatctaaagctattaactaacatcatttctattttaagaatggtgtggagctccgtaatacattatccctggtggctggaaagttggaccttgttgagattgctgagctgagttcgactgaggaatttgaggctgttgattacctatcaaatgtggtggtggtggtggtggcggaagcccaggtggcattaacggaatgttgccaaaggcgtaagggttattcattaccggtggttttaggaactgtggtggtggtggattaggtattacatggtactgaccttgtgtggtaggtgtctgattctgggagttgttgtaagaagggaatgaagcattagtgtctgagaccggaactgtgctctctgatttggatagaccagaagtctttgttgcttcagctgcgaatgaagatagaacagactgcattatcatatgtgatgaggttgacgctgtgagcattgcagcaatagatgcaggcgtcatttttgatgcttgaccagatttggtgttgacatttgtctcggttatcgtagtggcagcagttgtttgtttgatgtgtat

SEQ ID NO: 139576 - DNA, 676 bp, Arabidopsis thaliana landsberg
  unsure (1)..(676): unsure at all n locations
ttacgcacaagccccaccggcttcatattacggttcttctaccccggttcagcaaaatccggtttacccaagaccagcttcgtccgggttcgtcagaggaattttcaccggtttaatcgttttagtcgtcctcctctgcatctccaccaccataacgtggctagtcctccgtcctcaaataccgcttttctccgtaaacaatttctcagtttccaatttcaacgtaaccggtccggttttctccgcgcaatggacggcgaatctcacaatcgaaaatcaaaacacgaaattgaaaggctactttgatcgaatccaaggtttagtataccaccaaaacgcggtcggagaagacgaatttttagtgacggcgttttttcaaccggttttcgtggagaccaagaaatcggttgtgatcggagaaactttgaccgcgggagataaagaacaaccgaaagttccgagttgggttgttgatgagatgaagaaagagagagagaccggaacggtgacgtttagcctgagaatggccgtgtgggttacttttaagaccgatggttgggcggcgcgtgagagagggcttaaggtgttttgcgggaaattaaaagttgggtttgaaggaannnnnnnnnnnnnnnnnnnnnnnnngcctaagcctcttccttgtgtggtttacgtt

SEQ ID NO: 139577 - DNA, 2588 bp, Arabidopsis thaliana landsberg
tccttggacctggaattgtcggtggtttgtttcttccgatgcttggtgctcttcctgacgctttgcttatcatgggtatgtcaaaatgttttttttttcttttttcaaagtttcgaaatttagatgctgaggtttcgtatgattcgattcgatctataaagtgtcatgcttgtgtgcgagttatgtagcaaatgcgaaattgaaattcattttgagtgaaatagacgaattttgttttgctttgatgaagattctttgaattttgagagagcaaaaaaagtgaatatttgattggttctgtgaatcaaatgatgatacagggattaacaaaaagtgaatttttgttgggttttgtgataccaaattgtgaaaagatgatgatgatacactgatgttaaccgatgaactcataacttgtcactttgtgctttttagtcaaaatcttatcttttttttctgtggagttgttatcttgatgggttatttattatgtgtttggtgtttctttggttataaacaatgtcttttggctttcagtgtctggactatctggagatgcagcaactgctcaaagccaagtctctgtgggaatgggtttgcttgctggttccactgttatgcttctcactgttatctggggaacttgtactgtggttggcaagtgtgatcttcgtgattcaattgctgtaaacaaccaagacaccaaaggctttcacctaaaaggtaacaaggaagtgtcttatacggttacaccttcaggattcttcgtttgtatgggtttttataagggactgatgaatacagtagaatttagtatttgtgctttactatatgcgggttccttattgttgtttactctgtttttgtagattctggtgtaactgttgatatttggaccagctatgctgcaagaataatggctatatcagttattccgttcgtcattgtccagcttccgcagatgttgggctcaacctctggaagacaattgtccgtgttgattgctctaatcctttcagttcttatgttgatctcttactgtgtatatcaggtaacataaaatcttcaggacagaagtttctgaaaaatatttactagacttgtttcctttttttttgctttctccatcttgttttgtgagattatccttccttgtatgatgatatctaggtattccaaccatggatccaaaggagacggcttgcttttgcaaaacacaagcatgttatatcaggaatactaaggcacttgaaacaacatgctctgggaaggcttcttgatgatgaaggtcagcctgatgaacatgtcattcgaaagtaagtcatatattctttacatggagaatgcattttactcggtttcaccttgtgctcaagtttatctgtttattaggttgtttttgacaattgatgcaaacaatgacggacacttgtcagcggctgaactaaaggcgcttatcattgggatcagctttgaggatatagattttgacaaggatgatgctgtgggaaaagttctccaagattttgataagactcttgatgagcaagttgatcaagaagagtttgtccgtggaattaagcaatggcttatccaggcaatgggaggtgctccatctggtcctgaagctggccctcgaacaatgaaattccttgacaatttccatgtggttagaaagactgttgaaaccttatttgaacagacttgggtcacaaaacttatctggaatctaacgcaattagttttatcctttttcttgttttgcagcaaacaaagagagagcatgctttgttgggagataacgagaatggtgagaacgatgaggaaggcggtgaggttgcagacccaaaatggatcaccattaaagcagctctgctgctactgttaggagctgccattgcagctgcatttgctgatcctttagtcgacactgttaacaacttctccgcagccacagggattccgtctttcttcatttccttcatcgctttgcctttggccaccaattcaagtgaagccgtgtctgccatcatcttcgcatcccgcaaaaagatcagaaccgcctctttaactttctccgaggtccatccatattcacaagtcttatatctttctgtcccattatatttcctatactaaaacccgtttcttggtgtttgtttgttttcagctatgtggtggagtgacaatgaacaacattctgtgtctctcggtgttcttagcaatcgtctacgttcgaggactgacatggaacttctcatcagaagtgttggtgattctcatcgcttgtctggtgatgggcggtttcgcgagtttccgcacaacttatcctctttggacatgtttcatagcttacttgctttacccattctccttgggtctggtctatattcttgattactggtttggctggtcgtagatatcactctctgttcaaagagtttgttctaatgagtgagtgtcttcgcgcgtggtttcggttcttctctacatatatatatatatatatatatatatggattcgagagtgtaaaaacttacattctgagatttgtcagtgattattaatgtattggaaacagagtctt

SEQ ID NO: 139578 - DNA, 2636 bp, Arabidopsis thaliana landsberg
gttagatagctttctgaacaaaaagagagaatttggggatatagatagaatccgccattgaagatcccttccctttgacctgttgagtgttgacaacctgaaaagaaacaaaaaaagaagaagaccgcttcatcttctcaacaccacctctgtgttattgctctcttttcttcttcgacgacttctctcacacatacaaaaggtttgggattttttttggtagaatctttttaagttatctatcgaaatcagttcttctgggttgttggtgaataaatctacttttcatcttaattaggacaaatctctctaattaaaacgcctcagattttgtcttcagttgttttgttttaaaccctaagttacttgtaagttaaatgaaatctacaattcttaatttatctcttgtttccaaaattgtgaaaaaatccaaacatatatagaatagacacgtaacggctcaaagtcggtaattggaggtaacgtgattgagtcttcttcatcaatcataaatcttccctcttaagaattaagacgccgcctcattacacctgttccataatcatcgtcaatatattcattctgcaaaactattcttcttcttcttctttcaaagtcgtaattgctctctctcacccctaggttcttaagtcatacccattttcaaggacaccttagaaagtttcaagttttctattaggtaattgcatgttgaatcgattacgttcttcttgtgattccccttttttctggcccaaagaggataagattctaaaaatctgaatctttgtatgcaggtgtattgatcttgaagccttaaagtttgtgtctttttgttaatttgaataaagtttgatgggaggagggaattccaaagaagagtcgtcatcaccatcttcatcatcatgggcttctcatcaaagttatcctcaatatggacctgatagctacaactatcctcctccacccacttatgctcccgctccatctcctgctcctgctcctgctccggtgcctgctccatctccggcttccagttatggccctcagtatagtcaagagggttatgcatcacagcctaataatcctccaccacccacttatgctcccgctccatctccggcttccagttatggccatcagtatagtcaagagggctatgcatcagcagcatcacagcctaattatcctccacctccttcacagagtcaagttgctgacaggaagaaatttgatcggaggtattccaaaatatcggataactactcttctttactgcaggttagtttaagacaatgcataccctatacacttggattttcccctcaaaggttctttggaaactgaatctagcatgtgtctgaattgattccaggtgtccgaggctctaggccgtgcttgttttgaatcttctaatctaatcgttggtattgatttcaccaagagcaatgaatggacaggtttgttatattattcttattcttacgttttgaatgtaaaggagaagccaaactaattggttttggtactgcaggggccaagtccttcaataggaaaagcttgcatcacttgagcaataccccgaatccatacgagcaagcaattactatcattggaagaaccttagccgcctttgacgaggataacttaattccttgttatggttttggagacggtatgcactgttttctctcttctcgattctcataagaatgtatatcaatcggatcatcattgacttgctttcatctctttgcagcatcaactcatgatcaagacgtgtttagtttctatccagagggaagattctgtaatggatttgaggaagtattggctcgttatagagaaattgtacctcagcttaagctcgcaggtttatttcctcctctgacctgcactggccaattctatatctccttgtgaaacgcaagttataaacttaaaactgtgtttttttttcctgcgaacttatgtatttcaggaccaacttcttttgccccgatcattgaaatggcaatgacagtggttgagcagagtagtggccaatatcatgtgttagtgattatagctgatggccaggtactgattaatattttgactgcctgagctgtgtatgatcttctgattttgtgtctagggatatcaaagtggacccattttgttgtttcaggtcacaagaagtgtcgataccgaacacgggcggctaagtccgcaagaacagaagacagtagatgcaattgtgaaagcaaggtgcgaatatttcaatcttttgactaatgtttcttccattttaaagttctttactttgagtgttatgttataaagtgttatggtatgtaatcagtttcatcctctctattacagtacccttcctttgtcaatagtcttagttggggtcggggatggaccatgggacatgatgcaggaatttgatgataacatacctgcccgagctttcgataacttccaggtaagcttctttttttcatattatgacattgaagattgcttcttttcttcagtttggaaccatttctttaacatgtctgctctgtttctagtttgtgaacttcacagagatcatgtccaaaaacaaagaccagtctcggaaggagacagagttttgcgctgtctgc

SEQ ID NO: 139579 - DNA, 1084 bp, Arabidopsis thaliana landsberg
atggttgaaagtgctgcgttcccaggagggtattatcggaatacttttgaagcgcctgtggaattagagggctctgggagctctgcacagattgatactgaggtcactgcgtctgagaattcaagtactcctgcacggaagtgtattatgttgaattcgaatgatgaagatccttatggtgttcagagacaagtcatttccttgtataacatgtcacaatctgagaggaaggatttgatttatcggcttaagctggagttggagcagacaaagatagttcttaaaaatgctgagttgcagagaatgaaccctgctgctgtgtcgtctactagtgatagggtgggttttagcactggtcaaaagatatcatctcgagtcagcaattcgaagaaaccatctgattttgctgtgggttcggggaagaaagttcggcatcagaatgggacttctcgtggatggaatcgtggtacctcagggaagtttgagtcttcgaaagagactatgactagcactcctaacattacactgatgaagcaatgtgacacgctactgagaaaactgtggtctcatccgcattcttgggtgtttcaggcgccagttgatgtagtgaaactgaacatacctgactatctcactactatcaagcatcccatggacttagggacagtaaagaagaacttagcgtctggtgtatactcaagcccacatgagtttgctgctgatgtgaggcttacatttaccaatgcgatgacatataaccctccaggacatgatgttcacattatgggggatatccttagtaaattatttgaagcgcggtggaaaactatcaaaaagaaattaccaccttgtagcatgcaaacgttgcctgcagtaacattggagcccaatgatgaaaggaaagctgctatatctgtacctccggcgaagaagagaaagatggcttcacccgttagagagagtgttccagaaccggtgaagccacttatgacagaagtggagaggcatagattgggcagacaactcgaatcactactcgacgaacttcctgcacatatcattgacttcttgaagaaacacaatt

SEQ ID NO: 139580 - DNA, 3109 bp, Arabidopsis thaliana landsberg
caaaatcacaaaagtcatctaaactttgaagaatctttaccaacgagaatctcacaaaagttggaatcgtgcacgcctctcgagttatctccggctccgatactccatctggtggattctgtagaagaaaaaatttcaatctttgttggattttctgggaaaaactcagatgggtttgctctgaatcgattggaaaatcaaaccggtgtggactctgcaaagttggttgatatgaacagtcttgtgagaagaaaacaagttgattctgttcatcttatcaaaaacgatggacctcatcagcttgccaagaaactatccgccgttgatcttgttgctattggtatgagaaagcttcaagctttggccaattttgatcaaaattccttatgggtgttgattgtgttcctttcggtgttaatttgtcaggagttgggacaacaattggagcaggagtgtatattcttgtgggaacggtagctagagagcacacaggacctgctcttgctgtatcattcttcattgctggagtagctgctgctctctctgcctgttgttatgctgagcttgcttctcgttgtccatctgctgggagtgcttatcattatgcgtacatttgtcttggagaagggtatatatatatggattttaataggattgaccttgttgttcgtcttaaagctgatactcatggattttcttatttcataggattgcttggttggttggttgggcactggtgttggattatacaattggtggatcagccattgcccgtggcataactccaaatctggtatttgcctttgagttatatgtgtttggtttcagtcaagaagttaatcacttagctccttttctttcttttttcaaaactattctcagctctaattctcaaacccaagatgcacttgttgtaaaaacgtttttctttggaatataatttaacattattttcaaaaaaaaaatatatgtatttgtggtcttttgttgatttaattctgactggtgtttcttttgttttaggcatctttttttggtggtttggacaatcttcctgtgttcttagctcgacaaactatacccggggttggtattgtggttgatccatgtgctgcacttttgattatgattgtcacgatactactatgttttgggataaaggaggtactttattgaagacattttaaatggattcatttcaagattatcagatcgtctaatagtgttataccgggttattttgttcttacagagttcaacagtacaagcaattgtaacatcagtgaatgtttgcaccttggttttcatcatagtagttggtggatatttagcttgcaagactggatgggttggatatgatctccccagtgggtaattagcctgttctcttctccattgagcgtagcttttgtcaaaagttatttcttaaagtcaatgtttaatacttgtctttacaggtactttccttttggactaaatgggatacttgccggatctgctgtagtattcttctcatacattggatttgatactgtaactagtacggctgaggaggtatacagtttattgaataatactctcattctttttgatttattatccttctcttttctctacaaaggactcactttgacgattccatatagaactagtaataaaggatgatttttggtcttagtatagtgaactttttttccataattctggcgattttctctgttaaggtcttaaccttttggtattgccacaacaggtgaaaaatcctcaaagggatcttccattgggaatcgggattgcattactgatatgctgcattttgtatatgcttttatcagtagttattgttggattggtcccatactattcattgaatcctgatactcctatctcctctgcatttggagacagtgggatgcaatgggcagcgtaagtatgatacatctcttgacactcaaatttctttgtattaattagtcaagatgcatatacacatacttccttttgtctttgctttttttttttcttattattcctatatatttcaggtacatcttaaccactggggcaataactgctctatgtgcgagtttgttgggttcccttctggctcaggtactaaccaattctatcgttctgaaaatccaagttcaagagattttgtaattgagatatcttagtagtaaaagtaacatgctggttctgtgtgggttttggaaatgcttacatgtcgttttgacagagctttgtattttttttttattagccacgaatattcatggcaatggctagggatggattgttgccagctttcttttcagaaattagcccacgaactcaagtaccagtgaaaagcacaatagctattggtgttcttgccgctgcactcgcatttttcatggatgttgcacagttgtccgagatggtaagctggtatttgcctacattacatgtctcaagtcttaaggaaggattttcacctacaattagtggcaaacagaaaattgagggttcattattagtagtatagttttgatattgttgaagcagttagtattatataatttagttgagacacgcctaaacacactctattacggtaacagatccttctctgagtagctcacatcggtaatttatccaacaggttagtgtaggcactctaatggcattcactgccgttgcagtctgtgtgctagttcttagatatgtaccaccagatggagttcccctatcatcttcctcccaaactttgagtgataccgatgaaagtagagctgaaactgaaaattttcttgtggatgctatagaatcttctgattcccctctacttggaaatgaaactgctcgaggtactaaaatgtgctcaatcacgtagttaccatttggatatgttgtaaagatacatccaacaattcaatcttttctgccttttatctgcatttaagaaatatgacttttttgcttctttttaattgaacagatgaaaagtattttggaaagaggagaaaaattgctgcctggagtatagctcttgtgtgcataggtgtcctaggtcttgcttcagcagcttcagctgagcgtcttccaaggtcgtttcatctaacggaga

SEQ ID NO: 139581 - DNA, 2985 bp, Arabidopsis thaliana landsberg
tttgctgagatcaagagcagtgtctttaagcgttccagcaaggacaacatccatggtctagtatatgcgggtaagctttactcccgtgccctttgtagaatcctgtgccttgaatactaggcctcctatggctctgatcattagcttagtacttcaaacattttcaatcacctgtcaaaatgggatctgagttagactgtaattccagctgttagctttggtttttgattggtatgttttgtttcccttactatttctctaccagattcaatagagagattccacatatcggccttcttggtgtcagttttggctcaaaatattctcgagtctgaaggtgcatggtttggaaatttcatctacgtaagtgtacataattctctggtagatataaaattttgtacaagcctctttccaggttgcctaaaagtaaatatacttggactctgcagaatgctactacggtcttcttctgtgagatgatgatagacatcatcaagcattcatttcttgccaagttcaatgacatcaaacctatagcgtactctgagtttcttcaagccctctgcgagcaggtatggatcatacagcctttctctctctctcttgtgctgttacattggccctataaaatgccattgctgcgtcatcttacatccatatatctttctctggtattgtcagactttgaacattcgtccggaagatagaaagacaaatctcacctttgttccccttgcacctgcttgtgtggtatattcctcctcttcccttttgacctaaaaactcaattgtgataagtaaaaaaagaagaagcttggaatgattttgagtgtatattttgggacctcaggtgatccgagtactgacaccagtatacgcagcacacttgccatacagtccactcccatggagaatgttgtggatggtcatcttattcgtcataacatatataatgctcacaagcctcaaagttctcatcggcatgggactgagaaaacatgcaacttggtatattaatcgatgccgaagaagaaactcctcccatctccacaatgattaggctgaagatcatcttttgtgatcttattatacgtgtttaaatattcgatgaagcgatttttgttgtggttaggcatatatacatatgtacaaagaaagagacctcatggatcatttggcaaaaagccatcacaagacaaagaatagctattactctttttgttctcttcttctttttgttttgttcataggacaatacaataataggaacttcacaatttcgttcacatgacccatattctcttgactcgtgaggttgaaatgtaaatcactttaaaattaaaaacgtaccttgtcagttttgagactcaaaaggacttgaaatattgaaatccctattctttacgcgtactcgagatttttcgctcttgagagaatcacttcgacaatgtcggtaacggtaagcattctcgattctcggccatttttgctggtgtgttcttagattcggctttgcttttcatattttttgctatttttagatctaatcacaaaggagttacatgctacgattttgtggataaaaccactgttctcttgttctgtgatgaagtctgagatctctctttactgtgtcggtgttattaaaaaaaaaacagaactttttttgtttctcgagtttttttttttgaatccagattctgttccacagatgctaatttcaatcatagtatcaatctcaattgaaagtttctggctttggatgaattaattcaaaataaatttgagtattgatgatctctccacaggctgctttcattgattcggatcaaactcagcacaacattcttatggattcccaatcaactgtctccggtgtaagcaaccaacatttctcaaactttcatcttcgctgtgttatgggattatctttgtattgctgttgtaaagctgtctgttcaaaggctttgtattgattcattgttgtgcaggtgaaaactgtcaagattagcaatgtttcactaattgtttctaagaaagatgtcaaagagttcttttctttctctggtgacattcaatacgtcgagatgcgaaggtatgaaaaataacttgttgtaaattatcatcttcttgttaaagatgatctttaccaatatctctaatgtttactctaatgatctcagtgagacacaagagagtcaggtcgcatatgttacttttaaggattcacaaggagctgaaactgcaatgctcttaacggtattttgctttccgcgtatgcatcattccgtatatttcatgaattagtgcttacagcgaaaaacatttccttccagggagctgtcattgcagatcttcgtgttagtataactcctgctgttaactatcagctaccaccagaagcccttgcacttgactcggtaaagaccggaaactctttgatttattcgttactctctcggtgttcatgttgtttcctctgtgtagcaggaacattcgtttaatggtttttctgtcaagaaagctgaagatgtggtgaacatcatggtgggaagaggttatgctcttggaaaagacgccatggagaaagccaaagcatttgatgacagacacaacttgatctcaaacgcttctgcaaccattgcatcgcttgacgataagatgggtctgagcgaaaagctaagcataggaacaactgtggttaatgagaagttgagagatatcgatgagcgatatcaggtgagggagataacgaaatctgctttagcagctgctgaagagacagcaatcagtgcaagaacggctttaatggcaaacccttatgtatcaagtggagcttcgtggttttcaaacgcgtttggcgcagtgacaaaggcggttaaagagaaagttgagaatggaggagaaggaagaaaggagatcatcacacttgatccctcttcacccaaagttcctgctgtagttcctgttaagctcggttga

SEQ ID NO: 139582 - DNA, 1806 bp, Arabidopsis thaliana landsberg
atgagtgtaaagtgtgaattatgccgattaccgacgggcttccaccttgaggacaaggtggttctttacgggggcggtattgttatgacccggatacttgagaactgggcctgggagttgaagatgaacatcgaagcccatgataatcctttaagcccatatttatctataggtcaacatatttacagttgtgccatcgtctcttacgctttggtatttagtctctgtctttctctgtaatggttatcaaaacaatcaacaacaatatcaatatcaatttctcttctcatctcatactctccgtcgacaatcggcgcattactttatttactctgtttttcttatgtttttacgttgtttactttaagagataagtccagagcttatcagattgaaatgagttcgatctctggattggtggaagatgaaatcagttcgtttttcgaatcgtctccacctctgaagaacaaggaagagatcgtagccaatcttaatcagttcattgagctgaattcttcgtgtcaaggtgagatcagaatttgtgtatatatgtaacattttgatttctgaatgacttagagggttttttctttcttttattttatcaggagggatgaggaggattgtatgtgtgacttcaggtggaactacagttccattggagcaacgatgtgtaagatacattgataatttcagctctggaaatagaggtgctgcttctactgagtaagtttttatagtttttgttttcaattactctttatagaactggtaaaaatatatattattgaatacaaactttggttttgatttggattgcaaaggaatttcgtcaaggctggatatgctgtgatatttctctataggaggtaacaatttgaatgttgttttgtatttctcagctgtgtgtagtttaaagatttagtgaaatgatgcttctttatatcggttctattatgtcatctttaggggaacttgtcaaccgtattgccggtatcttcctgatgatccattccttgaatgttttgagtttccagatgccaaaaacattcaaggtttttcattacaatctctttctcagttcatatcaaacttatgtgggttttagtctggtattgtatcaaattatgtgttttttgttcattttttttttccagttcatgggtcacattcaggagctgtgaagatggctgttatggaccagcaagctgtatgcttagaccaactgtgttttattttacggaaagctgattacttttatgtattttcgagtcttttgtgtagtaaccgtgcaaattaacattgcaggcagttgcagaaggtcgcttgcttaaactcccattctcaaccatatatgaatatctccaggttcttaaatcttacactagctacttcagtcatcttgttttgtcttgacacataaaatgtaatcttaactgcctaagaaaccattagaatttatctcaatgcttgtgggatttctttaacagggctgcaactgagattatttttctttggaatacaaacagatgttgcggttgattgctacgatattgaaagatgtcggtccatgttcgatgttttatcttgctgctgctgtatctgacttctatgtgccatggttaagcatggtaagagtctcatcatatccctgtgattatggctacacaattcttgcgtctgaaaattgacttcttatatatttgtgaaaccagacagagcacaaaatagaatcaggatctggtcctttggacataagactagctcaagtccctaaaatgctttcaatcttgagatcaaattggg

SEQ ID NO: 139583 - DNA, 4473 bp, Arabidopsis thaliana landsberg
gagcccccacttaaaatagagcttttgacgttcttctgactttgaaccgtcacattttgcacctgataaccattattactcgttgaaacactctccttttgcattacagtagtctctgaaggaaaaagattatcactgcttccagcaacttctttgatgatgatactgtctttcacatcttcaaagctctcaaaatcaacatttccaacaaacccttcatcatcctcagactcattccttagaccaaaacctgaaacatacccatttttctccaagacatgaatccccgagactgcagaatcctcagaaacgttaaccgcaagtgtgtttcgtgatggagtcatcaacaacgcattgttctcattgggaagtttcagtcttctaccatcaggcaacagatatcttaaggcgtcaccatatgaaagtaataacaagatatgagtaagagccacaatcccaactaaaatagcccatttcctctttccacttcgtgactgttttcggagctcagatctaacctccatgacagaaggaactatacagattcaaacccacaaaaccttcaagttcaagtatttaacaacaagcttcaaaaactaatcctgccgacacattcacgagaacaaaaaaaaaagctggaaagacataaattccaacgatcttgatcttaaattggaaatcggaaacattcgttgctcaattcagagtaaatttgaaactcttgaagtggaaaagacatgaagatgcaccaacggtagaatcttcaaaacaactccgacccaagtgaagaagtgtctgtactgtatttttggtgttggtctcttctctttgacgacctttgactaatttggcgacgataaaactgaaaaagaaagtaaaaaaagcaaaccgaaccaaaattcatagatctgaacaataaaccgaattgttgaaaagattataccgaacttaagaaccggttgcttaagctaaaccaacaagccggttcaaaagtcgctccaccatcagagtatgttcatcagaggtcagaaaatcaaattagttacataggagtgaagcaaatttcccccggcgacgacatggacgtatgtgaatgaatctcgctatcaaacccctaattcaaccatcgccatgaaggtgctcggagaagcttcttcatatccttacagatcctgtatcatcgtcgtatttctctccgtttctctcttctggctccgtcccagcacttaccatccccagcaacaaaatctcaatccagagaacgtaactcgtttggagtctgagaatgaaacgaagactaactatataatccgatttaagcagtataagccggcgaaagatcatcgaatttacctcgaatcgaaggtccgatccggtggttggggttggatcgagaggattaacccagcgacgaagtatccgactgacttcggtgttctatggatcgaggaaagcgggaaagaggccgtggttggagagattgagaggctggagatggtgaaagacgtgaacgttgagtttaagtaccagagagttttgcttggaggatcttttcccgacgggaagaaacgtccggggaagatcttcacttctatgtctttcgaagaaggaactgagtcctctcctatggccgatacaagtaacaccacgttaaactggagtcgacatcttctcgctcaggtgagaaattgtgaagtaacatagtcaatatctgtttttctctgctcactatcgatctatgtgctaatttttggtatcgtaaactgtaagtgaggtctttaataagttacatttgttttctaatttgcagaagactcaagtcacgtccatgtttggagcagatcatctctggaagaagggttacaccggcgctaaagttaaaatggctatatttgatactggaataagagctgatcaccctcattttcgtaagatcaaggtatcactttttggagaaactgataaaccatagtatttctcaaagatttctgagaagtgtgaagtgtttaaattactagttttcttttatctacttgccttgttaagctctgaagctggtattgacggagtaactttcaggagcgtacgaattggacaaatgaggacactttgaatgacaacctgggtcatgggacatttgttgctggtgttattgctggtcgaaatccagaatgtcttggttttgcctcagacacggaaatctatgcttttcgagtgttcacagatgcccaggtaatgcatgatcacacaacagatacttcttctcatgcgggataaggtttaacattccttcaactaaactaaatccactcatggtccagtaaattctgtttctgtttccctaattacacttgctaagatactgatattggttacacagtgatctttattttgtcctcgagacactgtaattgagcgctataaatctgtgtgccttccttttctctttcccagatacgcaagttgtcttaatcaaataggttatgataagtttgcgctcagcttgttgcaggtatcatacacctcatggtttcttgatgctttcaattatgctatagcaacagatatggatgtattaaatttgagcattgggggaccggattacttggatctgccttttgtagagaaggtaattgttccttaatctcttggttggagtttacttatcctgttgagtcgagtggtggggatgtttctctctagcatatatgaacagtcgtgtgttccagaggcactgattttcttctaacaggtttgggaaataacagccagcaatatcattatggtgtctgcaattggaaatgatgggccactttacggaacgttaaataatccagctgaccagagtgatgtaataggtgtcggaggtattgacaatgatgatcacatagcttcattctcatctcgtggcatgagcacctgggaacttcctcatgggtactgtatttccttgctgcttctacattcccttttacaaaccctacaatcgtaaagatacaaaatagcttgttttcttgcaattcctaacttcaaagttttgcttacagatatggccgtgtgaaaccagttgtggttgcatatggccgcgacattatggggtccaagatcagcactggttgtaaaagcctgtctggaacaagtgtggctagtcctgttgttgctggtattgtttgcctacttgtaagtgttattcctgaagctagaaggaaggatctgctcaatccagcaagcatgaagcaggcattggtcgaaggtgctgctaagctttcaggtcctaatatgtatgaacagggtgctggaagagttgatctgtaagttacttatccatattggttatcaccattgtactctttatttttattttaatcctagttcctttatttttgtagtctctaatttttcgactctttgtcagattagaatcatatgaaattctaaagagctaccacccccgggcaagcattttcccgagcattcttgattataatgattgtccatattcctggcccttttgtcgtcagccgctatatgccggggctatgcccatcattttcaacacgacaattcttaatggtatgggtgtcattggctatattgaaagtccaccaacatggcaccctgcaaacgaggaaggaaatcttctgagcattcactttaagtacccggatgttatatggccgtggactggttatctagctctacacatgcagatcaaggaagaaggtgcacagttcacaggtgaaatagagggtaatgtaactgtgaaagtctatagcccaccagcctctggagaaagtgggcctagaaggagtacttgttctcttcagttgaaactgaaagtgattcccactccaccacgagcgaaacgtattttgtgggatcaatttcacagcattaaatatcctcctggttatattccaagagactctttggatgtccgcaatgacatacttgattggcatggtgatcacctgcatacaaactttcacatcatgtacaacatgttacgtgatgctgggtactatatcgagactcttggttcgccccttacatgttttgatgctcagcaatatggaacccttttgatggttgaccttgaagatgattactttccagaagaaattgaaaaactcagagatgacgttatcaatactggactgggtctggttgtgtttgctgagtggtataatgtcgataccatggtgaagatgagattcttcgatgataacacacgcagttggtggactccagtcactggaggtgcaaatatcccagcacttaataaccttcttgcatcatttgggattgcgtttggggacaaaattctgaatggggatttcagtattgacggtgagcagagtcgatatgcttctggcacaaacatagtccggtttcctgctgaaaggaaattgcacacttttcctttattagacagctctgagagtggcgctacccaaaatctaaagctaagta

SEQ ID NO: 139584 - DNA, 786 bp, Arabidopsis thaliana landsberg
cttcctccaaaacgaagacttcgaatacgacatgttctttctttcgtcctttttttttccttactttgctttccatcttgagattttgatatttgtttctttaaaaaaaaagaagctggcctttggaagaagccatttctgggtcgtatgattcgagttcgccggatggagctgcttcgtcgccggcttctaagaatattgtgtcggagagaaacagaagacagaaacttaaccagagactcttcgctcttcgatcagttgttcccaatatcactaaggtttctctttttccccttgttttttgtcttctaattccaggattcaaacttattatagactctgtttttgttttctgatagatggataaagcctcaataatcaaagatgctattagttacatagaaggattacaatatgaagaaaagaagctcgaagctgagatcagagaacttgaatctacaccaaagagtagccttagtttcagcaaagattttgatcgtgatttacttgttcctgtcacatccaagaagatgaagcagcttgattctggttcttccacttctctcatcgaagttctcgaagtaagtttcagttccttttttcatttagaaatcataagatttaggagaagaatttttcattgaaaattgtgtgtatttgggtgtgattgaagttgaaggtaacattcatgggagagaggacaatggtggtgagtgtaacatgtaataagaggacagatacaatggtgaaactgtgtgaagtctttgagtcattgaatctcaaaat

SEQ ID NO: 139585 - DNA, 1451 bp, Arabidopsis thaliana landsberg
catagttcttcctcaaattgctcatacctttgcttctctttctttctgtattcaacctcttatttcttgttcagcaccaacgtgtatctgcagtaaacacatatccatcgatcgatctcctcaaaaagttattgttttcttgaaggatttttcttgttcttgatcaagcatacatatatatagatggtggaagaaggcggcgtagttgtgaatcaaggaggagatcaggaggtggtggatttgcctccggggtttcggtttcaccctactgatgaagagataataactcactacctcaaagagaaggtcttcaacatccgatttaccgcggcagcgattggtcaagccgacctcaacaagaacgagccatgggatctaccaagtaagtcaagtcaagatcgttttttattttgaccatttcaaacatcatcatcgatcaagattctgattcttgatttgagtgcagagattgcaaagatgggggagaaggagttttactttttctgccagagggatcggaagtatccgaccgggatgaggacgaaccgtgcgaccgtgtctggttattggaaggcgaccgggaaggacaaggagatctttagaggcaaaggttgtcttgttgggatgaagaaaacacttgttttctatacaggaagagctcctaaaggtgaaaagaccaattgggttatgcatgaatatcgtcttgatggaaaatattcttatcataacctccccaaaaccgcaagggtatgtcaaagtttaccactctttttgcaaaaatatgattcggtttaataaaatagatccgagtttgatgcatacaaaatttgtttgttgagaaatgtttatctatagttcgttttttttatatatgccttagttcaagaataatccaaaacatgaaacttaattaggaacttaattaattagtaatctaaatgctaattttttttttgtttgtgtgatggttataggatgaatgggtggtgtgtagggtttttcacaagaacgctcctagtactacaatcactactacaaaacaactctcaaggattgattctcttgataacattgatcatctcttagacttctcatctctccctcctctcatagatccgggtttcttgggtcaacccggcccaagcttctccggtgcccgtcaacaacacgatctcaaacctgttctccaccatcctacaaccgcaccagtcgacaacacttaccttcctacccaagctctcaatttcccttaccactcggtccataattccggatctgatttcggctacggggcaggttcaggcaataataacaaaggtatgatcaagttggagcattctcgttgtgagtgtgtctcaagaaaccggtttgagttccgatgtgaacacaaccgcaacgcccgagatatcttcttatccaatgatgatgaatccggcaatgatggatggtag

SEQ ID NO: 139586 - DNA, 379 bp, Arabidopsis thaliana landsberg
ctaaacccaagaaatacaaatacccgtcagtttatgatccgtatggtcctagaccccagccttcaagcaaaatcatggagctagctgagcgtatagctgctttatctccagaagaaagaaaacagattggtcctgcactcaatgaacacctgaggcttccaaaacaacagatgatttcatcggacggcattggagcaaaacaagataccggagctgggaatgtagaggagaagaaggagaagacggctttcgatgtgaagttggagaagtttaatgcatctgataagatcaaagtgataaaagaagtgagaacgttcacaagtttgggtctgaaggaagcgaaagagcttgtggagaaagtcccggctattcttaaaca

SEQ ID NO: 139587 - DNA, 1706 bp, Arabidopsis thaliana landsberg
atggcgacgctatcaacactagagattgctacgaccttcctctctttcaccgctcctcgttcctctgccgccttcaactatcgcttttcttctgccgccgtctctgttctctccaggcccagagctaccaccgtttccgtcagaacgacgccgtctttcttctattccccggtggtccgccgtcaaagattctcatctgtctccgcctcagctacgcagactgaagattctgatgtcaccactaagattccgccagataaccggattccggctactattatcaccggttttttgggctctggcaaggtcagtcagtgtttctcatcatttcatatctattctagggtttaaaattagccctgctaagtaaaagaaatgttggactaattatactgcaatgttttgtttttccacagacaacattgctgaatcatatactaaccagagatcatgggaagcgaatagccgtgattgagaatgaggttagcttattatcctcgcctgaattcagttataatggtgttgctttctaattcatgtttcatgtgaattctctcagtttggtgaagttgacattgatgggtcacttgttgcttctaaatctattggagctgaggatattgtgatgctcaacaatggctgcctttgttgcactgttaggggtgatcttgtcaggatgattggagaattagtcaataccaagaaaggaaagttcgatcatatagtcatagagactacaggttgggaaagggggcattttcatttagtatgcttagagaatctggggaatgagtaatgactatcttatgtttattttcactttttaggattggcaaacccggcaccgattatccaaaccttttatgccgaggaagaaattttcaatgatgtcaaactggacggtgttgttactctagttgatgctaagcatgctcgtttgcatctagacgaggtcaaacccgaaggtgttgtcaatgaggctgttgaacaaatagcttatgcagatcgtatcatagttaacaaggtaaccaaagttttgaacacaactgtctcaaagagaatgtgatagtttttgtgatcttgagtggttgaatctcttctatcataagattcaggtcgttcctctctcaaatagtttatagtttacaaataaattcatttgcacaaatggttttgacacgtcctaagtgatggatccatatgttttactcaaatatattgggaagttatcggttgtattgtttttgttggcatatccaatttctgaaaagtgactgtactttgttgcagactgatcttgttggtgaggcggaattaggttcggtggtacaacgcataaaggtcggtctcacatcttcttcgtattcatttatttcactagatgattatatgttagtctctcagaccattcttggttataatgttaacgtatttgctatggttatctacagacaataaacagcatggctcagatgacgcgaacaaagtacggaaatgttgacttagattatgttcttggaattggaggttttgatctagagaggtctgcttcttgtttaacttatgataatattcagtttggtgtcttgtagcttcacgcagttattaaggtgttctttgctttatcagaatcgaaagctctgtgaatgaagatgataaggaagatcaccatgatcacgaccatgatcatcatcatgatcacaacc

SEQ ID NO: 139588 - DNA, 1287 bp, Arabidopsis thaliana landsberg
tttctgttggtttcatgatccgttacttttgttataacttgttggtttcttgtgttcaggagcatcgtgttaaaactgctagtggtgttgtgtctgtcattgtctatggagacagagaaaagccagcattgattacttatcctgatttagccctaaaccgtaaggctaaagaatctctataggcactaatgtaatggctaaatttattaatgtttttgttgtttcttcttcagatatgtcatgcttccaagggttattcttctgtcctgaagcagcttcattgctgcttcataacttctgcatttaccatatcagtccacctgggcatgaggtccaatattttagtttctctttttttaacttgccgtatgctttgcttgacgtgattacttactcacatgacttctctgttttcttgcagttaggagctgctccaatttgtcctaatgattcagtcccttctgctgaaaacttggcagatcagatccttgaagttctcaactttttcgggtaacgatggaatcccttatttttggcttattgaagttctcaacttttgtttttcgggtaacaatgtataagctttttgttcagccttggtgttgtgatgtgtatgggagtgactgcaggtgcttatatcctcaccttattcgcggtatgttcctatttatttttctcttctcattgcccattgcttcagaagaatactgtgtttatcatctcttctatgttttaaaacttttcagatgaaacatagagaacgggttcttggtttgattcttgtctcaccgttatgcaaggcgccgtcttggtctgaatggttttacaacaaggttatcacaaacttgttatattattacggaatgtgtggagtggtaaaggaatttttgcttcagagatattttagtaaggtgtgttcactgcagttaccattgctctctctctgcacttgttgcatttccagacttctcttatttaaaccggttgcaactgcttgctacaggaagtccgtggtaacgttgagattccagagtcagatatagcacaagcttgcagaagagtcagtgtttatctcttctgttgattttctgtttcatcaatagattgatttttctgtatcagtgattcacaccttgcacttttggtgattgtctcagctgcttgatgaaagacaaggcataaacgttttgcgatttcttgacgccattgatcggtaacacaacaaacacctcgaaattctttaccttaaagcattcattcattcatggtgcaaatattgactttctt

SEQ ID NO: 139589 - DNA, 1433 bp, Arabidopsis thaliana landsberg
atggtgatgctcggtgtgctccagcttccctgccgcctccatcactctctcttttactcctcttcccaaattgcttcttctcgccctcaaggtcaatatctctctgtctctttagtttctgcgaaactatctcttatttacttgaaaattgaaaatattcaggtgttgctaaagtggttctgaaaaaaggcaagacacagctcttcaaagacggaagtccaatggtgtacagtggagctgtcgacaggatcatcggaaaaccacctcctcagacaggagatgttgtcattgtagctgatggcactgagaatcccattggttggggtttgtataactctgtttctatgttctgtgttcgccttatgcagcttcaacacgaatccaccaggtttccatttctacacttttcctgtttgattcttttttcaaaattgaatctttgattgatcttcttggctcgcttgtggtagagatccttcttgtgcattgaacattgagaagcttctccaaacaagaatcgctgaagcagttcagttgcgaaagagtttggcacttccctcggctaatactaatgcttatcgtcttgtcaacagtgaaggagataggtatttcgctgactgatcccgtcattttttttttgttttaaactcattttcttacattttctctggtcctgtcttattgctctgctgcagattgtctggattgattgtggatgtgtttggagatatagctgtggtagcatcctctgctgcttggcttgaaaagtacaggattgaagtggagagttgcttaagatcaattgacggaattaatcatataaactggagaccttctcttgatgttcttaaagaagatggttttgacatctcaagtctgaaacagacacaatcatctactctcccacagagatcaatggtacggtgtgtggtgcccttaatcaggtctttctctcttcttcagatatcttcatgaatatggcaacattacaggggtgagagctgagtaatgtttcttataccaggttgtggaaaatgggatctcatacgcaatttcgctagagggacagaagacagggttctacacggatcagcgcgaaaaccgtcacttcatatcaaccatctctgctggtaaaagagttcttgatctttgctgctatagtggtggatttgcactgaatgcagcgagaggaggtgctaccagtgttatcggtacatttcatctctctcctccttctgatccaccttatgcattgtctagtgaatcgtctgatcaaaacactttcaggaattgattcatctttacctgctttggagctcgccagagagaatgtaatcctcaacaatatggatccagagaaggttgttttctttaaacaagattcaacagaattcatgaagggtgcactgtcaagagaagagacatgggacatc

SEQ ID NO: 139590 - DNA, 989 bp, Arabidopsis thaliana landsberg
ggaatggttcgttcgcaatcttcaaattctccgtttcgatttttcgtgagtttcttctgaaatctgattttggtttttgttcttcttcagatccgattttactgtctacaaaatccagtgagcggcgcgtcattaatggctaaagcggcgattaaatcacacgcgccggcgctttattcgttatcggtgattcagtttaacggaagcggcggttcaaaaaccgataagaatctacgcgccggcgttgctctttgtgcacgctctgcttatttaggtcacgtcgatgcgttacgagagcttggtcactgtcttcaagacggttacggtgttcctcgtgacgtctccgaaggtcgtcgtcttttgattcaagctaacgcgcgtgagctcgcgtgttctctacgctcttacctctctctgaaatctggggacgagaacgagatcttaactgatttaagcgtggttccggttcaggagattcatccggttaaccggtttttaaaagagtggtttagttcgggtcgggttgatttagcggaagggttaaggatgtgttcgcatggtggttgtggaaggccggagactcgggctcatgagtttcggcgatgttctgtttgtgggaaggttaattattgctcgcgtggttgtcaggcgttggattggagagcgaagcataaggttgaatgtacgccgttggatttgtgggttgcggcagcggcggagattggcgacaacggtgaagcggtggcggtggagattgatgataatcatggtgagcggtaacggctctaacgctttttttcaaggaaatgactgaaatgccaacagtttctttgactgttgagtttttttttttttgggttatttaattatgttttaaaaaatttaatgttaatttcttctcttaattaattagttttggctaatggcgtttctgaatcttctgatactaaactggcatgttattttaaataatatagttttttgccgtt

SEQ ID NO: 139591 - DNA, 1227 bp, Arabidopsis thaliana landsberg
cgaaaagagagagagatgagactagtcgtctcaagctgtctactagttgcagctccttttctctcctctctgttacgagtctcactcgccactgttgtcctcaattccatctccgcctcttttgccgatctcccagccaaatttggtcaatttctccccctcttcctttttccttatccgaaacaatttctcgaacaatctggttaaaaagaagttgattttgattctcagacggctccgtgaccaaaaacggaatctgtggagctctatacgtcgcagatcctctcgacggttgctcaccgcttctccacgccgccgcatccaactggacgcaacacagaactactaagttcgctttgataatcagaggcgaatgttcttttgaggataagctgctcaatgcccagaactcaggttttcaagctgtgattgtctatgacaacattgacaacgaagatctcatcgtcagtaagccttttgcctcccacccaagtttaaaattccatcttttcttctcctgatgagctagggttgagctgaatttcattggagttatttaatttagtcaacgcccccataagtttggagattgaccaacatctgttttgcacagtgaaggtgaaccctcaggacattacagttgatgcagtcttcgtttcaaatgtcgccggtgagattttgagaaagtacgcgagaggccgagatggtgaatgctgccttaatccgccagacagagggagcgcttggactgtgttggccatctccttcttctctctccttcttattgtcactttcctgttgattgccttctttgcacccagacactggacccaatggcgagggaggcacaccaggaccatcaggttagatgcaaagctcgtccacacactcccctgcttcaccttcactgattctgctcaccacaaggccggggaaacatgtgctatatgtctcgaggattacagatttggagaaagcctcagacttctcccctgccaacatggtacttactcctattcttctgtggaaataaactggcaacttgccacccttaatgtgttcattgaggtcttggaaatgtatatttatgagacacagatcttcccttcacaggattgaaacatgtgcttactattctaggaagactttgataggtttctcttagattctaactttataaaatagatttctttctagcataaattcctctgttttagggttgaaggt

SEQ ID NO: 139592 - DNA, 1219 bp, Arabidopsis thaliana landsberg
aaatatctccacccactctctctcatcactcccactacctcatttttctctctctacctaaccaatcctaagctcatctctctatctccaatggagtccgccgcactatcccgaatcggtctcgccggactcgccgtgatgggccaaaacctcgccttaaacatcgccgagaaaggtttcccaatctcagtctacaatcgaaccacttccaaagtcgacgaaaccctagatcgagccgccctcgaaggaaacctcccagtctccggccaatactctccccgcgatttcgtcctctcgatccaacggcctagatctctcatcatcctcgtcaaagctggagctcccgttgaccaaacaatcgacgccttctccgaatacatggagccaggagattgcattatcgacggtggaaacgaatggtatcagaacacagagcgacggatctccgaagctgagcaaaaaggattgctctatttaggtatgggagtctccggcggcgaagaaggagctcgtaacggtccttcgttaatgccaggtggatcatttcaagcttatgataacatcaaagatattttggagaaagtcgcagctcaagttgaagatggaccttgtgttacttacatcggagaaggtggatctggaaatttcgtgaagatggttcataatgggattgagtatggagatatgcaattgatctctgaagcttatgatgtgttgaagaacgttggtggattaagcaacgaggagcttgctgagattttcactgagtggaattcaggtgagcttgagagtttcttggttgagataacttctgatatatttagggttaaggatgagtttggtgatggagagttagttgataagattctggataagactggtatgaaaggtactgggaaatggacggtgcagcaagcggcggaactgtctgttgcagctccgacgattgctgcttcgttggattgtaggtatttgagtgggttgaaagatgagagggagaatgcagcgaaagtgttgagggaagctggattgaaagaagagattggttctgcgtcgagtggaatcgataagaagagattggttgatgatgttaggcaagctttgtatgcttccaagatttgtagttatgctcaagggatgaatttgcttagagctaagagtttagagaagagttggaacttgaattttggtgaattggctaggatttggaaaggctgat

SEQ ID NO: 139593 - DNA, 421 bp, Arabidopsis thaliana landsberg
ccctctctctctttgtctctctatcatcaattatgcaaaaagcaattcgaccatacgagtcaccgtggacgaagaccgtgccgggcaatagcattttccttttaaagaatgaagataaaccatcatcatcatcatcatcattatcatggttaacatcaggatcaccaaagccaacatctataagcaataagagatcaagcaacctagttgtgatggagaatgctgtggtggtgtttgcaaggagaggctgttgtttgggacacgtggcaaaacggctgctactgacacatggcgtgaatccagtggtggttgagattggtgaagaagacaacaacaactacgacaatatcgtaagtgataaagagaaattacctatgatgtacataggaggaaagttgtttggaggattggaaaatctgat

SEQ ID NO: 139594 - DNA, 2064 bp, Arabidopsis thaliana landsberg; identical to SEQ ID NO: 9540

SEQ ID NO: 139595 - DNA, 751 bp, Arabidopsis thaliana landsberg; identical to SEQ ID NO: 12670

SEQ ID NO: 139596 - DNA, 2198 bp, Arabidopsis thaliana landsberg
tatataaaggaactccatataaggtttcttttttaagaaaaaacagacagatttattgaatctttcatacgtaaagttttccaactcaaatttgctatattctcatgattcaagaaaatcaaattgtaccatgtccaggactgctcatgagcttggagtggaaacagcagttattgcagaacatctagaaggactggaacagcttcttaaaggcgtcccaatgatgaaggaattaactttacgctcaagagactacttggtttcatttggagaatgcatgtccactaggctatttgctgcgtacctgaacaaaattgggcacaaagcacgacaggtatgtatatatatgttacctagattgatcaccttatagattgtttcgtgacttgacgatgagttttgtttttgcagtatgatgcatttgagatcgggattatcaccacagatgacttcactaatgctgatattcttgaggcaacatacccggcggtttcgaaaaagttacttggtgactggagcaaggaaaatgcactccccgttgtcacaggcttccttggaaaggtatataaaataacgattgattacgagtctcgtgcacgccttgttgtgacatttttagaattttgaaaacaaaaggccccacctttgagtttgtgcagggatggagatcttgtgctgtaactacgcttggtagagcaggtagcgatttgactgcaacaacgatcgggaaggctttaggtttgcgggagatccaggtaccattatatccgggggttattgtctatcaatgaagatgtgattttgcaaaacatatatactctactgtcatgtggtgcatgcaggtttggaaagatgtggatggagttttgacttgtgatcctaacatttactgcggagctcaacctgttccacacttgacatttgatgaggctgctgaacttgcttactttggtgcccaggtaaccaacctcataaaacacttgttgtaccaaaagaccaaatgatttacctcttccattgcaggtgttgcatccactttccatgcgcccagcgcgagaaggtaacattcctgtaagggttaagaactcttacaatcccactgctccaggaactgtcatcaccagatcaagagacatgagcaaggtacgtgaagtcaaattgcatcactagtattacccttttttataccacgtacaacatcaccatgacctcttcttcctccttatcttctcctaggctgtattgaccagcatcgttctgaaacgtaatgtcaccatgttggacatcactagcacccgtatgctcggccaatatggtttccttgccaaggtaaccaacttaactccaattgatgacaagatactccctttcccgccctcccagctcacactttctatctctgtaggtgttttccacatttgaaaagttgggcatatctgtggatgttgttgcaaccagcgaagttagcatttctttgacattggatccttcaaagttctgtagcagagagttaattcaacacgtaagcttgtgactttgtatctgtgttgttttctttgagagaactttcaggctacgtaccacttgttcttggagcacagaaaatcaaatcaagactcatcttgtattctgtaattcttggccatgtgacaggagcttgatcaggtggtggaggaacttgagaagattgctgttgtaaatctgcttcgacacagatcaattatctctctcatcggaaatgttcagagatcatcattcatattagagaaggttagttaactctctggtttggtttgtatgatttaatatatagatagtcatagtggcttaccgatgaacaacaaacagggcttccgagtacttcgaaccaatgggattaatgtccagatgatctcccaaggtgcatctaaggtcaaacctctttcaacttctttggcaatatagatgattctgtacaaaaggtttaccccttgaatacacactcgtctgacttttggatgctatcaggtaaacatctcactgatagtgaatgatgatgaggcggagcattgtgtgaaggctctccactcggccttctttgagacagacacttgtgaagcagtctcagaatgcccgaccggctacatcgctgcctcttcgtgaaacctctaggtgcaacctgcaaggtctgaaagtactagctagtttgatgttatgat

SEQ ID NO: 139597 - DNA, 2910 bp, Arabidopsis thaliana landsberg
agcaattcctcttctgggctggtgatttggtttgcaattgtgttttttttttagggtttgattggatcgtggccctgatttagaacctaattgcggtcaaaagagtctgtgggaggattgaattggaataaagtgttatctttttttgattggcggaattcacattcaatcggaaagaggccaacttgttggcggcttccgatataaaggtgcttttgagctctgctcatatatcttatttaactccaacgaaattgagagatgaatggttccgattttgattttctctgctcatcatgggtttggcaggttagctacaaatcttgaggtccccaggtgcaaaattactaattttatagtgtatacttaaggataattgaagtgaaatttgggagatcataaagaaatgtttggagcttctaagtgatattattggatatggtggactggatcatagattctgatctggtcaggtgctgggacttaggagcgacaaagtaactagagagtggtttaaagtataccacttttaacggataagtggtcatgtctcgttgcttcccatttccacctccaggatatgagaagaagattagaaccgaggcatcagactctttgataaaggttctacattctttgataatcatgttcttttctggtgtttctaagattgattttgttggagagtgactagagaactttggtaacacgttttgcctctaggctcttagcatagtctaaaggttttgataaatggtcggatttgtgggtgcctttgtgttgagtaagggtcatagagactgtttcaggataagtttcttgtataaatgtagcattactgttaagagttggtcgagtctgagatattgtcacccaaacagttaagtagtgatagaggaattgatacctgtaatgatgctgatggacttaaactgcctcatatgagagaaccataagtaccccaatattagcttctgccccgattgtccttccacttgtttttcttagtacacagcaagcattgcaggatccttgactaacttagaatgctgagatgctgacatattgaagtgtatgggtttctgtagctggtggttttggatgttagataattgtattccatagatgccaaacttagtaatatcactagtgtgatcctttatccttgaatgaatgtagacgcatactcattgaatttgatgattaacctggtttcttctctgaaaacttatataagttgacccaagaattgacaagtaaaggtaacccaagagttgacaagtaaaggtaactaaatctttgtatgcctttcttctaatcatcacttatatacgtgtggtctttttctcgtgggatttaaactgcaggaaaagcacaaggagaagaagcacaagaaggataaagaaaagaaagaaggaaaagagaaaagggaaaaagaaaaaagcaaagacaaacataaggaacggaaggagagaaaagagaaacataaagataggaaagacaaagatcgagatcaagaaaaaagcagaacttcagaggacagaaaagctgctggtgttttgtcaaacaccggggacagagaaaaacttgtaacaaataccttgcagagtaatggtaacggagagtctaagtttatacaggacctggcaagaaggttcggaaatgaagaagctacagaaagtcaaagtccacgaaagattgattttccttgtggagttacagagaataacaattcctgctcaatacctcaaaccaaccgtacaaaagttgacgagaagagaaacagtacccatagaaactctgctatgtcaaaaaagtctgaaagtgcggttctccgagtatcaccttgcatggatcagaaaggagctgaggttaaagttaaaccagtggagaaaaatgataaggcaaagaaacgggaactacaagagaagaatcaccgcagggacagtgtgacaaagagtgataagccattgggtaatgaagggataaagaaaagtgaaccaaaaaacataacaaatggaagtagtaaagagaagaaagaggagaaaactgaggtgataaagaaaaatggtcaggagaaaccaaagtttgtagagggaggacccagattagagagagaacaagacgttgtgggtactagggattttagagtgcaagacttttcaacagcaggcgtcaagaaccttactgctgagagaattcttggcaaacggaaggatcttgagacaaatggattgctgtatggtgagtccttccctgaccgaactcttttttcagttgaaatagataatatatgtcttgtcgtccaaaaaaagaaaaaagttatatgtgatgtaccttatgtcttactcttgattactcattgatgtctttatatattattaggatattcattttcactaagtgttattaatggattagattttggttttcgtgctaaatgtgaaatgggaatgtgttttacttgtgttattactgtttgtctcttagcatgagtttctttaattgtcatgcagagaatggatctacgaaaaacaagatacataagccagttgtttctcctatatcatccgtggaaaacggaagaaagtttggagcatgccaaacacatccaaagcttgtttctgagttgcacgaaacagtgtctaatccagaggttaaggagcacaagattaacggattcatttattctcaagaacccaaaagccatccaccggtttcttcagtgaaagttaaagaaaacgatgaagcatctgcaaagaagcggcctcattcagacttgaaatatttggatcagattttgaatgtaccaaaaagggaggaattgcatgaggttgatgatgttgaacaagaatggctatttggtcagtcaggtaaattattaaaaaagcaaagagcagattctgatga

SEQ ID NO: 139598 - DNA, 1626 bp, Arabidopsis thaliana landsberg
gagctttcactgagttgggtccattttaccccactggcgatggccgtggccttcgtgttaactccatgtcttggaacaaaggtttgtttttgacaattttaagcaaagagaacagaactctgtgattttatatatgatgctattctctcttggtgtaatatgtctagcgtcgaacctgctttttgtggagtcacctgctggagtaggatggtcttactctaataaaagctctgattacaacaccggggataagtctactggtaaattttataatccccttttcaaacaatattagcagaccgttgtttcttgatatgttttgtggtttggacagcaaacgatatgcttgtgttcttgttgagatggtttgagaagttcccaaagttgaagtctcgggatctctttcttactggcgaaagctatgcaggtgtgtcttcgatatcgatgaaatgtattgaatgttaaccttaaaacatcatcactattctcatatatatatatattttacaggacattacatacctcaactggctgatgcgattctcagctacaattcacactcaagtggattcaaattcaacatcaaaggcgttgctgtaagcaaaagaaccttcctattgacattccatcaactcttttgtttctcttttgaattcttttgtctgttttttttgtctgatcagattgggaatccacttctgaagcttgacagagacagtccagctacgtacgagttcttctggtcacatgggatgatctctgatgaactaaaactcacaatcacgagccaatgtgactttgatgattacacatttgctagcccccataatgtaagcacggcctgcaatgaagctattagtgaaactgaaaacattatcactgagtatgtcaacaactatgatgttctcctcgatgtatgttatccgtctatcgtccagcaagagctgaggctcaagaaaatggtcagcccttctttatcttttgttccaccaacaaagtttttgttgaaatatacgtcaatttactaaaacaactgcaggctactaaaatgagcatgggagtggatgtgtgtatgacctatgaaagacggttctactttaatcttccagaggtacaaaaggcgcttcatgcgaaccgtactcatctgccttattcatggtcaatgtgcagcgggtaaattttcgtactttctctcggttttattgatcacaaaattagagaagctatttataactggagttcatatatctctacattgattgcttttggctgttcactttgcctgtcacagcgtgttaaactactctgatatcgatgggaacatcgacatgcttccgattctgaagagaattatactgaacaaaactcctatttggatcttcaggtaatacatctattaaagatctactttatctccttcttttcatgtcttaattgtagtgtcgaaattgtagtggagatcaagattctgtagttccattcggcggttcaagaactctcgtaagagaacttgctcaggatctcaactttaagaccacagttccctatggagcctggttccacaaaagccaggtagtttgcctacaccattaaacaatacaatcagcagaagcccagtttactttt

SEQ ID NO: 139599 - DNA, 1912 bp, Arabidopsis thaliana landsberg
aggaggagaaagctatggaagcaataaatgacgctttgagagctttgcggaagcgtcatcttctggaagaaggagctcatgctcctgcgatttctgctctctctaagcctttaatctctcaggtaatcttgttttgttcctttcttcattgcttcagatttcaccagtttcaactttataccttgttatcgaagtatacaaattgctagtaaacattgaaagatttgcactatggaataagtagttagatggaacaaaggctcttttaatccttgtagattcttgtaatgcgtttcattggatttcagaaaaaaaaacaattgtagctctcagtatgtttgttcagtgcattttgtgagttcatgtgtcacagagaagtataacagtatatgtagtttagttaagtttatacttgcttcaattatatagtatgcctcaaagtttgtattgaatccttttgttttggttcagcgtctctgtagatttggttctttctacttttatgctctggaatatttgacacatgtcttgatctggtttgagtatctgtatgcagggttcagaatggaaggagaaaacagaaaagctggaaacagagttacagcaatgttacaaagctcaatctcgactatctgaacaactggtgatagaagtagctgaatccagaacttcaaaggctattttacaagagaaggagttgttaattaatgacttgcagaaggaattaacacaaagaaggtaagaatggaaatacagtgactgtaaggaattatgttgtgcgatatttaaaaccagagttgtttgtaaggaggaattgtacacgattacaaaaaagagttagaggaaaagaccaagacggtggatgtacttattgctgaaaacctggaaatacggtctcagttggaggagatgacaagtagagtgcaaaaagcagagactgagaataaaatgttaattgatcggtggatgttgcagaagatgcaggatgcagaacgtcttaatgaggtacatagggacttttatttttcatgagtctttaatggtagagtttgttcgtcccctttcttcgatttggttaggatggccttaattctttcttcttacgtaggcaaatgatctctatgaagaaatgctagctaagctgaaggcaaatggtttggaaactcttgctcggcagcaagttgatggtattgtccgccgcaatgaagatggaaccgatcactttgttgagtcaaccattccgtcaacatgtgcgaatcgtatccatgctcatgaaggtggctgtggttcaatagtctttgaatacaactctggtactctgtttactggtgggcaagatcgagcagtaaaaatgtgggacaccaatagcggaactttaatcaaaagcttatacggttcccttgggaatatacttgatatggccgtaacccacgacaataaatccgtgatcgcagcaaccagctcaaacaatttgtttgtatgggatgttagctcgggtagggtacgccatacactcacaggccacacggataaggtttgtgctgtggatgtgagcaaattctctagccgacatgttgtcagtgcagcatatgaccgtaccataaaactttgggatttgcataaaggttactgcactaacacagtactctttaccagcaactgcaatgcaatctgcctcagcatagatgggcttacggtattctcaggccacatggatgggaatcttaggttatgggatattcaaactgggaaacttctgtccgaagtagctggacattcttctgctgtgacctcagtatcattgtcccggaacggaaataggatcttgacaagcgggagagacaacgtgcataatgaatttgatacccggactttggaaatatgtgggacactgagagcatcggggaacaga

SEQ ID NO: 139600 - DNA, 6175 bp, Arabidopsis thaliana landsberg
tgtcaaacagagaaaaaattatgctttaaggacttcaagaaaatgtttgctcaagtaacaaatcctccaattgatcctattcgtgagaaaattgttacatcaatggagtgcatgatcggtccagaaggcgatctaaccgaaacaactgaagagcaatgtcaccgtctctccctaaaaggtcctcttttgaaaatcgaagagatggaagccatcaagaaaatgaactacagaggctggcggactaaagttctggatataacttatgcaaaagaaagaggtacaaaagggttagaggagactttggaccgaatttgtgatgaagcaaatgaagcaataaaggagggctacacattactggttttgtctgatcgaggtaattgacatccttagaaactcttgactctaggatctgttattcatctttgatcagtctttgccatgttcttactttttttttttaatgtcttcactgtttagctttctctgcaacacgtgttgctgtgagctccctcatggctgttggtgccgttcatcaccacctggttaagacacttgcgcgcacccaagttggtttggtagtggaatctgctgaaccacgtgaagtgcatcatttctgcacacttgtcggatttggagcagatgctatctgcccatatttggctgtagaggccgtttatagattacaggttgatggcaaaataccacccaaatctaatggggaattccattccaaagaagagttggtcaagaagtattacaaggcaagtaactatggaatgatgaaggttcttgccaaaatgggaatttctactctagcctcatacaaaggtgctcagatatttgaagctcttgggctttcatctgaagtaattcagaaatgttttgccggtaccccaagccgagtggaaggagcaacatttgagatgcttgcacgagatggacttcaattgcatgagttggcctttccaacccgtggctatgccccaggaagtgcagaagcttcagcacttaccaaccctggaaactatcactggaggaaaaatggagagattcatctcaacgatcctcttgcaatagccaaattacaagaggcagcacggaccaacagtgtggccgcctacaaggaatactcaaagcgtatcaatgaattgaacaagcaaagtaatttgcgtgggctcatgaagtttaaagacgcagatgtgaaaattccactagatgaagtcgagcctgccagtgaaattgttaagcggttctgcactggtgccatgagttatggatcaatttctctggaggcgcatacaacccttgcaatggccatgaacaagcttggaggaaagtcgaatacaggtatattttttttctctatgaattttgctgttcccttttcgttctcttgtaaagaatactaagacatcagtttatgatcttcttaaggtgagggaggggaactgccatcccgtatggagcctcttacggatggttcaaggaaccccaaaagaagttcgatcaaacaaattgctagtggaagatttggagtttctagctactatcttacaaatgctgatgagctgcagataaagatggctcaggtaccctaaaatataacttgacataatgttctcttattctcataccttttgcacatctttgggtttctactgtctcaatgttttgtttttcatatcagataatgctctttgcacaaagtagttataggtgccttgtcaaaagttttgtgaatattgcatctaaatgctgtttcaagtgtctaacgtttttcttgaatgccatacagggtgccaaacctggggaaggtggggagctaccaggccacaaggtcataggagacattgctataaccagaaattccactgctggtgtaggacttatcagtccacctcctcatcatgatatctactccatcgaggatcttgcccagctaattcacgatcttaaggttcctatttatgctctcccaactcttactttttgaattattgtcctttgtctaacatccatttcttttatctcttgtagaatgccaatcctggcgcacgtattagtgttaagcttgtatctgaagctggtgttggagttattgctagcggtgtggtgaaggggcatgctgaccatgttctgatagcaggtcatgatggaggtactggtgcatctcgctggaccggtattaaaaatgctggtcttccatgggaactgggtctagctgagacacaccaaactcttgttgccaatgaccttcgtggccgtactgttcttcagacagatggccagctaaaaactggcagagacgttgcagttgctgcacttcttggtgcagaagaatttggttttagtactgcaccccttatcacactagggtgtatcatgatgagaaagtgccacaagaacacctgccctgtgggaattgctacccaagatccagttctccgtgaaaaatttgctggggagcctgaacatgttattaacttcttctttatgcttgctgaggaagttagggagatcatgtctggacttggttttagaactgtaactgagatgattggtcgtgcggatatgcttgaacttgatagggaagttgtcaagaacaacgataagctggagaacattgacctatctcttttgctcagacctgctgctgagattcgtcctggggctgctcagtactgtgttcagaaacaagatcatggtttagacatggctttggatcaagagctgattgcattgtctaaatctgctctggagaaatctcttccgtgtacattgaaactcctatctgcaacgttaaccgtgctgttgggacaatgctgagccatgaggtaaccaaacgttaccacttgactgggcttccaaaggacacaattcatatcaagttcacaggaagtgctgggcagagtcttggagctctcttgtgtcctggaattatgctagaacttgaaggagatagcaatgactatgttggaaaagggctctctggaggtaaagttgttgtttaccctccaaaaggaagcagctttgatccaaaagaaaatatcgttattggtaatgtagcactttacggtgccactagtggtgaagcatacttcaatgggatggctgctgaaaggttctctgttcgtaattctggtgctaaagctgttgtggaaggtcttggtgatcatggttgtgagtacatgactggtggtactgttgtggtgcttggaaagactggtagaaactttgctgctggtatgagtggtggtattgcttatgtccttgatgtggacggaaagtttaacaccagatgcaaccttgaactggttgatttggataaagttgaagatgaggaggacaaaatgacgctcaaaatgatgatccagcaacatcaaagacacaccaacagccaacttgctcaagaagttcttgcagactttgagaatttgctgcccaagtttatcaaggttttcccaagagattacaaacgtgttttatcagccatgaaacacgaagaggtcaccaagcaagcaatcgagcgggcttctgaggaagctgacgagactgaagagaaagaactcgaggagaaagatgcatttgcagaactgaagaacatggcagctgcttcgtcaaaagaggagatgtcaggaaacggagtggcagctgaagctagaccttctaaggtagataatgctgttaaaaacggtggtttcattgcttatgagcgtgagggagttaagtacagggatcccaatgttcgtcttaatgactggaacgaagtcatggaggaatcaaaacctggaccactccttacaactcagtcagctcgttgcatggattgtggaactccattctgccaccaggtatacatcctcagataaaatgccttttttctttccaagtattcttcttgcagcttgtcaaagactggttttgttgtttatatgtcaaggaaaaattgcaactaggtgtttcatgaatgaaatccttaacatttttgtttttgaaaatttacaggagaactctgggtgtccctctcggtaataaggatccctgaattcaatgaacttgtctaccagaacagatggcaagaagccttgaatcgtctacttgagacaaacaactttccagaatttactgggcgagtatgccctgcaccatgtgaaggttcttgtgttcttggaataattgagaaccctgtttctatcaaaagcattgaatgtgctattatcgataaagcctttgaggaagggtggatggtaccaaggcctcctctcaagagaacagggtatactttctaagtctattccatattatcttatcttccactgttgtgaggctcacatacatcttgtcttccactgttgtgagtttacatttggctgatttatatgcttctgctgcttgtggtttgcaggaaaaaggttgctattatcggaagtggaccggctgggttagctgcggctgaccagctgaacaaaatgggccatttagtaaccgtgtatgagcgctcggacagaattggtgggctgatgatgtatggagtaccaaacatgaagactgacaaaattgacgtcgttcaacggcgggttgatcttatgaccaaagaaggtatcaactttgtggtcaatgccaatattggaaaggacccatcttactcccttgatgcccttaaggaagagaatgatgcaatcgttcttgctgttggttccacaaaaccaaggtaatattttgtttcaaacaatgctgaattcctatttatgataccagacgttcaaatggattatggtgaactaaccgagacattattggggtaattttgcagagatcttccagtgcctggtcgtgatctatctggtgttcactttgccatggagtttcttcatgcaaacaccaaaagtttacttgacagcaatcatgaggatggcaattacatttctgcaaaagggaaaaaggttgttgttattggtggaggtgataccggcacagattgcatcggaacatctatccgccatggatgtaccaacattgtaaacctagagcttcttcctcagccaccctcaacaagagctcctggaaacccttggccacaggtttgtttcagatcttctacactcaatccttttagcaacttcttcaagatttttgcatccattggattaaaaagagttgtgagcaaggttggatattgttgattttaatgagcttccgtgtgaatacagtggcctcgtgtattccgtattgactacggacatcaagaagctaccaccaaattcggaaaagaccctaggacctatgaggtcttaacgaagaggttcataggagatgacaatggaaacgtgaaggggcttgaacttgtgcgtgtgagttgggagaaggatgaaaccgggaggttccagttcaaggagatcgaaggctctgaggaaatcattgaagcagacctcgttttcttggccatgggtttccttggacctgagccagtaagtgattcccgttgtgtaccctcttcttatatattgtgggtcttgtggcaatgatttaaaaccaattgcttgtttttgattttacagacacttgctgagaagctaggtctcgaatgtgacaacaggtcaaactttaaggccgagtatggccggttttccacaaccgtggaaggtgttttcgcagcaggtgattgtcggagaggccagtctttggttgtctgggctatctcagaaggacgtcaagctgcagatcaggtagacaaattcctcaccaaaacggatgatgacgaagacgccaagctacaacaagaccttaaccagatgaaacacaacactatcacaaactgaggtaaaagaaagccttactcatctgaagcaaaagtcgagagagaaagacaactgatgttactcttttagaggacacacaggcgtaaaggaccgacttatggcagagatgaaggaagagagttgcagaggaaaagtaccgaacttgatgatttagtagagagaagtaaaagtttaggtttgtttttgtttattatcgtccataaagtaataatgattcataagtacattctctttgtaggatttcagtagctttcttttgttaaagctttctgaaattgaaagccttttgttttttctctatggctgtttctaagtttgaattttaaggaattgtaatgcagttcctgcttcttgtt

SEQ ID NO: 139601 - DNA, 4088 bp, Arabidopsis thaliana landsberg
atgagctcctccacgaacctctgtcataccgtaagtgatacctgagtacaaccctgccgctagccctaccattcccaaatcattaaatctctttccaacgttaatcgtgaagcgttaacttaatcaaattcatatataaactcaccccattggagagattcttttcctgtgttcttcacctataggccacaaatttaaacattttcagttaactaacaagaaaccttatgagttacgaccattctttatgtattattttgcaacacttagatatgaacacactagcacactagcacacgaatatttgacgaataataaaaggctaataattagcgattgtaataaactcaccaatgcatcaagagatttgctgctttcccctgattaagaaaacaacgataaaacatcattaagataaacataatgctgattacataagatcatcaaccaaatatgatacaattatgttacggacctctgagattagggaacctatgtttcttgttccctgtaatctccgacggtggacccacgttgttcgagtcaaaacctgcccctaaaatgtataatcaaactaaagtacgttctctatttattcattttcactcttacattacatactcatttcttatacatataaatcataagtaagaagaaacccgccggagtttcttaccgtcaaccacggtaaagtaagcttcccttgacacggcttgtaaagctcccaccttcatagttaatccatattaagctatgttactacatatatgttacatgcatatacgaccgggaaacgaagagatatggatgaaaacttactccggcggctttaacgaaggaatctgcgatacggttaagaagaggatgaccaagatcgaacaagtgtgccttctcaaagcttcttatctcatccattacaattcttcctccactcttctccatttttttctttctttcttcacttgttgcttctctctttctctgttaatacttctctcttcaacaacaagtaaggagaagattgtggaacagaacagcgttcttttgacacgtgttctgcttttccacacgtgtcggagtctgccgtttgaactgttcgccgttctccttccccacgtggctctcacaagataacgtcaggcagaccgagaaataaaaggcccaatgggctcagagttggatattataaccgggaattttgaaatctccggttttaaagacgagaaacgtgacacgtgtcatctccgctttgatatctccgcctccgctcgtcggagtgagactagtacagacttgtcatctccgtcactccctttttctctacacagatctctcattcactctctcgtacacaatgcaatcggctctttctctttccttctcacaagcatcgcttcctttagcgaatcgtacgctttgttcatccaacgcagctccttctacgccgagaaatctccggttctgtggactccggcgagaagcgttttgcttctctccgtcgaagcaattgacctcgtgccgtttccatattcagagtaggagaatcgaagtctccgccgctgcttcttcttccgctggaaatggagctccatcgaaatcattcgattatgatttgatcattatcggagctggagttggtggccatggagctgcattgcacgccgtcgagaaggtcctctttcttcctcttattaattaggaagaattcaagttcgattatgattctatgctttgccaatactctggatcaaattgatagtggaatcatatgctttgtttgataaagatggttcaggaatgctttgccacatctttttcaatataccaaaattgggatcgggccagcgattactgtatttctttacggtattcatgatctcatcgagtgattgttgttttgataacgttgtatagggactcaaaactgctatcattgaaggagatgttgttggaggtacttgcgttaacagaggctgtgtgccttccaaagctctacttgctgttagtggtaggatgagggaactccagaacgaacatcacatgaaggcttttggtttgcaggtagtaaaaattcctgtagaatgcaattgtagacgctcaattttgatctcaaatcattgtgaagcaagtattatcttcctggccttgactcttgtttccttccattgactcccttggaaaacaggtttcagctgctggttatgaccgccaaggtgtggctgaccacgcaagtaacctggctaccaaaattaggaataatctcaccaattctatgaaggcacttggtgttgacatattgacagggtttggcgctgttctggtcagtatgttattgtctttggttgactatataaactccaaatgataggtcgttgttatgtggtgatcctaatactctttagtcttttgtgcactttgcagggcccacaaaaggttaaatatggtgacaatattatcaccggaaaagatataatcatcgcaactggatctgtaccgttcgtcccgaaaggaattgaagttgatggtatgtgtttttttataaatgatatgtgaaaggggagttgcctcaaaaaccaaagcttctcatttcttttagtatagcaagtaccctaatattcctcatattttgtgctgcaggaaagactgttatcacaagtgatcatgcattgaaattggagtccgttcctgactggattgcgatagtaggaagtggttatatcggtcttgagttcagtgatgtttacacggcccttggaagtgaggtaacattttgattttgtgctaatgatattactttagtacgactttgtgatgttgtgtccttgtccttgagattgtaataactgcaattagcaatgttctccaattttctagttctttgtttggtctcttcctgtattgagcttgtttttgtgtaaatagtagaaaataagattttaaggtaccaatctgttggtttttcgatttaaattgtagttagtgatcgaaaacggaaaccttttgtgcaggtaacttttatagaagcactggatcagctaatgcctggatttgatcctgagatcagtaagctagctcagagggttttgataaatccaagaaagattgactatcatactggagtctttgcaagcaaagtgagcctgttatatcatgcattgcaaatactgcttctctttctctatacagtgtgtccatgtattcatctgttaaacttaaatctattcttattcagattactccggcaagggatgggaaaccagttctgattgagcttattgatgccaaaaccaaggaacctaaggatactttggaggtaaccaaatggaatttaaaagataacatgatctgatgtctcacaaagagaatatttaacagttactgggtccttaacatgatctgatgtctcatgcctgaattgggaagatttgtgccgttggtagtaggtccttagaagtcttgtttttcacttttttgcttttcgctgcagtattaaccacattgttactcttcccacagaaatgtaagtatacacattatgcataggtggattagtaaagcttctcattttctgaatttattgtggcctttcgtctcaagatagaatataaatagtcatgtcttttggtttcttttcattgtaccatgtgattttctgcgctgaaagtgtaattttgttttccttctccaggtagatgctgctcttattgctactgggagagctccattcaccaatggacttggcttggaaaatgtatgaaatgacactaaatcccaccttttagtattgtcattttggttaccagagaatgtttagttgtcagaaaattaaccttgaagctgtcatctcaatgcaggtcaatgttgtgacgcagagaggtttcataccagttgatgagcgaatgcgtgtgatcgatggaaaggggactctggtcggttttatttgcatatacataccttttccttgtcagcaattctttctatatgctaaattcatttctacttgtgataggttccgaacttgtactgcattggtgatgccaatggtaaattgatgcttgcacatgcagccagtgcccaaggaatttctg

SEQ ID NO: 139602 - DNA, 1113 bp, Arabidopsis thaliana landsberg
aagatgcaaaatttagaggtacaatttttgaacacacacacttacttgttatctttactctgaagcaactcttgtgaatgatgaaaaagctttcatgttgtgttctctgttaggaataagtttcccaacacaccaatggtctgtgttcaagaaaaatttctctgctattgaggaagctattaagcatttccagttaaagaatacgtaagaatgttaccttattcatgttctccttttggtgttttatattcattggaccgcatatcttgctgcagaacaccaaatggaaatgcttgtgaggctttggatacgagaagcagtagcactcacggtttttcgcttatcgagacttggcgatttgatgggaggagttatctttcatgggcatcagagatggagctttttttgaagcaaatgaagctggcttatgttctctctgagccttatcctggtattggtagtggtagctctcaagattggttgagagatgattatctttgccataatgatttgatgaaatcattgtctgatgatctgtaccgtcagtacttgaagagattcaagcatgctaaggaactgtgggaagagttgaaatgggtttaccgtcgtgaggaatccaattctaagatggtacaagtcagaaagtacattgacttcaaaatggttgaagagagaccggttcttgagcaagttcaagagtttatcaagattgcagattccattgtgggtgctggtatggttcttgatgagacgttttatgtgagtaccatcatttccaagtttccttcgtcgtggagtggctttgtgactagattgatggaagaggagtttctaacggtttgtatgttggtggaacgattaaaagctgaggaagagtttctcaggagtggaaaaaaaagggttacagttagtgcagccacaggctcttctcagatagaaatgagaccgagtctaggaacaatgcatacaggttctcagagtgtaagttcgaagaggaaagaacctgagagagacatcatccctgaagagaaagctcccaagaaaccaaatcagatgacttcttcagtcgctgaatttgtggattcagagactcaagcaaagaaccaacattag

SEQ ID NO: 139603 - DNA, 6188 bp, Arabidopsis thaliana landsberg
  unsure (1)..(6188): unsure at all n locations
cttacgggaaatgtccagtttaccaatgtaacaccgcttacatatgcgactcattatttgcaggttcttgaccgtggtgagaaaattgagcttttggtggacaaaaccgaaaatcttcgctcacaggttagactctctcatacccttatctcctgcatctatttgcctacactcacacacaaagatgaacatgctttttgagttcatagctgactcatcctattaccatatcttgtgtctaactgaactcaaactgccacaggcacaagatttcagaacaacaggaacgcagatgagaagaaagatgtggcttcagaacatgaagataaaactcatagtgctcgccatcattatcgcactgattctcatcatcgtgctctcagtttgccatgggtttaagtgttaagcccagaaaattcaaaacttctgagatctttctcactcggtacatcgtagtgccttctcttttattgttcgatcttcaatctaatgtttctgcttgaattggttttgtatagatagacatatatgtatgctactcatttgctatattgcttgcatctgatgacattgatcccttgcgaaccagtcagtacttgacaagagatccgaaactattaaatgattttgttgactgaagattgcattgtggtggtgatgataaaaatttgagattgtattgacgattatacggcgtgatgtgtgctggttactttaaatttagataagagtagtgccctctctatatcgttactagggatggtagtacatatatatacgtacgtcatattccgaccaccaaggttgttttgttcaaactcctcccgcaacgcttgagtagatcttgtcggccatcgggtcgtttatgagttcaaacatacgtgtttactctgctatcagtaggagcaaccaatacagagtttagtagtacatacagaagcatcttgtcaagaaacaacaatctgtagtcacaatggtataaatatttgggctattttagttaagtgggccgaatatttaatgggccgtaaaacctaatttgagatcctgcaaccaaaactttcccgctaaaacactctcattcccgctcaagctcacaccagattccgattttcacttttgttcaccgagcaccaaatcccaacaaaattccgatacggtcaatcatatcagagaatggaattcgatatcccattgccggaggagcttgagcttctagaagccaattctcatttctacgaagaagaagatgagtacctaaactttgaggagccgccatatccttacccaatcgacggcgatgaagaaaaggaagaagaacgcgtcgcgcacaaggagcctcatgtccgacaatcggaatcttctgatatcaagggttgtaaacgacccaggagtctaatttccgatccgattgtgaatctcgacgaagtctctccagcttctgataagagaagcaaaattgatgataaccgggtagaaattgaagatgaggattggttacgcttctctccggttaaggaagtagttcacgttatggaggaggaagaagaagttggcattccccaggagactatgttggccaggttactatactgttcatgagacttaccgactcggaatttcttttttagtaatctcgttattggaatttgcagatacgcttctgagatagatggggaatgcttcccaatcacagcacctgacggaggagatagggtttatgcgaaattctgccgggctttgggagatgaagaggtgaacaaattggatgtgaaagacaaatctaatggtaccatgtattatctatttcttactggggaatactcttttcttgtattcattcgtttctcaatcttctgacaagaactataattttctcgatagttaacttatatcattcatttgtttttttgcaggtcttattaaagatcctatcagtgttcttttgcagcaatcagagaaagaggcatttaacaaggtcttgcaagctagttctgaagatcagaatgaaaccatttctgcagaaacgtctgtaatgcatgagaaactctgggtggacaaatattctccgagctccttcactgagcttctcagtgatgagcaaaccaatcgagaggtacttttcacttcttggtgatgaatctggaaaattagatgaagaagagaattcggtagaatagaggcttatttgttgtactagttgaccgttattaatgttatttgcaggttctgttatggcttaagcagtgggatgcttctgtttttggatctgaaattaggagcacgacagaggcagtattgtcagctttgaaacgacattctaccacaagtcatcatcagaaatcggattcagcttttacaaggaaaaaacagttcaatagatggagtaaggagagttttggatattctaaaaatgcagaagtgagcaataccaacactgcagatattaatgacttgtggaacaaaaagtccaaacttactggtcctcctgaacaaaaggtgagcgataaactgatctagacttcaagtttattcttataatctgcttctggttgtcttttattataaccataagtatgcatcggttgtaaaattcgtagtttcactgttgttgtagatccttctgctctgtggtgcccccggacttggaaagacaacgcttgctcacattgcagctaagcattgtggatatcgcgttgttgaggtattcttgtataccttttactttccatgataacgaatggattcttcatcattttgttgcagcaacgtttctgtatgtgcatttcttattcttcttttcttgtgtattatgtttaattcaacctgtgttattttgcagatcaatgctagtgacgagcgatcagcatcagctattgaaactagaattcttgatgtagttcagatgaactctgtcacagctgattctagacctaaatgtttggtatgctttacatactccttattcgcttgggacctttcttcattatgtcgaactgtattactccatgttgtctgaaatggaagagactgacactaatttatgtaggtgattgatgagatagatggagctcttggtgatggaaaaggagcagttgatgttattcttaagatggtatgtgtatgtatgctggtactgagactttggttaagtttgggtctacttagtatcaactctttgcttgttttacctctttcccagtttcagtaactgcacgaaggtttttggttaatcttatcttacgttgctagctctaaacctcctttgattctctttatcatttcttgaactttttctcctcttggagaccaatttgggaatgactatgtggactatgtattagcatttctaagtatataattgtatctttgctacataggtgttggcagaaagaaaacatgctacaggcaaggaaaatgtagagaatgtaaagacttcctcgaagaaggaccgccgaacagcaccactatcaagacctgtcatttgtatatgtaatgatttatatgcaccagcactaagacctctgcgacagatagcaaagtaagttcaagttcaacgttctgttggctttaagggtctctagttcctgtttgtgtggtgaagctagcacttttttttattattatgtagagcatactgctttcaaagtgcttaactgtctccggtacacgttagctaattttgcttatcatatgcttattctagagaattcttctcttagtaattagtatgataataagcccccatgcttctgttgcagggttcatatatttgttcaaccaacagtgagtcgtgtggtaaacaggtaactatttcttactctactgtgtgcgaagaagaactcttctaagtttcttcactattttgttttattttggtgaagctacggccattgataactattaatccaactgttagtcacctgtaagactattttccactctgaattgagagtctggaaatttatcattccacaagatgtgactaaatttgttaaatagtatgaaatgatgcagcacatctcattgctatcatggttgggaagtattttggataagaaccattgaactatattcatattaaagtcacaatttctccctgattttagatatctatcaaaatcgtcttactaggctgatatgtgtaaatgacaggctcaagtacatctgtaatatggagggtctgaaagcaagatcattcgctcttagtgctcttgcggagtacactggtatctttctctctttaatttggtttttagtgtgatcttaattttcttagagaaattttttggtcgtgtatttgtttcctacataattctgctatcttttgccttttatttggtggttactggttacagaatgggacattcgctcttgcttgaacactctgcaatttctctacaagaagaaagaaaccatcaatgtggtgagactttgatacccttcttgcactggctctgtgttttccactttcgatttgatttgtactagcccatctagctaggaacaccgtaacagttttcaacatttttgttctataggcaactaactttttaatttggtttcccatccttggggtttttatttcttctgataagctaagacccgcctggtttgtctttcagattgacattggatctcaagttgttgggcggaaagacatgtcaaagagtctgtttgatatctggaaagaggtaagcccaattaaagtgtcgtagcaatctttgcttacagataatttcattttatatttaagcttgcttcctctttctagatattcaccacgagaaaaatgaaacgagaacgatnnnnnnnnnnnnnnnnnnnnnnnnnnnaaaactttgacttcttacactctctcgtgtccagtcggtatgtactagacaatgaatttttctttcattattcaataacttttctgctttgtgtattcatccttaagtttaactgaatgtgcaggggtgattatgatttgattttcgatggtatacatgaaaacattttgcagctccactaccatgatccagtgatggacaagacagtaaggctaattaatgactttgaatccctatgactgttttgttctgtatgtttgtgcggctatgttctgaaataacgtatgtgtattcttttttacataaagatcagctgcttggacggtcttggaacttctgatttgctgcatcgatacataatgcgcactcagcaaatgcctctctatggtaaaggctttaaagctcagatgattgcagagtcctgtaaataagactgatattttctttttaccttatgatgtagtttactttcctagcctggtgatacctatacaccgtcgtgtggcccaaattcaaaaaccaatgattgagtggcctaagtcataccacaggtgattttggtgtcatattttattgataaagaaaggcaacattcaaagcgtccctttttactagtgcttctcaatatcaaatgtaccagatgtcgaacacttttggtagaaaagcaggagtctctgcggtcttggcaccacaagatacctccctatattggaaggcatttgtcaatcaagtctttcgtagaagactctatttccccgctattgcatattctttctcccccaactcttagaccggtatgtcttcatctgttgaatgttggtttttctttgtattcattgttcctttcatggtttactgtgctgctcttctaagcatatcatctttgctattctcctcaggtggcatcgcatttgctatcagataggcaaaaagaacaactggcgggtttggtcatgcttatgtgttcttattctttgacttataagaatgtgaaatctgatcctgttctaagtagcctcagggaggatgctgcttcagatgctttagttcttgctttagatccacatctatttgatttcattaatttcaaggttttgtttctttttcttttcttagtatctgtccactacattctgcctttggagataatactcatcgcctttccaacatttgacagggtcaccaatttaaacatcatgtactcgccttagcgatgaaacaagtgttggtacatgaagtaagtcgcatcttcttccactaaacttgttatggatttgtgcctttagctgcctgaagatcttgattgtcaaaattacaaaaacatgttaaaaacacaggttgagaagcaaaaga

SEQ ID NO: 139604 - DNA, 1230 bp, Arabidopsis thaliana landsberg; identical to SEQ ID NO: 60741

SEQ ID NO: 139605 - DNA, 2114 bp, Arabidopsis thaliana landsberg
  unsure (1)..(2114): unsure at all n locations
attcctatcaatcaaaaatacaaatcgactttcatattttctttgcataagagagaaagaaaatgggatctcatgtcgcacaaaaacaacacgttgtttgcgttccttatccggctcaaggccacattaacccaatgatgaaagtggctaaactcctttacgccaaaggcttccatattaccttcgtcaacaccgtctacaaccacaaccgtctcctccggtcccgtgggcctaacgccgttgacgggcttccttctttccggtttgagtccatccctgacggtctacccgagactgacgtggacgtcactcaggacatccctactctttgcgagtccacaatgaagcactgtctcgctccattcaaggagcttctccggcagatcaacgcaagggatgatgttcctcctgtgagctgtatcgtatccgacggttgtatgagcttcacacttgatgctgcggaggagctcggtgtcccggaggttcttttttggacaactagtgcttgtggcttcttggcttacctttactannnnnnnnnnnnnnnnnnnnnnttatcaccaataaaaggtacgtttgtattattaattttggattgatgatttaatccgtgtttttaaactgatttacgtgttataatattaagtttagcgtagaaacaagaaaccatgagataatcaatgcgaatcgtatattttacgtgtatatacacacgaacaagattagtcaaggtgaacaagttgttggcttttatctatataatttcgtaactgggatgctactgtgctagttaaagggttttggacttaccaaaaaaatcccaactagagaccccaactaataaattatacaccaaaaaagaggtccacaatagggacaaataataaatttgtcaaaaaaaaaaaagtatccctaaatttgtattttctcaaaaagaaaaatataatcatttccatacttttgtgattgtccaaacgaaataccgatagtgaataaaaaatacaaaccaataaagaacaatggtcataaaatacatcaataacacaaactaataaactttgtcaacaacagagaattatagtttgggttaaaacttatacaccgtcaaacccaaacgatttctatatattaaaaacaaactgtaaatcagaactttcaatcgaataaagatgaatccagaaaaaatcatatccttttaggttttcccgattcccctatttgaggcactaaaaatcacaatgattgcgaaacataattaatagtcatatatggtggctgtaactagaatagtaggataacttgcaaaataaaataaaatcaaactggataaattaaaataaaatttaaattccaaaagagagcacatacttggaaaagtaaactctatgcaattagccattccatatatcattgtatttagaccactttttgtctgacatctttgacctataataaccttttgctggctctgatcctgtatacagtatcaatgttaatgcatccaaatttgcatctttaattgtagttaagaaatcttgagatgatatcgagttctgatcaataatatggtggtttatttggcagatgagagttacttaaccaaggaacacttggacacaaaaatagactggataccatcgatgaagaacctaagactaaaagacatccctagcttcatccgaacgactaatccnnnnnnnnnnnnnnnnnnnnttatcatccgtgaggctgaccgagccaaacgcgctcagctatcatttctcaacacgtttgatgatctcgaacacgacgttatccaatctatgaaatccattgtacctccggtttattctattggaccgttacatttactagagaaacaagagagcggcgagtatagtgaaatcggacggacaggatcgaatctttggagagaggagactgagtgtctggactggctaaacacgaaagctagaaacagtgttgtgtacgttaacttcgggagtataactgttttgagcgcaaaacagcttgtggagtttgcatggggtttggctgcaacggggaaagagtttttgtgggtgatccggccggatttagtagccggggatgaggcaatggttccaccggagttt

SEQ ID NO: 139606 - DNA, 1643 bp, Arabidopsis thaliana landsberg
tatcagtgtttgtggttttctcagttctctcgtagcgaggaaggtgtgactcatgtgttagtcactggtggtgctggatatatcggatcacatgctgcgtcgaggctcttaaaagattcataccgtgtaaccattgtggtatcttctgtggctgacatggatttaggtcattttgttcaacattattgtaaatgtcgatatcacaaagtaaatctctttctgtttaataggacaatctatcacggggcaatctcgctgcagtcagtattttgcaagaactatttccggaacctggaaggcttcaatttatttatgctgatcttggagatgccaaagctgtcaacaagatattcacagagaatgcctttgacgctgtgatgcatttcgctgctgttgcatatgttggggaaagcacacaattccctcttaagtgagtatattgagctatgttccctgtgatctttcctattgtgtagatgtaaaataagtaacattgtgttgtgtcaattgtaggtattatcacaatattacatcgaacactttggtagtattagagacaatggctgctcatggagtaaagactttgatatattcaagcacttgtgcaacgtatggggagcctgatattatgccaattacagaggaaactcctcaggtgaatttttgatttgtaaactgtttagtatccacagtttttcttttatgcgctctaaccccagaacgtggtcctttcaggtgccaatcaacccatatggtaaggccaagaagatggcagaagatatcattttggatttctcgaaaaactcagatatggcagttatgatcctaaggtttgttttagtgatcctccactaagttctatcttgtggttcaatgcatttttttcacttcccatgaaattgacaaggttctctttctaccagatatttcaatgtgattgggtccgatccagagggcagattgggtgaagccccaagacctgagctgcgagagcatggacgcatctccggtgcttgttttgatgcagcacgtggcatcatgcctggcctacaggtaatcactttcttcagttcatgaactttttctgaagtccaattagttttttttcaggttttttctcaagcttcactttcagttttggtcagggtcttgagtattattccttggacaagtcatcacagattggcactattagattcttaatccttttccttcaagttctgtcttttgtttttgttcataacttcgggctggcacatgctgtagaacatgcttgtaaaaaagctgataagtagttatagtttacagctgagcaaaatacataattgagacaactaattcttgagtttcctttattaaagcagtgtttaaattagtctacttgttacatgcacatggctataagctttcaagcttctctaatcattgatcttcatttaacttttctttttccccagatcaaaggaacagactacaaaaccgctgatggaacttgcgtacgggattacattgatgtcactgatttggttgatgctcatgttaaagctcttcaaaaggcaaaaccacgcaaagttggaatctacaatgttggcaccgggaaaggtattgttgactcttggcctacattagtactgtactgaaga

SEQ ID NO: 139607 - DNA, 1196 bp, Arabidopsis thaliana landsberg
tttagagctttcttcttcctttccctatcctcacccccaaacgaacgctcttcaagaattagggtttcgttttgaatcttctctgattcccaaatccaaagatatgaagagatcttcagggagaaaggattcaaatttcatagaacaattgatactttacgtcgctagtgctgcattgagtagcttggttctctacgttggtctccgtcaacttgacccgaaccgtgacgccgctaaaaagtctctcgagcacaaaagagaaatcgccaaacgtttgggtcgtcctcttattcaaaccaatcaatacgaggtaattttgattctatacagttctctaattgattgaattcgtattcaaaatccaatcttttcaattgtttattgtgaaaacaggatgtgattgcgtgtgatgtaataaacccattacacatagatgttgaatttggttctattggaggattggagtcaattaagcaagctttgtatgagcttgtgattctaccattgaaaagacctgagctttttgcttatgggaagttactgggtcctcaaaagggtgttttgttgtatggtcctcctggaactgggaagactatgcttgctaaagcgattgcgagagagtctgaagctgtttttattaatgtaaaggtttctaatttgatgagcaagtggtttggtgatgcacagaagcttggtaggtgtagatttggagattacattacctgtctattggttgtgttactgatttatgttttcttcagtgtctgctgtgtttagcttggcgtataaactccaacctgctattatttttatcgatgaggtggatagctttcttggccagcgacggtcgactgataatgaagcaatgtcgaatatgaagaccgagtttatggctttatgggatggatttactacagaccgtgagttgaaattcttgtcctcattgttctgtttagccatgtgaactatgtacagtctgaggtttgatgttttggttttatagagaatgcgagggtgatggttcttgctgcaactaacagaccatcagagctcgatgaagcgatattgaggcgttttcctcagtcatttgagatcgggatgcctgattgccaggagagagctcaaatattgaaagttgttttgaaaggagagagtgttgaatcagatattagctatgatcgtatagctcgtttatg

SEQ ID NO: 139608 - DNA, 800 bp, Arabidopsis thaliana landsberg; identical to SEQ ID NO: 1181

SEQ ID NO: 139609 - DNA, 4650 bp, Arabidopsis thaliana landsberg
  unsure (1)..(4650): unsure at all n locations
tatatgtcatgtttatatgctattagtattgacaatcggattaagctcattgaagaattcaggaaggctgatgtggtccttctcacttatgcttgtgatcagccttcaactcttgatcgcttgagttcttattggctccctgagctccggcgtttagaggtttcttatttatttattgctgaaatatcgtatcttcgcattctcctacaagtatgttttcaagttataattatatatgtatgtaatgtatctagatcaaagcacctgtgattgtggtgggctgcaagcttgatttacgtgatgaacgatctcccgccagactagaggatattatgtcaccaatcatgaaggagtaccgagagatagaaacctgcattgagtgttctgcattgacccttatacaggtatcttcttgcttttgttctctgaccgaaatatcttctgctacagtttaaagattatcttttggctaagagagaaaatgttccgtatagatactaggaacctttagaacagataatgctgaaagaccaagcaaaactgaaccatgcctagagtgatccttattgtatgccactaaaatatctggattcttttctttcaggtccctgatgttttctattttgcatcaaaagcggtccttcatccaacatttcccttgtttgatcaagaaaaacaatgtttgaaaccccgcctccgcagggcagttcaaagaatattcaacctttgtgatcatgatttggatggtgcccttaatgacgcagagttgaatgatttccaggttcgctttctctgctagacactgattattgcattcctaatccttctataaatatgatgctgcaaatttggttaacaggtaaattgttttggtgccccacttgaccctgttgaacttatgggagttaagaaagtggtacaagaaaggcaaccagatggagtaactgaccttggtcttacacttccgggtttcctttttcttttctctctattcatcgagagaggtcgccctgagacagcatgggctatcctacggaaatgtggttacaatgattctttagaactccacgctgagttactacccgttccagctaagccagtctcctgatcaggtgtgtgttgttttagatagtgtacttaaactacgacatatctcttaattgttatgttnttgggggntntgngnnnctggctggttgcttttnnntnntgtttgcgctctgttcctgtgtttcgcttgcggggcgtcgggctngcggcgngggctgtggcctttctgggtggggtcttccagttatatgaccttgataatgtgtgtaggttcgtttcttcaattatccaacaatgattctgttgttctctatcacctaaaagcttatttcaccttcaaggagcagtagtagttctctaatgctcttcgttttgctactatttaggatggagcgttacagccagctgagctagatgatttatttcaaacagctccagataggtaatttgctggtgattttttttttttttttaattcattgctattctttcctctgtaatcagtggttatcatatgttcttccaatgattgtttagtgagttaaccttctttcttttgaattttcttgccaatttcttcaatgctcttgtacatgaatacgtttattatttccggaatatgtttctttacacgtacaatctgctttacgatttcagtccttggcttgaggatccttataaagaagctgcagagaaaacgccaggcggaagtttgacaatcaatgggtttctgtctgaggtttgtattcttgatgttatgttgacgctgaattagaatcaagctttcattgtcatcatgatcttatcaaattcaatattttttaccattgttaattttgctctgttatatgtgttgatgcagtgggctctaatgacacttctagatcctcgaaaaagtttggcaaacctgacatatatcggttatggtcacgacccagcttcaacattttctgttactaggaaaagatcagtggatcgtaagaaacagcgaacagaaaggaatgtgtttcagtgctttgtatttggccctaaaaaatctggaaagtctgcactcctcgattctttcttaggaaggtatgctagttttaacatttcgaagtatccatattctgtgtcatcttcagtgctttgattgtttctgtggtctactcgtgttatattttataatctgtgtttcaactccaggaaattttcaaacagctataaggcaacaatgggtgaacgatatgcagcaaatgtcattgatcagcctggggttagtagcaaaagtctgaactcttatgttctttgtcacatgtggatatggtttatgtgggtttttttgttttgttttcctaattgttggacgcatttttcagggttctaagaaaaccctcatattgcgggaaataccagaggacagagttaaaaagtttctgacaaacaaggaatcgttggcagcatgtgatgttgctgtggttgtctatgacaggttagctcagaaattatttgcacctggtatgtgtggataataagatgacagacttagcaagaaaaaatgatgttttccagttcggacgtatactcatggagaaaggcgagggaaatactgatggaggtagcaaggaggggagaagagagaggttacgggaccccttgtcttctggttgcggccaaagatgatttggatccatatccaatgtcagtgcaggagtctgatagggtaaatgcatcacttaagcctaatatgatttgatgagatgctgctcttggtatgattgatgattctattatcggatgacaacaggtttgcatggaattggggatagacatccctgtgtcattaagcatgaaacttggggagccaaatagtcttttctcaagaatcgtgagtacagcagagaaccctcacatgagcattccagagacagagtcaggaagaagaagcaggaatatccgccaactcgtgaatagctcacttctatttgtctcagggtctttcttcttcttcacaagatctatgcatttccttttttcttgagcaattccattaaatcatccaaagctttactattaaattgcagtgggtacagcgtgttgggttctgccggattagcagcttgcagggcttattcgtccagtaacaatgcttgaagctttttgcccccaaaaaaaacttagtaataaaacacttgatgtttttctttagcgattcatctgctttgtatagaataaaggtaaccctcgttgatggcttcaaatctccgctccgtcacacctgaattttggagtttttagatacaattattatgtgtgtgggttggatttttttctcatcttcgaggaacctttcttattctttgtttcttttttcattgatgatataccattttatcaagaacaaaaaaatcatagttctttcctttttttgggatcaaccacagatctttatgaagaagacacaaatgggcttagatgtagacaaatccaaatcttcatgagaattaaattaaacgacggggaaaaaacagactcatgtattagcataaatgggcccattttaataaatttgggccaatctagaaaatggtagtgaaacgaagatcacgtaaataaaaggcgaccgttggatgttgttatcttgtacaagagccttacaaaattcttctggttctctgaggatcaaaccaccacaagtcagaacagagtgaggtaatcattaccaacaaaaaatggcggctttatcatcctcctctctgtttttctcttccaagacaacttctccgatcagcaatctcctgatcccgccatctctccaccgcttctctctaccctcttcatcttcctccttttcctctctctcttcttcttcttcttcttcttcttcttctctcttgacattctctctgaggacttctcgaaggttatctcctcaaaaatttaccgttaaggccagctccgtcggtgagaagaagaatgtacttatagtcaacaccaacagtaggcggtcacgccgtgatcgggttttacttcgccaaagagcttctctccgccggccatgccgtcaccatcttgaccgtcggcgatgaatcttccgacaagatgaagaaacctcctttcaaccgattctccgtaagatttacaaatttccacccgggttttgagtttttgaatccgattcagaccgaacctttgtatctgtcgacaggaaattgttagcggcggaggaaagacggtgtgggggaacccggccaatgttgccaatgtggtcggaggtgaaacatttgacgttgtccttgacaacaatggcaaggatttggatactgttaggtctgcttatttaacttagagagccatggtttctttcttttagaatctccatggatgagaattgatgatgatcttatatccttttggatttttcggacataggccagtggtggattgggctaaaagctccggcgtcaagcaattcttgttcataagtagcgccgggatctacaagtccaccgaacaacctcctcacgttgaaggggtataaattcttaatactgatctctaaattctcactacttatgtctccttcttctccaatgttgcaggacgcagttaaagccgacg

SEQ ID NO: 139610 - DNA, 453 bp, Arabidopsis thaliana landsberg
tatgggagagccacaacggcgcagaaggtatattccctaaagctctacgacgctcttcaacgatcgcggcggagcgcaacagtccgggacacggccgacaaagtccttgcgacgaccgctcgtggtgcaactcggtggagccgagccattttggttagtcgattcggaacgagtctgaggcggcgtaggaataccaaaccggcgtcggcattagctgcggcgatcaggggaagtggtggaagtgggaggaggaggaagttatcggcggtgggaaatcgggtccgggttttgggtgggttggtgccgggttgccggagaacggcgttaccggagcttttggacgagacagcagattacatagcggctttggaaatgcaagtccgagccatgacagctctatcaaagattctgtcggagcttcagccgtctactaatctcggctcggctttatag

SEQ ID NO: 139611 - DNA, 1694 bp, Arabidopsis thaliana landsberg
tttgtagtggaccaaaaaatggaagccaaatttggatctcaaatttctcttcattttcgtaccaattcatttcctttaaggaaactctatggctttccccttaccacattttccggtacgtctttaaatcatcttcgtttaaaggccactaatactttaaagggtgatgatcaagagagtattcgcaagttcaagaagttaccaacttccgaatggactcactacttccactcgtttgtcgtcgatgtctcggtgagtccatatatatatttggtgtttgtagatgtatagaagcttaagtgtgtttacatatcttactttgaatttaggaaatggatgcgcttaggaatgagatcgatgcactaaagccgaaagtgaaaaacacaatcatgtcttcccaaggcattgactcgacaaagaagagaatccttatgatatatttgtgggtgagccttgtccttgcacatcattttgaggaagagatctatgaaactctaaaagagggttttgtcaacatagagaagatgatggtcggtgaagatgatttgtacacaacttccatcatcttttgggttttcagaagatatggtcaccacatatcttcaggtaaaggagtctctctacctaagctttttgtgacttgtcttggcacttgtgtttttcttttatatacacgtgggacagttagggtttctctcgggtttaactcgttaaagaactccgttcaggcctcgcggtttaattcaaaacgcgggtcgttacactttttatcatcattgatgtttaactctaatatgttgtataacatgttgcgttttggtcaatagatttctttaggagattcaaagggaacgacggaaacttcaaaaaatctcttattggagatgccaagggtatgttgagcttttatgaagctgccaatatggcgacgacgaaagattatatactggacgaagcattgagcttcacatcgagccacttggagtcactagctgcaaatggggcgtgcccgcctcatatgtcaaggcgtatacgaaatgctctcaatgcatctcagcattggaacatggagatgctagtcgctgtggaatatatatcattctacgaaaaagaaaaagaccacaacgcgatgctactcaagttttctaagctcaatttcaagtttctacaactccaataccttcaagaactcaaagttcttacaaagtatgtaacatcttctcaattacttagctacgattctttgttaagagttattctaaccatctatgtttggatggaaggtggtacaaggaggtagattttgtatctaagttgccaccttacttcagagacagaatcgtcgaaaaccatttctttatacaaacgttgtttgtggagtcacaacactcacgtgcaaggattatgatggctaagtacttcattcttttagtaattcaagatgacaccttggacagatatgcgtcccttcctgaggctgaaagcctcgtaaacagcttgaataggtacactttatatattaacattccagataaagaatgatcatgatggtggtggtggtgatggtgatgataatggatgatttagtcgatgatgatgtacaggtgggctcctgatcatgccatggataacaacctgattatttgaaattcgtgtttacatttatattggatacatttgaagaggtcgaaaaa

SEQ ID NO: 139612 - DNA, 1143 bp, Arabidopsis thaliana landsberg
  unsure (1)..(1143): unsure at all n locations
caccaaatctcttcaacaaaaagattaaacaaagagagaagaatatggcgagagggaagatccagatcaagaggatagagaaccagacaaacagacaagtgacgtattcaaagagaaggaatggtttattcaagaaagcacatgagctcacggttttgtgtgatgctagggtttcgattatcatgttctctagctccaacaagcttcatgagtatatcagccctaacaccacgtacaccatctctctaaacaccactcttaaattaagctaattgagttgctttgttttcttataattaaccactacttttttggtgattttgttggttatagaacgaaggagatcgtagatctgtaccaaactatttctgatgtcgatgtttgggccactcaatatgaggtttttttccttcttagatctttcttcttcttcttgatatgtgtttcgctggttggttaaattcttgatgcgttttgctgcagcgaatgcaagaaaccaagaggaaactgttggagacaaatagaaatctccggactcagatcaagtatttgtttctctctcttctcttagatgaggagttttactaaaaaaaatgagtacgaaaatatacatatttttaaaattgtaggcagaggctaggtgagtgtttggacgagcttgacattcaggagctgcgtcgtcttgaggatgaaatggaaaacactttcaaactcgttcgcgagcgcaaggttctcttcatacttttcccttacctagggtttcaattaatcctatatacccaagcttcagttttgaattgaattattaaaaaatgaattttattgttgtatatatgttttagaaaaagaaacattttgtttactgttggataatatatgttaattgtattgtactgtacagttcaaatctcttgggaatcagatcgagaccaccaagaaaaaggtcacatcttctatgtccactcacttttccattttatcatatttatttgtctcaacaattttgtgacaattgaatttatcaacttactaaaactgttgataacacttttcttggacaattatanttgtgtgtgtgtgtgtgtgtgtttaagctaatggataaagaaaaatccaagcatactatattgtgatgtcataata

SEQ ID NO: 139613 - DNA, 3373 bp, Arabidopsis thaliana landsberg
tccctcatctagcttttatggtagagatatctgtttactagctgtgaggtaaactgaagatgagaaactgtgaaaatgatcacatgaattagaagatacatcatggtaatcttattagggtactgtcagagagattttgttcagagttcagtttctctattgatgaatcctgggcttacttggaagtgacagccatagctgataggtgtatcgaacacttgtgaatttctaagagaaatgtaaatttgaactgtgtttgtactgcatgatttttcatattggtggtgtaaagcatgaaaattgaagaattcagctactcatagtcagtgtagtaacacattcctctgactaatgagtgatgtgggtggtttaatgttcatgacgccaaaaaaaattgaatgggaaaatctatattttctaaggtgtttagctaactgaattttctgagtgtatccagacatagccttagcttaagtcttaattgggaaaaaaaatcttgatttaagtggagaagctgtgtctttatttcttccaatttactttgatccttcttgaaagagatatatttgatcttctctttacatatatcttttgcttaagttctggttaatcaaggtcctcttatacccttttcttctttgtggtttgattaggggatacaagcgtttcttcagacgttccattcttgagacatctgactacctgaaagacgattgcttgataatcaattgtacggttggagttgtggtttcagaaatactctgcccacagttacactctgttcacgtccctgattcagaacttggatcacattttggagttctactggatagcatggaaggttctgatataacttttaacattgctggcgagaagtttctagctcataaactagtactggctgctcgatctccatttttcaagtctaagtttttcagtgagtttgaagcaaacaatacagaggttactattaacgatttggaacctaaggtttttaaggtacatcattgatcattggtggttattctttagttatttctgttagtttagatcgtgcttgtattaatgctctgttccatccaggctttgctacaattcatgtacaaagattctcttccggaagatgtggagcctgcaacagctcatacatttgagcgcttaaagctgtcagaaatatacgaaacattgattgtaaaagttttagcagcagccgacaagtacgacctgattaggctcaggttgttgtgtgaatcccacatctgcaaaggcgtatcagtcaaatccgtcgccaagatcttagcgttggctgacagatataatgctaagaactaaaaggcgttgcctaagttactgccgtgacctagcaggtatgcttctacattgcatttttaaacaatgtttaatatcatacgctaggccattaaagtgtatgatggtctccatagaactattggatcttctcttgtatttgatttggtgtggccttggatattgcagctgtcctggagacagacgcttaccaacagatgaaggatgaatgtgtgaccctccagtccgagcttctgaaggcggtggctggtcacgaggaaggtagtaacagtactggaggagcaaagtctcagagcgtgtgggcccaactttctgacggcgggggcgataccaccagccgacatgttagacaacgaaccacctagagcctcaaaatatgcatcatttcctcaggttaatagtagccatagagagggtaaatagctgtttttttctgtattcaaaaaaaaatatatgatcccaagtcctaactctatgataggtaaactctttcacttatcacttcagtaacagctttggattattcttcttttcgtgtttatgtattttaaatcccagaacatgtggttgtttcttttactctaaaacattttgatttttacggatccagaagtataccagtgtacatatcaaacagatgcatatttttccatcgagtgagttgattttatggtaatttcgagccttttactacaagaaatgttctttatgacattgggttataacttcactcgggttaaaaaagtattagcatatcttaaaaagccttctctctcttatctctctcaaatcttctagagagagaagggcttagtttttcttccgccatccggtgaatccggcaaagccatctggttgttaaaccagcttcagtccaacatcctccggctattatagaggaggttggttggcttttcactggcggtgttggctccctcagcaacgtcggccagttttctctccggcaacgatggctccgtagcaccgtttgcgctggctcctcttgtatgcggcatgttttcggctttctatgcgatggtgtccgcttttgtctctggtcattccaccgtcatctttccggtggttttggccagttatgtaccggtgttagatccggtttatttgtttctgttttacttttaataattctcattgagatgtgttggtgataatagtgatagcaatctcgatttctattgcttcttatccaatccactctcttttgagattcaatttgcaggaatatttacagagatttgagttttaagatgaagaaaagaagttgattccttcgcttattatcattgccttaagctgttggtttaattggagtttcgattactttataccggcgaaaaatcagaagaatctatgtcgattgttatcggttgtgattccttcttcaccggaatcggtgctcggacgacaaaggaagaagtcggttcacttttaggcttctcgtctcacacgtataggtctttctcctattgacgacacgtgatctgagatagagacaaattccagtttcttcttctgtaggaaatctctttgggccttgttgggtctaaataatttctgtaatcttgcattttgaaaaggcttttcttaggccttgtatgagttggatatgtttaatacaaaatttctcttgtgaaaaaaaaaaacttcactcaggttcatgtaacaagaaacaacttatatcaatcgtagtcaataataaaatgcaactgattatgtcttaagtttgcgattcaataagaatcgaaaacagcaatcaacaataaaatacagaataaacgaaaagtcatgaaagcgagagaaacaatcttgttatttggtttgttcattagaagaaaagccaagtcacttgtgcttatttttgttctttcagcaaaagaacattgaactagcaacgttggtgttcagcttcggcatgggaggcacagggactgctccagctgtggtgatcccgccgtggctcgatgaagtctcagacatgtcctcaaacttcattgcagttgccatctgtgcagccgccaaatga

SEQ ID NO: 139614 - DNA, 1093 bp, Arabidopsis thaliana landsberg
  unsure (1)..(1093): unsure at all n locations
cttgtcttctctaaccctctaaattctctttggtcgggatcactggaaagaaatgtataatcttactttctctccatcattgtcctcttctttgctctcttttacacaacaaactcctgcagccatagtgtcctcttctcctccggatttagtacttcaacaaaaactccggtttgtcgtggaaacctcaccggaccgatgggcttatgtcattttttggcaaaagatgtttgatgatcaatcggaccggtcttacttggtttgggttgatggtcatttctgtggaaacaagaacaacaattcccaagaaaatgttcatttttctttgcctcttatgttatctaatcaaaatatccaaaatttctttaaatcaacttcttaaaaaagttctattaagaaaataatataattttccttacccttgattttttgtttttgtttctttcttaagtatacaacaaacagcatcgagtgtgagctgatgatggacggtggagatgatctggagttgttctatgccgcatcgttttacggtgaagatagatcgccgagaaaggaagtatccgatgaatctttggtttggttaaccggtcccgacgagctccggtttagcaactacgagagggctaaagaagccggttttcacggggtacacacattggtctccatacccatcaacaatggcattatcgaacttggttcatctgaatcaattatacataaccggaactttataaaccgagtcaagnnnnnnnnnnnnnnnnnnnnnnnnnnnnnnnnnactaaccaaaccggttcttactctaaaccgccggtatcagatcactcggaaatcggaaatcagcaattcggatcggaaagaaaacggaggaggaaacttgagacgacaatggtagctgcggcgacgaaagagaaacatcatccggcggttttgtcccacgtggaagcggagaagcaacggagagagaagctaaaccaccggttttacgctctacgtgccagcgtaccaaaagtgtcacgaatggacaaagcgtcacttttatccgacgcagtttcgtacatagaaagtcttaaatccaaaatcgatgatctc

SEQ ID NO: 139615 - DNA, 1067 bp, Arabidopsis thaliana landsberg
attctcccaaagcggaacgcacgccgcgcctattagggaccaaggaccggaactaataacagcggttgacattatgcgaccggccagtggggaaataccggatattaggcagaagatcactgccaaaaccaaaccaacttggtgggggaaggaaagaaacacagcaaggcctaatgcattgaggctcaaaaactgaacccacccctaagactgaagatatcctatccatgcggtattcctgcctgtggaaaacgccaaacatagcattgacacttatgggaacgggaaagaaaaacacgagattctcttgatacaaatatggacaaatggaagtttaactcctaaagaagcacttcatcaagccttccggaatttgattaatttatttattccttttctacatgtagaagaagaaacgttctatttagagaacaatcaacatcaagttactttacccttttttccttttcataatcgattagttaacctaagaaaaaaaaaaaaaacaaaagaactagcctttcaatatatttttattgaccaattagaattgcctcccagaatctacaattgtctcaaaaaatccaatatacatacattattggaccttttgaataacagtcaagaagaccttatcaaaattgaacattttcacgtagaagatgtaaaaaagatattagacattctagaaaaaaaatagaaaaaacatttcaaaaaaaattgactaagactaaaaagtcaatttgaaattgaaatggattttcaaatttcaacgtaatttctattttccagtcgaacccattttaattaattaattaaattaattagaattagatatgtatctagggagaattcatttggaaatgactactccctagatacctccctagatacccacgtcgtttattttacaattgaataaattgaattaaaaaagacctaaagttagagatttatcaatcggtaatgttgctccaatacctaaccacagggccgccgcggtgccaatcaaaaagacggttgtcgctactggacgacgaaatggattttgaaacttattaacattt

SEQ ID NO: 139616 - DNA, 4021 bp, Arabidopsis thaliana landsberg
aaataacctagacgaagaacaaacaaaactctctctttctctctctctctaataagtaaggttttgatctttttcaagatcaaacaaaaacaatggagttagagagtacgagcaatggccgacgtccgccgccaccggcagagattggccgtggggcgtacttggcgtgggaagatttgacggtggttataccaaactttagtggtggtccgactcgaagattgctcgatggattaaacggtcatgctgaaccaggtcggattatggccattatgggtccttccggatccggcaagtccacgcttcttgattctctcgcaggttcgttttctttttggtattagtgtgagtgagatttatttgattatgtacataaatatttgttctatttcattattttgttctacataatttacgtatctaatttatggattcttattataccttatgctaattctagttgttaagtcacactcattattcgttaaaagataaacaaataaatcatatcttaaataattttaaataattgttcagaattatcccatgtatataggtagactcgcaagaaacgtgattatgaccggtaatcttctattgaacggaaagaaggcaagactagactacggtctcgtcgtaagtataatctaatatcaaaatttaattcgatttttttttgggaattttagaatttttattggaattattactatgaataggcttatgtaacacaagaggacattttgatgggaacactaacggtgagggagacaataacatactcagctcatctacggctatcaagtgatttgaccaaagaagaagtcaacgacattgttgaaggaacaatcattgaacttggtcttcaagattgtgcagacagagtcataggtaattggcattctagaggagtgagtggcggcgagaggaaacgcgtcagcgttgcgttagagatcttaacgcgaccgcaaattttgtttcttgatgaacctactagtggtttggacagtgcttctgctttctttgtgattcaagcgcttaggaatatcgctcgagatggtggtagaaccgttgtttcatcgattcatcagcctagtagcgaagtttttgctctctttgatgatctttttttgctctctagtggtgagactgtttactttggtgaatccaagtttgctgttgaggtaaaaacagagccctttcttgggtctcaagaaacacattttctgcgattttctgatcgctaaatgataactgttttgtttgcagttctttgctgaagcggggtttccttgcccgaagaaacggaatccttctgatcatttcctaagatgtatcaactcagactttgataccgttacagctacactcaaaggatctcaaaggattcgggtgagagatttaaatctttaatactttttgaggaacactgcaaaatcgtttagtcttttgactcaagagttaatctttattgtaggagacaccagctacatcagatcctttgatgaatctagcaacatctgagatcaaagctaggcttgttgagaattatcgtcgttcagtctacgctaaatctgcaaaatctcgcatccgtgaattagctagcattgtaagcaaactcttctctgccccaaccatttcaagaatcttgataagtgtttattgaaaatttacgtgttctgttttcggtgttttataggaaggacatcatgggatggaagtgagaaagggaagcgaagcgacgtggtttaagcagctaagaactttgacaaagagatcatttgtgaacatgtgccgcgatattggatactattggtcaagaattgtgatctatattgtggtatcattctgtgttgggacaatcttttacgatgtaggacatagctacacatcgatcttggctcgggtttcttgtggtggattcattaccggtttcatgactttcatgtccattggagggtttccttctttcattgaagaaatgaaagtgttctataaagagagattgagtggttactacggcgtttcggtttatatcatatcgaattacgtctcttctttcccgttcttggtagccattgcgctcatcacagggagtattacttacaacatggtgaaattccgtcctggtgtctcgcattgggctttcttctgtctcaacatattcttctctgtctccgtcattgagagtctcatgatggttgtggcttctcttgttccgaatttcttgatgggtcttatcacaggagctggcatcattgtaagaaatacactaccttttatttcaagatcctctctgtttttattactacttcactagcctatacacttataaatagattttgaaggtttatgttttttgttatagggaatcatcatgatgacctctggattcttccgtttgcttcctgatcttccaaaggttttctggcgctacccgatttccttcatgagttatggttcttgggcaattcaggtattcattttgctttataccattcaatacaatagttgtagcgtttagcttttaactattgcgtatctcacattaaaggaaatatagttttgatacgaagttcgtgaatctttggtagctaagctcataaattccaaataaatgtattactaaaacaagttagagtccggaccaagatacctattaaacttagtataaaggttataaagttaacatgtttttcttcttcttttatattgcagggagcatacaagaacgattttcttggtctagagtttgatccaatgtttgccggggaacccaagatgacaggagagcaagtgataaacaagatatttggggtgcaagtcacacattctaagtggtgggacttatcagcgatcgtgttgatacttgtgtgttaccgcattctcttctttatagttttgaagcttaaggagagagcagagccggctttgaaggcgattcaagcaaagagaacgatgaggaatctcaaaaagagaccttcttttaagagaatgccttctctgtctctttcactgtcgtcaatgtcttcaaggagacaccaacctctccgctcactttcttctcaagaaggtcttaactctcctatccactactaaaagacttaatataatgtatgcatgcgttccgaagctttcatcaagatctcatctaaatcaaactttgtcattgttgaagaaaaagaacaaactgatacagagtttcgtttgataaaccctacccaaatgttccactattgaaactttacttcaaggtttatgtaacacaagtaagacagtgttgcgcacagtgagagtatggccaaataaaaacgaaaaccttgttacaccaacatgtttggtccaaataagtatggcgcagagatacccggatcccatagtcaactttaaatgaccaaaagtagtttatttaggtgtaaagggtcaaagaaaaagaaagaacattttcttgagatcccatgaggaaaaaaatacattttgggctcggtcagtcagtaactcagtatatactaaattggagatattgataccaaaattttatcatgaataaaactaaaatttacaagtacaatattatcgtgatcattcaagatttccgacatgaaataaggaaactcaaatttaactaaattttagatggactaaagaaagactaggtaatttaaatggggaaatgaaaaacttatataagttgataatagttaagaaaacaacatacgaagaaatttcgattattaatttgccatctttgtgggaaattaagcaaaaattgacacgttgtcctttagtcaacgaaaatgaagctctctggaagacccacatgcatatatttagttatcaaaattctccttataaatttagttggagtgttctaataaaatgcataatttttttagccaaaataaaaaaaatgcataatgtttttagagcaattattaggactgtaaaactatccatttaacaaaaggaaagtaaaacacaaacaaatatgaaacatgtccatatactcataagatagtat

SEQ ID NO: 139617 - DNA, 1434 bp, Arabidopsis thaliana landsberg
attgctcacgaaagccggaaaatatgccacctggcttatcccaggactgtttgcttacgctgttctacagccgctcactcgctactttcaaaaccagagtttgatcacacctctcctcatcacctcatatgttgtgttctgtatccacgttcctctctgctggtttttggtttacaactcagggcttggtaatcttggaggagctttggctatcagtttgtcaaactggctctatgccattttccttggatctttcatgtactactcctctgcctgttctaagacacgtgcgccgctctccatggagatattcgatggcattggagagttcttcaaatatgctcttccttctgcggctatgatttggtacttcacttttctctgtgccttttcacttctcaaagcctccacactaaaaattatgttgtgtgttgcagcctagagtggtggtcttatgaacttataatattactctctggtctcttacccaacccacaactggagacttctgtgctctctgtctggtactcctccttgcatcgatcaatttcttcttgttacaattttgaatttgcaagaacataatgttattcacactgtggcagtcttcagacaatttcaacaatgtattcgataccactagcaatcgcggctgcagcaaggttagagctttagtcacactatgcagtacataaatactgaagcatattttctgctcatgacaaggaatcatatggtttcatattcataagcggatgtttatttcttgtgcagcacaagaatctcaaatgaattaggtgctggaaactctcgagcagcacatatcgtggtctatgcggcaatgtctcttgcagttattgatgcattgatagttagtatgtctctactaatcggcaggaatcttttcgggcacattttcagcagtgacaaggaaactatcgactatgttgcaaagatggctccattggtctctatttctctcatgcttgacgctttacaaggggtcctctcaggtctgagacttgttcttctttctttactcacacacaagttcttgtcggatattgtttactcttttcctccacatagtgcaaagacacttcatgttctgtgttttgtcctgagtcaaaagctatcccaaaaatatactcttttctaccacgcctaatcgtcttttgatggttagcacgcattgcaaggggatgcggatggcaacatataggagcttacataaacttagaagctttctatctctgggggatacccattgctgcatctttagccttctggattcatctgaaaggtgttggcctttggattggaatccaagccggtgccgttctgcaaacgcttctgcttactcttgtcacgggctgcacaaactgggaaagccaggtcctacttctttttcgttcttttcttcttcatgactag

SEQ ID NO: 139618 - DNA, 2582 bp, Arabidopsis thaliana landsberg
  unsure (1)..(2582): unsure at all n locations
tgatgaaagattcacgttttatagtgggtctcacatattaaaaaatatttatattgttttgcttataattactggactaattaaatttattaaaatatcctccatcaatattttattaatattcaactgaaaaatacatttaaaaaaaagtatttaaaacaaatcagtgagaaagcccaaaaaaactcaatattcatataacagagtgagagtaatagattgattcgtatacaataaactcttacatatcgcttttgtaaataaattttctagttacgctgctgcaggctactacgagaaacaaaaacaggtctaatagattagttgactctaggttttggctcggatgtttaacatggtgtgttttatacccaacgagcaactacaccgcatcattagtcggatagtttagattcggatcactcaagttaattataaaataaagtgtatagatttttatcgtacatacatactttagtttagtaaacaaccaaacataactgtacgttacaacattctgtttcctctctttttctgccatcagaaaaagacgcgtacacgtttctttgcaactggttcgagaaattcccagagcacaaaggaaatgagttctacattgcaggcgaaagttacgcaggttaaataaaaatcatcttgtgttttttttaactaatatgtctaattcggttttataaaattttttaactaatatgtcatcttctgttaaatcatcttgtgtttagtttttatattgtctaattcggttttataatttttttgggtaacgtgtgtgtgcaggaatatacgtacccgagttagcagaacttgnnnnnnnnnnnnnnnnnnnnnnnaatgatttgtcgcttcacatcaatcttaagggttttttggtaagtttgtatgaatctctcgatactagctaactgtaaataaaccaagtagttgtgtacgataacaataaaaacaaacatgttaattatactcgatataaccatatattcaaatcaaatcagtcccattttttttttttttagnctacatagttggggaatcctgagacatcagatgcagaagattggagaggttgggtggattatgcatggagccatgcagtaatatcagatgagactcataggatcataaccaggacgtgcaatttcagcagcgataatacttggagcaacgatgagtgcaatgaggccgtagcagaagttctcaagcagtatcacgagatagatatctatagcatctatacctcagtttgcataggagattctgcgcgatcgtcttactttgattcagcgcaattcaaaacaaattctcgcattagctccaagagggtatgtgcatgtgtataacataaaagcctataatttactttgaaactaacaaatatcttttattttgttgggatgccttagatgccaccgaggctcatgggtggatatgatccatgcttagatgattacgcgagagtattttacaacagagcagatgttcagaagtctcttcatgcgagtgatggagttaatctcaagaactggagcatttgcaagtactctccccaatatcctttatggttttttttttgtgtaatatttgaaggaatttgtctgaatgttctttggtattctaacttcagcatggagatctttaataattggactggttcaaacccgtcggttttgcctatttacgagaaactcatcgccggaggattaagaatatgggtttacaggtaaattaaattacgttcacgaaaaccaactaaattcctaattaatttcactctgacgaaaagtagttgactacaacacaaattaaaaacttcgatcactgaaactaaaaaaacagagtatacaattaggtggcttcctacgcaagtaaccactacatactttagcttcttctactttagttggttaataacaatatgaaagaaagtttattctccaatttttctaagccgttggtttttggtttctttttgtgatggatccagtgtgacacagacggaagagttccagtacttgcgactcgttatagcttaaacgcactcgaattacccatcaagacagcttggaggccatggtaccatgaaaaacaggtacccgtggacctaattcaccagttatatgaaattcttgatttgagtattgttagaccggttaaattcttgatgatgctataacaggtaagtgggtggcttcaagaatacgaaggtttaacgtttgctacgttcagaggagctggacatgcggtgccttgcttcaaaccaagcagctctctcgcctttttctcggcgtttctcagcggagttcctcctccgccatcgcggtagagaagaaattcaatgattaaaaagatgatttagtacgtaatctaattatgagtatttttgaaagatttttgggttttgtttcgttaacttgtcagacacacgagataggggaaaacaaggattgtaacttgtaagagagaatatgtgatttatgttacgttttatgtcatgatcataatgatcaaaagaaaaccttcaccgctttgagattatgatcaaatgaaaaataaatagctttttg

SEQ ID NO: 139619 - DNA, 1053 bp, Arabidopsis thaliana landsberg
  unsure (1)..(1053): unsure at all n locations
aagaagaaaagctttgagaagccatggatacggaaactgagttcgataggatactattgttcgaacaaattcgtcaagacgccgaaaatacctacaagtcaaatcctttagatgccgatgttagttttctcttcatttcatgatttcagattcagttcgatctgatctctgctttgtgattcgatggcagaaagaaaaaacgaatctttttgattttttgttcttgttgttgcagaatctgactagatggggaggagttttactcgagttatctcagtttcatagcatttcagatgcaaagcaaatgattcaaggttctttaaagctatactctgttttaatatgattgaatttggtataagaatcttattcatctttagatctctttactcccatatgaacttggttgttaatgtttcaagcatccttgtaatcataatcattagtccttaggcttagtattatgattcagcattcttcacacttgctaaagataggtttttgtatagagcatttagtttatgatacttggggatctaactatggttgatggcaacatgctctgaaagtttgatgtttgtgtgtgtagaggccatcacaaagtttgaagaggcattgttgattgacccaaagaaagatgaagcggtttggtgtattgggaatgcatacacttcatttgcgtttctgactcctgacgagactgaagctaaacataactttgacttagctactcagttctttcaacaagctgtggatgaggttattttgctttccattcagaatcaatgttgatactcatctttttgtgttgtgattttaaatctgtgatgtgaaaaacgtgtttttgatctttgcagcaaccagataatacacactacctgaaatcactcgaaatgacggccaaggtacttctttctataaaccatcaaccaatttgtgttcatattcattntgcctctaaacccaatctcaaagttttattctttgatcaaatttcttctcctttgtgctgagtacaggctccacagctgcacgcagaagcttacaaacaag

SEQ ID NO: 139620 - DNA, 1574 bp, Arabidopsis thaliana landsberg
tcaaaaccctaagcaagcttctctcactcagcaatggcacccattgatccacactctttcaccgattcctctcatcctctcaccacgcatgtcgctctctccctctacctcgatttcaacacctccataatccatggctccgctctcctcactctctcctccgccttctccggcgaactctctcttgatactcgctgcatttccattgctatggtcctcgatcctctcactctcgagcctatcccttactccgtctccaccacaccggatcgaattcggggcaccgaagttgtcgtagtcctctccggtcaatcttcactgctaattgtctactccacttcgccttctgcttccgctctccagtggctttcgccgcttcaaactttctccaaattgcatccttatgtctacacgcagtgtcaagcgattcacgccagatccattttcccatgccaggacactcctgccgcgaggatccgttacgacgtcgttatgaacataccgaattcgctctctgccgtcatgtcggctcgccacgtccgtcgtaggcttgcggttcctgaggaggctaaacatctcgaggctgggtcgctggggtcgtcactgtggtgtggtgaggatagagttgtggaagagtttgctatggaacagcctataccgccttatctatttgcttttgccgttggtgagttagggtttcgggaagttggacctaggactcgggtatacacagaatctgccgccattgaagttctagatgcggctgctctggagtttgcaggaacggaggatatgatcaagcaaggggagaagctgtttggagattacgagtgggagagatttgacttactggtgctgcctccgagttttccttatggaggtatggagaatccaagaatggttttcctgacgcctactgttatcaaaggagacgccactggagctcaagttgtagctcacgagctcgcacatagctggactgggaatttgatcactaatatcaacaatgaacacttctggttgaatgaggtagctttgaattgtcttgtgcttttgcttcttttagctacaaattaggatgtgtaactgtgtgtccgtttttagagtttgccttgttgatgggaaagtgtttatttcatgttcatggcaatagggatttacaacttacgcagagaggagaattgtggaggttgttcaaggggcggatatagctactttgaacattggcattggttggaggggtttaactgatgaaatggaacggtttaaggacaacttggagtgcactaaactgtggaacaaacaagaaggtgttgatccagatgatgtatattctcaggtcccatatgaaaaaggattccaatttgtgttgcgaattgaacgccaggttagttgaattgccctcttcgcttaggtgttttgttatgtaatgtttacaataatggtcatctatttactggaaaactttcagattggaagaactgcttttgacgaattcctcaagaaatacattgctactttcaagttcaagtcaatcgatacaaacacatttcttgaattcctgaaagcaaaca

SEQ ID NO: 139621 - DNA, 2208 bp, Arabidopsis thaliana landsberg
aaaatgcatactctcaacaacaccatcaccaccaccaccggttcgcaagatccgaatctcgacccaattccagacccggatcaatttcccaaccggaaccgcaaccaaccacaatctcgccgccctcgcggattcgccgctgcagcagcagcagcgtcgatagctccaacggaaaacgatgtaaacaacggaaacatcgccggaatcggcggtggagaaggaagcagcggcggcggaggaggtggaggagggaaagggaagagagagagggagaaggaaaaagagagaacgaagcttagagaaagacatagacgagcaatcactagtagaatgctcgccggattaagacagtacggtaattttccgttaccggcgcgtgctgatatgaatgatgtaatcgctgctttggctcgtgaagctggttggagtgttgaagccgatggtactacttatcggcaatcacagcaaccaaatcatgtggttcaaacttcgaaactctctctctcaaaattcaaactttcatattaagctatttaagttagggtttagtggaaagatgataaatttgatcccaaatatgtgtgaagctcttaaagttataagctttgttctgttattaatgtaacatagattgtttaatattattggattaggtacagtttccgacgagatctattgagagtccactttcttctagtacattgaagaactgtgctaaggctgcaattgaatctcagcagcattcagttcttaggaacgatgaaaaacttgctcctgtgtctcttgattctattggtattgccgagagtgatcatcccgggaatggaaggtatactagtgttagtcctatcacctccgttggatgcttggaagccaatcaggtgaatgataaattcatttccttattaggagaattgactttaagctggacgttgtttcatctaaccactttgtttttctttcagcttatacaagatgttcattccgcagagcaatgtaatgacttcacagagagcttttatgtccctgtgtacgccatgcttccagtgagcttctgatgagagaactttgtgttttaagtgtatatatatggatgttgcccaataaaaaagagtgtacatatatttcttaccagttttgccgcgatccttagttttcctgtgctaaagttctgtaccttgtctttcaggttggcattatagacaactttggccagttggttgatcctgaaggtgtaagacaagaattaagttacatgaagtcattaaatgtcgatggagtagtaatagattgttggtggggaatagttgaaggatggaaccctcagaaatatgtatggtctggctatagggagctctttaaccttatcagagacttcaaacttaagctacaggtgtgaatatttttacttgtagagctttgttaaatacatcctatgtgaccaaactgtgactttccctataaaggaccgtctttttcataatatcttagcaatcagtatatggtttgtttgaaggtggtgatggcatttcatgagtatggagggaatgcatctgggaatgtgatgatttcgttgccacagtgggtgttgaagattgggaaagacaatccagacatttttttcactgatcgtgaaggaagaagaagtttcgagtgtttgaattggagcattgacaaggaacgggtattgcatgacgaactggtatagaggtactcaaagaacactcattgctcagaaattgttcagtattttggtatattatgtctcatttcctcctcttttgtactgtctagattcttatttcttccttttcaacacttgattatccaggtctattttgattttatgagaagcttccggtcagagtttgatgacttgtttgtggaaggactaattactgcggttgagattggtcttggagcttctggtgaactaaagtacccatctttcccagaaaggatgggttggatttatcccggtatcggtgagtttcaggtatttttcagattgctgaactttacttctaagttctaacttatgactagtgaagttaacatatcaatttactatttttcctattgcagtgttatgacaaatattcgcaattgagtctgcaaaaggaagcaaagtcacgaggattcactttctggggtaaaggaccagagaatgctggtcaatacagttctcatccacatgaaactgtgttc

SEQ ID NO: 139622 - DNA, 1921 bp, Arabidopsis thaliana landsberg
  unsure (1)..(1921): unsure at all n locations
tataggtcgtggtatgatgatcagccttatatatttggtgcaggacttggtattccagagactgctgatcccaacatgacgattaagtatcctacggggactcgtacttatgttgctcctgtggatgtttattcaaccgcgaggtctatgggtccaacagctcagatcaatctcaactacaatcttacttggattttcagcattgactctggtttcacttaccttgttagacttcatttctgtgaggtttcttcgaatatcactaagatcaaccaacgggtgtttacaatctacctcaacaannnnnnnnnnnnnnnnnnnnnnnnnnnnnnnnnttggactagttcaaacggggttccgtttcacaaggattacgtggtgaatcctccagagggaaatggacagcaagatttgtggcttgctcttcatcctaacccagttaacaagccggagtattatgatgctcttcttaatggagtggagatacccaacctgaatacttctgatggtaatctggctggaacagatcctatacctggtccacaggtgactgctgatccatctaaagtcctacgcccgactactaggaaatcgaaaagcaatacggctattattgcaggcgcagccagtggtgcagttgttctggcccttatcattgggttttgtgtgtttggtgcttaccgcagacgtaagcgtggtgattaccagcctgctagtgatgcaacatcagggtggcttccactatctctgtatggaaactcacattctgctggctcggcgaagacaaacacaacaggaagttatgcctcgtcccttccgtcaaatctttgccgtcacttctcgtttgctgagatcaaagctgccactaaaaactttgatgagtcccgggtgcttggtgttggtggtttcggcaaggtttacagaggagagattgatggcggaactacaaaggtagccatcaagagaggcaacccaatgtccgagcaaggtgtacatgagttccagactgagattgaaatgctttcaaagcttagacatcgtcatcttgtgtccttgattggatactgtgaagagaactgcgaaatgatcttagtctatgattacatggctcatggtacaatgagggagcatctctacaaaacccagaatccttctcttccatggaagcaacgtcttgagatatgcattggagcagcccgaggtttacactatctacacactggtgcaaaacacacaatcatccatagagatgtgaagacaacaaacattctattggatgagaagtgggtggccaaggtctctgattttggtctatcgaagactggtcctacactagaccacacacacgtaagcacagttgtgaaaggaagtttcggttatcttgacccagagtatttcagacggcagcaactgactgagaaatccgatgtctactcctttggcgttgttctattcgaagctctatgcgctcgtccagccttgaacccaacacttgcaaaggaacaagtgagcttagctgagtgggcaccatactgctacaagaaaggcatgctagatcaaatcgttgatccctacctcaagggcaagatcacaccagaatgcttcaaaaagtttgctgaaaccgcgatgaagtgtgttctagaccagggcattgagagaccatcaatgggagatgttctgtggaacttagaatttgcgttgcagctccaggaaagcgcagaagagaacggaaaaggagtatgcggtgacatggacatggatgagattaagtacgatgatggaaactgtaaaggaaagaacacaagagttctgatgtgtatgaagggaatgtgacggactcgaggagcagtggaatagatatgagcatcggtggtcggagcttggccagcgaagattcagatggactcacttcaagtgctgt

SEQ ID NO: 139623 - DNA, 3485 bp, Arabidopsis thaliana landsberg
gctgaggaagatgcagcatctcttagagcagagcttaattcgatacaacagcaagcaatgggtaattcatttgctggcatgtcgccaatgggagtttccccagaccaactaccaatattagaaaaggagatggctaacctaaaactagaattacaggttcgtatgattttgaaacagataatatgttcctcgtgagagtctctgtatctaagataataattttcttaacatacacagaaagaatcagtgttgaggcagcaagaacaacatcgtttagctgaagaacaaactcgagtagcttctttaatgtcagaaaagcaggaactggaacagaaaatttcagttttatccagcagggcctcaggtaatatgcgatgccacacattttttttttttctcttcttttcaaagcaagtctgtatttgcagctgttacgatcatcaggtgtttggatgcactaactgacgtctaaatgcttttgagtcattcggaatttttttttactgagttgtgcattgttggatacatatcaatgactttttttgtgttatttattatgcagaagtatcagagtctggtcaaaaagtattttcagtggtaagaaattgttataacccatttttcccacttgccagcatataagctttcacgttttatggaatccctaagttttaggttcgatggttttcatgtaggaagataaagaaaaactcgagaagcagttgcatgatatggctgttgcacttgaaagattagagagtagtaggcaaaaacttctcatggaaattgacaaccaatcatctgaaatagagaagctatttgaggaaaactcgaacctctcagcttcgtatcaagaatcaatcaacatatcaaatcagtgggagaatcaagtaagcttgtcacatttacatttgcttaaaaacattttcttggactttacgttgacttgtagccaactgcataggtgaaagaatgtctgaagcaaaacgtagaactccgtgaagttctggacaagttgagaacagaacaagctggttctttttcacgagggccttcagaatttgaggcaaatgggtcgcatggaactgatactctatccctcaaggttttggtcctcaccgactcttaagtattagaatagaaaattcaacacaaatagtgtttgtggtgttaaattctgcctttgtttttccagggtgaacttgcgaaagaacagagcagagcggaatcattatctgctcaagtcctccaactctcagctcaactccagcaagcaacacaagcatacaatgggcttatgcgcatgtaagtttctcacggaactttcttcaatccattgagattctatcctgtcttgttaattgttttctattacgatttcttgcagctataaacctgtgcttagaaacatagagagtagcttaatcaagctgaagcaagatggatcggttacagtggcacagtgaatcaggaaccaagggcacacttctgagtattgaatatatttttatacaacaaaacatctatttagaaccaaggggacaagtgaatctaacacttttttctttattgaacaatttggttcgttgtgttgtaactgttgttcattgaaagcttcggttcgttttcctcaagtttgattttggaaggtttggagtttggttatagaagtgagactaaaccgaatttctaaatctcgacaatgttcaaattggtttccttggtttttttttttatcttcatcaacgaactgggccttttgttacaggcccattttacttggattgggctaattataaccgaaaattgtaacggtttagaatcttcaattgagcgcgaaatgatttcttccttggcagcgatcaccggagggccttcaactttccggcgtgatcccgattcaaacactctcaggctttcacgcaggaaaacattaatctctgtattacgaagctgcaagaacattgcccatgttccatcgattcacgccaagatcattaggaccttccatgaccaagatgctttcgttgttttcgaacttatccgtgtttgctccactctcgattccgtcgactacgcctacgacgtgtttagttacgtatctaaccctaatgtatatctatacactgctatgatcgatggttttgtgtcatctggtcgttctgctgatggagtttcgctgtatcatcggatgattcacaattcggttttgcctgataactacgtgatcacctcagttttgaaagcttgtgatttgaaggtatgtagagagattcatgcccaggttttgaaactagggttcgggtctagtagatcggtagggctaaaaatgatggaactcgacgggaaatctggggaattggtgaatgctaagaagatgttcgatgaaatgcctgacagagatcatgtgcagcaacggtcatgattaattgttattctgaatgcggtttcattaagaaggcgttagagctttttcaagatgttaagattaaagatacggtttgttggactgcgatgattgatgggttggttagaaacaaggagatgaacaaagcgttggagctttttagggaaatgcagatggagaatgttagtgctaatgaatttacagctgtctgtgttttatccgcatgctcggatttaggtgcgttggagctcgggaggtgggtacattcgtttgttgagaaccaaaggatggagcttagtaatttcgtaggtaatgcgttgatcaatatgtactccaggtgtggtgatatcaatgaggcaaggcgggtttttagggtaatgcgagacaaagatgtcatatcatataacacgatgatttctggattagcaatgcatggggctagcgttgaagctatcaatgaatttcgggatatggtgaacagaggatttaggccgaatcaggtgactttagttgctcttttaaacgcatgtagccatggaggtttgttggatatagggcttgaagtatttaattctatgaagagagtttttaatgttgaacctcagattgagcattatggatgtattgtcgatcttcttggtcgagtggggcgactagaggaggcttacagattcatagaaaatatgccaatagagccggatcatatcatgttaggaactcttttgagtgcttgtaagatccatggaaacatggaactcggtgaaaaaatcgctaagagactattcgaatctgagaatccagattctgggacatacgttctcttatcaaatctttacgcttcatctgggaaatggaaagaatctacagaaatcagagagagtatgagagattcagggattgagaaggaaccaggatgcagtactatcgaagtggacaatcagatccatgagtttcttgtgggagatatagcacaccctcataaagaagcaatttatcagagattacaagaactgaatcgaattcttagattcaaagagaatcaaatagagattataatgggtttctagtgtcagataca

SEQ ID NO: 139624 - DNA, 1683 bp, Arabidopsis thaliana landsberg
cacagaataccttgaaccctaataacaatggcgacgctgttgaaactcgacatagccacgactttccttgctttcatcgttccccgagctaatacctccttgaaccatcggttcgcttctgctaggctcagtacagccacagtttccctcagaacgaagtcgtcatcgttctattccgcggcgctttactctgacagccgtcggagattccactccgccgttgcctctgattcctcgctcgccgttgtagatgatgaagatatcttcgatgttgccagtgagattttgcccgacaatcgaattccggccactataatcaccgggttcctgggctctggtaaggtgaggctaatctagggttcatgattcggaaattcctgctcaattttgagcgatcagattctgaatttcactggaattgtttttttctgagtgtatagacaacattgctaaaccatatattgacgggagatcatgggaagcgcatagccgtgattgagaacgaggtattgtctgagaagctgaatagagattgttttatgttttatggtttcactaatttgttctgaaatgtgaattctcagtttggtgaagtcgacattgatggatcacttgtggcagctcaaactgcgggagcggaggatataatgatgcttaacaatggctgtctgtgttgtactgttaggggtgatcttgtgaggatgatttctgaattggtccagaccaagaaaggaaggttcgaccatatcgttattgagacgacaggttcaatattttctatcactctggagctacatgattcgttaagaaccaactactatgttattaaagaataaatgaatagattatgtatattttctttcaggattggctaaccctgctccgattattcaaactttctatgctgaggatgaaattttcaatgatgtcaagctggatggggttgtcactctggttgatgctaaacatgctcgtttgcatctagatgaggtcaaacctgaaggctatgtcaatgaggcggttgaacaaatagcttacgcggatcgtatcattgttaacaaggtattgtgaagttctatttcgacctaattttcatgattaacatcaccataacttgtatttgaaatgtgtggtggatgcttatagtagaagcttttcaatggtctgctatgtatgttctcctcgacatatcatacaagctgaaaattgtttgtactttgttgtagactgatcttgttggtgagccagaactagcttcagtgatgcagcggataaaggtaggttctgcttcttctgattctttcttttttctctttgaacatctatttttctctgtgcactgcgttagcatttatgatgtggttatttccagaccataaacagcatggctcacatgaagcggacaaagtatgggaaggttgacttggattatgttcttggaattggagggtttgatctagaaaggtccggttttattttacgtcttactaaaaatcttattacgagtcactccgaaaacttctgtccaaagtgaatagtagctccttacatttgttatggtttattggttgtggatttcctggtttaagagggctgattttgttactctgatttattgctggtggccaactattttatctttccagaattgaaagctctgtgaatgaagaagagaaagaagat

SEQ ID NO: 139625 - DNA, 2220 bp, Arabidopsis thaliana landsberg
atgtatttgtgttctgattactctttgatgtctgagaatgtcatccatttgaaaaagtgttcctttgacttaatttttgtgtttatggatcttgcagattgaatcattccataccttttgctaccgtagatgctgaggagctatctggttctcaccctgctgaagtacagagctttggtatgtctttacttctcactgattgtgcgttgaagctatggaaatgaataatagcttgttggttaaatgttgttgtggagtctctgagctctactttcattgttatgtctagtgcagggaaagtggataggatcgtcaaatcataacacgcttctagatcctctaaatggagaaccttttatcaaagttgctgaagtggatgaatcaggaactcaggtacgagcctatcaaaaaccgttgatcgtatcacaatgttgtttatccgtgtcaattctaactttcagttttcctctgttctatgttgtagccatttgtggacagcttatcccagtgcccgaaacatggtctccataaccctttcaaatctccagagaggtatgatttgcttgaggtttggtgttatttcttcttgttgtgtcatttcccattttgttctatatatgaaggatagtaatggtcttgttttctacagataccttttatatggagatatctcgacaaaggcagctcatatgctcgccttacctaaggtaacgcatactttttttgttgaatctcgagtcttgaattcaaaaggttttgttttctgaataacatgcatactgaggtactgttgtatgcgtgtatacactattaggttgctgatttcttcgcgaggttgattcaaagggttgctccaaagagttaccagcaagctgctggagaaatctttgtcacaaggaagtttttataaaacttttgtggtgatcaggtacataactctcttcaccactttttattttggttcctggttatcagtttcaacaacttagtaattcttgtaggcatgttctcaaaactgcctatatagacattgcatgtatgattaccaaccagatatttcatttctatggctaattttccgaagttacatcttaagaatgtatgtttaatgattccgcttcactttcgtttataaggtgcggttcctagcacggtcttttgcaatccctgggaatcatcttgggcagcaaagtcatggttaccgttggccttatggtcctgtaaggcattcttcctagatggttgtaattggtgacaactctctttagtgctttgttatgaaatcataggtttgtaatgcaggtaacgattgttacaccatttaattttccacttgagattccactacttcagttgatgggggcattatacatgggtaacaaacctcttcttaaagtggacagcaaggtataaattactcttcacattactatagttctcgtaattgtattggttccatctgtttgataatataatgttacttgattaggtaagcattgtaatggagcaaatgatgcgattgctccactattgtggtttacccgctgaagatgtcgactttataaattctgatgggaagacaatgaacaagatattgttagaggtatttggtcaggaattcacaagtctattgtctccacaggttttttggttgagctaattcagtgtcttgtctatttgtaacttctttcaggcgaatccacggatgaccctcttcacgggtagttctagagtagctgaaaagttggcacttgaccttaagggtcgaatcagattagaagatgctggatttgattggaaagttttaggaccagatgttcaggaggtttcttcttataactttcgtatttatatttccacaagtctctttagatttgattgtaacccttgattcggtctcaaatgtcaggttgattacgttgcatggcaatgtgatcaagatgcatatgcgtgcagtggacagaagtgttctgcacagtctatgctttttgttcatgaggttggtttgatcctaattgttatggtgaaactacctttgaatcttttgtttacttccattttcttctgtctttgttgttttcaatgtattttctctctgagcagaactggtcaaaaacccctcttgtttccaaattaaaagaactagcggaaagacgcaaactggaagacttaaccattggtcctgtccttacagtgagtttcattgtttctccatctgtt
